United States Patent Application Publication US 2005/0228172 A9 - sequence listing, part 169

SEQ ID NO: 753931 - DNA, 606 bp, Homo sapiens
ggatattgctatagatcacctagacaagatgaaaagatagagcagctcaggaaatgtgtttacagataagaggcaagttttaaaagcagggccgtgatcatggggactttgattacacctactaaataatgtataaatgaatgttattcaacaactacagacattgactgacaaaacaacrgtgggcaaatggaggcaaaagcatgagccttagcaataaatctctgtagtccaggctccgcgcatggttactcccttgtggccacggcctttccctcttgtcctacagctaggctccttgcagctagctttggggggagttgatacatcattcatttgtgtcttcatttattgtcacacatttgagtaccgactttgggttcagattggatgcatttaggagaaaagattcagcctcagccctgaaggacctcatgggaggcagacaggaaacaaacccagctaacaaaaataagacaatgaaacacgtagagatgtaaacaaaatgtactgaaaacctaggaggaacacctcagtatcagaagtaactcagaactaggacctggtgtttttcaactccagtggaaagagtcttgagatattcct

SEQ ID NO: 753932 - DNA, 522 bp, Homo sapiens
tttttttttttttagagacaatgttttgccatgttccccgggatggtctcaaactcctggactcaaatgatcctcctgccttgggctcccaaagtgctgggattacaggcatgagtcaccaagccaagccaacataagcattttttaaaaaattatttgagataaaaagatccaagtgggccagacaatgaagagtttgtttcttttttgttasatggagagaatgagaatgtggcaaatttggggagcacatttttctatagttggagaaaaccttgttgatgaccaagacttttggattaaagttgggtttaaccatgtgggttgcttctatgagtcaatacttttaaggtaattcaatacaaagacagtgggtaatatcttgaaaatggcaaggacaactgtatctcacagtcaaacatacccttttctttgggggtcaataaactctaagccaccaatcttcagtgttgtgggaaattcttagaaacctcagaatcgtttcacgaagaccagatgacg

SEQ ID NO: 753933 - DNA, 522 bp, Homo sapiens
tttttttttttttagagacaatgttttgccatgttccccgggatggtctcaaactcctggactcaaatgatcctcctgccttgggctcccaaagtgctgggattacaggcatgagtcaccaagccaagccaacataagcattttttaaaaaattatttgagataaaaagatccaagtgggccagacaatgaagagtttgtttcttttttgttacatggagagaatgagaatgtggcaaatttggggagcacatttttctatagttggagaaaaccttgttgatgaccaagacttttggattaaagttgggtttaaccatgtgggttgcttctatgagtcaatacttttaaggtaattcaatacaaagacagtgggtaatatctkgaaaatggcaaggacaactgtatctcacagtcaaacatacccttttctttgggggtcaataaactctaagccaccaatcttcagtgttgtgggaaattcttagaaacctcagaatcgtttcacgaagaccagatgacg

SEQ ID NO: 753934 - DNA, 619 bp, Homo sapiens
agggcagtgggatcaacttagtaatagcagcaactccacaagagccaaacactcagggggctcaggaagggacagagggaagaaccgtgtgggagttttcttgtgcctcctaaaggaggcacagtgctctgaagccaaggttctggggaagccaacattgctacgaacctgggcttgcaggacaagtgttccccacatcttctgcaaagcaaagatagactgctatcaacttaagakaactgggttccagaggtgactcttgggtaagtcatcaacccccacctgcataggaaagacccctttcctaaactagccaatgcaggacacctcgtgaacaggacttttcaatcactgtattttcatatattcacacggctttcctgcaaacttttatttatttatttatttatttatttatttatttatttatttattttgagacagagtctcgctctgtcaccaggctagagtgctgtggtgcgatctcggctcactgcaacctccaactctccagttcaaaggattctcctgcctctgcctcccgagtagtcctgcaaacttttcttaaatgacatattttaaagaatgttcatctgagtgcagcacagaaaggttctcc

SEQ ID NO: 753935 - DNA, 567 bp, Homo sapiens
tcacatttttattcataatgaaaatgctttattaagtcacatgggaataaaacgtagattcttacagattagatgacttattcaatgaatacaagagcatcattgtcaaaataagccgtgcaatgttccttgtctagggcaaatgaaaagttactgcagaaaagcaggtttccaattttttgccctgttgtgttgcacagcgtgtcatacactatccagtgtgtgctgtgttcagaagtcgacacccagcactgtcttgaatgttatgagtctatatttcaacaaataaaacttactakaaattaagacaaataaattttatactctagtcaaaacttagtaatttattctgtaatgtacatagtaatatagcttttctgtaactggcacagaatagcttcacatttcatacttgatgttggtaataagtaattattttatttgagataagttggtacactgtgttctttcctttccttctaccttttggacacagagcagatgtcactggagcttttggcttggactgtggctagctccaggctgcccaccttgggtttgtcatta

SEQ ID NO: 753936 - DNA, 624 bp, Homo sapiens
ttcgcacaccggcctcttctttgcattttggctttgctttcccagtctcctcctgctgtttttcttgctctgagactttcctgaagccggcgtgtgttccctctcagtctgcttggccgcgactttgcagtgcagggaatgtgctttgggtgtagcccaagcacaggctgctgcatgctgggatcgacaggctgctgagggcgagagcgccaggtcctggcacgtgtgacttgcttggttctttctagaaggtcacagctgggggaagaacatgacagggaccttcttacttctgtttttttggagacagaatctcactccatcacccaggctggagtgcagtggtgtgatctcagctcactgcaacctccgcctcccgggttcaagcaattcttgtgcctcagcytcttgagtagctggaattacaggtgtgtgccaccacacccagccaatttttgtatttttagtagagacggggtttcaccatgttggtcaggctggtctcaagctcctgacctcaagtgacatgcctgcctcggcctcccaaagtggtggaattacaggtgcaagccattggcacctggctagggaccttcttatttctatggataagtggaacaagtt

SEQ ID NO: 753937 - DNA, 650 bp, Homo sapiens
gattaagggttttgcaaaaatcagtttaggaagaaaaagggatggaacagagccttctgtaatattttaaatcaaaggggttggctataaaatatggagaccaaaataactgctgagaacacaatgctttcacataaaataaaaacttgggaagaagactccagataagaaagactaacagttggcacttacatttcagtgttatttaccagcaggaaaagacgattttgactgattgagttgaatgtgctgagttgatggtgagttcaatatggctgyaaagctcggtactgtcctggtcattgtgccttccgggagagggagaacgactgtgagttcctgagcccaaaggtgatcttttcttgctttgtagttctgaggagactgcacctggacaagttgtagaaatttgggctgtgcggtatgagatgcatgtatgcagactaaaaggcattcagccaacggatctaaaaataattaaaagaagagtgagattacctttcatggatggacacaaagaccaaatatatgtatttaccctaaatgacaacagaaggaaaccagaaagataattgaaggattgtgaagatcaaagggctagaggatttgctctttctgacacaagggtctagaattgcaaaaaaaaaaaa

SEQ ID NO: 753938 - DNA, 629 bp, Homo sapiens
tagcagtatatggactgatttttcaaaaattaacaagctatatcaaacatgtgttaaatttataaaaccgtgctaagcaccatgagaaaaaaagttgatcccttattctaaaggcacttagttggaatggcaaagcagaaatgcaagcataaatgagcgactgtgaaaatctgaagcaggatattagkaggggtgctcttttgttacttggggtgatgggtcaacagcagaatgagtagtatgtctgtgagctcctcaggaccttcacttctttctttatctctgcagcccccatgcttatagtctatgatacacagtgggatatcagtaagtgtgtctttggtggatggatgagtaggtggatagatgaatgaatgaatgaatgaatgaatgaaagttcaatttgttttttttcatgaccagcagtagactcacagattgtgggtcagcaacaggaacaaggcagagtagagatattataattgtctctaccccaatatgtctggggtcacagctggtacagttgactgagggctggctcaatggctggacctacctggaggctcattcattcacatgtctggtgtttgatattgtctgtaggctgtcaacaatgggaacacccacgt

SEQ ID NO: 753939 - DNA, 632 bp, Homo sapiens
cacattttcgtattttgagaacatgtgtcttttataaaacaatgttataattttaaaaatctaagaagcgaggatgttatcaattaagtagtcagttattgggtattaagcctctatgtcagccagacactctggttggccctgaggggcagactctgtcccccaggtaattaaggagaaagaaaacatgagaaagatgaagatgatgtcacaaaatacagtaaaatgcagcccttgagtctgaggaggggacatttccttggaagcaataagccttgaaggacagggcattagactgaagaacaagaagacctcaaggaggtgttcagtggacttttgaaggatgggttacagagaggcagaygtgggaggcaaagcacaacttgatgcaatatagaatagaattgagagaaaattgtccaacagatcctttctgtctaaggaaagttgtcacagaataaaggcagccataggtgagtagagaatgggtgccaggtgaacttgtgttcagagtgcctggtagactgggttccaccggctggctttgtgggcacaatctcagcagtatatgtttctctctgtaaaaatgtctttcttaaaaaaataaataaataaattcaaaaatcagcatt

SEQ ID NO: 753940 - DNA, 596 bp, Homo sapiens
aaaatccattcaatatattgaggttttaatatgattctgatgccgatctctggctttcttagaaatatttaatgtctggcttttaggaagacaccttttaaactcagaatgacttcccaaacaactgttgaaaagccaagcctctcagccactcctgccgttsgtcacttccgctaacactcttgactttctcctcatctatatcattgactactaaatttccttctctcttacaggcatacattaacctggaatcttttggttgcaagtggcagaagtttaatgattgtctcaggtgactaagaagtccagagctatgctagcttcaggctagtcaaacaaataaaacttataagaatctatctaattctccctgcttggctccaatttgcagcgtgctggtttctgtcttaggctttacatcatcatggcaaagatagtggcagataaaggcaacctctttccagcaaaacttctaaaactcccagggccaattctcatcagtgtggcttagatcacatggccagccttaaatacaaatgtgcaggattgtgtcattgtcctaaccctaaacctggggttgggttctttccaat

SEQ ID NO: 753941 - DNA, 611 bp, Homo sapiens
acaggcactgatacttcagggtcttccatttaagcaaccatgaggctcagcagtagataagccccacccgtgaacaaaattctatttagatatttacttcctcactccctaataagaattgacaccaagtatcttcagacatttaataaagctccgagcataaaatagtcgctaaaacaaacaaacaaacaaaattaagggagatagagactgtactggccagaagaaaactgcaaataattataattatttccctatccttagggaaataagaaagaatattacattcaagaaatgttagagtgcaataaaagaatattcagagttcaataaataactcttggtttstaacaagtaaaacagaaaaaaaaattataataggagaattaagagatgaagttaggaaaatctccttggaaaatgaacaaaaaagtcaagaatatagaaaatggggtaataaaaatcaatggataaatctaacaaaccaaatgtttgacccatatcagttccaggaaaagagaacagagggggaaaaaaaaagagaaaaaatttcaagacataatgcaagaaaatttcttagaaatgaaacacacaggttttcatttgaaaca

SEQ ID NO: 753942 - DNA, 492 bp, Homo sapiens
tgctgggaggatatggtattagaagtggagagagtggaggatcagggatcctgtggtggagagtgtgcctcccaacctcatacattctgagagagggggagtcccaattggaaagcccaagttttacaagctactcagagccctggaaagggaggcttaaaggtgctttgggttgccttcyaccaaatacgcgtgggtggcatgattgaggtgtcaggaaggggctcaacacctgtggaaagaggagagctggcaccagccaactttgcccttcccctgcaagaggaagagacaccctgatgttaaaattggaaagcctgggaaaaataatgcatagcataggcagggccatgaggtgctaggcccccacatctccggcttgggagaggataaacagtttctgcttttctggagggcaatttggcattgtgtttcaaaacctttaaaaaaatgcatacccttgtaccctgcagacctgcatctggacaatta

SEQ ID NO: 753943 - DNA, 492 bp, Homo sapiens
tgctgggaggatatggtattagaagtggagagagtggaggatcagggatcctgtggtggagagtgtgcctcccaacctcatacattctgagagagggggagtcccaattggaaagcccaagttttacaagctactcagagccctggaaagggaggcttaaaggtgctttgggttgccttccaccaaatacgcrtgggtggcatgattgaggtgtcaggaaggggctcaacacctgtggaaagaggagagctggcaccagccaactttgcccttcccctgcaagaggaagagacaccctgatgttaaaattggaaagcctgggaaaaataatgcatagcataggcagggccatgaggtgctaggcccccacatctccggcttgggagaggataaacagtttctgcttttctggagggcaatttggcattgtgtttcaaaacctttaaaaaaatgcatacccttgtaccctgcagacctgcatctggacaatta

SEQ ID NO: 753944 - DNA, 621 bp, Homo sapiens
ctgcagcaaagccatagcgataaatgaaggcttcatagactacaaggtgagtccttccctaaaaggcaggaggaaaggacattccaaggttaaaattagctaacatttattgattcattgatgtaggcactctttccacatacaagtaaggaaacaggctgtagcttgcagatttgggatatggacaagttggtgtggttcttgctcctggtaagtctctctggactacaatggcaagtgatctggggcagctggtgcccagtgaaagtggaaggaacaagaargctgattgtgggggtgaggccagatcaggggcagcatcaaaactcgtggaatctgctgactttgtcctgtgagtgacggaagaccactgaatagtagacaagatggggacaggggaatgagttggtcagagttgagttatgaaaaatgtgactccagtggaaacgacaaaaatgacttggggagagagagagagagattagtaccactttcactcatccccccatccctctaccccttgctcatatgcacacacacacacacagaaagagagaaaatggaggtatagctttcaagttgtcttgtttgtgtggctatgaactccaaagttttggcaaa

SEQ ID NO: 753945 - DNA, 569 bp, Homo sapiens
aaatgacttggggagagagagagagagattagtaccactttcactcatccccccatccctctaccccttgctcatatgcacacacacacacacagaaagagagaaaatggaggtatagctttcaagttgtcttgtttgtgtggctatgaactccaaagttttggcaaatacatctaaattacatatataatagctttttttttttttcaccagagagatccttcctgaagaaggctaaagtgttccttgtagcccaggattgatcactccttgtaattgaaacctctcaaaatagtgtaacgtggctctccacttgcatgattcctttaaggagatgttgaaagccatgtaggaaatggaccgtgcttagtcagttccagtactgtgtttggatgtaaccaatggttggtaatttaataaatgaaacrgatggatggatggatggattaattagtggatgaataaaagaagggatgagtgagtggatggtgggtgggtggatggatgaattagtggatggatagatgaatacatagatggatgcgtggatgagtggatggtaggtggat

SEQ ID NO: 753946 - DNA, 630 bp, Homo sapiens
ttccaataaaattttgctactttgatatgtcacataaaacatagtgatatagttttgaccaattgtgtcctgagacttgaaaggcaatccagatggtataggctaaatgtttgtgttgacccaaaattcctgttgaagccctaacctccagtgtggctgtgtctggagatggggcctctaagaaaataattaaatgaggccctgatctgatagcatcagtgtccttayaagagacaccacagagctctcgctctccctctctcttccccctttcacaccgaggaaaggccatgtgaggacacagagaaggcggccgtctgaagccaggaagagacgcctcaccagaacccaaccctgctggaaccctggtctcagacttccagcctccagagctgtgagaaataaatggtttaagccacctattgatggtattttttctttttgagacagtgtctcactctgtctcgcaggctggagtgcagtggcatgatcacagctcactgcagcctcaacctcttggcttccagcaatcctacctcagcctcctgagtagttgggaccacaggcgcccaccaccacgcctggctaatttttgtattttttttgtagagatgagggtctcaccatatt

SEQ ID NO: 753947 - DNA, 613 bp, Homo sapiens
tattccaggacgctctccccatctgagagccttgatgcagtcatgtctgcacggtccccttcgtcgtggcaggtcacagtttcccaggtgtcgcattggtcttccggtctccttaggcaccttttggctgtgacagtctctcatctctccttcattttgatgacagtgacacttttgagaagcactggtcaggtattttgtaggatgaccctctactgggattggtctggtgcttttctcatgattagactggggtgatgggttttgggaggaggaccgcagagagaaagttccartttcagagcatcctgggtacattccgtcaacatactgtatcactgttgatgtcgaccttgatagcctggatgaggtcatgcctgtgacgtttctgcagtgtcaagttaacttttattctccctttggattttattatctttttaacttgacgtgtaagttttaacttcacaggtaataagaacatatcttcctgaggggaagaatatggtttcctgtgactccccgccatccccagccgtacccaccatcatcaatttgctgtgcttccttccaggccttttcctacttatttacattcatatatatgtggccatag

SEQ ID NO: 753948 - DNA, 613 bp, Homo sapiens
tattccaggacgctctccccatctgagagccttgatgcagtcatgtctgcacggtccccttcgtcgtggcaggtcacagtttcccaggtgtcgcattggtcttccggtctccttaggcaccttttggctgtgacagtctctcatctctccttcattttgatgacagtgacacttttgagaagcactggtcaggtattttgtaggatgaccctctactgggattggtctggtgcttttctcatgattagactggggtgatgggttttgggaggaggaccgcagagagaaagttccaatttcagagcatcctgggtacattccgtcaacatactgtatcactgttgatgtcgaccttgatagcctggatgaggtcatgcctgtgacgtttctgcagtrtcaagttaacttttattctccctttggattttattatctttttaacttgacgtgtaagttttaacttcacaggtaataagaacatatcttcctgaggggaagaatatggtttcctgtgactccccgccatccccagccgtacccaccatcatcaatttgctgtgcttccttccaggccttttcctacttatttacattcatatatatgtggccatag

SEQ ID NO: 753949 - DNA, 613 bp, Homo sapiens
tattccaggacgctctccccatctgagagccttgatgcagtcatgtctgcacggtccccttcgtcgtggcaggtcacagtttcccaggtgtcgcattggtcttccggtctccttaggcaccttttggctgtgacagtctctcatctctccttcattttgatgacagtgacacttttgagaagcactggtcaggtattttgtaggatgaccctctactgggattggtctggtgcttttctcatgattagactggggtgatgggttttgggaggaggaccgcagagagaaagttccaatttcagagcatcctgggtacattccgtcaacatactgtatcactgttgatgtcgaccttgatagcctggatgaggtcatgcctgtgacgtttctgcagtgtcaagttwacttttattctccctttggattttattatctttttaacttgacgtgtaagttttaacttcacaggtaataagaacatatcttcctgaggggaagaatatggtttcctgtgactccccgccatccccagccgtacccaccatcatcaatttgctgtgcttccttccaggccttttcctacttatttacattcatatatatgtggccatag

SEQ ID NO: 753950 - DNA, 607 bp, Homo sapiens
acccaacacccagatgaacatgaccagaggagaagcacccagaaacccctctgctccccctcagccactaccttttccacgatggctgaatcttggcggtctatgcttttgatagaaatggaatgctacacacgtgtgcttgtgtgcctagcttttcttgctgctgtgcctacmtgcttttcttgcctgcactacattacgaacttactcataaaaacactatgcagtcgagtatagctgcaggtagctctttttcattgctatataacgtttcattgtgagatagaatgatttatttaaccattctcctgttgatagacatctgggttgtttggcaattatgatgagcgctgtggttaatgtcctcctagtgggtgtcttattttagacatataaatgcactgctgtatcacaaggaatgaaattgcagggtcaaagagtaggcaatgttcagatgtagtaggaacttcctaactgtttccaaagtggttgacaatgtccctggctccaagcttggaagcccagcccccgatgctgggacactcacactgtgcccagtctcctgccccagggtcagtgaaccacccccacctgctgctttctgcct

SEQ ID NO: 753951 - DNA, 548 bp, Homo sapiens
aaagggccactccagactcctgaaactctatgcctgttagagatcttaagataaagctgaccaaggaaattttccccagaagcagacggcattcaagatgtgaacagctttcccaagattgtatatcaaagctgctttgttgtcatgaaagccttaccttttttttatttacttttcctttattttttgttgtttgagtctgatataatttggcgctttgtccccacccaaatctcatcttgatagactgtggacttttaagttaatgttgaaatgagttaagactttgggggactgtttggaaggcatatttggttttgaaatgtgaggacatgagatttggcaggggctaggcgtgsaataatatggtttggttctgtgtccccaccctaatctcatcttgaattgtgctctcatgattcctatgtgttatgggagagacccagcaggagataattgaatcctggggctgatttccctcatactgctctcacgccagtgagtaaatctcatgagctctgacggttttatcaggagtttctgttttt

SEQ ID NO: 753952 - DNA, 597 bp, Homo sapiens
taaatatatactaatcaataaacactaattttaaaaaaacaaagaaaacacttgctatatcataggtggaccttgcaattattaacactgatccatattttcacagctagctgaatcagcacaacttagtaacctttatgtttgtaagagattaatttgatatagatatagcttargtatccagaaatttccttttgaagattaaaccctagcctcatagtgagaattcctcttggggctaggactaatctattaaattattgcctattctaagccttttttcacttatttttataatgtttacattttaagaattgtgatagctggctttaatcagggagcattaatcgaggtaccaaatgagactactttatattcagatacaatgaatgttcctgaatgaacaagatgggggtagccttttctgtacctccccttcattatttttctagaaaaccttaaagctgttcagtaaatttaactgcagtcactgactgtgatagaaagtaatttgaattaaatgtatattcaaaactatttaacccagaaggtagcagacaagggtatttaaaataaagcttctggcagaacatgtga

SEQ ID NO: 753953 - DNA, 603 bp, Homo sapiens
taatatacaaaagtcatttagtttcctctattctagaaataaacaagtaaaatttaaattaaaaacacaatgtaatttacaatagcatgcaaaaaataaaatacttggatataattaagaaaattcgtataagaattatatgacaaaaactacaaaactgtgattaaagaatcaaaaaactaaataaaggcatattgtgtgtctgtggatacaaagactcaataatgtcaagatattctttgcaacttgatctatagattcaatgaaaagaaaatcaaaattccagtaagttatttttcacatatttacaaactaatttcatattatatatggaaaaaaatgaccragaatagccaacacaatattaaggaaaacaataagctgtggaacgaacattactcaacttcaaaattactataaaggtacaataatcgagcaagtgtagtatgggtgaagaataaaccaataggtcaatggaacaggatagaaagccccaaaatggacccacttgaatacagtcaactgatctttaacaaaagaacaaaggccacacaatgaagaaaagatagtcttttcaacaaatgatactgaaacaactggaca

SEQ ID NO: 753954 - DNA, 603 bp, Homo sapiens
taatatacaaaagtcatttagtttcctctattctagaaataaacaagtaaaatttaaattaaaaacacaatgtaatttacaatagcatgcaaaaaataaaatacttggatataattaagaaaattcgtataagaattatatgacaaaaactacaaaactgtgattaaagaatcaaaaaactaaataaaggcatattgtgtgtctgtggatacaaagactcaataatgtcaagatattctttgcaacttgatctatagattcaatgaaaagaaaatcaaaattccagtaagttatttttcacatatttacaaactaatttcatattatatatggaaaaaaatgaccgagaatagccaacacaatattaaggaaaacaataagctgtrgaacgaacattactcaacttcaaaattactataaaggtacaataatcgagcaagtgtagtatgggtgaagaataaaccaataggtcaatggaacaggatagaaagccccaaaatggacccacttgaatacagtcaactgatctttaacaaaagaacaaaggccacacaatgaagaaaagatagtcttttcaacaaatgatactgaaacaactggaca

SEQ ID NO: 753955 - DNA, 566 bp, Homo sapiens
tgaatttaaatattgtgtatctttcttgtttctcatttctatagtcatggaacaaacaaatgttagtaagtaaataaataaatgaatatgctgcttctctgaaattcttaatggcatctcaagcaatgtaagagcagacaacattactttgagacatctcataaggaaatggtcaaacaaaattccttttacccaactcrgagttctttctgggaccaatactttgggtatttcaaaagttaacattcttaattttaggtatttcctttctttattattgtattatattttgtgtaatttaattgtataaatgagaatcactgaggcattaagagatttcttctggtgttttaagttggtccaacaaattctgagaataagaatgaattatgtagagaccattttgtatgaatatttgaaatttttatacttgtctgctgtcttttttcagcaacatgaaagttttgggccagtagatgtataagaaaaagaaattgctgtaatatctggtctagaagggattataaatatatatttaagccaaaagtaattttttcaaacacctt

SEQ ID NO: 753956 - DNA, 512 bp, Homo sapiens
ttaaccaggttagtctttcaaaacaaaacatcataaaagggatggcttaaaaacagcaaagttctggaggttggaagactaatatcagggagccaacatggctgagctctggggatggttctcttcctagtttgtaaatggccattttctcactatgtccttacatggtggagagaaagctctggtgcctcctctttttcttataagggaaccagtattattacatgtgggatctatcctaatgacctcatttaaccttaatcaattccttaaaggccgtgtctctaatacagaaacatgggattgagcttcaacacatgaattttgccagaacacaatttagtccatagtyttccctcagctggtgcttcagaatttaagttcttcttttaggcaaaaatatgttcattccatcccaacagccttgctctccaggtcagtagtaggagtggcagccttgatgatctatgaattgccaacaatccccatagccttagctcattctagcatta

SEQ ID NO: 753957 - DNA, 571 bp, Homo sapiens
tggagattaaataggcagacaacctccctgggctgtgagagaaggctagactgtgtgcttattggtattttcacaggtagtttcaagttgactttggaaaaaaaaaatggctgtctatttcaggtttcatattaagcaaaggattgctctgaaaaacatttagtccctacccttaccaaaaccaaacaaacaaaaaagaaaaagaaaataaaagattaaaactgtttattttgctgttttcagtagaaaacacagataaatagccataaaagtatagctacaattcttagcaccaactatayatcagcataatctggggagtattttattaaaagtatgaattccaaggcaccaattctggctgatgctgaagtacatccttgagtagcaaccattgaattgtaaaatgaggaacagaaaactaaagcttgccaataagtacaattgccatgactacagaatttattgcaggatgctatgtaattgtaataatgagtttttaaaaagtagaaaagacactgacaataaagattctagttaaaaataaatatataatttcaaaaatgcagca

SEQ ID NO: 753958 - DNA, 633 bp, Homo sapiens
ccagatgtccctttgatggccgttgttgaaggccattgggaccaataatctatattagattgaatacttaagttagatgtggtttcccccattgtagcagggagctagcgtattagccttgtgggcaacatgatgcatgggaaatgaaagatttttgtaaaaagtcagtatttatttccaggaaaagcctgaccttgctatttgaacacccaagactctttagaggatgtgtttggtgttcacatgtgtttcttctattttggatagtagrgaagtaaagcttacaaagaatgcctagaacaagaacttttcatcattaaaaatttttcccagtgttctgatatgtgactttgaggccaatgagtcataaacaaatataagaaagctgtcaatgagtttcttcaaaggagggaaaactttctacgaatctaagatccatggagctagaattgtagaactaggctcatcagaatcgtgactattattgctccatcaaactgtgaaaagaaatgatgtggaccttgctggaaacaaaggcttagcaaacaattttgttcaatgcccaccgagacatatagaattgggaactgatacatgtgtcccttataggctcaaaaattatatcttacaatt

SEQ ID NO: 753959 - DNA, 605 bp, Homo sapiens
aagtttctattttaaaaaataaaatacagcaagcttcagtgagagaccttaagatgggtcactagacatcacagtgaacatgattttgtcgtactattaatatttctcagcaaatggctttgggaagcacggtgggaactctgattcctgtaggtagccactaaatcattgccctgactttataattctgcagcaatgtcttcatattttgtgaagtctagaacccttcgcagcgggaaacttgcacacttatagccgaattgcatagagtctatctaaagttagtttaaagactcacaggttactttgccaccagmaatgttcatgtattggatttaggggtgggctcaattttcacttaactatttaattaaacagttactttgctgacctctagttagctgacgtctgttctgtgccaggcactgggcaaagtgtttggcttatgttatctctaatgtgcacaaatctgaaaggcaagtcaaatcgccaatccccatttacagttgaggaatctgaggctcagggaagtcaaatatcttgctcaagttcacatagctggcaggtgacaaagccaggatttgaatcaggcatgctgactcaca

SEQ ID NO: 753960 - DNA, 616 bp, Homo sapiens
atatatatatagatagacagacagacagacagacagatagatgtatagagatagatatagagagatatagatatatagagagagatctcatattgtttctgtttctctgaagaaccctaatacaaatggaaagttaaaataggcctgcagtagaagtcactggaaccctttgttgacaaccagcaggtgggataaaggacccactagaaccttgctcagtgcactgtcactccccatcccaaccctactttcatggccctgaggaacagcctctaaagaacctcacaagctcagwtaccctccttcccttgctgctgttttagagcagacgatgaaaggggaccacaatggtcacagttcatcctagaactaggagtaaatgcttacaggtatggggtttcttttgggggtgatgaaaatgttctggaataagacagtggtgatggctaaacaacactgtgaatgtactaaattctactgaattgtacactttagaataatcaatcatatgccatataaacttcacctcagtaaattatttcaaagtatgatttataatatgtgaattttacctcaatataaaaaaactgcaaaaaaaaaaatggaaatatctcca

SEQ ID NO: 753961 - DNA, 564 bp, Homo sapiens
ctgttcaagttccagatcctctctctctagctgtatgattttggacatgtttcttaatttctctgaacacattttctcatctgtaatataggtataatagcatccaccataaagttgatgtagattgaaatattcrtacaatgcgtaccagagtgcttataccttgcaaatgctcaccacatggctgccatcattattagtagcagcatccagctgtccaaattccacaaatctttaaagccctgcatggtttacccactttgtggaaaccgttgcttccctccccatgccacctaccaaccacagaaagctcagcctccttgctaaagtctcctgcctctcctctgacagttcagtgagttccaactgaggattgcccttgctctgttgttttgtcttgtcgtttcaccataaatgtctgtcatgtcttcctacctggagtattcccttctggagggcaggattctgtcttctacctctcagtatcaccatagcatgcagcataagacctagtacacaccgcaataaacactgacagggagattgcccagcccaagacaagcg

SEQ ID NO: 753962 - DNA, 601 bp, Homo sapiens
actgtgtgtttgtcagactaacctgtatttccaaactgagatgaccctgcatcctttcagaaaacaggtggtaaggaaacacctactgagttctcaatactggagtctgagtttttcagtgtgtggtcaaacatctgtgagtcttggacaaacagcctcggttctctgcctgtgaagagaggaattctccagcagccctccctaggtgacccatggcatacccttccttggggcctgaagggctctgtctctaaccatgaacwccacggcttatggatctgtcagggtagcagagagcaactgatgccaccaatttcagccttcaagatggccagtcaacccagcccttctctaggtttccacctgtgtgtaatttaaagaataaggaatctgattgatttccagcaggagcacatgacagtaaactcaagcagtgacagccctgactgcggcttgcctgactgcatgaagctctctttctcaaggggatcacttgtagtcaggtaagataatttttaactaagtcagttaaagcagagagtcattagaaagcacacattaaatatggttttctttcatcctcccgctcaatacaggcaca

SEQ ID NO: 753963 - DNA, 638 bp, Homo sapiens
aagctttaagaacatttgttctctttgaggaaaccctgacttagggaattaagagaaaaaatgccatctgtagaaaacaaaccaaagtaaaaacttgttaccctacccatcctggcataacttactcaaaatataagggaaacctaggaagtgtattttgctatttatgaaatatttcttttcagatttttttaatacttcagaagtatattctaagcattataatagtcaacttcattaatacaaactaatrtaaattccagaaataaagttaatgagatccaaacaaaaatttaggctctgggttgagtacagtaaatagcatgaagtcagaagacctgggtttgatgattgcttcctggctgtattttctctagtaagtcttctagtttcatgtttgacactggagtctctggtttctaaagtgtagacaataaatatgtctgtcatacaggatgggtttaggcatgaagtgagttaataaggcttgggaaaatagtttgaaaactgcaaaggtctatataaaatgtttgttgttacagttacaactactagcttttaatggtagaattttggttgttctgctaggtctgcggtggttgaattggacacagaatggaactacgctagacagatga

SEQ ID NO: 753964 - DNA, 564 bp, Homo sapiens
tccccatttaagatatacagttctgtggcttttagtatattcacctacagagttgtgcagccatcatcgccagaaagaaaccccacagcccttacccttcacccctccagcctccccattccttccagtcccaagcaactaccaggtgactttctgtctcagtggctttgcctatgaaacaacctgtttttataacctgagagaggtatccacagggaagcttctcagcctctcctgttacactctgtgataacctggtgcacctttgtaagccgctgagagaggaatgggacctgcctgcttgtcagcattagagagttattctcccctttaaaggaagcaggagttattttgctttggtagtacaggttgagtatcacttatccaaaatgcttgggaccagaggggttgtgaatttccgrtttttcttttagattttcttttagattttgaaatatgtgcaaatactccctgttgagtatcccagatctgaacatcagaaatctgaaatgcttcagtgaatattttctcttaagtgtcctgtcggcactcaaaatatttcag

SEQ ID NO: 753965 - DNA, 573 bp, Homo sapiens
aaataccttttttcccatatgaactacaagtatagacattttggggggccttcctcatatatattcaaatttatagttattgtgttctatgagtatcatgaatctgcctgatgatttcataataggaaattgaatgacactgatttggggaaatgaggtagaaattatgggttaggcagaagyttctgtaatctgttagtaattgtttggtaagatcatacaatttgtacatagtaaagcaagctagtgaattaagcttttcgttatcagatgctatgggagtggtctgagaagggagtaatagagtaagctgttggtttctgcttaagactaaaacatgtgctttaaaaatgttcttaaaaccctttatttaattgaaacttgattcctactataggctaaattttatattgttgtggatatagaggcattgtcagctctaaaactctgattttaggatgcttcatattttatattatttaaaatagcacaattttcaagaaggcaaaacagtagcaattcaaacatggatttgttcactttgggttcttgtttcttctgtcttcccccaga

SEQ ID NO: 753966 - DNA, 612 bp, Homo sapiens
accgcacaagcagtggccagtggggattgaggaagcaattcctttggaatagatttctctccctctattcaaaaactagtagcctctactagatggaacctgtaactttccatctctatagacccacttacaatctcctgtgcaaaccagctctgttgactaaaaaaaaggtcaactgtctgtgccagatatgaatgatctgaagatatgccgggcatggtagctcacacctstaatcccagcactttgggaaggccaggtgggaggagtgcttgagcccaggagtttgagacctgcctggacaacacagcaagaccccatctctacaaaaaataaaaaattagctgggcatggtgggatgcacctatagttccagctcctggggaggctgagacaggttgagcccaggatgcaaaggctgcagtaagttacgatcaggccactgcactccagcctgggcaacacagcaagacctcaccccatcttgaaaaaaaaaaaaaagttaaaacgaagacattcagaacagcagctcctcagctctcagcaatcccaaatgaagctacagaacctttttaaggcttagactggcagaaacagtactaaatacgtttc

SEQ ID NO: 753967 - DNA, 612 bp, Homo sapiens
accgcacaagcagtggccagtggggattgaggaagcaattcctttggaatagatttctctccctctattcaaaaactagtagcctctactagatggaacctgtaactttccatctctatagacccacttacaatctcctgtgcaaaccagctctgttgactaaaaaaaaggtcaactgtctgtgccagatatgaatgatctgaagatatgccgggcatggtagctcacacctctaatcccagcactttgggaaggccaggtgggaggagtgcttgagcccaggagtttgagacctgcctggacaacacagcaagaccccatctctacaaaaaataaaaaattagctgggcatggtgggatgcrcctatagttccagctcctggggaggctgagacaggttgagcccaggatgcaaaggctgcagtaagttacgatcaggccactgcactccagcctgggcaacacagcaagacctcaccccatcttgaaaaaaaaaaaaaagttaaaacgaagacattcagaacagcagctcctcagctctcagcaatcccaaatgaagctacagaacctttttaaggcttagactggcagaaacagtactaaatacgtttc

SEQ ID NO: 753968 - DNA, 590 bp, Homo sapiens
aaaaaaaaaaaaccaaaaaactgaagcaaaataaactaaamcccaagtaaagtgagtttgtaatgtaagtgctgcattttcttctaccttcctgcccacggccgtttcctcatttcttccattgcctcaatattaagaaataaacagctttaggaaataaaatggtttttcctgtgaccccacatcagtgtcacaacattcaaggcacagaagcaactcccataaagtgctagctgtttagagtcaccgccaccaaatttgctaagtcactgggggtacggttcttaaagagctaatgatgctctttgctaaaatatgaatacaacattatttctaatgcaatgcttaaaatgaaagcagttgtgctagacaggagaccaacatccatacattttggctcaagtcagtaactgagaaatgagttcaagaaccttctttaagtcatcattaatcaagtcccaggagaggcggctgtgcccgctacaaaagggccaggaatgaagctgcacagacggcattagctgggcaccgggctctgccagtctacacttaagctcttaaggcagtacagagaaccaggtgacccggac

SEQ ID NO: 753969 - DNA, 653 bp, Homo sapiens
tagtaacttctcttagaagcaaaatttattcaaagacctgtgctaacattcttaaatatctgctagccatggtaaagaaatcattacactttacattcttagctcccacaatttagcctaaatatttgccctggcatgcttatactggcccaagcaagcattaagtcatagcctgttcctcttccttatttgaaggtgtttttacctttctcagcattccacaagttacttcctccttcctttgttctcctctgcctttgcctcttttaaaaarttctaagttgctagccaatcaggacaaatacagaatgtgaggtcccgttccagccaatggaactggacacagcagtagggtggacgcatcaggttataaatgaccctgtctcctttgctcagtgtactctcgtggcaaaactgctggcgagtgtaccctttctgcaggaagttaaaatggccttgctgagtaaattaaatttatgttcaagtgctatttctttatggcaccaaggaacaagcatttcaaacacaagtaacatgaccaccaaggtagacatgctggagcagtgtgatgggaatatctgaaggtacaggctccaggagtcttcagcaaaatcaggaaagttagggatctgcttttcaataaatatattctg

SEQ ID NO: 753970 - DNA, 500 bp, Homo sapiens
ataaaatattgtatttgaatggatctcttactgatccattcaatggatccataaatgagtggattattatttaaagaatgcagaacatcatccattggtttttttggaaaaatatcggctccatgagttatacggccctttcaaattttgactttatrtaattccaaaaactcacctttgttaatattacctgtcccgttaaaaaacaaaaaaaaaatttttaatagtaggaagttatgaagcagatacaagttttctaaaattctaattttcacttgaaagcccaaattttatctttagaaacaaacacttcagttgttttccttgacgtgactgctgacttcattcgtttttgagaaaatgtctgtaaaatactcaagtatgaattaaccatcacatgtgtgccatttgttctctcaagtaaaatgtgtttcatgaaaaaaagtagttggtttagctcataatgcaaatcatctcttaagggttgagattcaataaaa

SEQ ID NO: 753971 - DNA, 646 bp, Homo sapiens
atctcttactgatccattcaatggatccataaatgagtggattattatttaaagaatgcagaacatcatccattggtttttttggaaaaatatcggctccatgagttatacggccctttcaaattttgactttatataattccaaaaactcacctttgttaatattacctgtcccgttaaaaaacaaaaaaaaawtttttaatagtaggaagttatgaagcagatacaagttttctaaaattctaattttcacttgaaagcccaaattttatctttagaaacaaacacttcagttgttttccttgacgtgactgctgacttcattcgtttttgagaaaatgtctgtaaaatactcaagtatgaattaaccatcacatgtgtgccatttgttctctcaagtaaaatgtgtttcatgaaaaaaagtagttggtttagctcataatgcaaatcatctcttaagggttgagattcaataaaattaaccaatgttttctgcttcatcgaggtcttaagtgaaaattagtgcttttctttttcctgtgaatgcataagtgcatgacaaatatagtgactactagtttggtgccagtgctttgattcatgctaagatgccaacagtgttacccaccattacttttgcaccatc

SEQ ID NO: 753972 - DNA, 616 bp, Homo sapiens
  misc_feature 483, 484: n = A,T,C or G
ccatgttcagccacaaatgagtatttctatccaagaacatgactaataaatatattttagttctaccttgttttcatatccttaaagatagtttaggtgttactattttacagtcaaggcttatttcaatttgctaaataccatttttttttttttttgagatggagtctcgctctgtcacccaggctggagtgcagtggtgcactcttggctcgctgcaagctctgcctcccgggttcacgccattctcctgcctcagcctcccaagtagctgggactacaggcgcccgccaccatgcccggctaaatttttttgtatttttagtagagacggggtttcactgtgttagccaggatggtctcgatctccggacctcatgatccacccgccttggcctcccaaagtgctgggattacaggcgtgagccacggcgyctggcctcaatttgctgaataccattttctttgctcatcactgcttgnnttttttttttttttttcttttttttaacccccaccactccttttctggattcaggttttgatagtgcattactgacaaaatttttttgtcaccccacccctattcttactcttaaataataatatagctgga

SEQ ID NO: 753973 - DNA, 616 bp, Homo sapiens
atcttatattacttactaaatttggcaaccctatgtcagtgataccttccccatccctgccatcaacaataccactaacaaatgcaattggcaaaataaaagaggcttgcaagagaaatctcctttctccccgatgaaagatggtaggcagaggaaaacatcacaccttcctcttcattccttgatgattaaagagaaaagaatgagaaagaatttttggacagagtgatccaaagttatatatgatatayataaagtggcatatatatttctatttgtatatagatttacatatttatatgtcctttatttggaattatactttcaatacaaattagtaaaacccttatttatcctggggcataatttattcagcatctatgtcccaaatgtgtgaggttttggaaatggagataagacaggcatagccccttctgtcctggaatttagagtctcacagaggtagttatacaatttacaaactttgctataatgtgtggttaataacatggtggggaagtacaggacatttttggttagaaaaccatgtggacctgacaaagcacattttctaggatttattttgactaggggtcaatgtacttttaaacattca

SEQ ID NO: 753974 - DNA, 638 bp, Homo sapiens
taaataaaaatgttctgtaggtaattcccacagaagtcatatatttgctaatatttgtggattttcctcacaaaagtgcctctcacgtaatcattaacgtctctatgctttctttagatacggatacagtagttcaaatttaaatgccagtttctaaaagccttggcaagatagaaaacgcagtctatggcaaggattcaggcaaatcaaaatgcttgctcatgaggggcaaggaatcaaaacaactgcagaaggcactgctagaacytaaattcagtcagcagatatttattagggccctactccctgctgattgctgaagataaaacaatgagaaaaacaaacttggtgcttgccctcctgaactttagagcctatagaagggtgcacattctaatgtaaattttatgcaaataacatttaatattgtgataaataagaaaaaactgggttctgtaaaagttttaaatatatataaaaaaggcttccttgggaaagagcgctttatctgagatttgaaggatgtctagatgtttgaaaactaatattttagaagatggggtatagatggagggcacaaaaatatttcatacagagaatatagcttgtgcaaaggccctgaggtgggaggaacatga

SEQ ID NO: 753975 - DNA, 552 bp, Homo sapiens
cttaactgttctctgaatcaattccaaaaatgtgcaacatcctcaatagggagaactaaagatggctgaggttctatgaaaatctttagaacttgtgaagtcttttctagattttagattgaaaatttattacctacaaagttgtttggaggaaacaacattttcctagaaaatgactttcaatgacatttaacaatgtctaataaaatattttagtttactttgtacattatttcatggataggaagactttaaaaacccaaatacttccaacttcaaccccaccctytggctagcttgtatgttcacagatggagcttttaacaattttatttggatttcgctcttccttgaaagatttatcattctgtttccagaattctatgtatctacatgttttattctcttgcatttaattattctcttctctttcatttcccttctcatatttcgcaccttgtctttcttcctatccttataaaataggaaggtgatcaaaacaaggtagaagcaagtaagtgaatgggagaataaaagaaagaaaaaggagca

SEQ ID NO: 753976 - DNA, 561 bp, Homo sapiens
ataacaggatttatctcctgtttttctgggacatagatgccccttttaggtgtgtggcccagactaaactagaacactcatggagagatagagctaattaactccaaacacctaagtatgttgagatgatttctcttatatgtccttcactctgatactggaccaggaggggtgacttttcttcattctttccttataggtataagagctgaaatgagctcctcaccccacccacccaagctccactggaggggggatttggaggcaaatgaatgactgagagcactcatstaaggccaagagagagaagtggaatcataaaggagaggcagagtggtccgcagtttgaggaagtatggtagtggtggccaagagaggtggggacagcaggaaagacttcgttatattttgcacttaccttaataaggattcatagttttcatgaggcgagaagcaaattcttgttttgttctctgaagccttgatgtgggtttgattgtctcacagtaggacattttctgcaatgtatcatcccttttcattcttcccgagggtgtgggc

SEQ ID NO: 753977 - DNA, 635 bp, Homo sapiens
caataaatataggttgaatgtgtaggtgtataaaagctgaagataggtgagtaaaaattaataatgatggctgccttaaaaaatcaaattaacaaagtaccttttctatttttttacagtgttaatacagcttttgcagggttcagaatatgcttcttatcatctttcaccatcttccttgctttttaaactgtgaacatttaatatataatttttaattcattccaaagaaagctataagtggaaggaaaacatgacccagwttttgtaaattcaaacttatttcgacagttgtgaaacccttgaattctcaaacaaacaaccaaaagatagcatatacataggggaagatttgttgttgttgttgaaataattcctatacagaaacacaaaatattatgagtgttagtctttgaagaggaagtgtcagggaataggcaaaggaaaggaaagatgctgaacacctaaaaaaaccctgaagaattttatacacaaggaaatatcaaaggagagctagagagccataccaataaaatagaaattgatagatgaatagatgaggctattaaaaaggatttgtagaggctccagggaatgcaataatttggtcaagtagagaagttatacaatatatt

SEQ ID NO: 753978 - DNA, 635 bp, Homo sapiens
caataaatataggttgaatgtgtaggtgtataaaagctgaagataggtgagtaaaaattaataatgatggctgccttaaaaaatcaaattaacaaagtaccttttctatttttttacagtgttaatacagcttttgcagggttcagaatatgcttcttatcatctttcaccatcttccttgctttttaaactgtgaacatttaatatataatttttaattcattccaaagaaagctataagtggaaggaaaacatgacccagtttttgtmaattcaaacttatttcgacagttgtgaaacccttgaattctcaaacaaacaaccaaaagatagcatatacataggggaagatttgttgttgttgttgaaataattcctatacagaaacacaaaatattatgagtgttagtctttgaagaggaagtgtcagggaataggcaaaggaaaggaaagatgctgaacacctaaaaaaaccctgaagaattttatacacaaggaaatatcaaaggagagctagagagccataccaataaaatagaaattgatagatgaatagatgaggctattaaaaaggatttgtagaggctccagggaatgcaataatttggtcaagtagagaagttatacaatatatt

SEQ ID NO: 753979 - DNA, 585 bp, Homo sapiens
tctgtgtctagctaagggtttgtgaatgcaccaatcagcactctgtatctagctaatctagtggggaggtggagaacttttgtgtctagctcagggattggaaatgcaccaatcagcaccctgtcaaagtgggccaatcagctctctgtaaaacagaccaatcggctctctgtaaaatggaccaatcagcaggatgtgggtggggccagctaagaacaaaatcgggctgcctgagctagcagtagcaaccggttggggtgcccttctgcattgtgaaggctttgttctttggctctttgcrataaatcttgctgctgctcactttttgggtccacgctgcctttatgagctgtaacactctctgtgaaggtctgtagcttcactcctgaagccagagagaccacgggaaggaacgaacaactccagacgccccgccttaaaagctgtaacactcaccgcgaaggtctgcagcttcactcctgagccagtgagaccacgaacctaccagaaggaagaaactccaaacacatctgaacatcagaaggaacaaactccggacacgccgcctttaagaactctaacact

SEQ ID NO: 753980 - DNA, 670 bp, Homo sapiens
gagacagcctcactgctcatcagtctggggaaaagggcagattgttacagccaagccacagaaatccgggaatggtggctaaggggcacagtgggtcagaaccaagagagtaagtaagctggatcaaactgaggatccagaaacattcagctgtgaatgctcatctttgtaaaccagaagactatatcagccacagcatggagaaaaaaaaaaaatagagcctgtgagtgagcacagagccgggaaaggaggctgggtgttctgggcatagcaggtggacattgactcactttcattatttcattagtttcattagaacaaaattaaagttctaatgaatgcattatgcattaaagtttttttactacatagccaaaataacactattttatttaacaagtaaataatacttctaaataacatacatattcacatttccctaattatcccccctcccccaaattaaagtagctttgtccaacccaggacataacccaggaccatacattayatctggatgttatattcctcaagtgtcttaatctctagaccagttcccttccccatgatattattattttgaagagacccagatcagtgtcctgcaaattgtcctatttagattcatctggatatttcttcctggaaatcattagcttgttcccatatc

SEQ ID NO: 753981 - DNA, 619 bp, Homo sapiens
ttcacctccttggttagtatattcctaagtatttaatgttttctttgcaactattataaaaggggttgagttcttgatttcattctcatcttggtcgctattggcgtagaggagtgctactgatttgtgtacattgattttgtatcctgaaactttactgaattcatctattagttctgggggatttttggtggagtctttagggttttctaggagtctttagggttttctaggtatacaatcatatcctcgaagaacagtgacagtttgacttctttactgatttgtatgccctttatttctttctcttgtctgattgctctggctaggacttccagtactatgttgaatagaggtggagaaagtgggcatccttgtcttattccagttctcacagggaatgctttcaaattttccccattcagtataatgttggctgtggatttgtcatagatggcttttattaccttaagktgtgtcccttctatgatgattttactgagggttttaattataaagcaatgctggattttgtcaaatgcattttctgcatctattgagatgatcatgtgatttttgtttttaattctgtttatgtggtgtatcacatttattgact

SEQ ID NO: 753982 - DNA, 616 bp, Homo sapiens
cgtatgtttcttgacatagttctgccgcgttgctgattggacatagagagtttcattgttttcctcccactaggtgtgtcaactgatggctcttttagaggcaatgtgaagatgagagaaatccaatatcaaattcattcattcatttattcattctgaataatgaatgagggcttactgggcatataccgcatacagtgatttgcaggtgtctccacttcaggcacatgcactagagaggcaagcttttcacttttttgtgtctgttccctcctccatcacacttctcttgtcctccctctctacatrcaattcttatctggcaaatattaagagctcacttctccattccagaccctgtttatgttcctgcaatacaagagtgaccagatcacagcccctgcattaaattctaagagctactgttacaaagtaccacaaacttggtggcttaaaacaacagaaatttattctctcatagttctggaggccagaagtccgaaatcaaggtgtcagcagggccatgctcttgccaaaggctctgggtgaaaaaggtgaggatctttccttgcctctttctggcttctggtgtttgccagcaatctttgatgttcct

SEQ ID NO: 753983 - DNA, 616 bp, Homo sapiens
cgtatgtttcttgacatagttctgccgcgttgctgattggacatagagagtttcattgttttcctcccactaggtgtgtcaactgatggctcttttagaggcaatgtgaagatgagagaaatccaatatcaaattcattcattcatttattcattctgaataatgaatgagggcttactgggcatataccgcatacagtgatttgcaggtgtctccacttcaggcacatgcactagagaggcaagcttttcacttttttgtgtctgttccctcctccatcacacttctcttgtcctccctctctacatgcaattcttatctggcaaatattaagagctcacytctccattccagaccctgtttatgttcctgcaatacaagagtgaccagatcacagcccctgcattaaattctaagagctactgttacaaagtaccacaaacttggtggcttaaaacaacagaaatttattctctcatagttctggaggccagaagtccgaaatcaaggtgtcagcagggccatgctcttgccaaaggctctgggtgaaaaaggtgaggatctttccttgcctctttctggcttctggtgtttgccagcaatctttgatgttcct

SEQ ID NO: 753984 - DNA, 553 bp, Homo sapiens
tcaccagcagaagagcagagtggcgtggcagagaacgagtgaggagaagaagcaacagagtgatggagactatggatatgcatgcttaatctcagatggcacaactttggagaggagccctgcgggagacagcaaggcttcagggaatgatcatcttcttctcgcatcatccccctcccagctcctctttgtgagagccacctccatcactcaataaaacctcctcattcaccatccttcaagtccatgtgacctgatccttcctggacaccagacaaggacccaggtatcaagagggcaggatgtaaaargctgtcaccctgactctccactgaactggttaacacttagccatccacagatggcaaacactaaaagagcattgtttgtagcacacactctctggggctccagaggtcttgggcaaccactagatgctgccacaggctggtaaagggttcattcctgctggtgcctaaaggcactcaccccagctcctgcacctgctcacctaagtgctccccctcccacaaggggtttgagctcagtggcc

SEQ ID NO: 753985 - DNA, 610 bp, Homo sapiens
atctggctcctgcaaaagaagaaagctaatgggcctaatgaagcaggtggtcaggccctctttagtagcttccaacatgtggggtacacttctggagagaaacaagccataggtgagtcaccgagcatgctgagtctgtgcaggtcatgatctgagcatcatgtgatggaatggagaggcccaggtgggagggtgttgaaggcagatgccataaggaaaggaatctgctgctgcagctgtagaggacagtggccacttgtctcctggaaccaccattgtgcttcaatagctaccacagaatgagcatcagcagagagagacatgaggcagtggagagaggctttgagarcagacctgtgttcaaatcctgactccaggttttgctagctgtatgatcttagcactttctgagccttgggttcttcatcttctcaatggggtaaagaatttcaatttcaaagtattgcttgagaataaactgaaatgagatatcacctggagtttctcaacacaggagaggctcaataaatgtgcctattagcatcttgcacatggaggtgttgcttgtgttttggggtcctgggggacaggcagccccacgttttactcc

SEQ ID NO: 753986 - DNA, 628 bp, Homo sapiens
ctttctatcagtgaaaaccaatttgagcctgtatcctcaaattcatgagtaaattgttcatttacttctgaatgataataggtaagtctgtagatatatattaagaaagctcaagagaagcctttaaatacttaccaaagtaattgaaattttataaagtattataktatgtttcctatgacttaaacactactcaagaaattatagatttttttctaatatgatagtgttaggtaccagctaaaattataatatgctcctgaggcgaggtctattttaaacaataatgagtataaaattaatattataaatagtctttttcacaatttcgactttactttttttttttttttgagacggagtctcactctgtcgcccaagctggagtgcaatggcacgatcctggctcactgcaacctctgccacttgggttcaagcaattctcctgcctcagccttccgagtagttgggactacaggcgactgccaccatgcctagctcatttttgtatttttagtagagacggggtttcaccattttggccaggctggtctcgaactcctgacctcaggtgatccgcctgcctcagcctcccaaagtactaggattacaggcgtgagccacagcg

SEQ ID NO: 753987 - DNA, 512 bp, Homo sapiens
acaagcttcagtagctgatttgatcaagtggcagaaagggtatcagtgattgaagatcaaattaatgaaatgaagcgagaagagaagtttagagaaaaaagtaaaaaggaatgaacaaagcctccaagaaatatgggactatgtgaaaagaccaaatctatgtytgtttggtgtacccaaaagtgatggggggaatggaaccaagctggaaaacactcctcaggatattatccaggagaacttccccaacctagcaagacaggccaacattcaaattcaggaaatacagagaacaccacaaagatactcctcgagaagagcaaccctaggacacataagtgtcagattcaccaaggttgaaatgaaggaaaaaatgttaagggcagccagagagaaagctcgggttacccacaaagggaagcccatcagactaacagcagatctcttggccgaaaccctacaagccagaagagagtgggggccaatattcaacattcttaaagaaaagaatt

SEQ ID NO: 753988 - DNA, 512 bp, Homo sapiens
acaagcttcagtagctgatttgatcaagtggcagaaagggtatcagtgattgaagatcaaattaatgaaatgaagcgagaagagaagtttagagaaaaaagtaaaaaggaatgaacaaagcctccaagaaatatgggactatgtgaaaagaccaaatctatgtctgwttggtgtacccaaaagtgatggggggaatggaaccaagctggaaaacactcctcaggatattatccaggagaacttccccaacctagcaagacaggccaacattcaaattcaggaaatacagagaacaccacaaagatactcctcgagaagagcaaccctaggacacataagtgtcagattcaccaaggttgaaatgaaggaaaaaatgttaagggcagccagagagaaagctcgggttacccacaaagggaagcccatcagactaacagcagatctcttggccgaaaccctacaagccagaagagagtgggggccaatattcaacattcttaaagaaaagaatt

SEQ ID NO: 753989 - DNA, 512 bp, Homo sapiens
acaagcttcagtagctgatttgatcaagtggcagaaagggtatcagtgattgaagatcaaattaatgaaatgaagcgagaagagaagtttagagaaaaaagtaaaaaggaatgaacaaagcctccaagaaatatgggactatgtgaaaagaccaaatctatgtctgtttggtgtacccaaaagtgakggggggaatggaaccaagctggaaaacactcctcaggatattatccaggagaacttccccaacctagcaagacaggccaacattcaaattcaggaaatacagagaacaccacaaagatactcctcgagaagagcaaccctaggacacataagtgtcagattcaccaaggttgaaatgaaggaaaaaatgttaagggcagccagagagaaagctcgggttacccacaaagggaagcccatcagactaacagcagatctcttggccgaaaccctacaagccagaagagagtgggggccaatattcaacattcttaaagaaaagaatt

SEQ ID NO: 753990 - DNA, 513 bp, Homo sapiens
agaaagttttaaaaattgaaatcatatcaagtatcttctaagaccacagtgaaaattaggaatcaacaacaggaactttgggaacaaatatgtggaaattaaacaacatacacctgaataaccaatgggtcaatgtaaaaattaagaaagaaagtaaaaattcttgaaacaaatgaaaatggaaaaacataccaaaccctttgtgacacagaaaaagcaatgctaagagggaagtttatagcaattaacgtctatacctgaaaagtagaaagatgttgaataaacaacctaaaaaatccacctcaaaaaactagaaaagcaagaacaractaaacctaaaattagtaaaaggaaagaaagaataaagagcaaagcaaagcaaaatgaaatagaaactgaaaaaaacaatacaaagaatcaacaaaatgaaaaattggttctttgaaaatataaactcaatcaataaaccactagctagtctaaccaagaaaaaggatccaaacaaatagaagt

SEQ ID NO: 753991 - DNA, 649 bp, Homo sapiens
actgcatcctcttcgtgtgtatctgttagaaaatatctaaatcatcatgttactgaactgcgtattggggcagaagcactacacattctccttgcagccaagtgaccctaatccagttatgatacgtgtctctagtctcttattctatgcctaggcaaatatcaatcacggatcaatgctgctgagcacagcctcatagcattcttttctgctgttccagaaagccagcactaattgactggaactggcacttctctctgcagactgatttgtttttggtgttcatggccatcacagacctcaagtttacataactggggcattgtgagccaattttagatttcaagggaaaaaatatctaagtggctcagctcttatcaagcatccacccaatttwaatcgattctggttaggagtgtgggatgggtacagttagcatgagctacataatttgcagggcccagtgcaaaatgaaaatgcagggtttcttgtccaaaagaagcaggaaaaaggctttcttctttcttccacagtcttgacctgttttggtgtgagtttttatctgctacctaatgtcatactccatgaagcatagaatacttatggggcaagtacagaccctcacaggcaccagggatccttccctgtg

SEQ ID NO: 753992 - DNA, 498 bp, Homo sapiens
ttagctcatccgttattgctagcattagtgtattttatgtgtggcccaagacaattcttcttcttccattgtggcccagggaagccaaaagattggacacccctaacctaacagaaagacaaaactacaaaagtttgacaacacactgtattagggaagctgaagagaaacagacatgctcttgcattgctgttcrgagtgcggaatgatggaacccatacagaaggcactttggcaaaatctggaaaaaattacaaatactctttgacccagcaatctcaccatagattttatcacctatgaatgacatatgtacatattcattgcagaatatttgtaaaagcaaaagactgtaaataacccatatctaccaatccagtactagttaaattaatctatacacccactggaatactaagtagctgtagaacaagaatgaggaaattctctatataataagagtcagaacaatccccaggatatattctaagtgaacaa

SEQ ID NO: 753993 - DNA, 602 bp, Homo sapiens
gctggggaacagagtgagactctgtctcaaaaaaaaaaaaaaagaatacctaacctcctgggaaggcagcccagcaggtgtctcggccttattttacccagcccctattcaagatggagtcactctggttagaacacctctgacaaaaggagccacttgrtccagatccatttaacatcaaggatggtggtgctatggacagaagtgaggaaacatggaagcgggctactttagaagtgaggatgctgagtttgttttgggactgaatatgacattaaaagagagaaggaaaactgagataagaaagaatattcagggaaaggagaacatcctgcttccaaggagaactctgccttctccatgtaagaggactttccaaattaaaaagtaaaaggcagaccgcaaaatgatctaagcctttataatggtaaagagcgtgggcattggaatcatactgtgagttcacttgtggctccccatcagccgtgtgaccttcggcaggtcactcaaccccctgcatctcagttccctcagctttaaaaaggtggcgatagcagtatctaacctacaagttatcataagaactcagttcaataatctat

SEQ ID NO: 753994 - DNA, 602 bp, Homo sapiens
gctggggaacagagtgagactctgtctcaaaaaaaaaaaaaaagaatacctaacctcctgggaaggcagcccagcaggtgtctcggccttattttacccagcccctattcaagatggagtcactctggttagaacacctctgacaaaaggagccacttggtccagatccatttaacatcaaggatggtggtgctatggacagaagtgaggaaacatggaagcrggctactttagaagtgaggatgctgagtttgttttgggactgaatatgacattaaaagagagaaggaaaactgagataagaaagaatattcagggaaaggagaacatcctgcttccaaggagaactctgccttctccatgtaagaggactttccaaattaaaaagtaaaaggcagaccgcaaaatgatctaagcctttataatggtaaagagcgtgggcattggaatcatactgtgagttcacttgtggctccccatcagccgtgtgaccttcggcaggtcactcaaccccctgcatctcagttccctcagctttaaaaaggtggcgatagcagtatctaacctacaagttatcataagaactcagttcaataatctat

SEQ ID NO: 753995 - DNA, 618 bp, Homo sapiens
acattttggtcattttgaatttacaaacatcaggaacttaatagttaattgacagaaattaggacgggaaatctagttttggtaaattctatgccctagcagttatttacattgagttctgtataatgaatacatagagtaactrtataataacccagtaagctcagcatcacatccactctgttgtaagattgcctaatttaccagagatttctctttcaacaatattataggagaaagaaattaacactgactgagcatctacccttaattttatctcatttaattattataacagtgctctgaaataggaattatccacattttacaaacaagacaattaaatcccatggagattaaatcatttggctcttgtacttggtaagtagtggagcaatgattttaaaccaagtctatctcctgtttgcttcacagattgctgaagcagaagaagacaagattaaaaaaacatatcctccaggtaaaaagaaatcatattgatgttaatttaaataatgtaggctatgagaatctgaactaaaatggctgtgttgggtttggggctattcttccagaaaacaagccaggtcagagcaactattcttttgttgataactt

SEQ ID NO: 753996 - DNA, 606 bp, Homo sapiens
ttttctctgtacttgtccaaactccaatccttgtccaagctccaattatgtctcatgtaaactatagcaaaatctacagttctcccagcaaccactccgcctctccccaactcattcttcatttggcagccaatgtggtagtttccttacccgaagtcaggagttcaagaccaacctggccaacatggtgaaaccccatctctactaaaaatacaaaaattagccaggagtggtggtgggcacctgtagtcacagctacttgggaggctgaggcaggagaatcacttgaacccaggagacaagggctgcagtgagccaagaccaygccactgcactccagcctgggcgacagagccagactccatcttaaacaaacaaacaaaacaggaaaaccaaagtccttaatgaagcttgcacagtcctgcatggactgcttcctgactacatttctaggttcatcctgcacacataatctgatagaaaccttgttcttgcccttcatggcacttcatgcagtttgtaattttaccttcataagtgtgattatttatgattaatgcctttctccaaaactaaactgaaaacttcataagaatagagacattg

SEQ ID NO: 753997 - DNA, 606 bp, Homo sapiens
ttttctctgtacttgtccaaactccaatccttgtccaagctccaattatgtctcatgtaaactatagcaaaatctacagttctcccagcaaccactccgcctctccccaactcattcttcatttggcagccaatgtggtagtttccttacccgaagtcaggagttcaagaccaacctggccaacatggtgaaaccccatctctactaaaaatacaaaaattagccaggagtggtggtgggcacctgtagtcacagctacttgggaggctgaggcaggagaatcacttgaacccaggagacaagggctgcagtgagccaagaccacgccactgcactccagcctgggygacagagccagactccatcttaaacaaacaaacaaaacaggaaaaccaaagtccttaatgaagcttgcacagtcctgcatggactgcttcctgactacatttctaggttcatcctgcacacataatctgatagaaaccttgttcttgcccttcatggcacttcatgcagtttgtaattttaccttcataagtgtgattatttatgattaatgcctttctccaaaactaaactgaaaacttcataagaatagagacattg

SEQ ID NO: 753998 - DNA, 606 bp, Homo sapiens
ttttctctgtacttgtccaaactccaatccttgtccaagctccaattatgtctcatgtaaactatagcaaaatctacagttctcccagcaaccactccgcctctccccaactcattcttcatttggcagccaatgtggtagtttccttacccgaagtcaggagttcaagaccaacctggccaacatggtgaaaccccatctctactaaaaatacaaaaattagccaggagtggtggtgggcacctgtagtcacagctacttgggaggctgaggcaggagaatcacttgaacccaggagacaagggctgcagtgagccaagaccacgccactgcactccagcctgggcgacagagccagactccatcttaaacaaacaaacaaarcaggaaaaccaaagtccttaatgaagcttgcacagtcctgcatggactgcttcctgactacatttctaggttcatcctgcacacataatctgatagaaaccttgttcttgcccttcatggcacttcatgcagtttgtaattttaccttcataagtgtgattatttatgattaatgcctttctccaaaactaaactgaaaacttcataagaatagagacattg

SEQ ID NO: 753999 - DNA, 584 bp, Homo sapiens
tacttgttgaaatactattttatatatgttgagtcaaataaagtatattattaaaattactattacctgtttcattttaccttttgtaacgtggctattgaaatatctaaaattacttaacatgtcttgcatttttggtctgcattatatttctgttgggcagtgctttgccatctgattaaatgttgttttgcttatwttatcctttcttatctaatatcttaattgtattctaagaatgtctttataatttgttttcaaaatgtggttttagatttttatgaatttttaacctttttaaaagaaccgtttcttgaattactgtgataaaaattcaacttcaaaacaaaatgcaattcgtgatagtctgcactaaattcaaaacatattagaaaccttggctttttaactgtgtacactatcctaattagatggaataggatcacaaaggatgagcattctgtcacatcatttgagcctaaggactggatatgttcttgtagccattgggccttggtcttccccatcttctttactaaccttcactaattttatccatgctcatcctaacttacctacatatt

SEQ ID NO: 754000 - DNA, 643 bp, Homo sapiens
ttcttaaaatttctttaacagaatcttgcttctatccaagagtactcctttggttgagctgagattaccaccaagtagggtggccacctcaatcatgtctttgctaggctcctcaattttcaattccaggaccagctcagctgattgttaacaygtgttgtggactatattgtgtaaccccaaaattcatagcttgaaactctaactaccaacgtgactgtgtttggaggtaaggcctttcaagaggtaatataaggttaaatgagatcttaagggtggggccctataagactagcgtccctaagaagagaaaaagacaccgcaagtgcatgtacacaaaggaaaagccatatgaggaaataacaagaagggggcaatgtacaagacaaggagaaagtcctccagataaaccaaatctgctgacacatagatcttggacttccaaactccagaactgtgaggaaaaaaaatctgttgtttaagctacccagtctgtattattttgttatggcagccccagcaaattaatacaacatattaaactcctaaagtacagaatctctacactccaggtatttgtcaggctaatctctaattcattatatacttaagtctttcaaaagcaccactgaggaaaatttga

SEQ ID NO: 754001 - DNA, 643 bp, Homo sapiens
ttcttaaaatttctttaacagaatcttgcttctatccaagagtactcctttggttgagctgagattaccaccaagtagggtggccacctcaatcatgtctttgctaggctcctcaattttcaattccaggaccagctcagctgattgttaacatgtgttgtggactatattgtgtaaccccaaaattcatagcttgaaactctaactaccaacgtgactgtgtttggaggtaaggcctttcaagaggtaatataaggttaaatgagrtcttaagggtggggccctataagactagcgtccctaagaagagaaaaagacaccgcaagtgcatgtacacaaaggaaaagccatatgaggaaataacaagaagggggcaatgtacaagacaaggagaaagtcctccagataaaccaaatctgctgacacatagatcttggacttccaaactccagaactgtgaggaaaaaaaatctgttgtttaagctacccagtctgtattattttgttatggcagccccagcaaattaatacaacatattaaactcctaaagtacagaatctctacactccaggtatttgtcaggctaatctctaattcattatatacttaagtctttcaaaagcaccactgaggaaaatttga

SEQ ID NO: 754002 - DNA, 643 bp, Homo sapiens
ttcttaaaatttctttaacagaatcttgcttctatccaagagtactcctttggttgagctgagattaccaccaagtagggtggccacctcaatcatgtctttgctaggctcctcaattttcaattccaggaccagctcagctgattgttaacatgtgttgtggactatattgtgtaaccccaaaattcatagcttgaaactctaactaccaacgtgactgtgtttggaggtaaggcctttcaagaggtaatataaggttaaatgagatcttaagggtggggccctataagactagcgtccctaagaagagaaaaagacaccgcaagtgyatgtacacaaaggaaaagccatatgaggaaataacaagaagggggcaatgtacaagacaaggagaaagtcctccagataaaccaaatctgctgacacatagatcttggacttccaaactccagaactgtgaggaaaaaaaatctgttgtttaagctacccagtctgtattattttgttatggcagccccagcaaattaatacaacatattaaactcctaaagtacagaatctctacactccaggtatttgtcaggctaatctctaattcattatatacttaagtctttcaaaagcaccactgaggaaaatttga

SEQ ID NO: 754003 - DNA, 627 bp, Homo sapiens
acagcattccatgaagttttggcccattcacacagttgtgaagttgtgagcctctttcttcctctcggtatcaaactcaaaatctgaagcctgtatccacctgttctcttccctcatgaatcctttaaatggcttcttgatagctgtatctyaaggttgcaaatgactaattaagtctcctggaattacagctgagccttttattgtccaatctgatcagtcaaaactcactccagactaatatggcaagtttccttggtagcccaccagggcagctagaccacacttttgactgtccacaatttcatctcttccttgttcatgcaaattttttcatggacctaaaaacaaattggaaattctttcttctaattttggaaagggctttcttttaaaaattagaaaaagtagcagttttgtatcattaacaaaatatgctaatcgaattgtaagatataatttatcatgtccacaactcttttttttttctttttgctttgatttgagatcccaacacaactcttaatagtacctttggggttgggtttaatggcccattgaatgtgtgccattaaatgtgggacttagtttcccagcagtatcacctaccgatgtgtactagttatc

SEQ ID NO: 754004 - DNA, 536 bp, Homo sapiens
ggaactagatagagttaatggttgcacaacactgtgaatgtattaagtgcccctgaattgttcacttccaaatggttaattttatgttatatgaattttacctcaataaaaagaaacagtcattttttgttaattaacagaaactccatgtgtgtacaaagaaaaagttctagaaagtatgttaacagcactcatgtctagttgatagaattataaacaagtttaatttcaatttttttccacatttgtttccaatttttctrcactgaatatatatgagttgcttttatattgggaaaacaatgattttaaatttttaaacaaaagatggcctttctttaagtctatgaagaagtttaagaaactaggaaatcatgctcagattaacattatgtattccatatcagttgcaaaattaaattttaaatgaagatataaagttttatggagtatatttcattatttttaaaacacaataatttgtccacacttatatgtaaaatttcaaatgcaaatgcaaaagacatgtttaaatt

SEQ ID NO: 754005 - DNA, 666 bp, Homo sapiens
agtccactatcaaagggcactggattccctgacaaagaacttggggtgcacaagcaacaatggttaggaagcataatgggagacaagactgataaacaacagaacagtaaatttaaaatatttaggaatcaatttaaaaagccatgtatggacatatttggagaggcctttttaaatgtgtgaaaggcacaaaagtagccttaaacaaacagacaagctaagttcttcaacagcaagacttactataaagatatcatttgtccctaagttaatatgtaaacttactgagattccaaaaacatttttgtaataragaaaatgtttgccaagttcatacagaaaatcaagcaaaggagtgaaactagcccttctagagattaaaacatactttttatgcctctataaagctgaaagtataatgctggtacatcaacagaatgaaaagccagcatatgtaaaaaagccatctcaaatcagtgaaataaagatggattattagacattagggccttctggaaaaaaaaacaaaaaacctgaaaaatgaaagcatgatctgtaactcacaaaataccctaagataaactataagtaaatcaaagatttaagtataaaaataccaccattaacatatcagaagaaaataagggtttattcctttatatattt

SEQ ID NO: 754006 - DNA, 604 bp, Homo sapiens
atgaatacatccaccacacccacaggtttcctccctgtcttcctccagctcctggacccacacaaccaaaaagaagggatactttcaacaaatgatactgaaacaaccgtaaatccacatgcaaaaaaacaaaacaaaacaaaacaaaaaccctgaacccttacctcataccatacacaaagattgattgattayaggctgaaagataaaaattaaaactacaaattgcctagaataaaacaggagaaaatatccatgatcttgattaggcgaagatttcttaggacacaaaaagtgtaagcataagaagctggacttcaacaagatgaagctctgttcctcaaaatagtattaagaaaataaacagataagccataaatttggagaaactattcaaatatatatccaacaaaggacttctaactagaatatatgaagaactcttacaagtcagtaacaagacaactcaatgaaaaatgggcaaaagattttgtctttataaaagaagatatatatgaaaggccaataaggatctgaaaagatgctcaatgtcatcagtaatcaaggagacacaaattaaaagcacagacagaccatatgacac

SEQ ID NO: 754007 - DNA, 624 bp, Homo sapiens
aaatgggaactcagaaagaaggttgaggggattaattaggtttctatctataacatatttgagggctgaatgcagtagctcacacctgtaatcccaacactttgggaggccaagacagaaggattatttgagcccaggagttcaaggccagcctgagcaacaaagcaagtccccatctctacaaaaaaaaaatttttttttaaaattagccaggcatgatggtgcatgcctatagtaycagctgctcgggaggctgaggcgagagattatttaaaccaggaatttgaggctgcagtgtactatgattgcaccactgcactccagcctgggcaacagagcaagactctctttctctctctcaatctctctctctctatctatctatatatataaaaataaacagatacacgtatatacatgtaccctacatacatatgtatacatatgtatatatacgtaagtaaaatttaaatacacatacatacatatgtatgtatatatgcatatatacacacatacatatatacataatgcttgaatatatgtataaataaaatttaaaaatgaacatatcttacacttaagtgctctgtcaatattcaactgctgttattcattattatt

SEQ ID NO: 754008 - DNA, 578 bp, Homo sapiens
caggggttaaacattgggtacacatggacataaagatgggaataatattggccaggcacagtggctcacgcctgtaatcccagcactttgagaggccgaggcaggtggatcacctgaggtcaggagttcgagaccagcctggccaacatggtgaaactttccccccaccccccaccccactgtytctactaaaaatacaaaaaaattagccaggcatggtgacgtgcacctgtaaatcccagctactcaagaggctgaggcagaagactcgcttgaacctgggaggtggagtttgcagtgagctgagatcatgccattgcactccagcctgggcggcaaagtgagactccatctcaaaaaaaaaaaaaaaaaaaaaggctggaaacagtagactcgggggagcactagagggaggagggtgggatgaaagagctgaaaaactaccgagtatatgatcactccctgggtgttgggatcattcatggccccaaccctcagcattgtgcaatatacctttgtaacaaacctgcacatgtgccctctgattctaaaataagttgaaaaaaaaaatatatagg

SEQ ID NO: 754009 - DNA, 578 bp, Homo sapiens
caggggttaaacattgggtacacatggacataaagatgggaataatattggccaggcacagtggctcacgcctgtaatcccagcactttgagaggccgaggcaggtggatcacctgaggtcaggagttcgagaccagcctggccaacatggtgaaactttccccccaccccccaccccactgtctytactaaaaatacaaaaaaattagccaggcatggtgacgtgcacctgtaaatcccagctactcaagaggctgaggcagaagactcgcttgaacctgggaggtggagtttgcagtgagctgagatcatgccattgcactccagcctgggcggcaaagtgagactccatctcaaaaaaaaaaaaaaaaaaaaaggctggaaacagtagactcgggggagcactagagggaggagggtgggatgaaagagctgaaaaactaccgagtatatgatcactccctgggtgttgggatcattcatggccccaaccctcagcattgtgcaatatacctttgtaacaaacctgcacatgtgccctctgattctaaaataagttgaaaaaaaaaatatatagg

SEQ ID NO: 754010 - DNA, 547 bp, Homo sapiens
tggtgcacaactgtagtcccagctacttgggagcctgaggtgggagaatcgcttgcatctgggaggcagaggttgcggtgagccgagatcctaccactgcacttcagcctggcagcctgggggacagggtgagactcagtctccagaaaaaaaaaaaaaagaaagtgaggggagaaattccagaaagaacagagtcagagaggaagagtccccaaatctgcttataaaccactcacatttctggctgactcttgaatcatcatgtgtggggcagactccaagcaacccaattaaggctaagcactgaaattatatttaagactttggttctgcttgctttaaaaacatcaatattctttgaatgaacatrttaaattgatgcaaaagtaatttaaagtaatggcaaaactgcaattatgtttgcaccaacctaataacagaatagagaatatccttagtgtattgctcacaatgtcaaggatacaataaaaaattgctagacatacaaaaaaagaaaagaaaaatgtgactcatattcaagagaaaa

SEQ ID NO: 754011 - DNA, 598 bp, Homo sapiens
tatccctcccccttccccgaaccccacaacaggccccagtgtctgatgttccccttcctgtgtccaagtgttctcattgttcagttcccacctatgagtgagaccatgcagtgtttggttttttgtccttacgatagtttgctaagaatgatggtttccagcttcatccatgtccctacaaaggacatgaactcatcattttttatggttgcatagtattccatggtgtatatgtgccacattttcttaatccagtctatcattgatggacatttgggttggttccaagtctttaagtctttgccattgtgaatagtgccrcaataaacatatgtgtacatgtgtctttatagcagctttcatcactaatttatagttttccttgtatagatctttcacttctttgttagattgatttctaggtattttgtattcttttattgtaaatggggttgctctttctctttttttttcttttgagacgagacagagtcttgcttagtcccccaagctggagtgtggtggcgctatctcagctcactgcaagctctgcctcttggatccatgccattctcttgcctcagcctcctgagcagct

SEQ ID NO: 754012 - DNA, 554 bp, Homo sapiens
cgcatctgtcaggttacacagtcatgtctaatttaaagccaagcaatttggtaaaggagaagactctccctggccagcctcatcactgaactgcagaggctggctgggagcccagaagagctggtgtttcttgcagaaaaaccatcatgattacctgtgccaggcatggagctaagcataatatacatcttttttttttttttcaatcctcccaacatcccagtgaggtaagaactattattattcacatgtggtggaacaagaaactgaggcttggggagattaaataacttcacagaggcctaraaaagtaacaggatggctgagccaaacccagcctgagctcatagccactactgatgagtcctggagatcactgtcactttttctagggtgaagtgcttttcccaaaagactcagagctccatggccctgtcttgtgagggaccatttgaccagatgcttttcaaagatgacacatctgcacatttcagaacccagtggaagtctgttcatgaagcaagtttttttaatgttcaaatcaagtaggaagg

SEQ ID NO: 754013 - DNA, 638 bp, Homo sapiens
tccatacataaaaaattggaggctctttatgaggcaagagagagaagagtgggagagggagtagttagtaagctggagtgagagggttgggtgcattctccatgtatagctaaaattccaaggtgttggtagaaattctaaaytcaagcctgaccttccagttgttatgaagctttatttgtcaaggtgggagtatatcgcattttaaaaaatagtttgtaacatgatttgtaacatttagaaatgtttatactgtcatgctgggctctgtaagtgttcagatggggcctgtgacagtccccttggaggaatgtcccctccctgattatgtgcagtttggagagacagggacttcattgcactgccttccttctatggaagcagcagaagacccttgagcctgcttcttccagagtcttctttttttgtcattgatgattgacatttctaatgttggtagtcaggtatgtgacttcagctcagacaatcgtattctttcttactggacttgagacttgggtggaatgactttgaataaaataaatttcagatgatgttcattctagcaggagtggatgcctgggttggggcatacctgttctgactcaggtcttacagctgggccccacctccttctc

SEQ ID NO: 754014 - DNA, 616 bp, Homo sapiens
ccagggactttctctgtctttcccttactccagacagaagtacagatggctcttggcgagcttaaaggagtatttatggggagtaatttcagagcttctgctgggcctttgcataggtaagagagtggccattaagatgtgtctgtcagttgagaaagcttttcactctaagtaatagagaaccagattaactgtgtctaaaacaccgaagacatttattgtcacaaagtctccaggttgttactcagctcatcagtgcaatcaaggtttcagaatttttctctttcccttctctcacctttggattgctagactttcatctgtcttttttatttttttgttttgttttttccctcatggtggcaaaatgaccattgcagccccaagcatcaaatctgtattcaaagcagccagtgctctgcgggcacactttctctttgttcctgttctttttatcaggaagcwatataacttccttaaaagtccaccaataaacctcccttatatcttgctggtcagaacttggcctcctgggcattgctgtgtgcaagggagactggaagactacaatgagacgtggaaaaggagtggggtgtgaggaaggcagtggatttgc

SEQ ID NO: 754015 - DNA, 585 bp, Homo sapiens
gtccctttaatgtggggtcctcctctgggctcttcctctctctgggaagtgactgtgcacagggaaagtgtaattggcaggctgtgacactgctgtctgcaagtgtctctctaagtggaacgcatttcagctttatctggtgatgtctgctacctgagaagggccctgggccatctcaaagggcttgtagcagctaattgtgcctgttaggaccagcaattagctggggatctctggacttcgaagctccaacacccaccagctttcccttcctttctctccctttcacttaactagcccagcctaatagaggcagtgaaggacaggcaggtgaggggcagacaggacaaggaaggtggaggctggcrgggcctcatcctatgcccctctgagtcctgcactccacccctgctcaagagaacctgcgaaaagaaacaggcaccagctctgctctcatgctgtaaatacatcctctttattgcaggaccagggctagaagcttattaatcggtatcgggagtcatgctgcccgtttgtacagtttaagcgggagttggaagatgacaataaaaagctaattaggcg

SEQ ID NO: 754016 - DNA, 560 bp, Homo sapiens
tttgaacacaacagtcacattcaatggaagaaaactacttaatcgaagcccaaacaagtttaggtttgtttttggtggggaacagtctcaacatacaaataatttctttaagcaacttttaacagtaatcttaactatgactataaattctcttcagtgcattcaaattatccatcaacatcattgtatatatgaaatgcatcatcrttctatgatcttaagttcataattagctggagaaggaagcctgggccaaaaatggcaacatttctaagattattaatctaacaggtattacctatgcctaaagtaactttctttttcacataaccctatatattctctgaaacaaaattcataagcctggctggacattcccattcctcacctttcccttcagcctatactatccttgtttcatctcaggtgctataaaaatggttgttgagatacagatagaaaagtcaccacttggaaaccatgaccctaccagatttacaggagcactagcagaagctaagatactagagttaattctttctccatttttagactgagcc

SEQ ID NO: 754017 - DNA, 479 bp, Homo sapiens
tttttcttagtgtttttcctatataattagtaattagttttatgtagtcttttaaatgtataaacaagcatattaacaaattattcaaatgtagatatataactttttacatgttcttctaataacttgcagataagtaaccttcacttaggggggactcttatttggagaaatgtgaaaacaagcttgtccaacccatggcccatgagccacatgtggcccagaacagctytaaatgcagcccaacaaaaatctgtaaactctcttaaaacattgtgagattttttgtgattttcttttttctttttctttcttttttttttttttttagctcatcagctatcattagtgttagtatattttatgtgtggcccaagacagttcttcttccaatgtggccgaggaaagccaaaatattggatacccctgctaaagtggactcctttgcatatttaacaagaaaataattaaacaacttt

SEQ ID NO: 754018 - DNA, 616 bp, Homo sapiens
aaggatgttcattctgtccattcttactcaacatagtactagaggtcctagtcattgcaataagttgagaaaaagaaataaaattctaaagattgaaaaagaataaaattatttctgtttgcagaggatatggttgtttatgtagaaatttcaagaaatgtaccaaaaartacttctagaattaatgtgaattcagcaatgactccatacaagatcaacacacacaaataaatctcatttttatatactaacaataacatgtgaaactgaaatgaaaaaatacaataccattgcaattcctccaaaaattaaaatatttaaatatacatttgacaaaatattttataggatctatatcttgaaaattataaaatgcagattaaatcttttaaaaactaaataaatggagagacatatcacatagctagattagaagacccaacaaagatttcaattctttccaaattgatctataggtttaatgcaatttctttcactattaattaattaattaattaaatatacaaaccaattctatggtttatttggaatggcatgggcagagagatagacacatgtaacaatgaagcataatagagaacccagaaataaaccc

SEQ ID NO: 754019 - DNA, 614 bp, Homo sapiens
agtcacttgttccacatttctaatttgttttaattaaaggaaaagtttaatcatatttctaacattttcaaaattgttggtgagtttttattattcaaagaaaatttatatataaagtcaagaccaaacattttctcaaaacacacacacatccyaacatgtactcattcagaaagaaaaaatcaacaatgtgtgatcactgctgagccaagaaatatatttttccataattttttaacactgtaccacagcaaggaattacctacttttaaccactgggtgtcccctgaactatatggttaacatgcaggcagatagcaccatatcacgtttaacaaatgtctaacctttcttattggcgctggtagtaagaaccctcattatcttttaaattcgccagtcattcagctttcaatttcactagtgaaataagtatattgtatcagattttactgagtctacttgctgtattaagaaagtacacaggaaaaaaagtgacaaaattatattcagagaagcaatttttatcttaagtactaagtgaaaccaaaaatgggatgttattataagattgttttagctctcagtttcctataaatagttttcttcaaaat

SEQ ID NO: 754020 - DNA, 585 bp, Homo sapiens
cctgcaggaagtacagtcagagctgcccgcggtgaagggccaggaaacccccgctgttcttgaagcctcaagaccccagatatcccaccttgacaagtgggtgagatgctgcccactgctcaggcaccacagagtgccacgaggctcctgggcatgtccccagctggtaggactgatggggataccaggaataagaagataaaatttggtytcaatgtgaaatgctagcagctatgagatgtttttaaatgactaatgagttgtctgctgcttcagccttgcaaatggtgttttatgttttttttgttgtttctgtgtgtgtttcttttttttttttttaagagatggggtcttgttctgtcacccaggctggggggcagtggtgcgatcgtagctcactatagccttgacctaccccttgcctcaagtgatccttccacctccgcctcccaaagtgctgggattacgggcatgagccactgtgcctagccacagataattttatacaatcaccatgtcagaggataatcgatggcctatatactttttttttttttttttcagagacagagtctcgctctgtct

SEQ ID NO: 754021 - DNA, 585 bp, Homo sapiens
cctgcaggaagtacagtcagagctgcccgcggtgaagggccaggaaacccccgctgttcttgaagcctcaagaccccagatatcccaccttgacaagtgggtgagatgctgcccactgctcaggcaccacagagtgccacgaggctcctgggcatgtccccagctggtaggactgatggggataccaggaataagaagataaaatttggtctcaatgtgaaatgctagcagctatgagatgtttttaaatgactaatgagttgtctgctgcttcagccttgcaaatggtgttttatgttttttttgttgtttctgtgtgtgtttcttttttttttttttaagagatggggtcttgttctgtcacccaggctggggggcagtggtgcgatygtagctcactatagccttgacctaccccttgcctcaagtgatccttccacctccgcctcccaaagtgctgggattacgggcatgagccactgtgcctagccacagataattttatacaatcaccatgtcagaggataatcgatggcctatatactttttttttttttttttcagagacagagtctcgctctgtct

SEQ ID NO: 754022 - DNA, 529 bp, Homo sapiens
ccatcctagtcacaaatggtcttttaccccattttttaatagactttacttttttagaatagttttagcttcacagaaaaaytgagaaggtagtagagaaaattcccatatacctcacagccaatgtccctattattatcttacattagtatgatgtgtttgtttgacttaatgagcccatattgatacattactttattattattttgagatggagtctcgctctgtcgcccagcctggagtgcagtggcacgatcttggctcactacaagctccacctcccgggttcatgccattctcctgcctcagcctcctgagtagcccgccaccacgcctggctagttttttgtattttagtagagacggggtttcaccatgttagccaggatggtcttgaactcctgacctcatgatcctcccgcctctgcctcccaaagtgctgggattacaggtgtgagccactgctctcagccaataccttattattaactgaagaccatcatttattcagatttccttattttttacc

SEQ ID NO: 754023 - DNA, 647 bp, Homo sapiens
ttgacatgactgtgaagtctcgcattatatggcccctacttttttcttaaggttcagttcacatcatataccgccttactgtctccatcctagtcacaaatggtcttttaccccattttttaatagactttacttttttagaatagttttagcttcacagaaaaactgagaaggtagtagagaaaattcccatatacctcacmgccaatgtccctattattatcttacattagtatgatgtgtttgtttgacttaatgagcccatattgatacattactttattattattttgagatggagtctcgctctgtcgcccagcctggagtgcagtggcacgatcttggctcactacaagctccacctcccgggttcatgccattctcctgcctcagcctcctgagtagcccgccaccacgcctggctagttttttgtattttagtagagacggggtttcaccatgttagccaggatggtcttgaactcctgacctcatgatcctcccgcctctgcctcccaaagtgctgggattacaggtgtgagccactgctctcagccaataccttattattaactgaagaccatcatttattcagatttccttattttttacctaatatcctctttctgctccaggatcccatccag

SEQ ID NO: 754024 - DNA, 592 bp, Homo sapiens
caggacttcattgatcgccggtcctgaaatgctgcagtgaaggtgaacaagggatctcagaaggggaagtgaaagctactggtggtcctcgttgtccacttggagaggctgccagtgcaatggtctgaaggtgaggggttcggggcagccagatgggaggttttacagaatgacaaaagcagtggattgcaggrtggcagtggtaggtgctattcaggggaatatcttacacccattacttttttttaagtgaagacatttttaataccacagaattttgaaaacataataaaaacataacatgtcacacttgcaacttatggattacacagtattcagaagatagatatccttaaaaggcattaataagccaggaagaatgaaataaatgaattaggcactcaaatcaggaacttagaaaaagaatgagagactaaactgtaggaaagtgtaggaaggaaataagaagagacattaatacaatataaaaaacagtagaaggggtaaataaaaagagctgattctagagagcaaaatacctaaccctatatccatcagtttaatccgaaaaaaataaaaggggaggggtgag

SEQ ID NO: 754025 - DNA, 686 bp, Homo sapiens
ttatgaataatggagctataaacattcatgtataggtttttgtaggaacatatgggttcatttctcatggcagacacctagtacccaggaatgaaattgctagattctacggtaagcttatgttgaacctcataagaaactggcaaactgttttccaagtggctgtaccattttacgttcccaccagtaatgtatgagggttcctgtttctccacattcttactgcctcttgtcaccatctgtcaattttattttgctattctaatgggaatatcatggtggttttaatttgtatttcttctaatgactaacgacattgacaccttttcatgtttcatttgtcttctttgatgagctgtctattcaaatcttccacccattttttcttttttctcaggttaycttattattgaggtgtaaaacttctttatatatttcgtatagaattccttatcagatgtatgatttgcaaatattttctcctatttctctatgggttgtctgttcactttctcgagggtgtcttttgatactcaaaagtttccaattttgatgaagcctaatgtatcaaattttaaaatttatagatcttgcttttggtgttgtatgtaaaaaatttttgcccaacccaatccactaacaatttctcctatgtttcttatcaaagtttcataattttggctctt

SEQ ID NO: 754026 - DNA, 644 bp, Homo sapiens
aggagttcaagattacagtgagctatgatcacaccactgcactctagcctggatcacagacagactctgtctaaaaaaaccccaaatgtatacactttcatcagatggagtattctatatatgtctattaggtcaagttggttgatagtgttgttcaagctcttttatatccttttcattttttgtatagttatttcatcaattatttagagtggggtattaaagttaacaattattattgctgaaatgtcyatttgtcctttcaattctgtcagtttttgcttcgtgtatttagggctctgttgttagatgcatatatttataattattatatattcctgaagaattgcctgtgttttcattataaaacaccgctctttgctgttaataagtttttttttttttttggtcttacagtctattttatcagtagagccactccagtctctcatgaattttttttacgtggaatatctttttccattcctttactttcaatttatttgtgtcttttaattgaaaatgtgtttcatatatggcatatggttagatatttcttttttatatggtttgacaatatttaccttttgatttgcattttccatgaattaatgcttaatggaatttgatatggttctatttat

SEQ ID NO: 754027 - DNA, 560 bp, Homo sapiens
gaaaaagaggagatgaataagaaataaggcaagggtgggctacaccaaaatgaaaagatggtgagggccccatataagaaacattgcatgcagccaacattttgaccttagacttctgaatgtcattgctaaaacaggttacacaggcagcctgcttcccatcatcctctgactaaccagaagatagagaattgcattcagaaagtgagcatagttctttttagggctggcagatagcagagcagtgatgtttagccttctgttttcacaccattcacacgtgcagcacattgccatcaataacatctctcttctggactgcttgcctctgggaggccactcagaatccccaccgggacaggwatattttgaggaagtccccggctgttcttattctaccccatctacactccattggaaatcaatgcagtacaacacctacatgatattaagcttctgattttgaaacagaaaattgatatgtaattcctgcccaaattttacattttagcttgtaatctagaccctggaaaaagcccagattctgtgcctttcttata

SEQ ID NO: 754028 - DNA, 622 bp, Homo sapiens
cctagtcctgcagcccctcatggcaacaatctgcaggggctgggcagtggctgtgtccttcaaacatggcagcacctctccatccctacttaggttacttgcctggccctgacatggatgaaacagtaatgtaatcaagcagcaattaagccatgtgaggcataatcaactacattgtacctttgctgagaagagacagtaayagaagagagcagcctgcagggagcctgggaagggaaagtgcaaagaaaaggaactcggcagtgcagcaccatcagggaagaaggtggacaggccagctggaacaggatttgggtctgcttggaaagcacagcaaagatatctctgtgatctagcttgctgcgtggcatgtttccaggaagagaatgcaaagcccacctgccatgagcattctagctgcttcgcaggctcaggagtgtactcacaccagtgaaagctgcagctttgcagttccacaattctaattccaagcaaaatgtgagtgagtgtgcgtgtgtgcatgtgtgtgtctgtgtgtgtgtgtgtgtgtgtgtgtttaaaaataggacttgggaccattgttaaagtactggtctttagtgaaataatgtttaaatatttt

SEQ ID NO: 754029 - DNA, 601 bp, Homo sapiens
atccagttttgaacatgtaactctgctgttcaaaattaatggttttcaattacctacattgtgaaatccacgctctttttcaaggtcctatgttatctgttcctgttaacctatacaccctcatctatgacttgtttgccttgtagttttacacataaaaactattatattgcttatatgtgtctagcacatactaggcactcacataaatgtatttccttctcttccccctacagtttacaaaaagacttttcttctccaatgatctaatgaaattctcacmatcacctggtgatgtaggtattttcaccggtaatagatgtagttgaagaagatgctgaaagtcagagagcagacataccagctggctaatgataaagccaagaatcacaccctgatttctgacttaaatgtggtgtgctttgtggtgtgtgctgtctgctacagatcacacttacgaacttgaccttccattaatttaaatttgtgacctgtttcccataccgactgtctgtgcaagctgcacatattaaatttaaggggcagatctctcctatattgtaccagaaatagaaatgattatggaaaagaaaatgcattt

SEQ ID NO: 754030 - DNA, 595 bp, Homo sapiens
tcccaccccagctctcctcattccctgtctctttccacctgtcaaagctctgtccgtccttcaagcccacctccaatgccacttccttcccagccctgtgctcggttcccatgctctgccagcaacactctcccatcttccccatcctgcctttaccctctcatgtccctctccaaaagcaccaggcaagtgtaggtaatgcttgctgaaataaagtgtaccctgattgaattgatctgcaaacataggaatgtttcagcccttgagtaagccatctccctgttttgttatctttgaactccacaaggycgtgtttttgaaatttaaatgtctcaaacgttttcttacactctacccaaagacagaagcttcctgttgtccttgctcacttaattctttcaaagaccatcaacctcagtgttgctaatgttcacaactgggtaatgttcacagctcgttcacagtttataaaaccattctctctactttttgtatatccttgaaaaatgtcaataataataagaattttttaaggcacagtatttgagatatttgggaccctcttaggaagtccttgtttggttaggactatttc

SEQ ID NO: 754031 - DNA, 516 bp, Homo sapiens
tgcaagaagtttttaatttttctaattatttttaaacttttaagtttaggggtatgtgtgaaggttgttctgtaggtaaacatatatcacaggggttttttgtacagattattttgtcacccaagtactaagctgagtaccgaatagtttttttgttgttgtttgtttgtttgtttgtttgttttttgagatggagtctcgctgtgtctcccaggctggagtgcagtggcgcgatctcagctcactgcaagctccgcctcccgggttcaygccattctcctgcctcagcctcccaagcagctgggactacaggcgcctgccaccacgcccagctatttttttttgtatttttagtagagatggggtttcaccgtgttagccaggatggtctcgatctcctgacctcatgatccgcccacctcggcctcccaaagtgccgggattacaggctgagccaccgcgcccggcccccaatagttattttttctcatcgtctccccactcccacccttcacc

SEQ ID NO: 754032 - DNA, 516 bp, Homo sapiens
tgcaagaagtttttaatttttctaattatttttaaacttttaagtttaggggtatgtgtgaaggttgttctgtaggtaaacatatatcacaggggttttttgtacagattattttgtcacccaagtactaagctgagtaccgaatagtttttttgttgttgtttgtttgtttgtttgtttgttttttgagatggagtctcgctgtgtctcccaggctggagtgcagtggcgcgatctcagctcactgcaagctccgcctcccgggttcatgccattctcctgcctcagcctcccaagcagctgggactacaggcgccygccaccacgcccagctatttttttttgtatttttagtagagatggggtttcaccgtgttagccaggatggtctcgatctcctgacctcatgatccgcccacctcggcctcccaaagtgccgggattacaggctgagccaccgcgcccggcccccaatagttattttttctcatcgtctccccactcccacccttcacc

SEQ ID NO: 754033 - DNA, 614 bp, Homo sapiens
actgtcggcaaagcctctaaatgtcagtggagaagctctgatccaagctaccatgtggatgaaccctcaaaaacataatgctgggctgggtgcagtggttcacatctgtaattccaacactttgggaggccgaggtgggcggatcacctgaggtcaggagttygagaccagcctggccaacaaggcgaaaccctgtctctactaaaaatacaaaaatttgccaggcctggtgacatgtgcctgtaattccagctattcgggaggctgaggcagagagaattacttgaacctgggaggtagaggttgcagtgagctgagatcgtgccactgcactccagcctgggtgacagagtgagactccatctcaaaaaaaaaaaaacacacatacacaaaaaaaaaaacccatcatgctgggtggacgaagatggacaggaaaggcacacactgtatgattccacttatataaaatatccaaaataggcaaatgtacagaggcagacagtagctgagtggttgtcaggggctggggggaggcgggagtgagaagtgactgctgatgtatgcggggtttccttttggggtgatgcaaatgttctggaaccagatagaggtgg

SEQ ID NO: 754034 - DNA, 614 bp, Homo sapiens
actgtcggcaaagcctctaaatgtcagtggagaagctctgatccaagctaccatgtggatgaaccctcaaaaacataatgctgggctgggtgcagtggttcacatctgtaattccaacactttgggaggccgaggtgggcggatcacctgaggtcaggagtttgagaccagcctggccaacaaggcgaaaccctgtctctactaaaaatacaaaaattygccaggcctggtgacatgtgcctgtaattccagctattcgggaggctgaggcagagagaattacttgaacctgggaggtagaggttgcagtgagctgagatcgtgccactgcactccagcctgggtgacagagtgagactccatctcaaaaaaaaaaaaacacacatacacaaaaaaaaaaacccatcatgctgggtggacgaagatggacaggaaaggcacacactgtatgattccacttatataaaatatccaaaataggcaaatgtacagaggcagacagtagctgagtggttgtcaggggctggggggaggcgggagtgagaagtgactgctgatgtatgcggggtttccttttggggtgatgcaaatgttctggaaccagatagaggtgg

SEQ ID NO: 754035 - DNA, 614 bp, Homo sapiens
actgtcggcaaagcctctaaatgtcagtggagaagctctgatccaagctaccatgtggatgaaccctcaaaaacataatgctgggctgggtgcagtggttcacatctgtaattccaacactttgggaggccgaggtgggcggatcacctgaggtcaggagtttgagaccagcctggccaacaaggcgaaaccctgtctctactaaaaatacaaaaatttgccaggcctggtgacatgtgcctgtaattccagctattcgggaggctgaggcagagagaattacttgaacctgggaggtagaggttgcagtgagctgagatcgtgccactgcactccagcctgggtgacagagtgagactccatctcaaaaaaaaaaaaacacacatacacaaaaaaaaaaacccatcatgmtgggtggacgaagatggacaggaaaggcacacactgtatgattccacttatataaaatatccaaaataggcaaatgtacagaggcagacagtagctgagtggttgtcaggggctggggggaggcgggagtgagaagtgactgctgatgtatgcggggtttccttttggggtgatgcaaatgttctggaaccagatagaggtgg

SEQ ID NO: 754036 - DNA, 633 bp, Homo sapiens
tggggacacaaaacaggcaggatgggcagggggtggtgaatagaaaagattgggtacataaggcagaagagcctggggctttataggggtggcccctgaagcctgtgacccaggagggaccaggcccaggccacagtccaggcaggagagggcgtgtccccatctgtgaacccccacccccagaccctggccatggtgcttaggagggaggcagcatggagcttcgggtctgggctctgggaccacctcttcctccctgtgtgaccgtgggcaaacgacagcrcccctctgagcctcagtttcctcatctggagcttgacttcactgtacgtcagtgtcaggactgggcacagagtgggtgcagcgtctgtggggcagcatgggggtgctgaggcagtgggtgaggggtaggctcgtctggaacatgccgttagcagttcccagcctctttgaaaacaggaaaccggctctcatgggagcccccagctgtgcttcctgagtctccgcgtgacgtgcgcgtgctggggcagtgtgggcaggcatgtgtgtgtttgcgtgtttgcaggcggcctggaatataggtggatccgcctgcgtgtgcatatgtgtgtgtgtgtgtgtgtgtgtcgggcc

SEQ ID NO: 754037 - DNA, 612 bp, Homo sapiens
caccaacaaaattaagacgcaacaaatctgtcacccttgaaaattcccttgtgcctctttgcagtcaactcctttctttttttttttttgagatggagcctggctctgtcccccaggccggacttgcagtgacgctatctgggctcactgcaagctccgcctcccaggtttactccattctcctgcctcagcctcccgagtagctgggactacaggtgcccgccacyacgcctggctaatttttttgtatttttagtagagacggggtttcaccatgttggccaggatggtctcaaactcctgacctcgtgatccacccgcctcggcctccgaaagtgctaggattacaggcttgagccaccacacccggcccagtcaactcctttcttgctcctgacaatcactgctctgtttttggtccctgtggtgtgtcttttgcaggatgttatataaatagaatcacagagtgtatagcctctgagtctggcatcttccatttagcatgatgcatgtgagattcacccatgttgtggcatgtatcagtagtgtatgctttttcattgctgagtagtactctattgtacaaatataccacagtttgtctatacattc

SEQ ID NO: 754038 - DNA, 567 bp, Homo sapiens
gggctatgtgcttatttcagcatttcaatgcctgtcattacttattgcctctaggtgtggagtaggggggatgcctgaccctgcacaccagctgtgtagatgtgggagaggggtttcttccagatgcagactctcagtaatatccttgtttctgcctccatggctcactcctgccctccactgatctggccactctctcagctcatcccactgatgacaccacgacgctctctgagagaccatccccaagcacagacgtccaracagacccccagaccctcaagccatctggttagtaactgcctccccagactggaaacaggctattttctgttcactgtgtatttccagcacctggagtacagcccagcacagaatagttctcagtaaagacgtgatgggaaagtaaatgacttcaagccaggcagagggtgggcacatgataaatgtctgaatagataagtgaatgcataaattattgctgcatacaaaccacctaaaaactcagtggcttaaaaggataaccatttatttagctctcatttctgcaatttggaaatctagggt

SEQ ID NO: 754039 - DNA, 567 bp, Homo sapiens
gggctatgtgcttatttcagcatttcaatgcctgtcattacttattgcctctaggtgtggagtaggggggatgcctgaccctgcacaccagctgtgtagatgtgggagaggggtttcttccagatgcagactctcagtaatatccttgtttctgcctccatggctcactcctgccctccactgatctggccactctctcagctcatcccactgatgacaccacgacgctctctgagagaccatccccaagcacagacgtccagacagacccccaraccctcaagccatctggttagtaactgcctccccagactggaaacaggctattttctgttcactgtgtatttccagcacctggagtacagcccagcacagaatagttctcagtaaagacgtgatgggaaagtaaatgacttcaagccaggcagagggtgggcacatgataaatgtctgaatagataagtgaatgcataaattattgctgcatacaaaccacctaaaaactcagtggcttaaaaggataaccatttatttagctctcatttctgcaatttggaaatctagggt

SEQ ID NO: 754040 - DNA, 567 bp, Homo sapiens
gggctatgtgcttatttcagcatttcaatgcctgtcattacttattgcctctaggtgtggagtaggggggatgcctgaccctgcacaccagctgtgtagatgtgggagaggggtttcttccagatgcagactctcagtaatatccttgtttctgcctccatggctcactcctgccctccactgatctggccactctctcagctcatcccactgatgacaccacgacgctctctgagagaccatccccaagcacagacgtccagacagacccccagaccctcaagccatctggtyagtaactgcctccccagactggaaacaggctattttctgttcactgtgtatttccagcacctggagtacagcccagcacagaatagttctcagtaaagacgtgatgggaaagtaaatgacttcaagccaggcagagggtgggcacatgataaatgtctgaatagataagtgaatgcataaattattgctgcatacaaaccacctaaaaactcagtggcttaaaaggataaccatttatttagctctcatttctgcaatttggaaatctagggt

SEQ ID NO: 754041 - DNA, 574 bp, Homo sapiens
acagcccactcagataatacaagctgatcttatcttgagatccttaatttaattacatgtacaagctgtgtgcggtggctcacacccacaatcccagcactttgggaagccgaggtgggcagatcacctgaggtcaggaattggagactagcctgaccaacatggtgaaggctggccaacatggtgaaatcccatctctacaaaaaaaaaaaaaaaaaaaattagctgggtgtggtggtgcatgcctgtaatcccagcyacttgggaggctaaggcaggagaattgcttgaactcaggaggcagaggttgcagtgagccgagattgcaccaccacactccagcctgggcaacagagtgagactccatctcaaaaaaaaaaaaaattacatgtacaaagactccttttccaaataaagtcactgtcacaggttccgagggttgggatgtggacatatcttttggggggctattatactacttactacaacactcaagtaaaaagaccacaaatgtccattaaaggtcctgaataagaatgatcataccagctttatccataacagccaaaacctt

SEQ ID NO: 754042 - DNA, 662 bp, Homo sapiens
aactggatccggttagtcccattctgtcccccagccctctcccggacccctccctcaaaactgttcctcccacctcctacgccaggcccaacccttggtctcagcaggtgacctgtttcctccttcactgggaagacagaagtggccccaggagaccctcccgccaccacatccagccacctccagtcctgatggctgcattcccccggccctgtgaatggacctttgtgctcccagataaagcgccccccattctgggcgctaaagcccagccctcacttccaaaaggaaatgccccrcaactcccacctccctgcctgaatccccacagctcctctctccaccagatgctggaggtcattcttcctcctacctgcactctctgcctccccccatttctcccatccccttgacagcaaacaccccaagttctttattcaccagctcccctttctctcctttctccttcccttgaatcccgccccccacaatccagcttgcagacacaccaccgcaccagaacacctttggacaagaccaccgtgacctcccttgctcctgagcccagcagtccattctcagtcctggtcatctgaaccaccaggcacaaccactgctcgttccctgcttcctgaaaccttccatcagcctccaactgccct

SEQ ID NO: 754043 - DNA, 619 bp, Homo sapiens
tatccaattttcccagcaccatttattgaagagactgtccaatcctcagtaaatgttcttggcacctttgttgaaattatgttgatggtaaatatgtggatttatttctgtgttgtctatttagttccattggtctatgtgtctgtttttatgccagtacaatactattttttaaaaaactatagctttatagtctattttgacttcaaaaagtgttatgcctccaacttttttmatttttctcagggttgctttggttatttggagtcttttgtggtttcataccaattttaggactgctttttctacctctgtgaagatgtcgttggtatttttatagagattgcattgactctgcagattgcttttggtaatacgctcatttttacaacattaattcttccaatcatgaacatgagacatcttttcacttttgatgtcttcttcactttctgtcatcaatgttttatagcttttttggtagagatctttcacctctttggttaaatttattcttttttttggtggctattttacatgtgattgacttctcgatttcttcctttactaatttgttgctgatgtgtaggaatgctactgatttttgtatgtcgatttt

SEQ ID NO: 754044 - DNA, 505 bp, Homo sapiens
acccagtttttgtcaacagagtggcaacagcaatgtatgggtgcaagtgggcatgacttctctttctcatttttcctctgctgacagataatgccaagaaagctttaaattgagccacatgttgacaatagaatgtttcttattccctgaataactgtgtggtgcagagctccttgctaacctgtgtggacctgtgtggatcttgaatgaggaaaagaaaaagacaaaagccaaaaactctccttgtgctgggctgctgatattgtaaagtgtttctgtgttacaatagccagcattaacttagccagcttttacactgatgaaatcatgcaacatctcacaaggctggagagtggcaatgtcaaktattaagcccaaagacatggaacttagagtttgattttaacctaatacaacctacttctcccccagtagcagggaagtgtataagggggtaagaggatggtcaaaggactgtatggatcccaagtccccagggaggtca

SEQ ID NO: 754045 - DNA, 637 bp, Homo sapiens
catgtgaagtcacggcaagaaggcaactatatctgcaagccagaaaaagaggatagagggccaagagaacagagctgctgttatctactgaactgggggagacacaattcagttggtaacaatggctacaccactttgcattcccagcatcctttatagagttcttccactctacrtacttgtcagcatttggtattgtcagtttttaagattttagccactttaatagatgtgtaggctaatgtcttgttaatgtcttcattatattcccgaatgacatatgatgtgcatctttacatatttatttgccctgtgtatgtcttctctggtaaggtatttgttcaggtcttttgaccatttttcagttgggtcgttttgttttctcactgttgagttttaagttgttcacctcacatattttgatgctttgttatgtacatacacattaaggattattatatcttcttggagaattgacctctttatcattatgtactgcccctctttacccctgaaagtttccttgctctgaagtctgatattaatatagttactcctgctttattttgatgaatgttcacatggcatatctttctccaccccttaacttttaacctaccagtatctttatatttaa

SEQ ID NO: 754046 - DNA, 561 bp, Homo sapiens
tagaagtgaggtcatgcaggatttgtgtttctgtgtctagcctatttcactaggcataatgtcctacaggttcatccgtattgttgaaaggagcaggatttctctcttttttaaaaggctgaatagtattccattgtatattttataaaacatagaaagatagatggatggatagacagacagatagatagcttttgtgtgtgtgtatatatatcacattttctttatccattcatccattgacaggcatttaggttgtttccctatcttggtgaccatgaataatgcttcaatgaacctaggggtgcctatctattgatgttatttcctttagatatatacccagaagtgggatttctggatcatacggtagctctatttttaagtttttgagaaacctccattttgtttttcataaaggctgkaccattttatatttttaccaatagtgcacaagggttccaatttcttcacatctttgcaaacacttacgatttcttgtcttttggatagaaaccatgctaatgtgtgtaaggtggtatgttgtggttttgattgcca

SEQ ID NO: 754047 - DNA, 551 bp, Homo sapiens
ggagtcatggtggtggatccttcttgaatggcttgggaccattcccagtggtaacgcgctcacaggagatctggttgattaaaagagatggggacctccctgctcttggtcccactctcacatgtgacttgcctgttatagctccaccttctgccatgaatatgagcttcctgaggcctcatcagaagctgagcaaatgctggtgccatgcttgtacagcctgaagaactgtgagccaaataaacctcttctctttacaaattaccctgtgtcaggtctttctttaaagcaatgcaaaatggscaaatagagatagaggcctgatgtggtggctcacacctgtaataccagcactttgggaggtcaaggaaggagaattgattgaggcccagagttcaagaccagcctgggcaactgagtgagatcttgtctctacaagaaaactgaaaaaattagccaggcacagtggctctcacctgtggtcccagctactcaggaggctgaggcaggaggatcacttgaacctaggaactcaaggctgcagtgaccta

SEQ ID NO: 754048 - DNA, 640 bp, Homo sapiens
agatactatgcttcttccacagtttttgcaatctgcagaccaggagattccctcacgtgcctacaccactagggccctgggcttcaagcacaaaactgggtggctgtttgggcagacactgagctagctgtaggagttttcataccacagtggtgcctggaaccccagagagacagaaccatacactcccctggaaagggggctgaagccagggagccaagttgtcttacttgatgggtcccactcccacagaacccagcaagckaagaaccactggcttgaaattctcactgtcaacacggaagtctgaagtcgaccttggatgatacagcttggtggggggaggggtgtctgccattactgaggcttgagtaggtgggtttcccctgaccctgctaaggactggcctgaactaaacacagtgaggcaaagtgactgtggtcagactgcctcgctagatcctcttcactaggtggggcatctctgaaagaaaggcagcagctccagtcagaggctggcttataaataaaaactcccatctccctgggacagagcacctgggtgaaggggcagctttggacacagcttcagtggacttaaacgttcctgcctgttggctctgacaagaggagtggatcct

SEQ ID NO: 754049 - DNA, 632 bp, Homo sapiens
tgcaagcatttgcaattttaaaaatagctgtttaaagtcttcatcagataatcccaacatctgtgaagtgttgacagtggttgattgggttttccaggcaagttgacattttcgtggttgtttgtatgctgagtaattttggattgcatcctggactttttgagcattatgtggtgatactctaggtcttatttaagctatatgggaaatattgatatttttgttttagccaacagccaatcttactttcaggccacaagttccaatccccaacctgtaggccatgarcatcacgtcagtttttaaagcccccgtgccatttcctggtcagatctcctgggcgtgcactgcccagtggtcattctgggacccgagtggttagttcagttctcaaactctttcgtaagtcaaactatggtatatgcacaggattcacagatgctcgattctagagagttctggagacataaaccacttcatggggtgactttcctgagcttctggctctgtgctgtctacctggtacttttctgattccttgcggtttactgttgtacacgtctgccattgggcccacttcccagcccacatggagagaggacagagagagaaaaggacaacggttgccccac

SEQ ID NO: 754050 - DNA, 629 bp, Homo sapiens
ctacccagtgctttttggacatcatgcataagactgcacagactctcctgccactctgcagacaggaaatgcaggccctgcacatgttagcctggctggagccagcatctgggcccaggtatccaagtcggtggcctttggcccacttgctggtgtgagcatggcctcgtgcagcatrgcagtgtgcagtggtggccagggctgcagccccagcgattcttctgccagtcactctgtgccctcagcacggggcctctgatctgtgcctgtttcctcacctctaaaatggatgcaagaagagatgctccagcatcttggctcacgcaggacaggctagggggtgcaggaccgtcgccccggtgtggattttcagttgcactttcagatgcatctcggcatgcgcagtgggttacagcccctcaggtcatctccccacagtccctgccccagaggttgtcgaggcgtgtgtggagcaatgcctggcgcagtggaaatgctgtcagtgttagccactgtgactggatttaagttgattattttggatcaagtgttatcacacttcagggtggccctgagaagcaagaaggggtcaggactcaggaagcaccatctctcataagccctggggg

SEQ ID NO: 754051 - DNA, 613 bp, Homo sapiens
ctgatcaatcattcagtgaacgtgtcctgagcaggtcccctggctgggccctgggatggccgctggggactcagcatgaaccagacccaccagccctgcccctggggaccccaggggtgtgaggagtgatggggcagttgtcttgggacccagcccccttggtgtttgtggcccaggctgctctcagtgcgtggactgggggccctgctctgccggggtgggttgcaggtggtaggagtactgctgagatagtgacccggagggcccagatctgtcctaccctcacccctgaccccaggcggcaaaagcaaatccgtggagctggaggatgtgaagttccaccagtgtgtgcggctatcacgcttcgagaatgaccgcaccatctccttcatcccacccgacggcgagttcgagctcatgtcctaccgtctcaacacccacgtgagtgcgccaccctggggctgggctgtcrgcagactcctcctccccttcacctccaggaggtgaagcccaggcaggcgccagggccagccccaccccacgctccatgagctgcctggctctgcagagatggagtctgaggacttgggactccgagctttctgaggggcac

SEQ ID NO: 754052 - DNA, 562 bp, Homo sapiens
tttaaagtatatgattcagtgggtttggggcacactcatgaggttgtacaaccatcacctatacctaatttcagaacattttatcccctcaaagggaaaccccgtctccaactgagttggccacctcagaagtgactgagaagcagtcacttatccccctccccagaaccctgacaaccacaaatctgctttctgtctttggattcgcctgttttggacagccatgaagtgggcaaaataacattgagtgaaatctttgtgatggagaaaaataggtcatgacatggtaggtgggacccggagggtcattttagccgagaaggtcaaggaggttctctctgaggaggtgacatttragctgagaccagcaggagataaaggagtggctgaagggaacagcatttgcagcagagggaacagacagtgccaagaccctgaggcaggaccatgcctggtgtgatcatggaactgtggggaggctggtgtgttggggaggctggtgtgcaggaggagatggggtcacagggtggccggggccagaccacagagccttgagggcctc

SEQ ID NO: 754053 - DNA, 569 bp, Homo sapiens
cctcactgcccttcgctccacggtttgtttccacacagcaccatgtcagctccctatgagttaggtacagatggacaggcgggtggatgaaaactgaaggtacaacttgcctgcctgccggacagaggcagctgtgggacctgcgttcctccaggcaaggcaggcagctcagctgaccacagmtggctgagtggctgccagggatcagtaactcagggaaagagagatgagcgagaatggggtctcagtcctcagggggctcctagtcttctgggaggaacatgtttgaatgccctgagtcagaaccagtatctaaagagaagtccacacaacgttcattggaagatttaacacatggagagttcaatgcagcagggatccagttggaaaaaaaaaatcaaggaaggctttctggaggaggcaacatataagatttttctttctaaatatatgtgaattgattcacttctctccatcatcacctctaccaccagggtcttagatgtcatatgtttcatctcttctgcagagtatttccattggctccttatccccctccccattttctt

SEQ ID NO: 754054 - DNA, 582 bp, Homo sapiens
ttgcatgtgtctctttatcttgctgggtctttcccaggcacatgagatgcatgaactagagtgtctttgttctgtgatcccactaataaccctttctctctctttttttttaaggaagccatgaagtctcgcttgatgatgcataagagtagacaaaggagaaggtgcccagaattcacactgtaataggcatggcctatgccaaagctttcagtgyttccccctaggccctgattggcatctctttccattctaaaaaataacacacttacaaagatgtacttaacattgacacagggaacccagagataccgattacaacatgttcaatgggcagttggatctgcattttattagtcaaaataatctatataagattcctttttgtgtctatcttaaagggtaatgaggacttccagtttcagctccaacaagaaaagagcttggaagtcaacgtttttgtcccaacaagaacagaaagttggacaaactgaaaagaaaggacttttctttgacccattgatgaggtggcagggcaaagccacgctgagacctggaaagacaggggtatctggacagaca

SEQ ID NO: 754055 - DNA, 554 bp, Homo sapiens
acagcctccgcctcccaggttcaagcaattctcctgcctcagcctcccaaggagctgagattacaggtgcccaccatgcccagctaatttttgtatcttttttttttttttttgagatggagtcttgctctgtcgcccaggctggagtgcagtggcgccatctcggctcactgcaagctccgcctcccgggttcatgccattctcttgcctcagcctcccgagtagctgggactacaggcacccgccactacgcccggctaatttttgtatttttagtagagrtggggtttcaccgtgttagcaaggatggtctcaatctcctgacctcgtgatccgcccgcctcggcctcccaaagtgctgggattacaggcttgagccaccgcgcccggccaatttttgtatttttactagagacgggctgtgctcggtgtcgggtgaagctacacaagcctgaggctgagctgaccgccaccttctgcctctcctgctccacctacctggaactgggcgctgatgcttggtggctttttcttcttgtgcaggtgcagtagg

SEQ ID NO: 754056 - DNA, 657 bp, Homo sapiens
tggattatttgctttttcctgttgagttgtttgagttccttgtatagtctggatattagtctcctgtcagaagaatagtttgcgaatattttctccaattcaacaggttgtttcttcactctaattatttcttttcctggcagaagctttttgtttattaagtcccatttgtttatttttgtttttgttgcctgtgcttttcagaacttagtcataatttctgactcttctgaccaatgttcaaaagagttttccctaggttttcttgtagctgttttttttttttatagttttgggtcttacatttaagtgtatgattcattttgagtttttttttaatatggtgagagagaagaatccagtttcattcttttgtgtgtgggtatacaattttcccagcaccatttattgaagaaggtgtcctttcctcaatataagttcttgtcagttttgttgacaatcaattggctgtatacatgtggccttatttctgggttatattccattggtctatgtatctatttctataccaatatcawgctgttttggttattatagccttgtaatatactttgaagtcaggtaaagtgataccaccagcttgttcttttttctccggatagctttggctattcaggttctttttggatccatatg

SEQ ID NO: 754057 - DNA, 502 bp, Homo sapiens
tgtgcttttcagaacttagtcataatttctgactcttctgaccaatgttcaaaagagttttccctaggttttcttgtagctgttttttttttttatagttttgggtcttacatttaagtgtatgattcattttgagtttttttttaatatggtgagagagaagaatccagtttcattcttttgtgtgtgggtatacaattttcccagcaccatttattgaagaaggtgtcctttcctcaatataagttcttgtcagttttgttgacaatcaattggctgtatacatgtggccttatttctgggttatattccattggtctatgtatctatttctataccaatatcatgctgttttggttattatagccttgtaatatactttgaagtcaggtaaagtgataccaccagcttgttcttttttctcmggatagctttggctattcaggttctttttggatccatatgaattttataattgttttttacaattctgtgaagactg

SEQ ID NO: 754058 - DNA, 545 bp, Homo sapiens
ttggctgtatacatgtggccttatttctgggttatattccattggtctatgtatctatttctataccaatatcatgctgttttggttattatagccttgtaatatactttgaagtcaggtaaagtgataccaccagcttgttcttttttctccggatagctttggctattcaggttctttttggatccatatgaattttataattgttttttacaattctgtgaagactgacattggtattttcatatggattacattaaatctttagattgctatagaccagtgtgggcttcttaamtatcttaattcttccagtcatgagtatgggatgtttttccatttgtttgtgtcatcttcaatttctttcatcagtgttttttagtttttcctgtatagattttcacctggtaggtcattaagagcatattgtttaatttccatacatttgtcttgtttccagagttcctcttggtgctgacttgttgttttgttccattgtggtctgagtatacattgagtaaatattgattttttttttaatttat

SEQ ID NO: 754059 - DNA, 607 bp, Homo sapiens
tcctgagggtctgaacaacaggaatcatgacttgaattattcttggtcagttctcactcaggctatggtagagtaactggcaccctcccagcataattagaaaactatacatagtatgtaaaatatgtgtttcacaaggaaaacaggcagacaggactgtgacatctgaaagaaaggaaaccaatgaggtgagtctcatgatcaaatgacaatttccaaactgcagtacgtggaggataaattcaagcagaacacaagagtcttatgaaactgtggaggcagcaacygcagttcaagtgggaatgatgtgggtggaatttgtagagcagagtacagagagaaaaaactacacagagaaagaactccaaaaaatatgcatagaggtccccttgaatctttggctgaatactaagctgtatgcacagagtgaaaggctgaaagcctgggtacgtgctgctggagaaggaacagctatgagaaagctggaatgaaggcaaatataaactcaccctgccaaagcttttgtaaaaatctttgaatggtcaagacaatccactaataaattaactgcattcgagaacaaagctcaacaatttttaaaggaaga

SEQ ID NO: 754060 - DNA, 614 bp, Homo sapiens
tacatcttcaaaggtcactggttcctaaaaatccagattcttgttcagccacaggccatccgcatccacgacaaaagaaagacaggggaggctgaccaggccagtgaaagcacagaatggtctacaagatgacccaagggcattttgggagtctcatcctgagttcctgtctttgtctgaaaccccaagcaaacccaagcttgactctattcaggttacaataaggagagcaacacatgagatctctgtagcatatgaaaatctgtccattttatttatttatttatttatttaatttatttatytattgttttgagacagagtctcactctgtctcctagtggagtgcagtggcgcaatcttggctcactgcagcctccacctcccaggttcaagcgattctcctgcctcagcctcctgagtagctgggattacaggcgcataccaccatgcccggctaatttttgtatttttagtagagatggggtttcaccatgttggtcaagctggtctcgaactcctgaccttgtgatctgcctgcctcggcctcccaaagtgctgggattacacatgtgagccaccgcacccggccctatttttcttttctttttttt

SEQ ID NO: 754061 - DNA, 614 bp, Homo sapiens
tacatcttcaaaggtcactggttcctaaaaatccagattcttgttcagccacaggccatccgcatccacgacaaaagaaagacaggggaggctgaccaggccagtgaaagcacagaatggtctacaagatgacccaagggcattttgggagtctcatcctgagttcctgtctttgtctgaaaccccaagcaaacccaagcttgactctattcaggttacaataaggagagcaacacatgagatctctgtagcatatgaaaatctgtccattttatttatttatttatttatttaatttatttatttattgttttgagacagagtctcactctgtctcctagtggagtgcagtggcgcaatcttggctcactgcagcctccacctcccaggttcaagcgattctccygcctcagcctcctgagtagctgggattacaggcgcataccaccatgcccggctaatttttgtatttttagtagagatggggtttcaccatgttggtcaagctggtctcgaactcctgaccttgtgatctgcctgcctcggcctcccaaagtgctgggattacacatgtgagccaccgcacccggccctatttttcttttctttttttt

SEQ ID NO: 754062 - DNA, 504 bp, Homo sapiens
ggaactctgggggtccccatagaagtctcctagccttgggttctttaggggttttggaggacagagtccctctcctgttttagagacagaggaagatgaaggggtgggggatacagccactgctcatggctgacaactcaggtctcccccactacaaccaggctgcacgcgagaaggggccgaatccatttcactctctgcggggtcccaagtgcctgtaagagcatcttgtacactgttggtgctcaataaataaattatccatgactggataaatgcrcaccaccaagggcagacaagactaaattatgtaccattctaatgtgctgagacatctgcaaaatagccatcctgggaaaactgggactcacagccaccgggtgctgaagaggtgatgctttggccacgtcctggccccttgcatttctgcactaacttccccatcactgaaagcaattgcgatgtgtcttcttctggcatttaagaggctaaagatgcttattg

SEQ ID NO: 754063 - DNA, 633 bp, Homo sapiens
ctttctcctctatttatttctcacaaccctgtcacctttcttttctttttttttttttttgagacggagtctcaccctgtcccccaggctggagtgcagtggtgcgatctcagctcactgcaagctccgcctcccaggttcamgccattctcctgcctcagcctcccgagtagctgggattacaggtgccaccaccatgcccggctaattttttgtatttttagtagagacggggtttcactatgttggcaggctggtcttcaaactcttgacctcgtgatccgcctgcctcggcctcccaaagtgctgggattacaggcgtgagccaccgcgcctggccctgtcacctttcaacacactacatgttttactacacatcttgtttcttgtctgtctcctgtacttgattgtcagctctgccagcacaatagctgttgtcttttttttttttttttttttttttggagagatgggggtgggtctcactttgttgcccagggcagtctcgaactcctgggctcaagcgatcctcctgcctcagtctcccaaagtgctgggatgacaggtatgagccaccgtgcccagcctacaacgtttgtcttcatcactgctggagaacttaaaaaaggccct

SEQ ID NO: 754064 - DNA, 633 bp, Homo sapiens
ctttctcctctatttatttctcacaaccctgtcacctttcttttctttttttttttttttgagacggagtctcaccctgtcccccaggctggagtgcagtggtgcgatctcagctcactgcaagctccgcctcccaggttcacgccattctcctgcctcagcctcccragtagctgggattacaggtgccaccaccatgcccggctaattttttgtatttttagtagagacggggtttcactatgttggcaggctggtcttcaaactcttgacctcgtgatccgcctgcctcggcctcccaaagtgctgggattacaggcgtgagccaccgcgcctggccctgtcacctttcaacacactacatgttttactacacatcttgtttcttgtctgtctcctgtacttgattgtcagctctgccagcacaatagctgttgtcttttttttttttttttttttttttggagagatgggggtgggtctcactttgttgcccagggcagtctcgaactcctgggctcaagcgatcctcctgcctcagtctcccaaagtgctgggatgacaggtatgagccaccgtgcccagcctacaacgtttgtcttcatcactgctggagaacttaaaaaaggccct

SEQ ID NO: 754065 - DNA, 532 bp, Homo sapiens
ctcgccggacatggtcccgccttcggagagaggcacgcccggcccggtgagtggtgctggtcatgccctgggggtattgacatcccttcccaccgcctgccaccaggtggcactggtggcacacatgagcccacggtggcgggtgctgcctgtggtccctgccttcctcaacaggggcccccgggagggtggcttggctgcccaggtatttccccaggcagggggctgacacttttgctacctcaccctgtgtactaaagggacarttttatccctgggcccgagaactgctggtgcctcctgtcaggtgatgtcaggttgctaattagagatctcgcctctgaattcaattctaggacagttcaggctctctcggctccggggagtttactggcgtgaaggagcttgatgacatcagtcaagagattgcccagttacaaaggtatgttggaaacggcccttccctccacatccagatgttacacgaactctcccaggttgttatcggaaatatcagaggctcacctggaag

SEQ ID NO: 754066 - DNA, 502 bp, Homo sapiens
taaaatggatcctatcagaagcccaacaacaaaaaaaaggattaaaatgtcctgagttgccatgttaggagtttttttggattttgttttgttttttattaaagagacttaaaacacagaatatacttttccattcatgtmtttattgtcttggggatacacctaattaacagcagaagaaaaacaatgtaccctgaaactaactgtaaatttattgaagacaggctccacatctttgtctcccacatcttcttcccctattttgtgcagtggttcacatatagtaagtattcaattaagttgaaaagcaatgcaagtttcaattcacattaatttggaggggttgcactgatttaaggagcagctgagatgaaaaggctagcttcgatcttttctgatttctggctagtgaggcacaccatcttgaaaacttcctctgctgaaccttgcataactgctgtccactgcggcattcttaatgtcttgatttgtttccatttct

SEQ ID NO: 754067 - DNA, 502 bp, Homo sapiens
taaaatggatcctatcagaagcccaacaacaaaaaaaaggattaaaatgtcctgagttgccatgttaggagtttttttggattttgttttgttttttattaaagagacttaaaacacagaatatacttttccattcatgtatttattgtcttggggatacacctaattaacagcagaagaaaaacaatgtaccctgaaactaactgtaaatttattgaagmcaggctccacatctttgtctcccacatcttcttcccctattttgtgcagtggttcacatatagtaagtattcaattaagttgaaaagcaatgcaagtttcaattcacattaatttggaggggttgcactgatttaaggagcagctgagatgaaaaggctagcttcgatcttttctgatttctggctagtgaggcacaccatcttgaaaacttcctctgctgaaccttgcataactgctgtccactgcggcattcttaatgtcttgatttgtttccatttct

SEQ ID NO: 754068 - DNA, 572 bp, Homo sapiens
attaacaaaaatgtacatttatcccccaaatctgcatataaataaaaatcaatttcagtataaaaatctttttagaaagctagacttaaaaattaggaaaataataaaagttagagagctttgtccttagttttgggataatttttcttctcatttggaatgggaaagacccttccctgactcccagcaaccagcccaacgtgcctcggcctcagggagctgtgcaattgcwgttccctgcctctcttttggttccaaggaatataattgaccctcacactcccatattcttatttaggcatccttctctttaaagaaaaaaaaaaaggcaccagtgttgatttggctacatatagacctcacttctgagaaaagaatgatgaaatatgttgtccagatgtcccttttagagatatcatgaaggtttgcttaatttgcttacaatgattgagtaaagaaagctcaccaatagcactttaaattatacatcaatattgcgatacaatcccaacattcatattaaaagagtacttaaaaaaagtcaacgaggccagcgcggatggttcaagcct

SEQ ID NO: 754069 - DNA, 669 bp, Homo sapiens
caggcaagcggatttgggtgtgagttctgtcggggcgggggtctgagtgggacctgcaggagcaataccgtgggactttggtggcatctgggctggggtctcccaccttctcccacccacccaccggcaacaagaccccacgcccacttcttttctgcaggtttcttcctgacgtcrgcatgctccagctgcgaccagatgaggggcacagagtcgcccacggcctgagacttgaaactgcgcttgagcgcctggagtgggtgaggaagggacggttagacaggggcagccccttgggcccacaccaccccgccggctcaccttggccttcctctgtctctgagcagccaccgtcttatgcggaaagttgcgctcagcaaccctgactgggaagagaggagacatcctgggtcagggaccccaggggagggcacgaggacctaccccaggagcttgtggagggccccaccaaggaagggggaagagccaaagggtgcagctctgtccctgcgacggggagaacccagaggtcctgacaaacagcagggcctgctcacctgcatgtctgctgatgggctggtcctgcagagatagagggaggcaggaggggcccgggcttccacatctccataacctacccagcgagaggcctaggccccctcctgctcc

SEQ ID NO: 754070 - DNA, 669 bp, Homo sapiens
caggcaagcggatttgggtgtgagttctgtcggggcgggggtctgagtgggacctgcaggagcaataccgtgggactttggtggcatctgggctggggtctcccaccttctcccacccacccaccggcaacaagaccccacgcccacttcttttctgcaggtttcttcctgacgtcagcatgctccagctgcgaccagatgaggggcacagagtcgcccacggcctgagacttgaaactgcgcttgagcgcctggagtgggtgaggaagggacggttagacaggggcagccccttgggcccacaccaccccgccggctcaccttggccttcctctgtctctgagcrgccaccgtcttatgcggaaagttgcgctcagcaaccctgactgggaagagaggagacatcctgggtcagggaccccaggggagggcacgaggacctaccccaggagcttgtggagggccccaccaaggaagggggaagagccaaagggtgcagctctgtccctgcgacggggagaacccagaggtcctgacaaacagcagggcctgctcacctgcatgtctgctgatgggctggtcctgcagagatagagggaggcaggaggggcccgggcttccacatctccataacctacccagcgagaggcctaggccccctcctgctcc

SEQ ID NO: 754071 - DNA, 669 bp, Homo sapiens
caggcaagcggatttgggtgtgagttctgtcggggcgggggtctgagtgggacctgcaggagcaataccgtgggactttggtggcatctgggctggggtctcccaccttctcccacccacccaccggcaacaagaccccacgcccacttcttttctgcaggtttcttcctgacgtcagcatgctccagctgcgaccagatgaggggcacagagtcgcccacggcctgagacttgaaactgcgcttgagcgcctggagtgggtgaggaagggacggttagacaggggcagccccttgggcccacaccaccccgccggctcaccttggccttcctctgtctctgagcagccaccgtcttatgcggaaagttgygctcagcaaccctgactgggaagagaggagacatcctgggtcagggaccccaggggagggcacgaggacctaccccaggagcttgtggagggccccaccaaggaagggggaagagccaaagggtgcagctctgtccctgcgacggggagaacccagaggtcctgacaaacagcagggcctgctcacctgcatgtctgctgatgggctggtcctgcagagatagagggaggcaggaggggcccgggcttccacatctccataacctacccagcgagaggcctaggccccctcctgctcc

SEQ ID NO: 754072 - DNA, 540 bp, Homo sapiens
atgcagcactgtttaattataaaagggccaaaaacaataaataatgatgaatgactttcatattttcataacaaacttttataagatatccatctacttaaagtcaggatgaattgcgacttttaaaacaaactcaaagagagtttacatgactaaattttgagagcaaattatgcaacaagacttcaggacattttgccaagcrtaacaattttgtgcctcttcctcaagtaccatgaagagtcccagaaaatctgaacgtcagccattgtaataggaaaggaaaatgaaataaaaggtttgtgaaaggaaggaaataacaaatccatgcaaattaaatagagtctaagaatgccattcctatttttagtgccaaataaaaccaaaatcttgctagtccatctaaatactgaactaatatttatttgcttttccttaatatgtatataaagatacacacacacacacacacacacacacacacacacacatacacacacaatgattaacactttttaacacaaataataattacataac

SEQ ID NO: 754073 - DNA, 540 bp, Homo sapiens
atgcagcactgtttaattataaaagggccaaaaacaataaataatgatgaatgactttcatattttcataacaaacttttataagatatccatctacttaaagtcaggatgaattgcgacttttaaaacaaactcaaagagagtttacatgactaaattttgagagcaaattatgcaacaagacttcaggacattttgccaagcataacaattttgtgcctcttcctcaagtaccatgaagagtcccagaaaatctgaacgtcagccattktaataggaaaggaaaatgaaataaaaggtttgtgaaaggaaggaaataacaaatccatgcaaattaaatagagtctaagaatgccattcctatttttagtgccaaataaaaccaaaatcttgctagtccatctaaatactgaactaatatttatttgcttttccttaatatgtatataaagatacacacacacacacacacacacacacacacacacacatacacacacaatgattaacactttttaacacaaataataattacataac

SEQ ID NO: 754074 - DNA, 614 bp, Homo sapiens
cttcctcttaggactttaggtctgcctacatgttgaagaagtttgagttttaggctttgggagcatttccttaaaaaccattgtcatgggggaggaaaaaaaaagggtagtgttaattctgtcttcacacactcagagatcatttggttgggctacattttatgagctatattccataaagatgctgcaaagttcaggtatctggtttaggaaagaaaaaaaaatcccttctytaacccaagaaatgtaatgcaaacaacttgggcctgtgtcacttagtcttctaagaagacttcaaggctgttataaagacccagtggtgggagaaacctgatccggtatagcggggccagaagaagctgcgggaccatgccgcggggacaaggcaaggagtttcgccaggatgttgatctcctggttatctacacttccgcctcagtatgatctgaattattaatgagaaagattaagatacagattccttccttcaagtgccttagtagtcacagacaggaggttaattataagactaaaagcaatcttgggttgttagaagaacttaaaggaaaacacctttcaacttcttgttatcaatcaatcatttttgtctttag

SEQ ID NO: 754075 - DNA, 577 bp, Homo sapiens
accagggatccacggccaccactagatgctaggaagatataaggaaggattctacccagagtctggagggagcacgggcctgctgacaccttgatttcagacttctagcctccagacctgagagagaatacattttgttgtttatagcyacccagtctgtggtactttgttacaacagccctaggaaactaatacacagttcaggaaaattaaacatgtttattatgtctcagaaatcgaaccaaataaacaaatagatatttactctgatagagctgggggaaagaaaattggttaaaatagaattttaaaatgagatttaaaaagcaagggaaaaagccatttttaacactataaagaagatgcaaaagcaaaactgaagaaaaagttcaacagcaaagggaattttaaaagacaatcaatctgaaataatgaatttagcgtgggcagcacttgcagtttaaaagaaaaagagaaaaaaaaatacctcagttccccttccttggttctgtaggtgcttttgtaaaatccgtggaaagtctccgaaagattgccagcatagtgaatgacaactgtg

SEQ ID NO: 754076 - DNA, 577 bp, Homo sapiens
accagggatccacggccaccactagatgctaggaagatataaggaaggattctacccagagtctggagggagcacgggcctgctgacaccttgatttcagacttctagcctccagacctgagagagaatacattttgttgtttatagctacccagtctgtggtactttgttacaacagccctaggaaactaatrcacagttcaggaaaattaaacatgtttattatgtctcagaaatcgaaccaaataaacaaatagatatttactctgatagagctgggggaaagaaaattggttaaaatagaattttaaaatgagatttaaaaagcaagggaaaaagccatttttaacactataaagaagatgcaaaagcaaaactgaagaaaaagttcaacagcaaagggaattttaaaagacaatcaatctgaaataatgaatttagcgtgggcagcacttgcagtttaaaagaaaaagagaaaaaaaaatacctcagttccccttccttggttctgtaggtgcttttgtaaaatccgtggaaagtctccgaaagattgccagcatagtgaatgacaactgtg

SEQ ID NO: 754077 - DNA, 577 bp, Homo sapiens
accagggatccacggccaccactagatgctaggaagatataaggaaggattctacccagagtctggagggagcacgggcctgctgacaccttgatttcagacttctagcctccagacctgagagagaatacattttgttgtttatagctacccagtctgtggtactttgttacaacagccctaggaaactaatacacagttcaggaaaattaaacatgtttattatgtctcagaaatcgaacyaaataaacaaatagatatttactctgatagagctgggggaaagaaaattggttaaaatagaattttaaaatgagatttaaaaagcaagggaaaaagccatttttaacactataaagaagatgcaaaagcaaaactgaagaaaaagttcaacagcaaagggaattttaaaagacaatcaatctgaaataatgaatttagcgtgggcagcacttgcagtttaaaagaaaaagagaaaaaaaaatacctcagttccccttccttggttctgtaggtgcttttgtaaaatccgtggaaagtctccgaaagattgccagcatagtgaatgacaactgtg

SEQ ID NO: 754078 - DNA, 569 bp, Homo sapiens
taatagcctattattctcattcaaggtggggtaactgaagcaaagaaccattcatgtaactttgctaagttcacacaacttgttggaatgcaatccacatctgtgtgagtataaactccctgctttttcagcttcaccaagatccctcttttttttttttttttttttttttgagacggagtctcgctctgtctcccaggctggagtgcagtggtgcgatcttggctcactgcaacctctgcctcccttycttttattggggcactatagtatatgaaatagatcatcaagaagtaattgaggttcttccagaatttcctgaacaatgaaattaacaagcactgttggtaaataataaaaatgctggattaatttgaaaaaaaaaaaagtactagaatgtttctattcaggccgcacctgaaaatgtgctacttatactaattaaaaatcctcaggcaagagacaactgtgcccaattttcaagttttttgttttgttttgttttgttttgttgttttgttaattgttgaccacgtcctgagttcagagcgaatcctctgggtgtttaa

SEQ ID NO: 754079 - DNA, 613 bp, Homo sapiens
ttttgaagaaaactatttataggaaactgagagctaaaacaatcttataataacatcccatttttggtttcacttagtacttaagataaaaattgcttctctgaatataattttgtcactttttttcctgtgtactttcttaatacagcaagtagactcagtaaaatctgatacaatatacttatttcactagtgaaattgaaagctgaatgactggcgaatttaaaagataatgagggttcttactaccagcgccaataagaaaggttagacatttgttaaacgtgatatggtgctatctgcctgcatgttaaccatatagttcaggggacacccagtggttaaaagtaggtaattccttgctgtggtacagtgttaaaaaattatggaaaaatatatttcttggctcagcagtgatcacacattgttgattttttctttctgaatgagtacatgttrggatgtgtgtgtgttttgagaaaatgtttggtcttgactttatatataaattttctttgaataataaaaactcaccaacaattttgaaaatgttagaaatatgattaaacttttcctttaattaaaacaaattagaaatgtggaacaagtgact

SEQ ID NO: 754080 - DNA, 660 bp, Homo sapiens
acattggtagcctgtctatcacaggtaccaaaaatatttgatggcatttcccatctttctacttttcaccatttccaccgccatcctcctcattcgagtccacagtatttcttgcatagatactacagtagcctccaaattcacctcatttttgcacttgcctccttagaatccattccacacagcaggcaaagttgttttcttaaaatgggcaaaaatcttcatccttcactcaagtgtgcaagaaatacacattttcttattttatttaaatcaacaaattctatcccaagctcctaccctactaggctggtgagaaattccaagacccccaatggttgcctaaaactgcagatagtactgaaccctaagtacactatgcatgaatttctttttccttcttcacagttttatggatagaagatttgtttctaccatagatcttagcaacctcaacatacaattttttccctccttattaagtcaagaactttcacattttcrcttaaaagaagtactttactgcttctcattggcatattcaaattgccagcatcactattcttgtgctttgaggctgttattaagtaaaataagggttgctcagcacaagcatgaccatgccttgacagtggatctgataaccacaaaggttactaa

SEQ ID NO: 754081 - DNA, 623 bp, Homo sapiens
tgcagacctcctgaaaaccaagccgaggactgcggggtccggtgtccacgcagagtgagtactgtcttccgccgctttgctccaggccgcgcgtgctcccgggtctagggcctgtgcccccggctacctgccctgcgtgyccggggcctggtccctgcagcggactccccaggctcgggacgtgcgcttttcctactatcgcgaccctggcgataccgtgcgttctgagtttaactgtgtttcttggcgactcctcctccttgtcggtaacactgttactgccccttccgccgggaaatgtatctggtgaccggacgcgtagggttacaaaacaagggatttgtgtggcccggtacaagtggcccgagacaagtggcccgagacaagtggcccaaaagaaggaaagcagcagctatgtcagtttggtttggcacctttatctctagggttggagatagatctccttctccccagccgtgccgccaccctgtgatgacctccgttttagagcgtgagctcactctgacctttctgcgtacctgatacatgctgggtgtggcgtggcaagtgttgtaacctgtttcggttccatttcctttacacaacctgagacggttgtagaa

SEQ ID NO: 754082 - DNA, 623 bp, Homo sapiens
tgcagacctcctgaaaaccaagccgaggactgcggggtccggtgtccacgcagagtgagtactgtcttccgccgctttgctccaggccgcgcgtgctcccgggtctagggcctgtgcccccggctacctgccctgcgtgtccggggcctggtccctgcagcggactccccaggctcgggacgtgcgcttttcctactatcgcgaccctggcgataccgtgcgttctgagtttaactgtgtttcttggcgactcctcctccttgtcggtaacactgttactgccccttccgccgggaaatgtatctggtgaccggacgcgtagggttacaaaacaagggatttgtgtggcccggtacaagtggcccgagacaagtggcccgagacaagtggcccaaaagaaggaaagcagcagctatgtcagtttggtttggcacctttatctctagggttggagatagatctcctyctccccagccgtgccgccaccctgtgatgacctccgttttagagcgtgagctcactctgacctttctgcgtacctgatacatgctgggtgtggcgtggcaagtgttgtaacctgtttcggttccatttcctttacacaacctgagacggttgtagaa

SEQ ID NO: 754083 - DNA, 592 bp, Homo sapiens
gtagtccttgcatatgagttagatgtgtggcttacaaggttaaccagcattttccagacaacctctacaaagcccacccccatgtaggtaaagggcttatcccacactgtcctgcaaaccccagtcacagcaccacataccacactatgctgactttcacgttttcctgctgtgatagtctctaggcttctgaggtcacaagccatacctcatccagtgtgcagcccccgtgactcaggaatgcctggtgcttgtgagctgtttgttgccatgaactaattagagcrtattctctggtgagagaatccttcgtgacatgatggatctaatttaaaatgtacaacagcaagtataacctgtagaccctttgtaatgtttacaaggtttcatactttggataaaatgtaaaatgatttcatgccatgtgttttcccccccggataggataaagatggaaagccactcctgccaaaagagtctaaggaacagcttccagtaagcaaaccagttttctctgaggatatcttttccttttggccctgattgcaatggtgtttgttgatacatttcctggttcttgcagcccatgagt

SEQ ID NO: 754084 - DNA, 559 bp, Homo sapiens
cttgatctctccctgcaagcaaataactttgaaattatgctgaataaactcagggatctagagatatttgacaatgacaatgatatttcactgctgtatggatttaaatacaaggagacaacttttgtatcatttacatttaggagaacattcaggtcaatatttgcctgcytaatttatctccatgtggatcacttttgtttcttttctagatgtattcaatctgatttagtttattatgagtttctctattatttgtttttttttccttggatcattgatgcagaccctagaagaggtggagtacagaaatagatttggagaagcaataatgagtaagcctcagtctttgcctctgagatgcattcagaagtggttgaggcaacattgtaagtgtgcagttccagagccagaagataaccagataatttataatccaagcaataatattgcaaaagtaaaaggaggcactatttaatcatcattccagggcaatagctgtatactattcagacaaactgaagagtaaagtcccctagtttaaaaactcgacaaacgt

SEQ ID NO: 754085 - DNA, 541 bp, Homo sapiens
agcattaaatgcctacatcaaaaagtctgaaagagtgcaaatagacaatctaaggtcatacctcaaaagaactagggaaacaaaaacaaatcaaactgaaatccagcagaagaaaataagaaagatcggagcagaactaaatgaaattgaaagaaacaaacaaaaaacaatagaaaarataaaccaaacagaaagctggttctttgaaaagacgaaattgatagatcattagtgagattaaccaagaaaagaagagggaagatccacgtaagctcaattagaaacaaaacaggagatattacaactcatatcacagaaatacaaaagattatttcaggctactatggacacctgcacacacataaactagaaaacctagaggagatggatacattcctggaaatatgcagtgcacctagattaaacctggaagaaatagaaactcagcagaccaatccaagtagcaaggttgaatccatagtaaaaaaaaaaaaaaattgtcaacaaaaataatgtcaaggaccagacggattcaaagctg

SEQ ID NO: 754086 - DNA, 565 bp, Homo sapiens
aagctggatcctcacctctcaccttgtataaaaatcaactcaagatggatcaaagacttaaatctaagagctgaaaccataaaaattctagaagataacattggaaaaacttttctagacgctggcttaggcaaagactttgtgaccaagaacccaaaagcaaatgcaacaaaaacaaaaatagatgggacttaattaaactaaaaagcttccggacagcaaaagaaataawcagcagagtaaacagacaacccacagagtgggagaaaatcttcacaatctatacatctgacaaaggactaatatccagaatctacaaggaactcaaacaaatcagcaagaaaaaaacaaacaatcccatcaaaaagtgggctaaggacaggaatggataattctcaaaagaagatatacaaatggttaacaaacatatgaaaaaatgctcaacatcactaatgatcatggaaatgcaaatcaaaattgcaatgcaataccacctcactcttgaaagaatggtcataataagaaaataatagatgggcatggatgtggtgaaaagggaacactt

SEQ ID NO: 754087 - DNA, 565 bp, Homo sapiens
aagctggatcctcacctctcaccttgtataaaaatcaactcaagatggatcaaagacttaaatctaagagctgaaaccataaaaattctagaagataacattggaaaaacttttctagacgctggcttaggcaaagactttgtgaccaagaacccaaaagcaaatgcaacaaaaacaaaaatagatgggacttaattaaactaaaaagcttccggacagcaaaagaaataatcagcagagtaaacagacaaccyacagagtgggagaaaatcttcacaatctatacatctgacaaaggactaatatccagaatctacaaggaactcaaacaaatcagcaagaaaaaaacaaacaatcccatcaaaaagtgggctaaggacaggaatggataattctcaaaagaagatatacaaatggttaacaaacatatgaaaaaatgctcaacatcactaatgatcatggaaatgcaaatcaaaattgcaatgcaataccacctcactcttgaaagaatggtcataataagaaaataatagatgggcatggatgtggtgaaaagggaacactt

SEQ ID NO: 754088 - DNA, 565 bp, Homo sapiens
aagctggatcctcacctctcaccttgtataaaaatcaactcaagatggatcaaagacttaaatctaagagctgaaaccataaaaattctagaagataacattggaaaaacttttctagacgctggcttaggcaaagactttgtgaccaagaacccaaaagcaaatgcaacaaaaacaaaaatagatgggacttaattaaactaaaaagcttccggacagcaaaagaaataatcagcagagtaaacagacaacccacagagtgggagaaaatcttcacaatctatacatctgacaaaggactaayatccagaatctacaaggaactcaaacaaatcagcaagaaaaaaacaaacaatcccatcaaaaagtgggctaaggacaggaatggataattctcaaaagaagatatacaaatggttaacaaacatatgaaaaaatgctcaacatcactaatgatcatggaaatgcaaatcaaaattgcaatgcaataccacctcactcttgaaagaatggtcataataagaaaataatagatgggcatggatgtggtgaaaagggaacactt

SEQ ID NO: 754089 - DNA, 630 bp, Homo sapiens
ttcaacccatgaaacagatttctgaacatttgttacgttttaaccaaatccgaagacacacattttcaccactttaagatatagttagaatgtcccctccaaaactcatgtttaaacttaatccccaatgtgatggtattgagagggagtgcctttaagaggtgattggatcatgaggactctgtcctcattaatggattaacccattcatggattaagggattatcatgaaagggaaactggtggctttataagaagagaaagacagactcaagctattacattatcacgctcagtccccttactctgtgattctccataccaccttgggactcttcagagtctccaccagcaagaaggctctcaccagatatggccctttgacctggggcttctcaatcccccaaagtgtaagaaataaactccttttctttagaaataaccragtttcaatattctgttataagcaacagaaaatgcactaagactatctaaaatgccttcttttaagaattatgtcagagaagcagaagagacatacaaaaaggaaaagttagggggtttgaccttttaactaaattcagcatgaactaaaaaaactcaaaagtttgccatccttaagtctgagct

SEQ ID NO: 754090 - DNA, 566 bp, Homo sapiens
tttttggcggggggacatttttaaaattactgattcagttttgctgcctgttattggtctgttcatggtttctatttcttcctgatttaatatagaagggttgtatattaccagaaatttatctatttcctctagatgttctagtttgtgcacgtaaaggtgttcatagtagccttgaatcatcttttgtatttctgtggtattggttttaatatgtcaccttttttcttttttttttttttttgggaaatgatattaatttattatttcaatacacatttaaataccatccttacgtgtagctgtctcatccactaatatataaggaaagaatttcttcctggrgcagtttttcattaaaaacaggttctctttgaatcagatggctatgaatgtcagtttgccatattatctctacttgtttaatatttttctttttttttttttgatttatttatggtgtttttttttttttttattatactctaagttttagggtacatgtgcacattgtgcaggttagttacatatgtatacatgtgccatgctggtgcgctgcacccact

SEQ ID NO: 754091 - DNA, 655 bp, Homo sapiens
ctacttttagatttcttgatgtacgagaaaaattaattcctacttgtgaaaatcaaggttactaagttgttacttggtcttgaaaatattcttttttttttttttctgagatggagtctcactcttttgcccaggctggagtgcagtggctctacctcagttcactgcaacctccgcctcccgattcttctgctttagcctccctagtaactgggactatgggtgcacgtcaccacgcccagctaattttttgtatttttagtagagatggggtttcaccacattgcactggctgagaaaatattcttaactaatagagaattgtttctccttttaggaaaacasagagcaagatgtttttccctctgtgaaggacagtattttattatagctgctgctgttattgctactagaagtttaagtgtgaaaacttcccagtgtgttgcgaagctgggcagccaaggggaggattgtcctacttttgactcccaacactttgtgaacactattctatgcttggggaattccccatttacagtctctgcttcctgaactcagaagccaaaaccttcgtctctcagcattgggtataggcccgagccctagactgttctaatgcactaacattacaatatgttatgcactacatatgcat

SEQ ID NO: 754092 - DNA, 565 bp, Homo sapiens
ttcccctttctgcacaaagacacaccttgcaatatgattttttgtttgcatatttatctgtatatttgctttaaactcacttttcataaagtagaatgttatttaaatataaagaagtttattcagtatccacttatgactaccattytttgacccagtcaccatccaataaaatgttttttgagcacatgcttccaaactgtgtacactaacgtacctattaatggtatatatgtgttacttaaccaacattaatgtgctttttaaaacatccaaaaataaaaattaaagacaaaaattaaaaaaagaaaccaaaacagattctctaatactttcttctagcacctcattgtattacacataccctggctacgggcatcccaccttatagacctctgctatagtcgaaatatgagtggctgatttaatttaactctattcaatatataaaaaaggagtaattttaagttttcaaaagattgcttaaacaggttcctcatttaaatgaccttaattatccacctgagacatctgcatagcatatagaaggattattcaacacaca

SEQ ID NO: 754093 - DNA, 589 bp, Homo sapiens
ttcagttctcattatccattttaatccacttattctcaatataagcaacttgcttagatttgaaataagattaaatcttacccagaaaaaaaacagaacacggcaacagagtgaattgctgtcattttatgtcaagtaaaataaatttcatttcatgatgatatgtggtacactataataaattctcaaccctgttactgcctgttttcccaggaaaaaacataaacattccattccaagaactgctttctatccacaaaaagttgttcatgaaataattacctcttcctctcctcaaaatcattggattgataaagtttccctacagaagccttacatccattcgttgcaatgttctttgcattggccttcattcaatasagaaaatgagagaaccaaatttatcataaatggagcattcttatgtacatttatactgacatttattgactcacagaagagaatccatttgatgttaagaataaaataactgaccatattttcattttaccactcaatccaaaaacaatagttagcaatgctaggaaagtggatattacagctgtcataaagataaaaattttaatac

SEQ ID NO: 754094 - DNA, 607 bp, Homo sapiens
gcctctgatcagctttcttctctgcctcctgaactcagttaatgtacaccttgtaaccactttaataagctgagttgcattcacacctacggagcttctaacttctgcaatttgtgcctgatatctccttgggcctgccttacaaatgctgtgtccaccatgcactgattttcagcagccttagggttaaacagagtgtacaaccaaaatgcctcaaaaagtctttcttaaaactggctggtgcttttatctgcaccctggagcacctctgagattttttatattggttgcctttttcttttaccagcctttagcctttgcagaagggcttcttggcacttttgtaggtgctgaagctggactgcatcatctgggtcctagtgggtgtcctcttgtcctcttaagaggcrtaagcataacttgggcgtgaccagacctgagacaccctccctgacttttccagcctttcactttaacttcctggagctctaatttctccttctcaggtgagactgggagcctgtatctctttgaacttaattccttaggggcagttagccttggtaaagggaggtagattggaatgtagggaggaggggtctctatt

SEQ ID NO: 754095 - DNA, 486 bp, Homo sapiens
gggaaaaaagcaaaaaattagctatgttaggaatataaatggggacaacactacagataaaatagttttagaagactaaaatttattatatgtatacaagggaatagtatactatttaaaaagaattagataaacatgtaccaaacaagcctcaaaaaatacaactggcagaaatattcctagaaggaatcctttagtcaatatgcacaaagcatttaagcatttcattatttttgtttttttttttttttttgcttttgtttttgtttttttgagacagagtcttgctctgttgcccagactggagtgcagtggtgcaattttggctcacagcaaactcygcctcccaggttcaagtgattctcctgcgtcagcctcccaagtaactgggattacaggtgcacaccaccaagcccggctaatttttgtatttttagtagagacggagtttctctatgctggccaggctggtctctaactcctgac

SEQ ID NO: 754096 - DNA, 611 bp, Homo sapiens
tcaggaagggggtacagagtcctgggtctctatcttcttcaagcacaaattgcatccccatccaactaccagttgaaaagacaggacacaggccaggtgcagtggctcacgcctgtaatctcaacactttgggaggccgagccgggtggatcacctgaggtcaggagctcaagactagcctggcctacgtggtgaaaccttgtctctactaaaaatacaraaaagtatccgggtatggtggcatgtgcctgtaatctcagctactctggaggctgaggcaggagaattgcttgaaccgggaggcagaggttgtggtgagctgagatcgcgccatggcactccagcctgggcaacaagagtgaaactctgtttcaaacatacaacatatatattatcaacatgaaacacgatattcagatattcttacagaaaagtagcaaacctctgctagttcatccatagaccactgctctaattggagagatcagaggccagaagtggtgttgcagagggaatggggggtgagttgaactgcctctccacgggtgagatgtgaggtttgcagcgctggacctgccaggttgtggcaattgggctggaggtaaaagatg

SEQ ID NO: 754097 - DNA, 611 bp, Homo sapiens
tcaggaagggggtacagagtcctgggtctctatcttcttcaagcacaaattgcatccccatccaactaccagttgaaaagacaggacacaggccaggtgcagtggctcacgcctgtaatctcaacactttgggaggccgagccgggtggatcacctgaggtcaggagctcaagactagcctggcctacgtggtgaaaccttgtctctactaaaaatacaaaaaagtatccgggtatggtggcatgtgcctgtaatctcagctactctggaggctgaggcaggagaattgcttgaaccgggaggcagaggttgtggtgagctgagatcgcgccatggcactccagcctgggcaacaagagtgaaactctgtttcaaacatacaacatatatattatyaacatgaaacacgatattcagatattcttacagaaaagtagcaaacctctgctagttcatccatagaccactgctctaattggagagatcagaggccagaagtggtgttgcagagggaatggggggtgagttgaactgcctctccacgggtgagatgtgaggtttgcagcgctggacctgccaggttgtggcaattgggctggaggtaaaagatg

SEQ ID NO: 754098 - DNA, 625 bp, Homo sapiens
ccattatgcttcatatttattatttcattgcttcgagtagatttatttattttactttatttttatttattattaatattttttgattgacaaatcataattatatatatttatggggtacaaggtgatgttttgatatatgtattcaatgtggcatgatgaaattaaactatcatatccatcacatcacttacctatcactttttgtttgtttgtttgtttgtttgtttgttttttgagacggagtctcactcttgtcaccgaggctggagtgcagtggcgtgacctcgggtcactgcaacctccgccccctgrttcaagcgattctcctgcctcagcctcctgagtagctgggattacaggcgcctgccaccgtgccgtgcccggataatttttgtaacttttttagtagagacagggtttcaccatcttggccaggctggtcttgaactcataacctcatgatccacccgcctcagcctcccaaagtgctgggattacaggtgtaagcacgcccagcccacttacctatcattttttaaggtgagaaatttaaaatctactctctaagttattttggaatatataatacattatttttgactatagtcaccctgctgtgcaa

SEQ ID NO: 754099 - DNA, 584 bp, Homo sapiens
gattcttgaaagtgggaaaaatacactggaatgctctttcatctcaatcatattaaacatcctataaagaaagttgtacgtcaacttagaatttttgtatgtttaagtatcaggtgctttctataaccaaaggggtcaattcaaagaatagcagtcagaacaccaaccataaaactgactttatggacctgagcctcatcakagtaattttggaactcttcctcgagtcccttccttcttaggtagctgatataaagcttgctgcttctagtcagtttttctttctttcagtgatgctgttactttagtcaccttacattttcaagttctgggcacaaagctacccctcgaatattaactttctgtggcatcacagagtgacagccaataactgggttattggtgttgccacttttttttcctaataccagaattgtaagtggagaaaagcttcctttggtggtccccaagtctagtacttgtaacttctactagcagctgaaatcttcctcacacttcatatcttattcctagaaactcagtcaggaaaccttgacaaactcctgctacctctagagcagcga

SEQ ID NO: 754100 - DNA, 513 bp, Homo sapiens
cttcatattgtataacttttttacttaattttcaaagatttaaattgcgtttataaattagattttattattaaattatttttttaagtactcaaaatgttacctaattgttaatcaatatttcccatttgtagggtctcctagatttgttagcttagactttaaatttagacattacattctttcaacatttttaaacatatggcattaaatattataatttataaattttgttttgtatttttatttcacaccttcctaatgtcatactttgaatgcagatttaaataaagtatttaaatatttaaatcatatatcgaatttgagtagaacgttaactaacaaaaattgccagttatgtgttggatgatagtttcyttttaaaatatgatgttgtgcatacatttttataaatgcagcaattcagttgaaaaagtttttaacatttgtatatgctagctgatacagataattaaacacagaatctgttgctaattttattttcattagatt

SEQ ID NO: 754101 - DNA, 568 bp, Homo sapiens
aggggtctgggtgcaggaccccacttccaaaacacactctcaccattttactctgcacttccagttttgcatgcctcaaggactcttttttctctgtggcttttccacctacatgtgcctccctgccaatcagacaggaacccgtactctagttttccttacttccaaaatcaagtttgcaaatggtagcgaatagctgcccgttcctctcttaacctcagcacgacaaaaaaaagtcattccattaattccgtttgtaggactagaagtctctgccgcttcaatcgggacaggagtagcaggccttacaacatcactacctttctcagtctctccaatgacttctctgctagccttaycgatataactcaaacactctctgccctccaagcccaggtcgattccttgggtgcagttgtcctccacaatcgccgaggcctcaatctgcttactgttggaaaaggaggactctgcctattcttaaatgaagaatgctgcttttacttaaatcaatctggcctcgtatatgataacatcaaaaaatttaaagacaaagctcaaaaacttg

SEQ ID NO: 754102 - DNA, 510 bp, Homo sapiens
gtgcacagtctctggagctagcatcttggattcaaatcctgactctgctgtgtgactttgagcaagttgcttaacttctctctgcttcagtttactcatccttaaggggggatcataatattcccaacccaacaggattgatgtgaggattaaataagttaatacaagtaaagccctcagcatggtgcctgatcagtgctttgtaactattattattattgttattattattaagagatcaagcaaaaaccaaaaccttggtgaggtttagtccctaaaattcatgggactggtragggttgttcctcttactcccacagtgagctcccaatagtcctctctccttcttggtgccccaggctgggaactgtggaatccaactatttctctgtttttgttttttttttcttttgaaagaggttctcactctgttgcccaggctacagtgcaatggcacaatcatggttcactgcagcctccacccgggctcaaatgatcctcccgcctcaa

SEQ ID NO: 754103 - DNA, 610 bp, Homo sapiens
aagaactcatctttactaaaaataaaaataaaaattagttaggcgtgatggtacatacttgtagtcccagctactccagagactgaggttgggggatctctggagcgaaggagttcgaggctgcagtgagctatgatcgcatcactgcagtccagtctgggtgaaagaacaagaccctgtctctaaaaagaaaagacaaggtttctaattcttacaccaaaatacatcctcaagttgttcttggtgaaggatcgtatacctgaaaatgtgaccactgaaaaagtgggattaaaaacaaggaaattcaggccaggcgcggtggttcacacctgtaatcctagcactttgggaggctgaggcaagcggatcacccgaggtcaggagttcaagaccagcctggccaacatggtgaaaccccatctctaytaaaaatacaaacattagctgggtgtgatggcccatgcctgtaatctcagctactcaggaggctgaggcaagagaatcccttgaacccaaagatggaggttgcagtgagcagagatcgcgccactgcactgcagcttgggtgacagagtgagactccatctccaaaaaaaaaaaaaaaaaggaa

SEQ ID NO: 754104 - DNA, 542 bp, Homo sapiens
agggacacaggctttccagccctgctcagacacataagaatgggctatgggcctgagacacgtccttaccaaaaggcagcatcctcacaacctctcctggacccatcgcctagtatgggaacatctctccctgtttcagagtcattgtgtcctctgttctgcttcagtgtgtgcatcacatggcacctggccagccccactgctatgtctgtcccctgtggggagagggcaggtccttctgccgcagcataagagggaagaagggtgtgtgcctgccagtggccctgcattggctgytgggagggacccactcgtcgtggcagaccaatgcccaacatggaaatggatctttccctgcttcttttccacgtgaatacagccctgtttcatccagtgcttaactgcttgtgatccttggcgactgtgatgccagaatgcagtgggcagaagtgcttcttataatagatgacagaggccgcttgtattccccagaggtgcgtggtatgcaatgcatacagcgggtgcatggggacctggtttca

SEQ ID NO: 754105 - DNA, 542 bp, Homo sapiens
agggacacaggctttccagccctgctcagacacataagaatgggctatgggcctgagacacgtccttaccaaaaggcagcatcctcacaacctctcctggacccatcgcctagtatgggaacatctctccctgtttcagagtcattgtgtcctctgttctgcttcagtgtgtgcatcacatggcacctggccagccccactgctatgtctgtcccctgtggggagagggcaggtccttctgccgcagcataagagggaagaagggtgtgtgcctgccagtggccctgcattggctgctgggagggacccactcgtcgtggcagaccaatgcccaacatggaaatggatcttwccctgcttcttttccacgtgaatacagccctgtttcatccagtgcttaactgcttgtgatccttggcgactgtgatgccagaatgcagtgggcagaagtgcttcttataatagatgacagaggccgcttgtattccccagaggtgcgtggtatgcaatgcatacagcgggtgcatggggacctggtttca

SEQ ID NO: 754106 - DNA, 542 bp, Homo sapiens
agggacacaggctttccagccctgctcagacacataagaatgggctatgggcctgagacacgtccttaccaaaaggcagcatcctcacaacctctcctggacccatcgcctagtatgggaacatctctccctgtttcagagtcattgtgtcctctgttctgcttcagtgtgtgcatcacatggcacctggccagccccactgctatgtctgtcccctgtggggagagggcaggtccttctgccgcagcataagagggaagaagggtgtgtgcctgccagtggccctgcattggctgctgggagggacccactcgtcgtggcagaccaatgcccaacatggaaatggatctttmcctgcttcttttccacgtgaatacagccctgtttcatccagtgcttaactgcttgtgatccttggcgactgtgatgccagaatgcagtgggcagaagtgcttcttataatagatgacagaggccgcttgtattccccagaggtgcgtggtatgcaatgcatacagcgggtgcatggggacctggtttca

SEQ ID NO: 754107 - DNA, 574 bp, Homo sapiens
tgggatcttaattttgttttaatctgcagctccataatgccatatgatatcaagcatcatttcatataattatttgccgtttgtttgttttgagatggagtcttactctgttgcccaggctggagtgcaatggcgygatctctgcccactgcatcctctgcctcccaggttcaagtgattctcctgcctcagcctcccaagtagctgggattacaggtgcatgccaccatgcctggctaatttttgtacttttagtagagacggggtttcaccatgttgcccaggtgaaactcccggcctcaggtgatccacccacctcggcctcccaaagtgctgggattacaggcatgagccaccatgcccggccattatttgtcccttgtatgtcttcttggtgaggtgtctgttgaggccttttgcccaatttgaaactagattgttcactttcttattgttgagttttaggagttctttgtatattttgtatggcaggatttttttttaatcagatgtgtcttttacaaatatcccagtctgtggcttgccttctcattctcttgacagtgtttttggc

SEQ ID NO: 754108 - DNA, 574 bp, Homo sapiens
tgggatcttaattttgttttaatctgcagctccataatgccatatgatatcaagcatcatttcatataattatttgccgtttgtttgttttgagatggagtcttactctgttgcccaggctggagtgcaatggcgcgatctctgcccactgcatcctctgcctcccaggttcaagtgattctcctgcctcagcctcccaagtagctgggattacaggtgcatgccaccatgcctggctaatttttgtacttttagtagagacggggtttcaccatgttgcccaggtgaaactcccggcctcaggtgatccacccacctcggcctcccaaagtgctgggattacaggcatgagccaccatgcccggccattatttgtccyttgtatgtcttcttggtgaggtgtctgttgaggccttttgcccaatttgaaactagattgttcactttcttattgttgagttttaggagttctttgtatattttgtatggcaggatttttttttaatcagatgtgtcttttacaaatatcccagtctgtggcttgccttctcattctcttgacagtgtttttggc

SEQ ID NO: 754109 - DNA, 526 bp, Homo sapiens
gtgtctgtggaatgagactcgctcccctgaggatctaaggattcaatgggtaattcatggtcctccgtgggaccacatcactaggtggaaaggagcccggtttcatcagcctctagcccaggctgccctgtatgccagcaccatgccagcactgaccaccagtagtcaggccaaccagcaccccagggcctaccacaccaaaacagagatggtgaggccgcaccagcagtggacacacggcccctgatgaggatgcacagtgcaggcttggtggagctggtgaaaaacagacagaaatgaagacgagagccagaaaraggtggtgtccttcacaagcctccctcaggctccagagtgcaccatccagactcgggcctctaagatcagactcccaggacaagcgctcaaggctgcattctaggctttgcctgaatttgactgtggccaggcccatttctttccttccagacagtctgaaggatcgatagcaggatttcaatgacgcctccagagggtagagtccttt

SEQ ID NO: 754110 - DNA, 612 bp, Homo sapiens
actgtgatcacagatgtcacccacaaaccatattaacagctaacatttttaagcactgattagatactttgctgagtgtttcatgtggattatggcattaggataagatggaaacatgagtcagatttaaacaagatctaaaatgcactatagtggagtgcccattactgaaagggaatgtgggttgcaaaaggcattcaaaaggtaaatgaataatgtgtttgggcttgaagtgatgtcagacatgatagaacccacatttctccatttgtagtcaaattattattctactttaaaytgatttagacagtagcctatgaataaaatatcagaaattatgaaagtcatgttttgaattctgttgatcacagtaaaggtaagaaatagaattgaatgagaacaaactggtaagaaaaagagaatgcattagacttcagaaaacttataagattccttaaataggtcatggaatacttgtagttgataataataatggtcatttattgaacatttaatatgtgccaaccactgttctcagggctttgcaaacattaacttatttaattttcacaatgatcctgtgaattagatgccaaggtttttatttccttt

SEQ ID NO: 754111 - DNA, 601 bp, Homo sapiens
taagtgaatatactttttatactttgaaaactttctttaaaaaggatagtgataaagggtaaattagaatgtgctttgacacaagtctaagctctttccagattcaggtaacaagagccaagtgtctcagtgtgatatagaaatgacccctgggaaatcatcatgtttagtaacttaatggatagaacagaaaatgccagtagattgctrtgaaaaatatgtcaagaaaacatttttacagaatttctttcattttatttaccagtgaactagacactcaataaattcgtgtgtctctgttgctcagtgttaccgcactgccaacttttctaccccattattgatataagttgagaatagccttactgttcaccatctgtcgtgaaagagtcaagtttttcttttttttttaataagtttagttaatcctttattttttcatttagcagctaataggcatagtgtactgtacaaaaccaggatatacagcagaaaccaaggcaaacacagcccttccattatggagctcacatcttgtgggatggagaaggaaggtattaaataattaagatacatttattcattctttctttttttagtt

SEQ ID NO: 754112 - DNA, 601 bp, Homo sapiens
taagtgaatatactttttatactttgaaaactttctttaaaaaggatagtgataaagggtaaattagaatgtgctttgacacaagtctaagctctttccagattcaggtaacaagagccaagtgtctcagtgtgatatagaaatgacccctgggaaatcatcatgtttagtaacttaatggatagaacagaaaatgccagtagattgctatgaaaaatatgtcaagaaaacatttttacagaatttctttcattttatttaccagtgaactagacactcaataaattcgtgtgtytctgttgctcagtgttaccgcactgccaacttttctaccccattattgatataagttgagaatagccttactgttcaccatctgtcgtgaaagagtcaagtttttcttttttttttaataagtttagttaatcctttattttttcatttagcagctaataggcatagtgtactgtacaaaaccaggatatacagcagaaaccaaggcaaacacagcccttccattatggagctcacatcttgtgggatggagaaggaaggtattaaataattaagatacatttattcattctttctttttttagtt

SEQ ID NO: 754113 - DNA, 615 bp, Homo sapiens
gattttttggtccgcagattggatctgttagaagggtagaaattaatagtttgcattcaagacttgaaaatattctaaaagattagaaaaatgtggtgtgggcccaccctgaatagtcctgcacctttattcaattttcattgccttaaagttaggcctgtctacttttttatcagttgagttctttaaagacatcccaattaaggagaaatttagcctagggagacaagttttgcagataagaaaattacattgtcartgttatatgattaacacccaaatgtggatacactattttcctttcaagaaggtcctaatgattctgaaaaaaaaaaaaaaaaaacatttaattttagctcctgttgtaacaggaagaaaaaaaatcctctaaagcagtcattaactcactgttacataaaggcagtagcacattagattagctctacgtaatcaagcagaaattgtgctttatttcttatggttagtgtccttgagatgagttaaaactacatgaaaaagataactccccctgaccaaaatgacacgtacagatttcacggaaatatctcatctttcttcaagttagacctgcccactgtttttttttcttccccc

SEQ ID NO: 754114 - DNA, 597 bp, Homo sapiens
gtagcatataagtggattttaaaatactttttgctgactttgtatacattttaagttttcaaataattgcctatatttatattctccaattctactccttccattctcatttaaatgtactccaatcaggcttttgcccacatgaaactttatagaactacttttttatgtggtaaaatatgcataaaataaaacttaccaccttatgtatttttaagcatacagttcaatggcagccatccacaacctcttttctcttgcaaaattgaaactcacccattaaacaataactcccgattctccccctacaaaccctggcaatcactattctactttctgtctctataaatttgactgctccaggtacttaatgtaagtggaatcatacagtatttatccttttgagatgacctatttcatacagcaraatgtcctcaaggttcatctatgttgtagcatgtgtcagaatttccttctttttaaggccgaataatattccattgtaaaatgttgatagggaattgttacattggagatcaagctgttaccacttcaacattagatccctggaagtaggaaaagcaaacattacatgcc

SEQ ID NO: 754115 - DNA, 526 bp, Homo sapiens
ctatgatctttcaatttctctttaaagattgaatttctatttaagatgaatttctaggaatttgattctcccactcagatgctgaacttaattatgtcacaatcagaattatctagatatttatttcccagtcacttctgtgaccagtttagtatatatttgaatcttctgttcttgaactcccttttgatgtggctttctgctatattactagtaattcattttaaagtggctaattaaaatcagcattattcagtcagaacrtatcacacacaaaccttttataataatttattgataaccttcacttacaagaacagtagcataacaaaagccccaaatccaagagatatttatccattgtctccatctaacaaagatcatattctctgtccatctctatcctgacatcctagtatttattttaagatctttatttagatgcaaatgcctttgatactagtacgcaggcaatattcatcccaatatctgggttgtttatattaattattccaataaagtttta

SEQ ID NO: 754116 - DNA, 526 bp, Homo sapiens
ctatgatctttcaatttctctttaaagattgaatttctatttaagatgaatttctaggaatttgattctcccactcagatgctgaacttaattatgtcacaatcagaattatctagatatttatttcccagtcacttctgtgaccagtttagtatatatttgaatcttctgttcttgaactcccttttgatgtggctttctgctatattactagtaattcattttaaagtggctaattaaaatcagcattattcagtcagaacatatcacacacaaaccttttataataatttattgataaccttcacttacaagaacagtagcataacaaaagccccaaatccaagagatatttatccattgtctccatctaayaaagatcatattctctgtccatctctatcctgacatcctagtatttattttaagatctttatttagatgcaaatgcctttgatactagtacgcaggcaatattcatcccaatatctgggttgtttatattaattattccaataaagtttta

SEQ ID NO: 754117 - DNA, 634 bp, Homo sapiens
ctctggattttcctcttgggctcccaagataacagagcttcttggttttgagaagtccacatctggcccacaggaaatccacacatattctttccctgccatattctagaactgtactccattccccatacctttctctgtccttgatctgtatccagtgaggacagyttaggccatagccccttggtctttgggcctcccaagaaaggcactgaagcagcagtccatatgtaactgattatatgacatcatcataataaaaggaaaagcttagtgttttatttctttctgaccttcccacaggtccttttcttcctttttcagtaataacatacttaatatcaatcatatttttaaaagtaatatttagggaaaacagacagtgggcttttaaatcgaccaagactcttgagctttgtatttgagaaagctttaaaaataaaagttgggcaagaaatttgaacctcaaagagtgactctacttttagatgacaaacccaaatcatgtttaaagtccctgaaaaacagaaaatgaccaggaagttcattttaaatatactctctaaaccatttgagaattgcaggccataaactatggcagaaagatagctggcaataaatttttcttcaattt

SEQ ID NO: 754118 - DNA, 598 bp, Homo sapiens
aagtttggaaaatgtgcaacctgaccatgtagtagaaaagaaaagcccattttctggggaggaattcaagcaggctggagacatttgcataagtaaaaaggagccaagtgctgataaccaaaacactggggaaaaaggtcttgaaggcatttcagagaccttcacaacaayccctatcatcacagccccagaggcctaagaggaatgaatgttttgtgggccaggcccaaggccccactgccttgcatggcattgggacactgctccctgcatcccagctgctccagctctagctgtgactcaaatgagccctagtaaagcttgggctgctgctacagagggtgcaagccataagccttggcagcttccacatgatattaagcctgtgggtgcacaaagtgcaagagttgaggcttgggagcctccacctaaatttcagaagatgtatggaaatgcctggatgggcaagtagaagcctgctgcaagggtggagccctcatggagaacatctacctaagacagtgtagaggggaaatgtggggttggagcccccacacagagtccccactggggcactgcctagtggagctgtgagaag

SEQ ID NO: 754119 - DNA, 575 bp, Homo sapiens
tttcacagcatttccatctggatgatgacttaattttttttttttttttttttttttttgagacagagtctcgctctgtcacccaggctggagtgcagtggaatgatctcagctcactgaaagctccacctcccgggttcatgccattctcctgcgtcagcctcccgagtagctgggactacaggtgcccgccacaatgcctggctaattttttctatttttttagtagagacggggtttcaccatgttagccaggatggtctcgatctcctgacctcgtgatccaccygtctcggcctcctgaagtgctgggattacaggcgtgagccaccgcacccggccgatgatgacttaatttatggtcattatggtatatgcaataatgaaggggaatctgcaattttacagtatgtaagtttgacttacttttttggatgctgccatacttcatgtattttatataaacatttgcaaatgggatatataatattgttctgtttccaacaaacctaaaatatgtatttgtatgtctatataaatgtattaagacttttgttgcaagaaattacatataa

SEQ ID NO: 754120 - DNA, 558 bp, Homo sapiens
ttataagtagtcgtgttcaatatggttagaaatgtggacagggatttgtgtgctgttctaaataattgagatgattgttgcaaactcagtgttgcaccactgaaggtttttaagctgtagactggtttcatttaaaatggcctctgaaggaaaacctagagtcacactttgcttcaaaaatagaagactttaaagatacctcagcaaatccagagttatcctagttttgttcttatggaaaaaattgaagttagggtgaagaaaattgtgcttttaaaaagacagcagtcaaccataatcacagcagtttctgaacctaactaaacatgaatagttaactgatcttataattattataatkattatcaccatgatgttatgattattgtatcatcaacagccatctattaaataccaatatgggatggcacaattgggaataaaccgtagccttgcttagtggacatttatagtcagctcttttatatgtttcttatgctctatatctgctcctatatatgaatactgaacacatcagcccaatataaactttaccag

SEQ ID NO: 754121 - DNA, 614 bp, Homo sapiens
acactgtgatcacagatgtcacccacaaaccatattaacagctaacatttttaagcactgattagatactttgctgagtgtttcatgtggattatggcattaggataagatggaaacatgagtcagatttaaacaagatctaaaatgcactatagtggagtgcccattactgaaagggaatgtgggttgcaaaaggcattcaaaaggtaaatgaataatgtgtttgggcttgaagtgatgtcagacatgatagaacccacatttctccatttgtagtcaaattattattctactttaaaytgatttagacagtagcctatgaataaaatatcagaaattatgaaagtcatgttttgaattctgttgatcacagtaaaggtaagaaatagaattgaatgagaacaaactggtaagaaaaagagaatgcattagacttcagaaaacttataagattccttaaataggtcatggaatacttgtagttgataataataatggtcatttattgaacatttaatatgtgccaaccactgttctcagggctttgcaaacattaacttatttaattttcacaatgatcctgtgaattagatgccaaggtttttatttccttt

SEQ ID NO: 754122 - DNA, 615 bp, Homo sapiens; identical to SEQ ID NO: 754113

SEQ ID NO: 754123 - DNA, 472 bp, Homo sapiens
tttggtcattgctgctaataaggaaagtcaagcacatccacaggagttaggtgggtacaggggagtctatactagacttgtcttattttatagaatgtgtcatgttctcttctgcccttggggaattatttcatgctatctttttcctggaatgatctgatccctttcatctaagttccactcctgstttacatctcaactacacatggtttcctcagagaaacttcttaagccctcagtctttcttgttttatgatctcataagactctgctccatttcactgttctccaaaggttgagtgatttgttaaatgcctccactatttcatgtgagggcacagggcatgtatgacttattcagctgggaatcctcagtgtctgacatagagtaggtatttaataataagtgttcaataaagagtagatgactaaatcactcattatcaaacctgtcattaacctctgtgtttca

SEQ ID NO: 754124 - DNA, 464 bp, Homo sapiens
cacgaaatatttccctgcagcatgtgatactgtttgatagcattttacccatagtagaacttctttcaagattggagtcaatcttctaaaatcctgctgctgttttaccaaccaagtttatgaaatattctaaatcccttttttgtcattttaacaatattcatagcatctttacccgtagtygagtccatctcaagaaaccactttctttgctcatccgtcagaagcaacttctcatccattctagttttatcatgagattgcagcaattcagtcacatcttcaggctccacttctaactctagttacattgctaattccaccacatctactgttactttcttgaccgaagtcttcaacccctcaaagtcatacataagagttggaatcgtcttattctaaattcctgttaatgcttatctttcacttcctcccataaatcagaaatgttcttaatgacatct

SEQ ID NO: 754125 - DNA, 639 bp, Homo sapiens
agacttatgtgagaagaaaattaaattgctcacttttaagtgaaaaagtattgtgcttcttattttagcactttaatcaattttccttagttaatgatgaaaaggcaataagaataacatgctaatgatagagacaggagacagacaagggtcccctgcgaaaccccactttcaagcctaaaatagcctgaagtctgaaaaaccggactgctggccctggatgaagcctgccctttccccgactagttctctctgaataatgcccacctgcacgctgggagaatggggtggaaccaggggaagtttgccccatttgcagagaggagaagcctggcttcttcagttcctgtgtggtgtcctgggcttcaatctgtaagacgggagcctgttagcargactctctctccctttgctgagagttcctctttcctttttcccttttcacccaataaaccctgccctaatcaccctacaatatgtctgtgtgcctaaattttccttgtcatgtgacaagaacccacttttttctacaacactaacatgtgaaagtctctcttctagaaatatccaagaatagctagtcctttggagcttattatttagtccttaccctgtcattaggaaaaaaaaaaaaaaaac

SEQ ID NO: 754126 - DNA, 639 bp, Homo sapiens
agacttatgtgagaagaaaattaaattgctcacttttaagtgaaaaagtattgtgcttcttattttagcactttaatcaattttccttagttaatgatgaaaaggcaataagaataacatgctaatgatagagacaggagacagacaagggtcccctgcgaaaccccactttcaagcctaaaatagcctgaagtctgaaaaaccggactgctggccctggatgaagcctgccctttccccgactagttctctctgaataatgcccacctgcacgctgggagaatggggtggaaccaggggaagtttgccccatttgcagagaggagaagcctggcttcttcagttcctgtgtggtgtcctgggcttcaatctgtaagacgggagcctgttagcaagactctctctccctttgctgagagttcctctttcctttttcccttttcacccaataaaccctgccctaatcaccctacaatakgtctgtgtgcctaaattttccttgtcatgtgacaagaacccacttttttctacaacactaacatgtgaaagtctctcttctagaaatatccaagaatagctagtcctttggagcttattatttagtccttaccctgtcattaggaaaaaaaaaaaaaaaac

SEQ ID NO: 754127 - DNA, 574 bp, Homo sapiens
gtcatttacctccttggttaaatttacaactaagtatttaaattttttgttgctattgtaaatgggattattttatttttctttcagatagtctgttattagtatatagaaatgctatttagttttctatgttgattctatgtcctgtaactttactgatttcatttaccrgttctaacagttttgtgatagagtctttaggattttttatatgtaaggttatgtaatcttacatataaaatatagagacaatttcacttcctctattgctatgagtatgacttttatttctttcttttgcctaattcttctggctaggacttccagtactaagttgaaaagaagtgttgaagagagtatcattatcttgtctctgatcttcgaggaaaagctttcaaattttcaccattgggaatgatgtcagctacaggtttgttatatatggcctaacggtgttgaggtgcattccctttatagctaatctgctgagaggttttatcatgaatagttgttaaattttatcaaatgttttttctgcatctactgagatgatcataggatagttatctctaac

SEQ ID NO: 754128 - DNA, 574 bp, Homo sapiens
gtcatttacctccttggttaaatttacaactaagtatttaaattttttgttgctattgtaaatgggattattttatttttctttcagatagtctgttattagtatatagaaatgctatttagttttctatgttgattctatgtcctgtaactttactgatttcatttaccagttctaacagttttgtgatagagtctttaggattttttatatgtaaggttatgtaatcttacatataaaatatagagacaatttcacttcctctattgctatgagtatgacttttatttctttcttttgcctaattcttctggctaggacttccagtactaagttgaaaagaagtgttgaagagagtatcattatcttgtctctgatcttcgaggaaaagctttcaaattttcaccaytgggaatgatgtcagctacaggtttgttatatatggcctaacggtgttgaggtgcattccctttatagctaatctgctgagaggttttatcatgaatagttgttaaattttatcaaatgttttttctgcatctactgagatgatcataggatagttatctctaac

SEQ ID NO: 754129 - DNA, 617 bp, Homo sapiens
gagctgctttttttttttctctcaagtgtttcaatcccttatttgttattggtctgttcagattttctatttttcatgattcagtcttagtaagttgtattgtgtctaggaatatatctacttcctctagttatccaatctattgatctataattgttygtagtagttttatgatccttagaagtaattagttttttaaaaaatgccatcaattaaataataaatgggaaaaaactaaagtgtatttatatgtgtgttatgcttatataccattgtggtaggcaggcattctttctgtattataacatgctagtggtgttttctttactttttaaatggtgtgagcaataaattcacctagcatattctttcacccaaattaaagttcttaggtaccaataaaggttatccacacatttgtcatgtatggttttaaacaccttgcctctcgtgagtgagatggagaatgagaacagtggggtcaaaagtgatattgggctgataagagctagtttagaaagaactcaacaaaagcctctgaagtgtgatccagaccagcagctctgtccagtgattttgccagctaaggcattatataaaaacacacagtgtggaat

SEQ ID NO: 754130 - DNA, 654 bp, Homo sapiens
aacatttctataacttgggctgcccaggggcttgcttggcataaacccacctggaagctcacgggtagaggggttcacagtaagaaaatgtaactgctgggtacccagagccctttcatgtgtgagaaagttctgcttgcagggtggcaaggatcaggatcagcrtgtgctttctatccactggtaaaacgtggattggagaaatactgccttttccttcagaatgctttggtgtctggacacatgacaagcctcagaagctttgatcttactttaaactggtctcccatcttatttttatttgaacagagtttgtggcagtcagaggatacataagggtggcgtcctttgacctccctgatgtttgggaggtaaaccacctccatccctcagaccaggaatgtagtcatgtgaattgatatctgcagagtgcctgacacagctggagggctaggccaagccagctacaaaagaacttgaggtgtgggaaagtttcttagggcatagtaatagctgtatggcaaagccgaggataaagttgctactgtctgcttgttcattcacaagtacttattgagcttctgctatatattgggtgataggctgggcctgcaaatagcataaaactattaactatagagtaaaacagccttc

SEQ ID NO: 754131 - DNA, 613 bp, Homo sapiens
cttttactcatggcagaaggcaaagtgggagcaggtgtcttacatggcaggagcaggaccgagaagtgggccgggaggagaggggaggcgctacacacctttaaacaaccaggtctcatgagaactctatcacsaggcagcaccaaggggatagtgctaaaccattcatgaaggatccacccccatgatcgaatcgcctcccaccaggccccacttccaacactgggggttgtaattcgacatgagattgggtggggacacagatccaaaccctatcactttgattttatatttttgtttcttttttcttactctgaaaatcttggtttctgttaacacaatccagttgctgcataaaatgaactatcacatttacctatttattacacatttaccttgatttattgtataatataaaaaagtttcaaaattacaattcaatattgttaataacaataaaactagagttaagtaacaagattttttgaagatttttatccttcaaacatatctatgtatgtgaagttagaatagtatattaaactcatttaaataattttttctttgttttcatattaccaatttgatatatcattagggtcatttattcatg

SEQ ID NO: 754132 - DNA, 653 bp, Homo sapiens
ccagtacaaagggtaaaattctggataaagcaaatgaattaatagctcaccttaataacaaaggttgctcacaaagttggcttggttaacaaatgtttttcaagtttctatgctaaatattctcaaacaacaattgcaagggaaaaccatgtgtttttattacatgtgacaccctaacagtaaaaatgaagtttgagaattaaaggaagagccttacttgaccactgagactatcagccatttgagaccatttaattatactgtactgrtaaaaagtttggcattagtgttaaaagaatttctcttattttcaccaaagaaattcctggatggtatcgtcttttatctgatgcttttctctggaaggagtagttatgaatctcctcgcttaagttctagattaattggactatgtttacacatgggtggtagcattgtgattgaaaagggcacttggttaaatggagctcctttctacttccttcttttacgtggctgctgcgttaagatggtaagatggctgagccttttggcaggtagaaggagacccaatcatcttttatgtcatctctcattctcctccacatatctctgtcctcagagagtctgcatgccctggccctctctggttatcacttttcctatgcttcttt

SEQ ID NO: 754133 - DNA, 608 bp, Homo sapiens
atgtcactttaacaatattgggtaacttttcaacaatgccccattttactggtaccaatttactgtattactccattttcatgctgctgataaagacattcctgagactggagcaatttatacaggaaaaatagtttaatgaacttacagttccatgtggctggggaggcctcacaatcatggcagaagggaaaaaagagcaagtcacgtcttacgtggatggcagcaggcaaaaagagagcttgtgcaggaacactcscctttttagaactatcagatttcatgagacttattcactatcacgagaacaacaccagaaagacctgcccccgtgattcaattacctcccattgggtgccttccacaacaagtgggaattcaagatgagatcttggtggagtacagccaaaccatgtcttgacaaactaccttaaattcagtggcttaaaagaatagccactgattcccatgttcccaggcctgtgggtcacaccaggttcgtcttctttctttgagatgtgagtctagggtcaggaggggcagctctgctttaggctgtggatcttcaaggcagctggtgtaactgctcatgtgtctcacttggcaac

SEQ ID NO: 754134 - DNA, 549 bp, Homo sapiens
ggagaggaccagggttgcattccggggtagggggctggctgcatggacccctggagctaagctggtaggcaggggcgggccagcccatctcccttgcagaggggctcaatgccagggtatgctcacagaggcctgggtgccaaggaccctcgattgggtttggctgaaaaaatagcagatgcgagyggtcagcttctcctccaagtccattaagtcctcacaaggctgggccccacagacctgggtctctggtgtcctcagcatccctgtgtggcttcttgagtctgactctgaggacacccctgcaggctgctgatcacagagcaagaggtgtgtggatccctcagggcacggggagctgttggggcacctcacgtcactcctggggctgtggcttaggattcaggctggctccagacttcctccttcacctcctcatcccagggctgtgtggcctgggtagcagccctaattcagaaccaggtgggagaggccttggctgtcacctagcccccttgccacctcacacaagacactatctccacagtg

SEQ ID NO: 754135 - DNA, 647 bp, Homo sapiens
tcctgagacctgcccagtgcactgagggtgcacctggggcctgtcccacctgatgtccccaagtgccccgcaaggtctgatctctcagcctccatctacctcccccggggggtgggggcttgctttgagctgtccccacctttctggatagaactaatgtacttcttacatatattgattgatgtctcatgtctccttaaaatgtataaaagcaagctgtgggccaggcgcagtggctcacgcctgtaatcccagcactgtgggaggccgaggctggtggatcacgaggtcaggagatcgagaccatcctggctaacacatagaaactccatctctactaaaaagtacaaaaaattagccaggcgtggtggcgggcgcctgtagtcccagctacctgggaggctgaggcaggacaatggtgtgaacccgggaggtggagcttgcagtgagccgagatcgcaccactgcactccagcctgggcgacagagcgagaygccgtctcaaaaaaaaaaaaaattatctgggcatggtggtgggtgcctgtaatcccagcctttcaggaggctgaggcatgagaattgcttgagtctgggaggcagaggttgcagtgaactgagatcgcgccactgcactccagcccgggtga

SEQ ID NO: 754136 - DNA, 628 bp, Homo sapiens
tacagcaaaagcagtattaagaaggaattttatagcaataaacacctacatcgaaaaaagtagaaatatttcaaataaacaatctaatgatgcacctcaaggaacaagaaaaacaaaagcaaaccaaactcaaaattagtaggaaaaatgaactaatgaagatcagagcaaaaataaatgaaattgaaagtaaaaataaaatacaaaagatcaataaaacaaagagttttgtttgtaaaaaaataaacaaaattaacaaatgtttagctaaacaaagtaagaaaaaagaaagactcaaataaatgaaatcagamatgaaaaaggagacatgacaattgataccacagaaatacaaagaatcattggagtctattacaatcaaccatgagtcaacaaattggaaagcctagtaaaaatgtataatttctcaggcacatacaacctatcaagattgaaccaaaaagaaatagagagtctaaacagactaattacaagtaatgaaatataaccagtaataaaaactctctcatcaaagaaaagcccaggacctgatggcttcaatgctgaattctaccaaacattaaaaaaaatacttaatacccattcttttcaaactgttccaaaaaat

SEQ ID NO: 754137 - DNA, 628 bp, Homo sapiens
tacagcaaaagcagtattaagaaggaattttatagcaataaacacctacatcgaaaaaagtagaaatatttcaaataaacaatctaatgatgcacctcaaggaacaagaaaaacaaaagcaaaccaaactcaaaattagtaggaaaaatgaactaatgaagatcagagcaaaaataaatgaaattgaaagtaaaaataaaatacaaaagatcaataaaacaaagagttttgtttgtaaaaaaataaacaaaattaacaaatgtttagctaaacaaagtaagaaaaaagaaagactcaaataaatgaaatcagacatgaaaaaggagacatgacaattgataccacagaaatacaaagaatcattggagtctattacaatcaaccatgagtcaacaaattggaaagcctagtaaaaatgtataatttctcaggcayatacaacctatcaagattgaaccaaaaagaaatagagagtctaaacagactaattacaagtaatgaaatataaccagtaataaaaactctctcatcaaagaaaagcccaggacctgatggcttcaatgctgaattctaccaaacattaaaaaaaatacttaatacccattcttttcaaactgttccaaaaaat

SEQ ID NO: 754138 - DNA, 615 bp, Homo sapiens
tgactatgggttgtgactggcaaggagtgtttcttgttagtctcaagatggagctggttggtctttctctggctcccctaggcacctgcttccctaacacttatatagggaaacggcaaataaatataataggattacattttccatagaaggctgatgtatgaggtacaataatttaatttttttttttttttgaggcaatgtcttgctctgtggcccaggctggagcagtggtgccatcacggcttactgcagccttgacttccccatcttgagcacctccgcctcccaagtagctgagactatagtcgcccactaccacacctgggtaatttttaattttttatggaggtggggtctcgatacattgcccaggcttgtctctagctcctggcctcaaacagtcctccttctttggcctccacaagtcttrggattgcaggcgttagccagtgcacctggctaacaacttaatttgttatcgtttgcttttttcccccagagcttgttttcttttctttctagctggtttttatttccttttcaatttaaaagagtgaattcaacattccaactgaagacaatgtgatagccatgaagtctttgtgtgagaaa

SEQ ID NO: 754139 - DNA, 647 bp, Homo sapiens
ccgatggacatttgggttgtttcagttttcgattttacaaatcaagttgggttgttatgaatattcatgtacaattcattatatggacatgtgctttctttcctcttggctaaacatctaggagtggaatgtctgaatcatattgtcaagtatacgttttgttttttggcaactgccaaactgggccaggcacggtggcccacacctgtaatcccagcactttggaaggccgaggcaggtggatcacttgaggtcaggagttcaagaccagcctggccaacatagtgaaaccccccatctctactaaaaatataaaaattagctgggagtggtggcacacacctgtaatcccagctactcaggaggctgagacaggagaatgtttgaacccaggagacagaggttgcagtgagttgacattgtgccattgcactccagcctgggtgacagagcgagacttcgtcaaaaaaaaaaaaaaaaacctgcctractgtgcaaactgtgtaccaaaagtagtgtgccattccacattcccaccagtggagtatgagagttctgcttcctctacatccttcccgcaacacttggtatggaccgtctttttaatggagtttgggaaagttcttaatatattctggatacaagtt

SEQ ID NO: 754140 - DNA, 574 bp, Homo sapiens
aaaatctacattaaaactctttgttggaatgctttacattttccacagaacagagactaaaataacctgttatacaattagttgcaaatacagtcctcgagttttttgcccatacacgtgagtatttgtctaaaacatgtcttctttttagcagctaggccctgccaccactgtgcgtggctgagttcacaaatctgttgtaacctgtagcttccctgtcacttctctggctctcctctcctgctaagctttgttttctaattaaaatcttctgccactgccatagctactgctgctactggaaccgccatagccaccttggtttcgtggtttggcaaatattggcctccaccactataggggccaragcttctgcctccaaagtttcctctcttcatgggtccaaaatttgaagactgattgttgtaattgccaaaatcattgtagcttccactacgtccaaagttgcttccatcattaccaaatccattatagccatccccactgccaccatatccaccaacaacatggctgccaccaaagccaccatgaccactgaagtttcctccatgac

SEQ ID NO: 754141 - DNA, 572 bp, Homo sapiens
actgatctttgacaaggatgtccagaatatacaatgaagaaaagtcttgaatggctattaggaaaataggtattgcgggaaactagatattcacatgcaaaagaatgaaactaaacctttatcttaaatcatacacaataaaatccactcaagacttaattataacacctgaagctgtaaacctagaagaaaatttagggggaaaatttcatggcattggtcttggcaataatttgagatgctttcttagagagagtttcagttaagaaaatttttcttaacagtcattaaaaagtaatgtataaacttcaagtaaaacaatttttggttggggctttctggttgccttagtcaactcaggccgcataacaaagtaccctagactggtggcctaaacagaaaygttctcacaattctggatgctgagaagtccaagaccaagattggctgatttggttcctgttgagggctctcttcctacatacagatggctgctttctcactctgtcctcacatggtgaagagagaatgctcttgtgtctctctctgttcttataagaacaccagcacta

SEQ ID NO: 754142 - DNA, 566 bp, Homo sapiens
ttgtatgggatattttcataagtcaagccacaatttaaaatgcatttttaaatattttgatttgttaatgtgtgtatttttccatttaactaaaaatattctccatagacttggggatagaatgatttctgtgtaagaaataaatctctctctatatatgcatgattcttagatttaactacacactatagaaacctctccagttattaatcttacatctgacttaataatataaccgcttgggtatatcactgcagctgccaaaaaatttggcctgagggtataatcagctgtagtaacagttttgccattttattatccgtctatcagtcaartattagacacatctattatatttatttaattacatgtataaaatcaatatagattatagatttggtatatagagaaaatatatgtttgtgtgtatatatatgtatacacatacatacacacacacatgtttacttgagcattaaaaaaacccaaacggcctctcttcttgtgcctctgcacataaaggccacaggcctcaaattgctcagagggacaatgttttctcacca

SEQ ID NO: 754143 - DNA, 698 bp, Homo sapiens
aatacagttaatgattattaagtgtgtaatttatgttctgattgctttgttactgggagcctggattttactgtcttcctttatacagcatttagatttgtttcagcagtctactactgctgatcagcttaatccttttagtgattgatattaagcattgtatgggcagtcatagagttgctcttcttcttacgttttacctttcttgtgtctcaatttaatgcccagagtgttcagcaaaatctttactctgacttgttagaacttctcattacttgtcccacttcacagagtctcattgtagacaaagactgtgcagatttctgaaactccttttttgcttaactcctcttcagaactctgcctcagaaatgtcatttgactcagcatgyctgaatgccaatccctaccttttctgctctgtgagattgctttgttctgcttgggatttacctttctgtaccatagtctgatatgtgcccccatgcatgaagctgagacaattataggactgcatcttgagttttccttctttcagggaacacagtgctgtgctttctgttatcaggttgtccaatacctgaaaacagttgcttaaaataactttcctagttttatagtttgtaaaggcaagagtggtagtctgatcccattatggattgcagcaggatccatatactacactgtgacaattcttt

SEQ ID NO: 754144 - DNA, 617 bp, Homo sapiens
aagtgcttctctagggactaccatacgagaatttaaattgtatgatgtctgttttacattgactgaggttgggagtgttacagcttgagagtttactattttcaaatgaatcaagatgttgctcttaaaaacctacgttttggtctttaagggcagaataatttattttcttacgcttttgaaggtcagaaggggtcaaaaagccattagatgatctgcttcacaactgctctaatgctactgtgtcatcttggacagatcacctcctaatttttttttttaagatggctatgcattttctcttcactttcaagtgttccaacttgtcactttttgcttcggtwtaggaatcttttggtctaaaacttctctgtatcagccctaaaaccactgagattacatttgtataaaaaatatattaaaaataaaataaaaagtgaattcaaaaataaaatatggtgataatataagacatgatattccattgtttggcaatattacatcaaagggaaagctagttggtacaagttgcatacttcaattcaaaaataagtgcctaagagtggtgtatttgcaaatggactgacatattgttttttaaaaggctgatgatcaca

SEQ ID NO: 754145 - DNA, 617 bp, Homo sapiens
aagtgcttctctagggactaccatacgagaatttaaattgtatgatgtctgttttacattgactgaggttgggagtgttacagcttgagagtttactattttcaaatgaatcaagatgttgctcttaaaaacctacgttttggtctttaagggcagaataatttattttcttacgcttttgaaggtcagaaggggtcaaaaagccattagatgatctgcttcacaactgctctaatgctactgtgtcatcttggacagatcacctcctaatttttttttttaagatggctatgcattttctcttcactttcaagtgttccaacttgtcactttttgcttcggtttaggaatcttttggtctaaaacttctctgtatcagccctaaaaccactgagattacatttgtataaaaaatatattaaaaataaaataaaaagtgaattcaaaaataaaatatggtgayaatataagacatgatattccattgtttggcaatattacatcaaagggaaagctagttggtacaagttgcatacttcaattcaaaaataagtgcctaagagtggtgtatttgcaaatggactgacatattgttttttaaaaggctgatgatcaca

SEQ ID NO: 754146 - DNA, 603 bp, Homo sapiens
gcaattttctcatttgagttcaaaatgtgtcgtaaaacagtggagacaactcgcaacatcagtaaagcatttggcccaggaactgttactgaacatacaatgtagtggcggttcaagaagttttgcaaaggagatgagagccttgaagatgagaagcatagtggctggccatcggaagttgacaacaaccaattgagagaatctttgaagctgatcctcttacaactacacaagaagttgccttaaaactcaacaccaaccattctayggtcatttgtaatttgaagcaaattggaaaggtgaaaaagcttgataagtgggtgtctcatgagctgagcaaaaattttaaaaaatcatcattttgaagtgtcatctctcattctatgcagtaacaatgaaccatgtatcaatcgaattatgatgtacaacaaaaagtggattttatacaataaccagtgatgaccaaccagctcagtggttagaccaagaagaagctccaaagcccttcccaaagccaaaactgcacgagaaaaaggtcatggtcactgtttggtagtctgctgccagtctaatccactacagctttctgaattctggcaaaag

SEQ ID NO: 754147 - DNA, 543 bp, Homo sapiens
atacactggcaaagcaagtctttccatgaaatttatataaagtgatttaaacaagcaaataaggtgaaaacatgaggcacctgaaatatttgttagattagtaatactctacacctgctgtagagtattgccacctctcaaaccccaaattactgctttgatgtgacagtcaacggccccttgaaattttatcttttcaaataatatacttgctatgtaatatttctattattttcaaagcagtagttggaactattcagcatttgccacaaaacaaaccaaggtagtaatccattactccagcttttgtgttccaaaagtatatctgaaaatcagycattagaaatttagaacacatttttctggagaaaaaaactacacaaatagccaaaaaccacttccagagatttgcaagctactcatagggagtctcagaatcctatttaacctataatataccaggaacgtcagtaagccaccatatataattctctctcgtgctcgcgccttagcagtacttccctagctacagacaggatccag

SEQ ID NO: 754148 - DNA, 628 bp, Homo sapiens
tacacctgctgtagagtattgccacctctcaaaccccaaattactgctttgatgtgacagtcaacggccccttgaaattttatcttttcaaataatatacttgctatgtaatatttctattattttcaaagcagtagttggaactattcagcatttgccacaaaacaaaccaaggtagtaatccattactccagcttttgtgttccaaaagtatatctgaaaatcagtcattagaaatttagaacacatttttctggagaaaaaaactacacaaatagccaaaaaccacttccagagatttgcaagctactcatagggagtctcagaatcctatttaacctataatataccaggaacgtcagtaagccaccatatataattctctctcgtgctcgcgccttagcagtacttccctagctacagacaggatccaggattaaacattgggaggaaaaagctatctatgaaaaaaaaaatctttcgtgaattcacrtaaagtttatttgtgactcctaaatcaatgcccatggtgcttctgtggtcatttgtgacatgtggagaatgtcaaaaaatttgagtcccgtaacatacatttctaaatgaggtgaagcaggataatgctctgcct

SEQ ID NO: 754149 - DNA, 518 bp, Homo sapiens
aaatgtgagactatgtaaaaagaccaaacttacaattgattggtgtacctgagagtgacagggagaatggaaccaagttggaaaacacacttcaggatattatccaggagaactaccccaacctagcaagacaggctgacattcaaattcaggaaatatagagaacaccactaagatactccaaaccccaggaaacataagcatcagattctccaagattgacacaaaggaaaaattgttaagggcaaccagagagaaaggtcaggttacctacaaagggaagccsatcagattaacagcagacctctcagcagaaaccctacaagccagaagagagtgggggccaatattcaacattcttaaagaaaagaattatcaacccagaatttcatatccagccaaactaagcttcataagtgaaggagaaataaaaccctttacaaacaagcaaattctgagggattctgtcaccatcaggcctgccttacaagagctcccaaaggaagcactaaacatgg

SEQ ID NO: 754150 - DNA, 550 bp, Homo sapiens
atttctgatgatttctataagcacagaaaaacaagaacatgctcctcagtctctctgaggtactgtgccattccttgaccacttaccctgtgggtagacactcttctagtctcttgtactggtagccagagttagggttgatttggcctcctggggtacaggctgtagcctggatagttagttgatggcaggcacacttggacctatatgacagagggaaataaaggaaaggagcggggggatcagagaacaaaaataacacaatacacwtgtacccaaggttgctcagtgtggccatgtcagactccagcctccctacctcatagctttcatggaggccttatagcaggagttccaggtgagggaggaggtaaaggaagatggggaaagcagtacagatacaaggcaaaggaagaggtgaaacagacaccataacaaagttggaagcaggggcagcaattccccccaccaactcacttgtcccgacacccatccttgcagtcacagccaaccagaaattcagggcctgtgttaatgaaaacacccttgc

SEQ ID NO: 754151 - DNA, 613 bp, Homo sapiens
gctactgagtcagatgaaatcttgtgtgttggcatacttaagaggagaaaatgcaaaaagagagcctcggatctgcacagaggtttcctttgacctcttggctgggagtaagctgtgcatgcacagtgcaaaataacatgatgcctagcagagagtggcttctggaatgagagccacagagatgcagagatcatgcagtgctctaatatgtagtagcttcagtcatgccagagtggaaatatactactgggcaacttagacattcaatgtagacccaagagaagtgatgctttgggaataaggaacatgctagggcaaaggagacaaatccaatgtaagtctcctttwacaaagcataaaccaagtcagataagatcaacaggatgttcgagtcatttaattgttgtcaaaacaaaactcaacacctttcaaagaaagactacctatttcagatatcctacaacaaaatattcataatgttttgcatacagaaaaaaataggtatgcaaatgaaaaccttaaaaaggtgactgacaaccaagagaaaaacacaggcaatagaaacagaccatgaaatgaccacaatgttggaattagcgacaatatgtgaaat

SEQ ID NO: 754152 - DNA, 471 bp, Homo sapiens
gccccacagttaagaaacttgaatacatgcaggctcgtgagctttatttttatcaattccattttaatattttactgaccatcacctatgcctaggttttcataatagcaagtaaaatggctgaatctttgcacactcatagaattcttcttctcaaactatagaaactacggtaagggatgtctgcaaagagatatgattgaaaccatccttgccactggacttcttgcaacaaagcaaacaaattttwaaagtaatacaattaactgccaagatatttctcaaatattcaaatggaggagcagtttaccttaacctcaattaccttaatagaattaaggggtagaattcttagaaagtatctgttaagtgcttaacatgttcttgtagaataataataaagttagctattgctctagttgtctccccacagtttttgtgtactaagatgggtagagaaaaattatcagt

SEQ ID NO: 754153 - DNA, 633 bp, Homo sapiens; identical to SEQ ID NO: 746024

SEQ ID NO: 754154 - DNA, 630 bp, Homo sapiens; identical to SEQ ID NO: 746025

SEQ ID NO: 754155 - DNA, 614 bp, Homo sapiens
atagcttagcttgggctcagaggcctgacacctagcatgccccttacttgtaatactgattgtttagtttcccatagttttagccactccttattaatatattatacattacctttttattatatttattacttagtgtctatttttctctaaagaaagtgggctctaagccagrcatggtggtgcatacctgtagtctcagctacagaggaagctgaggtgggaggattgcttgagcccaggagtttgaggccagcctggacaacatagcaagaccctaggtcaaaaaaataaaaaataaaaaacaaaaaacagaaaaaagaaagtaactaagcttcataagatgttgggtctttgtccaattgtctactcttatattcctagatcaatgcctgacatatagaatgtctttaataaatatttacggagtaagttttctttactcttttaaaataacttacaacctaatctcaagggacatatatcaactgactggaaaatatagaaggatgagtagagtttttaccctttactttctatatatctatatactttccatatatatatatatctatatttctatatatctgtgtactttatatatatataaagta

SEQ ID NO: 754156 - DNA, 614 bp, Homo sapiens
atagcttagcttgggctcagaggcctgacacctagcatgccccttacttgtaatactgattgtttagtttcccatagttttagccactccttattaatatattatacattacctttttattatatttattacttagtgtctatttttctctaaagaaagtgggctctaagccaggcatggtggtgcatacctgtagtctcagctacagaggaagctgaggtgggaggattgcttgagcccaggagtttgaggccagcctggacaacatagcaagaccctaggtcaaaaaaataaaaaataaaaaacaaaaaacagaaaaaagaaagtaactaagcttcataagatgttgggtctttgtccaattgtctactcttatattcctagatcaatgcctgacatatagaatgtctttaataaatatttacggagtaagttttctttactcttttaaaataacttacaacctaatctcaarggacatatatcaactgactggaaaatatagaaggatgagtagagtttttaccctttactttctatatatctatatactttccatatatatatatatctatatttctatatatctgtgtactttatatatatataaagta

SEQ ID NO: 754157 - DNA, 628 bp, Homo sapiens
  misc_feature 596, 597, 598, 599, 600, 601, 602, 603, 604, 605, 606, 607,608, 609, 610, 611, 612, 613, 614, 615, 616, 617, 618, 619,620, 621, 622, 623, 624, 625, 626, 627, 628: n = A,T,C or G
aactagtggtcgacttattaaaattttaaccacttatttcatattgttgagcaagttactctgccaatattaagctaaatttctcatttggttaaagtcactgcttcctttttgcacagacaaaatcaattaaataaaatgcaaggaaatagattacttgagtaaaaatgtgaaaaaagagmccgtattatcttttatctaacaaccacacaacgtaagaataaaaatctagattttgttctttgttggacaagacagggtttagtgactctgcagaaatcacagtgcaatttatgttttcatccccatcctacatttttaacacactcctggtcactaaggctctgtttgtggcagtatctaatctgaaagctatctctaaagcaaagccctttcagaagcattctgatttgccatctctccgttgcagcgaatgcttctttgtcagtccttcagagcttgtagctgtcttgatagaggctgggtctccattttccaaggggagttttcagtgaactgtaatctatctttccattggctgagtctgtaaaccttggtgggctgggtgggtccaaaaaaaaaaaaaaaaagagtgnnnnnnnnnnnnnnnnnnnnnnnnnnnnnnnnn

SEQ ID NO: 754158 - DNA, 524 bp, Homo sapiens; identical to SEQ ID NO: 746021

SEQ ID NO: 754159 - DNA, 607 bp, Homo sapiens; identical to SEQ ID NO: 746022

SEQ ID NO: 754160 - DNA, 537 bp, Homo sapiens
tctgtcccaaaatcttgggagaaagctacgaaataatatggtggagagactctgtggatgtaaagaaggagtcaatgtggagaaacccgcagccagaaagcagattgtcatctgaacaagaaaattcgtactggagtaaaaccatgcaaggcagtgtgtgtggaaaagtctttgtacatcattcattccttcataggcacatgagctcactctggacacaaacaatatgagtgtggtggggaatatggwgaaaagccccataaacataaacaatgtgggagagcctccatttctcccagaagtggtccaagactcatggtaatatgcactagaaagggatgttataaatgcaagctatgaggcaaagcccttaatttcagtatttatttcacaatgaactcacactggaaagaggttctataaatgtagagaaattgtgagagccttcactgttttcatttactttcaaatacatgaaaacattcacactggagaaaaatgctgtgaatgtaaacactgtggaaaaacatttgattg

SEQ ID NO: 754161 - DNA, 622 bp, Homo sapiens
cataattggataaagtattccataaatgtcagttagatttggttggtagattgtgctgctcagttcaactatatccttacagatttttttttttgcctgccggatctgtcaattactgactgatagcgggtgttgaagttccaagtataatagtgacttcatgcatttctctgtagttttatcagttttgctttatgtcttttgatgctttctttttaggtgcatacacatttaggattgttatgtcttcttggggaattgatgcccttttcattatgtaatacctttatctctgataattttttctagttctgccaatttgccatgttgggaattgacatatgtactccatcttttttgggttaatgttagtgtatctttctctacttttttcttttcgtgtgtctgtatctttatgttcaatgtgagttttttatagacaacatatagttgggagttgggtctttctttttatscattctgacagtctctgttttttaattggtatatttagatcattcacatttgaagtgtctgttgatatagttggttaatatttaccatatttacaactgatttctgttcactgcacttgttagtttctaagattttaattatcctg

SEQ ID NO: 754162 - DNA, 441 bp, Homo sapiens
taaatccatgtatttcatgaattctggaaaaatttcagctgttaatcttttaagatgttacctgtacttcattcttcctctctcctatcattctagtgttccagttaaatatgcctaagacatttcttctatcccttatctttcttaaccctcttatatagttcagtcttttttggtctttccatcagccatcagccctttgagtaattctcacctatcttgtttggttaattcttttttgagctttattgctctcctttacatgctggggctgagtttttaatttcaatgatgatgatgattttyataagaagcaactgcttagttttttttcttttctttttttctgttttttttgagatggagtctcactctgtcacccaggctggagtgcagtggtgtgatctcagctcactgcaacctctgcttcttgggttcaag

SEQ ID NO: 754163 - DNA, 600 bp, Homo sapiens
acattaaatctcttcactttcttggttcttagtactcttgcaaatattttattatctagtgatctattgacttctccagagatttctttacaaactgacaaccaaaaataacaactactgtctttgaagagtaacctcctgtggttaacatctctctaattgtttctctaagataatcttgataaaagaagtttgttctattctcttttgtttttttctttaaaaagtgcattttagcatctactttatgctaggtacttttaatccccacaacataagtrttattggcttttttaacaactaaataaatagaaacccagagaagctcagctctttccccaatgacacacaacttataagtagctgagtcataacctcaaatgagattcatatgctggttctaatgctctcttctctttaccagatttacaatgaaataaataaaaaataagatactaatttaacacaaacaataattttcaacctcgatcgttcaaactcattttttaaaattattataaacacaaggtaatggacgaaaagcaaaaatattccaatgatacaggatccttaccttttcatgatttttaaaaattataa

SEQ ID NO: 754164 - DNA, 631 bp, Homo sapiens
tgctaaatgcggaaatggctcttgaaaaatcactgctttccctggatctctactttgtctcttatttactggaaaaagcaatttaaaacgacctctcaccaaactgctgtagttgccttacctgcaaaattgagaaataatgggttgatgggagaattaaataaatttacatatgcaaactgtttagaaaaatgcctgagcctactctgtatgttattttattagtcgtattattttctttcctttaagacagagtttcacactttcacccaggctggagagcagtggcgcgatctmggctcagtgaaacctccatcccctgggttcgagcgattcgcctgcttcagcctccccagtaaactgagatgacaggtgcacaccactacacccgactaacttttgtacttttagtagagaccggggttttgccacattgatcaggctggtctcaaactcctgacctcaggtgatccgcctgcctcggtctcccaaagtgctaaaatgacagtcgtattattttcatattagtgttagtgggatcattattgttaccgttattattaaaaaaccaatcattttcattcgtctaaattgaggcataatgaacaagtgttcaatcatctacttaatt

SEQ ID NO: 754165 - DNA, 459 bp, Homo sapiens
gttctgaacttctatatgattattttcttaaatctcctatttatatttcagcgtaatggtttcatggtttgtatttgacctttgttttatgtatgacacattactttttattttacttaagaaaacttagtgacttgtccagtggtatttcctttgytagtttattcgtttaacactgaacacataacatgtggtagggatttgttatatttttagaataaaaagggcagaaaaggtgtggtccctgccttcaagaagctcagtggttccaaactgtagaataaagtagttccaaaaccagcataagtctatgattgttttcaatatgtttaaaaatcttaaggctaatcaataaccaaaggctgcattggtgaagtgaaacatgccattgcacttgtttcccttttatctagatatatcaacataatgtataatatttgcttttgcaaggagaggaga

SEQ ID NO: 754166 - DNA, 459 bp, Homo sapiens
gttctgaacttctatatgattattttcttaaatctcctatttatatttcagcgtaatggtttcatggtttgtatttgacctttgttttatgtatgacacattactttttattttacttaagaaaacttagtgacttgtccagtggtatttcctttgctagtttattcrtttaacactgaacacataacatgtggtagggatttgttatatttttagaataaaaagggcagaaaaggtgtggtccctgccttcaagaagctcagtggttccaaactgtagaataaagtagttccaaaaccagcataagtctatgattgttttcaatatgtttaaaaatcttaaggctaatcaataaccaaaggctgcattggtgaagtgaaacatgccattgcacttgtttcccttttatctagatatatcaacataatgtataatatttgcttttgcaaggagaggaga

SEQ ID NO: 754167 - DNA, 459 bp, Homo sapiens
gttctgaacttctatatgattattttcttaaatctcctatttatatttcagcgtaatggtttcatggtttgtatttgacctttgttttatgtatgacacattactttttattttacttaagaaaacttagtgacttgtccagtggtatttcctttgctagtttattcgtttaacactgaacacataacatgwggtagggatttgttatatttttagaataaaaagggcagaaaaggtgtggtccctgccttcaagaagctcagtggttccaaactgtagaataaagtagttccaaaaccagcataagtctatgattgttttcaatatgtttaaaaatcttaaggctaatcaataaccaaaggctgcattggtgaagtgaaacatgccattgcacttgtttcccttttatctagatatatcaacataatgtataatatttgcttttgcaaggagaggaga

SEQ ID NO: 754168 - DNA, 625 bp, Homo sapiens
tggtggttgtctagagtgtggctgtctgggtgcttcacatgcaattgagttatcacttcctagagacttttgaaagttaggtaattaaacgtttttgctgggttcattttaaaattagagattgtgggtctgtaaatgacaccgaaaatccgggtttccgtcatctcactgtctgtttcatgggaggactcagataattctttgagtatttagtttgtgtgagaaagaaaagcccttggtaattaaaaaatcgtctagcaaaggctcaggtttactgctctgaggtccacaagccatcgcatttgagtcaccatgaatggttacgttcacaataatttagcatatctgtgctgcatcccacaatgagcttccactttcgagttttccatgttccaggaccacatttcatctcaacgtgttcaccctgaatcatcctgtattcatyaatggaatatgacagggtctggaatttgaacaaattataatataatgctttatgaggtctgttctgtcatctgcatgcaaagtattttattttaaaataatttatgtgtttaaagatggttcacaagcactaggtaatttaatgtatgtagcacttcctcagttttggctcagcgtcttc

SEQ ID NO: 754169 - DNA, 626 bp, Homo sapiens
ttataatataatgctttatgaggtctgttctgtcatctgcatgcaaagtattttattttaaaataatttatgtgtttaaagatggttcacaagcactaggtaatttaatgtatgtagcacttcctcagttttggctcagcgtcttcctctccatttcacatttagagcaagtgagaggggaaggttaagtgatgtgatgagggagtgtggcagagtgacaatgcagagtggtggcgttkcactcgctgacttctcgacgcaggcttctcaacccactgagcctcctggctgtagtaggcaaggactcggtcacatgaagaccaagaaataatttatcacattagatcaccatgagaataagaccacgaattggcagagtgcttcacaattttcagaggatattgaagtgttctataacatgaagcatattgcatagaataaaaagatatactaaatacatccatgaaagagatggacaggtgcaatacatatattcttgaaatataattttaggactatgattatcgcagatattatctctctatacaaacgagtaaactgacatccagggggaaaaaacatcgtccctgcagaatcaggtctatacctcattttatatgccagta

SEQ ID NO: 754170 - DNA, 626 bp, Homo sapiens
ttataatataatgctttatgaggtctgttctgtcatctgcatgcaaagtattttattttaaaataatttatgtgtttaaagatggttcacaagcactaggtaatttaatgtatgtagcacttcctcagttttggctcagcgtcttcctctccatttcacatttagagcaagtgagaggggaaggttaagtgatgtgatgagggagtgtggcagagtgacaatgcagagtggtggcgtttcactcgctgactwctcgacgcaggcttctcaacccactgagcctcctggctgtagtaggcaaggactcggtcacatgaagaccaagaaataatttatcacattagatcaccatgagaataagaccacgaattggcagagtgcttcacaattttcagaggatattgaagtgttctataacatgaagcatattgcatagaataaaaagatatactaaatacatccatgaaagagatggacaggtgcaatacatatattcttgaaatataattttaggactatgattatcgcagatattatctctctatacaaacgagtaaactgacatccagggggaaaaaacatcgtccctgcagaatcaggtctatacctcattttatatgccagta

SEQ ID NO: 754171 - DNA, 626 bp, Homo sapiens
ttataatataatgctttatgaggtctgttctgtcatctgcatgcaaagtattttattttaaaataatttatgtgtttaaagatggttcacaagcactaggtaatttaatgtatgtagcacttcctcagttttggctcagcgtcttcctctccatttcacatttagagcaagtgagaggggaaggttaagtgatgtgatgagggagtgtggcagagtgacaatgcagagtggtggcgtttcactcgctgacttctcgacgcaggcttctcaacccactgagcctcctggctgtagtaggcaaggactcggtcacatgaagaccaagaaataatttatcacattagatcaccatgagaataagaccacgaattggcagagtgcttcamaattttcagaggatattgaagtgttctataacatgaagcatattgcatagaataaaaagatatactaaatacatccatgaaagagatggacaggtgcaatacatatattcttgaaatataattttaggactatgattatcgcagatattatctctctatacaaacgagtaaactgacatccagggggaaaaaacatcgtccctgcagaatcaggtctatacctcattttatatgccagta

SEQ ID NO: 754172 - DNA, 504 bp, Homo sapiens
gaacatcacacaccggggcctgtcattgggtgggggaagtggggagggatagcattaggagatatacctaatgtaaatgatgagttattgggtacagcatgccaacatggcacatttacacatacttaagaaacctgcacgttgtgygcatgtaccctagaacttaaagtataataaaaaaataaaaatgcttcgagattttggctggaataattttgcatagatgcatttgggaaaactgtagtctaggcacatatgtatgtcttcatttatggagatctgtcatgcccttctgtggaattttataagtatttaagatgattttcgtaaaatccatgaggaaatgtctttatatggtttctcttgataattatacattttttgttacatgagcacaagtatttttaaatttctctgaatgattagtctcagcatttataaaagttacttatcttctacatttgtatgtacctatcccagttaaggaggtatctttgttgcttg

SEQ ID NO: 754173 - DNA, 577 bp, Homo sapiens
tatgtacagagacactttgactgagttaagataagaagatagtctaaaaaagaaaatatttcttagctcttgtcttcttggaaaaatgtactatggatacaactaaataatacctttcaggaaatactgctttataatgttatctaaagtacaaatcctcccaactttttatatctaaaaatgatttggatttcgacaaagcgatgcagtgggttaataacagtttggacataccatgttaatgaacactgaaaagcccttagcttattgaaggccataatttgcagatgtacactgtcgagtcccaaatggatgcaaggtgaaaagaaacaaaacttttaaatgccamttaaaacaagtagagttgactatcatggtgatagaaaatagacatttattttcaaatgtagagacttgtgaagaaaatcacatttgcctttacgaaacataatccctttctttttattctggtacctgtgcactatcattctcattaaaacatcatcctgaccaatcccgcacatagctcactggggctctgcctccctcaccgctggctgctggtctacctgcctga

SEQ ID NO: 754174 - DNA, 661 bp, Homo sapiens
tatgaaatatgtaattattaaaattattgcaatgaatttcttaagttgaaattgctaacttggtaaatttataaattaaaaattactaaactggaattattaaagtgaaacttttgacgctggtacattccaagaacagataattatcctctgtacaagatcattgacattttcctgaataaacaagcatggttttagaagtctagagtaaaataaaaataaaataatacacgtgctaaccacaagtcatcactaatggttcttggaattcctttctcaagaagggtcttaaccttatttccatggccaaacggcaatacstctaaacaccttcagaatatatgaagtgtttacactatcaaggaccgcttagcaactatgctgaacatttaaatggcttttacgtttaatgtaagattttgtgatactccaatgtcaaactaaaagtaaccttggaagaaatctgtagtaaaatttataaaatgagcatattgtctctaaagataacatttaaccctttaatgaaaaagttttcagatttgttaagaatattctaatccatatcaatcaatagattttcttttctgtgataatctatgactcatgacaatattagatgtggcagtgaaattagcaaagcgagtggagactgcatggacag

SEQ ID NO: 754175 - DNA, 661 bp, Homo sapiens
tatgaaatatgtaattattaaaattattgcaatgaatttcttaagttgaaattgctaacttggtaaatttataaattaaaaattactaaactggaattattaaagtgaaacttttgacgctggtacattccaagaacagataattatcctctgtacaagatcattgacattttcctgaataaacaagcatggttttagaagtctagagtaaaataaaaataaaataatacacgtgctaaccacaagtcatcactaatggttcttggaattcctttctcaagaagggtcttaaccttatttccatggccaaacggcaatacgtctaaacaccttcagaatatatgaagtgtttacactatcaaggaccgcttagcaactatgctgaacatttaaatggcttttacgtttaatgtaagattttgtgatactccaatgtcaaactaaaagtaaccttggaagaaatctgtagtaaaatttataaaatgagcatattstctctaaagataacatttaaccctttaatgaaaaagttttcagatttgttaagaatattctaatccatatcaatcaatagattttcttttctgtgataatctatgactcatgacaatattagatgtggcagtgaaattagcaaagcgagtggagactgcatggacag

SEQ ID NO: 754176 - DNA, 608 bp, Homo sapiens
agcattacaacgttaaggtaacctgccagacgtccatgtggagatagagatggacagctgcattttagaggagggagactgtggtgatataaatctagaaggcgttagtatacagacggaaagagataaattcactgatgacctgaatatagacaggaaacacttggatrttcagccctaaattatttccatatctgaaaccaggacaaggaggaagactaaacaaagaacacaaggacaggctaatgagacgggagaaaaatcagaggtctcaggaaacaaataaaaatgctgtttaaataaagagggcattatcacagaaaattatgctgacgaggaaagaaaataagaataaaaacccgatcattatattcggaaatgcagtcatcgatgatccacacaaaggtgttttgttggtgtggaaattctgaagacagtaactgattgcagtaggttcaagagagaattggaagaaatgaaaaaaggggaaaaataaagtatccacaacttcttcaaagagatttgcggcagaggggagcagagaaatgatcaatagctgaaaggaaaagtgagtcacacaaaagttttctttaaggtgaatgaaatac

SEQ ID NO: 754177 - DNA, 614 bp, Homo sapiens
aacctgcttttgatttgcccatatgagaaaccatgagatggcttcgagtagcatttaactttccgagctgtaactgaaagttaaagagaaattccactactgtttggaagcgagaatcagtcctttcccactcagcctccacacaagatgcccacctcaacctgcttttgtcttggttagaggccaccttcctcatgggatccgtctttggaatcagcagtttttgctcccacctcataagcttaccggccattcagggactggagcaagctgcatgtgacacattcccccacctgtgcaagtacttttcatatttttcygtattggagtatcttggtcatttataatttatgatttcaacttgaaacaacttgccttggaaaggagcaaatattcattcagatatatgacgtcataactttccatttaactatttgttcttttgttcattaattattaaatacatgtttattgaatattttgaggagtgtgaggaataaaactgaataaaaatcaacccatccctgcactccaggagaaaggtgggaatacacactttgcatgagtatcatttggaaactgaagactagcactgtttcaaagctccaatgggt

SEQ ID NO: 754178 - DNA, 614 bp, Homo sapiens
aacctgcttttgatttgcccatatgagaaaccatgagatggcttcgagtagcatttaactttccgagctgtaactgaaagttaaagagaaattccactactgtttggaagcgagaatcagtcctttcccactcagcctccacacaagatgcccacctcaacctgcttttgtcttggttagaggccaccttcctcatgggatccgtctttggaatcagcagtttttgctcccacctcataagcttaccggccattcagggactggagcaagctgcatgtgacacattcccccacctgtgcaagtacttttcatatttttccgtattggagtatcttggtcatttataatttatgatttcaacttgaaacaacttgccttggaaaggagcaaatattcattcagatatatgaygtcataactttccatttaactatttgttcttttgttcattaattattaaatacatgtttattgaatattttgaggagtgtgaggaataaaactgaataaaaatcaacccatccctgcactccaggagaaaggtgggaatacacactttgcatgagtatcatttggaaactgaagactagcactgtttcaaagctccaatgggt

SEQ ID NO: 754179 - DNA, 614 bp, Homo sapiens
aacctgcttttgatttgcccatatgagaaaccatgagatggcttcgagtagcatttaactttccgagctgtaactgaaagttaaagagaaattccactactgtttggaagcgagaatcagtcctttcccactcagcctccacacaagatgcccacctcaacctgcttttgtcttggttagaggccaccttcctcatgggatccgtctttggaatcagcagtttttgctcccacctcataagcttaccggccattcagggactggagcaagctgcatgtgacacattcccccacctgtgcaagtacttttcatatttttccgtattggagtatcttggtcatttataatttatgatttcaacttgaaacaacttgccttggaaaggagcaaatattcattcagatatatgacgtcataactttccatttawctatttgttcttttgttcattaattattaaatacatgtttattgaatattttgaggagtgtgaggaataaaactgaataaaaatcaacccatccctgcactccaggagaaaggtgggaatacacactttgcatgagtatcatttggaaactgaagactagcactgtttcaaagctccaatgggt

SEQ ID NO: 754180 - DNA, 543 bp, Homo sapiens
acttcaaactatactacagggctacagtaaccaaaacagcatggtactggtacaagaacagacacgtagaccaatggaacagaatagagaaccaagaaataagaccgcacgcctacaactatctgatcttcaacaaacctgacaaaaacaagcaaaggggaaaggattccctatttaataaatggtgctgggagaactggctagccatatgcaaaaaaaaattgaaactggaccccttcctgacaccatatacaaaaaccaactcaagatggattaaagacttacatgtaaaacccaaaactctaaaaactctagaagaaaacctaggcrataccattcaggatatgggcatgggcaaagatttcatgacaaagatgccaaaagtaattgcaacaaaagcaaaaattgaaaaatgagatctaattaaactaaagagcttctgcacagaaaaaaaaaatcaacagagttaacagacagcttacagaatgaaagaaaatgtttgcgaactgcatctgacaaaggtctaatatccagcatctataa

SEQ ID NO: 754181 - DNA, 526 bp, Homo sapiens
gtcaaacatgatgcatgatctgtcagacagattatttccaaacctatctcacaataaaaaggaggaaaatcatctgcatgcagtaactaaactatatccttagaaaaattattcctcttttttcttccttttcttcccttcctttctctccaccccctttctaaaatagctattattttctgaaaagtgagtcctattaataatacctaatgtacctggcccaatgcacatccagttgcatattgcatgggcctgagctgttttaaaaaattccatgattaaaagcttgcattcttttctaccaaatagaaaacatttggcaagaaaattytagcaaaacaccaaacccatttttgatgaaaaactggaaagactttttactctgaagacttttgaaagtccctgtatagtccgggcactaaccagccatgaaaaagaaggggaacaaggcttttaattaaaatagtcatttgcataatatagcttagagtgggaaattttattgaaggatccctccccgtcagaa

SEQ ID NO: 754182 - DNA, 598 bp, Homo sapiens
caaagaaaaacaggacaggaacattagcacttttacaaataaataaattcataagaagaaatcaacttatttaatcatcaaaaaaataaaaattaaagccctagtgtggtatcacgtttgagcattacttagaaaagattcaaaatggcaataatggagtattaactcaggtgaaataggaaatttcgtagtttctttgggaacgtaagttggtaaagtatttttagaaaaccagttcaggctgggcgccgtggctcacaactgtaatcccagccctttgggaggccgagggaggaggatcacgaggtgaggwggtcgagaccatcccggctaacacagtgaaaccccgtctctactaaaaatacaaaaaattaaccgggtgtggtagcgggcgcctgtagtcccagctactcaggaggctgaggcaggagaatggcgtgaacccgggaggcggagcttgcagtgagccaagatcgcaccactgcactccagcctgggagacagggcgagactccgtctcaacaaaaaaagaaaaccagttaaataatacatgtcaagaggctttaaaaatggtcaaacccttggtccagaaattcta

SEQ ID NO: 754183 - DNA, 629 bp, Homo sapiens
gtagaaacctttagccttgaacaggaggcccttcattgtgtgtctcttaaccaccttccaggctttgttcttcctacccccaccatctactgccctttctccattgttcttttgagcctctatgaccttgcaaactctgctccccattcctggaatatcctttcaggtgaactttatcttattctctttttcttttcttccccagtgtcccaaatttgctttgtcctaagaatctccagggtctaggggcacgcagcacaccaaatccatcagaatctctagggcagaaatcttaaaaactggattttgttatccaggtatactcaagcaagagtaagaaacactggcctcaaaaacactcgagagacaatgggaaagaaaatttcaattcctatgtccatgttgtcttaaacatcacatcttctaactttatgatcaatgcttgtgattctcttcagaatgttttccagaataatctaagkaaaatgtctgtgggaaacaaaacagctgccactgaacctcaacatttatctgtatgcattatgtcaaggcgtgggagggggatgtacgtgtgcacagaaattcacacaaacacacagggtcacatgtatctgaaaatgccaatgtct

SEQ ID NO: 754184 - DNA, 590 bp, Homo sapiens
tcaaggttacattttctgggtccttttgtgccacactgttttcaggtttttagacagccctggggaaaaagtacctctggaaaaggaaattaagcaaggcttgaatgcttgggctactttagcttcgtgtgtgtgtgtgtgtgtgtgtgtgtgtgtgtgtgtgtgtgtgtgtgtgatgatagaactctagccttaaatattctcttatttgccctacagacaataagatcagattaattaattagttccacaagtgtttatttagtgacggacagtgttggaactgttgaggatataacactgaacaaaagaccaagtccttgccccatggaactcacattctmtatgcaacacatcaataataaatagaatgtcaggtactgattagtgctaagaagaaaagtaaaggtgggtgaggggatcggcaaatagaaggggtgctgctgttttatttagggtggttagagaaggccttaatagtaaggtggcatctgaggagagacttgaaggaagtgagggagtgcgctaggtggattggggtgcagactggcagagacaagtgtgtgcaggggccctgaggcagggacatg

SEQ ID NO: 754185 - DNA, 589 bp, Homo sapiens
tgggactcttggggtgacccacgccaagcacctcagtatgtagggaaggaaactgaggtcttctttcctgtagccccttcagtctagggggctcatcctggttgaaggtgcccacagcagtggacacaggaccccaggccctgctttcccctgactgccgtggaggtggyaccagaccaggctgacccaggggaccttagggatcccccagcctggcctctttgcatctctccccttcccatgctatgggccctggtcatggttctggtgactggatgctgctgtctgtagcagagctgcctcagcctctttcttctttccctttgttacctacccaggatctgcttctcctcccatcctacccttagtcaccccctgtgatgtcagcttgtgcgtgtctgtgggtatgcacctttggggatgctgagaggaaacagcctctcctgggaaaagtgagtcagggtctgcaggattttaggggctccgattcccaaagcaaccccatgggatatggttcagccctggcctaggagatggtaactggactctgcccatgtcctgtgtcctgggccagcccctcctctctctg

SEQ ID NO: 754186 - DNA, 589 bp, Homo sapiens
tgggactcttggggtgacccacgccaagcacctcagtatgtagggaaggaaactgaggtcttctttcctgtagccccttcagtctagggggctcatcctggttgaaggtgcccacagcagtggacacaggaccccaggccctgctttcccctgactgccgtggaggtggtaccagaccaggctgacccaggggaccttagggatcccccagcctggcctctttgcatctctccccttcccatgctatgggccctggtcatggttctggtgactggatgctgctgtctgtagcagagctgcctcagcctctttcttctttccctttgttacctacccaggatcygcttctcctcccatcctacccttagtcaccccctgtgatgtcagcttgtgcgtgtctgtgggtatgcacctttggggatgctgagaggaaacagcctctcctgggaaaagtgagtcagggtctgcaggattttaggggctccgattcccaaagcaaccccatgggatatggttcagccctggcctaggagatggtaactggactctgcccatgtcctgtgtcctgggccagcccctcctctctctg

SEQ ID NO: 754187 - DNA, 631 bp, Homo sapiens
tggggaaggctattctaaagaagaaaaaaaatgggacaggttttctgggtagatctgcaagtctggctttaagagcacaaggaggaaaagtaacaaaagggctggactactgtaaaagttacaaatacgtagttagaccaatagatctatatagtcaggtttttgtcatgtaatttattaactattacagaaacacaactaagaatatcaagtatttctctggctcttgatagaaaaaaaaatcagctgacttaatcctttrctgtcaaaagagttggcgtttcctgttctgggtgctactgccaaacgttctggtgcttagaggtgggatgcacgacgtcaaccaccgacttatcaatgcagccggctgtgtgtcacaattggccgttaccttaagcactgagccacacgggattagttcagccatttcaagaggtacatttaacgtcggcagttctgctttactaaaatgcagtagaggtactcttctgtcccttccgtttatagttctctgagagagttatattttttggttttgttttgtgttttcttttgaattttatatcttgtatttatccctgaacatgttttgtacttttttttttaagaaaaggaattattttgtgtatat

SEQ ID NO: 754188 - DNA, 515 bp, Homo sapiens
ttattttgtttgtttgtttctctgagacagggtcttgctctgtcatctaggctggagtgcagtggtgcaatcgcacagctccctgcagcctctacctcccaggcccatgtgatcctcccaccacagcctctcgagtagctgggactacaagcatgtgccaccataactggctaatttttttgtattttttgtagagacgagatcccaccatgttgaccaggctggtctcgaactcccaagcccaagcaatcctccagccttggcctccaaaaatgctgggattacacagacggccactgtgcccagccccttttggtyttttgaacctgtctccttcttgccttcaacaaatgcagtgcctagaggtacagcaggtaactagtaaccataaaatgacaggctaaatacttaggacagcagaggcaggaaggtgagaagaatgtgtgtccctaatgcttccttgagaagctgcaccaacattggcctgcctatatctggatttcttgttatatgag

SEQ ID NO: 754189 - DNA, 515 bp, Homo sapiens
ttattttgtttgtttgtttctctgagacagggtcttgctctgtcatctaggctggagtgcagtggtgcaatcgcacagctccctgcagcctctacctcccaggcccatgtgatcctcccaccacagcctctcgagtagctgggactacaagcatgtgccaccataactggctaatttttttgtattttttgtagagacgagatcccaccatgttgaccaggctggtctcgaactcccaagcccaagcaatcctccagccttggcctccaaaaatgctgggattacacagacggccactgtgcccagccccttttggtcttttgaacctgtctccttyttgccttcaacaaatgcagtgcctagaggtacagcaggtaactagtaaccataaaatgacaggctaaatacttaggacagcagaggcaggaaggtgagaagaatgtgtgtccctaatgcttccttgagaagctgcaccaacattggcctgcctatatctggatttcttgttatatgag

SEQ ID NO: 754190 - DNA, 549 bp, Homo sapiens
ctcctgggctcaagtggcctacccaccttggccttccaaagtgctggggttacaggtgtgaactactgcactcagccaaaaatagtttgagggaagtctttgttaagaaaaacagaaggccctgggtgcatttcaggtggttactattccttccccttgccaggaacatgaagggatttttccctgcttcacccttagaacctamtagggatcctggagataaaaattatgaaagtatggggttatcctaaaaccgaatcttaacagatgtcttaactctcattctagtccacattgagccttcagaaagtcaccgtgttaacttttcctatcactactgctcccaatggcaggattttgctttgggcttctgctcctggtcagttgtgattcttggtatttgtccctccttccagttctgggggccacagttagccctgtgatctgaattctctgatggctctacgaagagttgttgattttcagtttgttcagcttcgtatatgctgtgaggatgggagtaatgacctctaagctctttacatatca

SEQ ID NO: 754191 - DNA, 674 bp, Homo sapiens
aatagcatgcattgcacataataaagtaagtattaaaagagcttgaaagttttcactcccatactaacaataagaaaaaggaactgaacaaactgaaaatcagctcctcttagattcatcagagaattgatgtgaaaaggtaaattgcttcccccaaaaactaaagggacagacaggtgaatacagagaatcacagtttaccaggagcagaaactcaacaggagaagctggaagctgcagccattattgataggtatattttaaaytgtaattgatgaattgctggctgttcagtacagactagtttgagttaaaaatttcaagcatccaatgttaaggagacttccacacatttgtgagttttacctctaggagccctactatgttctcattgtaaaaatggaagaaaaatcccctcaggcaggaagagggaagagtaattgttttaaaatacatccagagttgtctgttcctcttaacaaggcctaccctcaagggaaactatttaccagatcctaactggctggggtttttctaaatcataacctacatgggggaaagaaacacccaactcaagctcactataagacagacttaatcataggactcaaatgctttccctccttggggattacagctcaaagaactgtaagcctcaggccctacagaaggag

SEQ ID NO: 754192 - DNA, 636 bp, Homo sapiens
tagacaactgaatttaagatgttaatcagtgtggagtgcattaaaatcacaaggctgtcctctacgagactaactgtattaaagagaattcaactggccaagtagaatggctgatactttaaacctgtattgactcatatttgaaatagtaagacacttgaaattgaattctttattttggtttacatagtccttgatggcttgaatgtgtcatagatttctcaaataactaataaaagttggaattactttccataagaattaaaagtggtattttggtgcccatactgtgaatcagtgtaattcttcagagaaagaacttcaaaaaaagcaaataaacatgaatgtgaatcactggtatgggccaagtgattggactaaatctactctcatgtcccttaaaactgtaaagtataaactgtcatgyagtgtaatgtaaagcacatgagttctgaattagactgtatttgaatcttgcatctggcagtttttagttacatgactgcaatgtattcaatttctctgagtctcagtttcctaataaaaatgattggattaaaaataaaatacttctcttgaaaagctactgaatacagtcaccagaaatgatacaaaagcgtttgggagggctcccag

SEQ ID NO: 754193 - DNA, 484 bp, Homo sapiens
atcccagcactttgggaggccaaggcaggtggatgatgaggtcaagagatcaagaccatcctggccaacatggtgaaaccccgtgtctactgaaaatacaataattagctgggcatggtggtatgcacctgtagtcccagctacttgggaggctgaggcagcagaagtgcttgaaccagggaagtgtaggttgcagtgagccgagatygcgccactgcactccagcctggcaaaagagtgagactccatctaaaaaaaaaaaaaaagaaactcaaagcccttattttacattttagtgttctgacttgaccatttattactttttaaaaaaggattgtattagtctattttcatgctactgataaagacatacccaagactgggcaatttacaaagaggtttaattggacttaacagtttcacatggttgaggaagcctcacaatcattgtggaaggcaaggaggaacaaatcacatcttacat

SEQ ID NO: 754194 - DNA, 618 bp, Homo sapiens
atattcaaaaaaagttttgccttttagtcactgtattaatccattttcacactgctataaagaaatacccaagattgggtaatttataaaaaaaaaaggtttatttgactcagttccacatggctggggtggcctcaggatacttacaatcatggtggaaagcgaaggggaagcaggcaccttcttcacaaggcagcaggagggagtgagtgaatgaagtgggaactgccaaacactattaaaaccatcaactmttgtgagaagtcactccctatcacgagaacaacatgggggaaactgtccccatgatccaatcactcccctcctttggcacgtggggattacaggtccctcccttgacatgtggggattacaattcgagataggatttaagtggggacacagagccaacccatatcattctgcccctggctccacccaaatctcatgtccttttcacatttcaaaaccaatcatgccttcccaatagtcccccagagtcttaactcattccagcattaacccaaaagtccaagttctaagtttcatctgagataagtcccttctgcctatgagcctgtaaaatcagaagcaagttagttacttgcaagttaaaat

SEQ ID NO: 754195 - DNA, 555 bp, Homo sapiens
ttccccaagctgttcccatgacagtgaatgagttctcatgacatcttgtggttttacaaatggcagtttgcccttcactttctctctttctcctgccaccatgtaagatgtgccttgtttcccctttgccttccaccatcattgtaagtttcmtgaggcctccccagccatgtggaactgagagtcattaaacctcttttcttttaaattacccagtctcaggtatttcttcatagcagtgtgaaaacaaactaatacactccgtatcttcaagttgtatccttttctttttagtatgtcttgtagttttttcttgatagccggacatggtgtagcaagtaaaagttactgctgtaatagggtggtaggaaggtgagggaatgtgttctatcctgctgtgattagatctcagtctttcaatgagcctatagctttgactgtggtttcacaagtgcttcccagtctcccccagccctcacttatgtgagacagcatggctagagtgggctgaagtcggttattttccttccaccgcatggagggctagagccagct

SEQ ID NO: 754196 - DNA, 555 bp, Homo sapiens
ttccccaagctgttcccatgacagtgaatgagttctcatgacatcttgtggttttacaaatggcagtttgcccttcactttctctctttctcctgccaccatgtaagatgtgccttgtttcccctttgccttccaccatcattgtaagtttcctgaggcctccccagccatgtggaactgagagtcattaaacctcttttcttttaaattacccagtctcaggtatttcttyatagcagtgtgaaaacaaactaatacactccgtatcttcaagttgtatccttttctttttagtatgtcttgtagttttttcttgatagccggacatggtgtagcaagtaaaagttactgctgtaatagggtggtaggaaggtgagggaatgtgttctatcctgctgtgattagatctcagtctttcaatgagcctatagctttgactgtggtttcacaagtgcttcccagtctcccccagccctcacttatgtgagacagcatggctagagtgggctgaagtcggttattttccttccaccgcatggagggctagagccagct

SEQ ID NO: 754197 - DNA, 528 bp, Homo sapiens
tgactgtggtttcacaagtgcttcccagtctcccccagccctcacttatgtgagacagcatggctagagtgggctgaagtcggttattttccttccaccgcatggagggctagagccagctggagtttggatttcccttcccccaggtctgttaggtctggataaaattccagaaggtttagctctggttaaatagtttctcctgaggacaggccttgttaagaagaagagagttctctggtgtatttcagaatgatttcttttcccctcctcatccgagaagcaagaagggattttcctcctgcatttactgtgagaacctggtygagctcctggaggtaaaacttaggaaactgttggggaccttctgtgagttgttggtcaatgatggagttttaaactcttatacttgttcacactgagtctgcagcaatttgttaattatggttcaagttttcctgttcttgcactggtttccaaggcagtttctgctctggcaagctgtgacttcctgtatttgcctgtctt

SEQ ID NO: 754198 - DNA, 644 bp, Homo sapiens
atttaagacagaatgccttagaacaggtagaggtgttaacctaagtattaaatatcagtcttttactttaggtatatagtgggtttcattttgtggcacacgagttcaccaattacacaactatcgtagacaaatgaagtcatgcaaacaaaaactggatactcacagcacagttaagctttataatcttcgtagctcttgataaatttttgaaaaatgcaggctgggcatggtggctcacacctgtaatcccagcactttgggaggccamggcgggtggatcacctgaggtcaggagttcaagaccagcctggccaacatggtgaaacccgtatctacaaaaatacaaaaatcagccaggcgtgatggcgggtgcctgtaatcccagctattcaggaggctgaggtgggagaatcgcttgaacccaggaggcagaggttgtagtgaaccgagatcgtgccactatactccagcctggacaacagagcaagactccgtctcaaaaaataaaaaaaaatgcatagttataagttgttcagaagagatgtgaaatactgaggcacatctactgaaacatgaaaataattaagagtatctaaaaaggattttaataattttaactgtataaacatttattaccacta

SEQ ID NO: 754199 - DNA, 584 bp, Homo sapiens
tctttacaatagaatgatttacattcctttgtgtttatgcccagtaataggattgctcggtcaagtggaatttctttcttcctttttaaatttatttttaatttttagtttactttaagttctgggatacacgtgcagaatgtgcaggtttgttacattggtatacatgtggtatggtggtttgctgcacctgtcaagttgtcatctaggttttaagccccacgtgcattaggtgtttgtcctaatgctctcccttccctgattttaggtatttgaggaatcaccacactgttttccatgacagttgaattaatttacactcctcccaacagtgtgtaagcattactttgactccacaaccttaccagcatgtgttatgtttttagtaatagccaataattttaatktttaaaaaagtaataagtcgctagtcaaggaaatgcacatggagattgtgatgagatacagttccatactattacactggcaacaattaagaattctgtctgaaccgagtgttggaaggcatgtggataaataggatcgtttatacactattaatgttagggaagggttgtaaaatg

SEQ ID NO: 754200 - DNA, 549 bp, Homo sapiens
acatacatatttctactttaaatttttctcaaatttctcaagatattccgagtaattttccatctttgtctttcctgtaggctttttcacacatgcagttactcatctttcttatgctcagtgcctaacctagtatgtgtcatatagtaggtgtttaayaaatatttgtggaatgagtgaaggccctgaaagcccatttaatatatttttgtgctccttatccttggtagcatgcttatttagcagtctacctagtttttacttttccaaagtcatatacatttaaaaggtcagtcagtggcaaattggataaagagtcaagacccatcagtgtgctgtattcaggaaacccatctcactgcaaagacacacataggctcaaaataaagggatggaggaagatctacaaagcaaacggaaaacaaaaaaaggcaggggttgcaatcctagtctctgataaaacagactttaaacaaacaaagatcaaaagagaaaaggccattacataatggtaaagggatcaattcaacaagaagagctaactatcct

SEQ ID NO: 754201 - DNA, 494 bp, Homo sapiens
ccatgtgccttcatgaaatatttcattatgctggtggaagaaatattcaaatgaatgtgctttttcagggatggtgacaccagaatgttttaaatctgttcattaccacaacaaggataaatggcgtttctgccaaagacttttgataacgggtgcagtaatgcatgccagcactttctgaaattaaaggttctaccctgagaggtaagtaggataatgcatggctaacaaatgcaaacccaaatttcagagctgagtgtttcttgtcagtatcaccgatcgtttccaacagacgctgccttarggagtttgtaatgtcatttctactctcttgacattaatgtccaggtgagcctaccccaaggtttgtaaaagagcagatccttattaacttagcatgctttattgtgatttttcttatatttggattcacatatgcttttaacagctgcattttaaaaatctgctatggtttaaagacagtatttcataaa

SEQ ID NO: 754202 - DNA, 548 bp, Homo sapiens
gccagactgaggactacccggtggatttgtattacctcatggacctctccgcctccatggatgacgacctcaacacaataaaggagctgggctcccggctttccaaagagatgtctaaattaaccagcaactttagactgggcttcggatcttttgtggaaaaacctgtatccccttttgtgaaaacaacaccagaagaaattgccaacccttgcaggtaagtaaatgattctcttggcatctytgtgcgctgattttctgtggagatactcccgctctgagctgcacttgccaggagcttgctaactccctggcatttctgccttgtctggttggatctcagcagttctctcagaggcctaggttgcttagagtggaggtgaggtcatctgaactacatggttctagccgtgggtccttgaggcctctgcatttgcctcccagtatagggcaggatgtggcaaaccagaatgcgtgttatgcaggcgagggaaccaagactttcaccataggctccactggatggtgcccagccccagcctctcaga

SEQ ID NO: 754203 - DNA, 660 bp, Homo sapiens
tggggattctgagtgggggctccaaacccacatttcacctccacagtatactaataagaggttctccttgagggctctgcccctgcagtggacttctgcctggacatccaggtgtttccatacatcctctgaaatttaggctgaggttcccaaactccaactcctgtcttctgtgcacccacaggcacaacaccacccttcagagggtaaaagccaccaaggcttggggcttgccaccctctgaagacataacctgagctgtacattggcytctttcagccatggctggagctagagcaggtaggatgcaaggcaccatgttccaaggctgcacagagcagcggggccctgggcacagcccacaaaaccatttttccttcctagacattcatccctggaatgggaggggctgctgtgaaggtccctgaaatgccctggagacattttcccccatggtcttggttattaacattcagcttcttgttacttatgcaaatttctgcagctggcttgaatttctctccagaaaatgggcttgtctattccaacacatagttatgctgcaaattttccaaacttttgctctctgcttcccttttaaatataagttcaaatttcagaccatctctttgttcacacatgagtgtatgcttttagaaa

SEQ ID NO: 754204 - DNA, 558 bp, Homo sapiens
agttagtattttattaaaacaatattccaaccagtagtgaaaaaaattatccatcaatggataccggactatccatgaaaaaaaaatctactcctagatatttacccaagagaatgaaaacatacatccatacaaagctttgtatgtaaatgtttataacaatgtattattttcataattgccaggaactggaaacaactcaagtgtccttcaactgaaaatggttaagcagattgtagtgtatctgtacaatggaatactattcagcaattcaaacgaacaaattactgatatacacacagcaatatggatcagtctcaaaagaattatgctaagtgaaagaagccagacttaagaggcaacatactatatttttccattcgtatgacttcctgggaaatgcaaaactatagaggagacrgatcagttgttgccaggggctaggagtgtaaggaaggtattaaacacaagggatcatgaaggagcttttagaagtggtgaaaatattctgtatttttattttgatgaaagttatgactgcataaatttgttaaactt

SEQ ID NO: 754205 - DNA, 643 bp, Homo sapiens
taatggtataaaaaagtagaaagaatgaataagacctactatttgatagcataacagagtgtctattgtcaataataacttaattgtatattttaaaataacttaaagagtgtaattgggaggctgaggcaggagaatcacttgaacctgggaggcagaggttgcagtgagccgaggtcgcaccattgcactccagcttgggtgacagggcgagactctgtctcaaaaaaaaaaaagaaaaaaaggaattgaattgcttgtaattcaaaaaataaatggataacccattctccatgatgtgcttattacatattgcatgctgtatcaaaatacctcatgcaccccataaatatatacacctatatacctactatgtatatayttaccatgtattgtattttgtgcacccacagaaatccaaactaaaaagaaatttaaaaatcaccaaaataagatgcaaaggtgacataactgagatagaaaagggaacgatgagaaaaaaagtgaaaaatatctaaaaaaaaatgatgaaaaattgaaatcctcattggcagctacaagcaacagagttgatgttataaagaaatcaaaaatggaacaaagaaaataatgaggacaagttttgttttggaggaaggagaat

SEQ ID NO: 754206 - DNA, 629 bp, Homo sapiens
aaaaaaatgaaagaaaaatatgtaaagattcaactagatgaaattttcttgagcttagagctaggagattaaaagaatgcaacatgttcaaagaaaaagtgacagagagaaatcaaactgaggtataaattaatagacatatagggttttaaagattttttaaaaaatatttggacatttagacaaagaacttaaataaaataatcagacttttgttaatatagaaaatagcagggtaattattacaaaatcctcatggaaagaaagtgtgagtccctcagaatttcctatcctgaataagagaagaagcaatagacaatacatttactcattcaagatgcaatgatttttgtatatggtgagagataagggtctagttttattcttcggcatgagactttctattttccccaacackacttattgagaaaagtatcttttccccagtgtatgttcttggcaccttaattgaaaatcagtttgctagaaatacgtggacttatttctgggttctttatttttttccatgggtctatgtgtttgtttttataccaataccatgctgtttgcttactatagctttgtgctttttgtattacagtacattttgaggtcaggtagtgtgatgc

SEQ ID NO: 754207 - DNA, 611 bp, Homo sapiens
aaaaacagagaacttaagtactatagaccaaaagcacctaacagacgttacagagcattgcatgaaacagcagcagaatatacattttcctgaagcacatctggaacactttccaagagagatcatgtgttaggccacaaaacaactcttaaaaaatttaagaagattgaaatctcatggagtatctyttttgaccacaatggtataatactggaaataaataacaggaggactcttggaaaattcacaaataagtggaaattaaacaacaccctcctgaacaaccaataggtcaaagaactcaagtgggaagtaacaatgtatcttgagacaaataaaagtgaaaacataacataccaaaactaatgggaagcagcaaaagtagcatgaaagagaaatacataatgataaatgtctacattaaaaaagaaatatctcaaaaaaacagcatctctttatatgtcaagaaactagaaaaataacaaactaagcccacagttaacaggagaaagtaataaagattaaagcagaaataaatagagagtaggaagacaactgaaaagatttttttttaaactgtgttttttaaaaaagataaacacaaagacaag

SEQ ID NO: 754208 - DNA, 616 bp, Homo sapiens
gacctgctttctcatcttttcattaagatacttaaaccggtggagaaaagctacacttcttaaggttaagggatgtgtttaattcacaatataactgttcagtatataccagaccttaggctaagctacaaggagtaaggccatgaaaaacctactggcataactgggaagacacacttggttacaatacagtatgatatgaaatataagagggataagcataacagtctatgaaagtaaaaagatgagagcaacttagtaacagagaaccagggaaacagataatgttttgggaagaggtaaaatctaaattcccttgaatgatgaatggtttcctaggctgmgaaccagaggaggacattctggtgcatgccatgtataaagatatggagcaatttgtttcattgagggatcaagaaaatgctaagaatcattttggaatttaaaacagagttaatgaaagttaagattttgctgggagggaagctgacaaagaatatcttgaaaacctcaacatttctaggtttgactctagtagtggatgctgttggtgccctgcccatataccctgccctattcactgaaaagtggccagttaccagcacctgcattcttt

SEQ ID NO: 754209 - DNA, 622 bp, Homo sapiens
cagttaccagcacctgcattctttgttggagagccttctttgatttctgaagtccattttgctagtgaatacagcaatctaaaaaggggaattattgctccctgtgagcatcccttagccattactctcaggagctggtatttaaatactcctgcttccttgcttatttagtgggacaacaatgaatatattctatacttgttcctatagcccttgtagctagtttaagctccaatttcccttagtcagatcatcaagatgagatgccagcactgttgatggcaagtgggtatgatgtagtatcacaattattaagaggttcactcatgcctcttttatatatatctgcattgagatatagrtagaagataaaagtagaagaaaatacattgcttatataatacctctagtatttgagacatcaatggtaatggtaaggtttgtgtaggcagttggttgttgttaactgtcattgaaacatgggaagaaaaacaagtgagagactcaggtgagtcaactactaattcaaggaacagtatgaacaccagaaggtctttgggtagcatttaccatgacctttatctttttaatcatagggcagaatacattgaaatctaggttt

SEQ ID NO: 754210 - DNA, 581 bp, Homo sapiens
ccttttttcagggtagctgtgatatgtctcaaataaattaagcctcccatttcatttattttctttcttttcctttttttttttttttttttttggagagacagtctcactctgtcgcccaggctggagtgcagtggcgcaatctcggctcactgttgcctccgcctcccaggttcaagcgattctcctgcctcagcctcctgagtagctgggactacaggtgtgtgtcaccacgcccagctaatttttgtatttttagtagagacagggtttcaccatgttgaccaggatggtctcgatctcaatccacccatctcggcctcccaaagtgctgggattacaggtgtgagccaccttgcccggccaaggctcccacttcaatggactcatttactagaaacaaactaggtctttgataatgygtgtgctggcccgtgtgaaccaccagcttcttggaaggggaaaataagagtgccttgttttcaaaccaaaaagaactagaaaagaagggaaggcctgtcttcctctggctgtggtagtccatcatggaaaagagcgttacactgcccttcccttggggt

SEQ ID NO: 754211 - DNA, 604 bp, Homo sapiens
ctgattccaggatgagaaactcagattgttggaatatacagagcatattccttgtgaaaattatcaaaatcaaaatagagtcatttgttttaaaaccctgacaaatggagccagggaagaccatgaagagagggttctcacgcatgaatacctgataacaaaaactatcgaccgggcctggtggctcatatctgtaatcctagcactttgccaggcacagtggctcacacctgtaatcccagcactttgggaggccaaggcgggtggatcacctaaggtcaggagttcgagaccagcctggccaatatgatgaaaccccgtctctactaaaaatacaaaaattagctgggcatggtggcacacgcctgtagtcccagctgctcaggaggctgaggcaggaggctgaggcacttaaacccgggaggtggaggttgcaatragcccagatcaagccactgcactccagtccagcctgggtgacagagcaagactccgtctaaaaaaataaataaaataaaaattcctacttgagccaggcacagtggctcatgcctgtaatcccagaactttgggaggccaaggcaggtggatcacctgaggtcag

SEQ ID NO: 754212 - DNA, 398 bp, Homo sapiens
agtttgtttcaagattaagaaataagtctataaataagcagtaacataataaatcataatacatagtgtggggaaaagtaagaggcagatgagacagagagtcactcgatggctgctttagaggggaaagttggaaaagtcattctgcagaaatagcaactaagctaagacccaacaagctaatgatgtaattgtcaaaggaagagaatactcagcagargatattgctagctgaaatatcttaaagtaagaaaaataagcttaccctggtgtagtaactcagacattgcagtgtgctagatcataggggttacgggaaaactggatactgggcaatataaaaggtgtcagcccaggtggtggtttgaactaggatgatagcaacagagactgtgtta

SEQ ID NO: 754213 - DNA, 632 bp, Homo sapiens
tgaccagatggtaaactggaaagtaattgatcttttccaatcaatatgtggaaaacagttgactttgaccttttggatttgcttatcttgaggtgttgtatataccacaagctgggcattacaggcacccatcaattacatcgattgcccttttgrttttcccttgctgctgagctggagttgaaatcatgcattgtatctactctaagctggtttgcacagaggaagagaaaaaaggaggaagtactttggtgagtgttgatgtttgctagggaccattgtggacagcttgaacctcagttttcagaggaagactaagaggggacgccttaaaaactagtggtttctctcaaggaatctgcctcattcctgagtgtcaaggacagtcgtaatgggttccaatcacgcattgcctctgaaatcaaagtgcagcatttgatatcttgactgatttcttcttggcctgtaactctgctattttagacaaatctgcgtgggctcttgatagacaggtagtaaaaatagcaactgtgtcacatgtaactttttctaattaagcatttacatcacattttgtatttctaaagtgatttggaagcactcagattctttgccagtgacgatgcttttgt

SEQ ID NO: 754214 - DNA, 578 bp, Homo sapiens
gttgtactagtttacattcccacctgtcatgtaaaagtgttccctttttaccacattcctatttttgattttttgattatggccattcttgcaggagtaaggtggtatcacattgtggttttgatttgcatttctctgatcattagtgatgttgagcatttttgcatacatttgttggccagttgaatatcttcttttgagaattgactattcatgtccttagcccatttctcaatgggattgtttgttttttacttgctaatttgtttgagttccctgtagattctggatattagttctttatcagatatataaattgtgaagattttctcccattctgtgggttgtctgtttactctgccgattgtttcttttgctgtgcagaaacyttttagtttaagtcccacctattaatgtttttgttgcatttgcttttgggttcttggtcatgaagtctttgcctaagctaatatctagaaacatttttctgatgttaccttctaggatttttatggtttcaggtcttagatttaagcccttgatccatcttgagtttatttttgaataaggtgagagat

SEQ ID NO: 754215 - DNA, 598 bp, Homo sapiens
atttttgaataaggtgagagattaggatccagtttcattattctaccagtagcttgccaattatcccagcaacatttgttgaacagggtgtcctttaccctctttgtttttgcttgctttgtcaaagatcggttggctgtaagtatttggctttatttctgagttctcaattctgttccattggtctatgtgtctatttttataccagtactgtactgttttggtgactayggctttatagtataatttgaagtcaggtaatgtgatgcattcagatttgttctttttgcttagtcttgctttggctatgtgggctcttttatggttccatatgaattttaggattgtcttttctagttttgtgaagaatgatggtggtattttgatgggaattgcattgaatttgtagattgcttttggcagtatggccattttcacaatattgattctactcatccatgaacatgggatgtgtttccatttgtttgtgtcatccatgatttctttcagcagtgttttgtagtgttccttgtagatgtcttttacctctttggttaggtatattcctaaatatttaattgttttgctgctattgtaa

SEQ ID NO: 754216 - DNA, 449 bp, Homo sapiens
aaatgtttagttcctggcattcagtacaaaatcaatgtagacttgctattgttagaatttaaagttttgtggggttttttttttctttgctcaaggaatgtcccaatctctttccaacattagctcaacaatccagtgtgtctggagctttaaccagcttatgttgttaatctacagcccagaatatggaatcctacttagaatatctatcagctgttccaggactgagtcaaacaatcagcagaattaggaattacaagggataatwtcattaggaaaaatggaataaaatagcttccctaggacaaggtggaggctgcaaaaaactgaacacttctctaaacccagactaaagttagagatctcctgaaattggcctaatgctattggacatttagtctttgtttggtaccctaccatcccttttgctggaaagaaaggaaatcaag

SEQ ID NO: 754217 - DNA, 569 bp, Homo sapiens
tctttccattgatggcatatctatgtcagctacaatccatgttcctataaaacaatactttaagaaatataacataatccataaactacaacttatagcaaaacattgacaagcttatcagtgagtcctagttttgagtgtttatgacatgtcttttcatataatacctgattcctatctctcccagaaaatctgctcttgttaattaatggtcaggtttaaatccacagaaaccccagaaggctaggtttagtatccgggatgcattaatagagtccacttctccacacttgctcttttggaaaggtgtgctgataaaactgtgacatctaccctgccatagtgttaatattgcagaaaacaaacatttcattcatttgtgtttacgcatttaccttcaggtataatcacatttgcccctggstgaggtacagtataattattttctcgtgatgattgccaaaaagaatcatttgaccataaactgaaaagagaagagaaatacttccatgaattactacttgtgatattccctaattttgtctaaaatgtaaaccgttccatttccc

SEQ ID NO: 754218 - DNA, 691 bp, Homo sapiens
gaaatgctgattaattcgattcgaggtgtgagaaaatttgagaaacaaaattttggcatgatcaaatgggtgtattaaaattgtttacttatgtatctgtctcccctaccagattataagtagcattgacaaacagcaggagttcaacacacatttcttgtatggataaccttgagcaaaccactgtgatttagtaataatgcctctcacctctacatattctattctcccagttaccatgttagcaccaggtacaggagcatgaaacataacgcagcctccaaattggtcacttcctatttcttctccaaactttccttggagacaggtctgtgtagcaaattctccttcaaaacagtttttaaagcatcattaaaaaaattgtcggaatcctcttatattgaagattttctcataactaagtgtatcatytgattcacatatgatctcaacctcatcctagaacatagttatttgcattcacatcatttcctcttttagatagcaagataggtaagtaccttgtcttgttcaactttgtattccctaaagtacttatacagtatttttcagagaagatactaaacaaatatttgaatgatcaagggaatattgataatgggatttagttttattatttatgaagccttccccaagatttgaggattaacataatcaatgcaattttata

SEQ ID NO: 754219 - DNA, 691 bp, Homo sapiens
gaaatgctgattaattcgattcgaggtgtgagaaaatttgagaaacaaaattttggcatgatcaaatgggtgtattaaaattgtttacttatgtatctgtctcccctaccagattataagtagcattgacaaacagcaggagttcaacacacatttcttgtatggataaccttgagcaaaccactgtgatttagtaataatgcctctcacctctacatattctattctcccagttaccatgttagcaccaggtacaggagcatgaaacataacgcagcctccaaattggtcacttcctatttcttctccaaactttccttggagacaggtctgtgtagcaaattctccttcaaaacagtttttaaagcatcattaaaaaaattgtcggaatcctcttatattgaagattttctcataactaagtgtatcatttgattcacatatgatctcaacctcatcctagaacatagttatttgcattcacatcatttcctcttttagatagcaagataggtaagtaccttgtcttgttcaactttgtattccytaaagtacttatacagtatttttcagagaagatactaaacaaatatttgaatgatcaagggaatattgataatgggatttagttttattatttatgaagccttccccaagatttgaggattaacataatcaatgcaattttata

SEQ ID NO: 754220 - DNA, 572 bp, Homo sapiens
taaattttcatggtgaaaccccgtctctactaaaaatacaaaaaaaaattagccaggcatggtggcgggcgcctgtagtcccagctactcgggaggctgaggcaggagaatggcgtgaacctgggaggcagagcttgcaatgagccaagatcgcgccactgcactccagcmtgggcgaccgagcgagactctgtctcaaaaaaaaaaaaccaaacaaacaaaaaaaacactagaaattttatgtgtttgagtaacatattattttctaaataaggtttctaaataagtgtttactgaaacaaaatatctgcaggttcttgcatacttatgactaccttggcttggattaatattttgaatattaagcgggtactcaaatacaactgtggacatggctgagccttttgtcttatgatgcatcataacaggaaatgtgcccccagcatgatctcccacgatgcactgcaccacactatcattggccatggttacattacactgaatgttatttatcatcacggagatttccaagatctcaaagccaaagttggatccagtgatctcaatttcag

SEQ ID NO: 754221 - DNA, 410 bp, Homo sapiens
gtcttgaactcctaggctcaagcaatcctcctgcctaggcctccctcccaaagtcctgggattacaggcatgagacaccatgcctggcccccaacactattttcaaaatgcatcagccagttcccaattcataactttagaaattcatatactctaaaaattgttgacatatgttggacgggaaaggaaaccttgtttgttaaaagttttaagaactatcttttagaggacaagaagtatgaagtgsgaaacagccagggtgtagacctggaggtgctccagcaaagctaggtccccggactctaccaggaggaaatcagttgtgttcactgggacagtggcagaaaggtgacaaaagatgggaccaggcaggtgggtgggagcatatcagagttatccttcctgtggaa

SEQ ID NO: 754222 - DNA, 621 bp, Homo sapiens
cccttcactctcttcctcctgctctggctatgtaagacatgcctcattcctctttgcctcctaccatgattctaagtctcttgaggcctccccagccatacttcctgtacagcctgtggaactgtgagccaatgaaaccccttttctttataaagaaaaactaccagtatcaggtagtttttttatagcaatgtgagaacagactaatacacagacatactaatggatatactgacaatcttgttatattgctataccttyctagacatacctcattgttgagatatatgggatcacacattgctccttttgttattagtatagtagttccatttctaatttctagaaacaatggttaaatcacatctaggagaactggtatcaaatgaccctaatatttgagaagctgagttgcttgatcctttaggctcttacattaactatgtgactacaaactagcatcaagtcattggcttgcaactgtccttcaatatggcataaagtgctggtattaaatgatagctctggaaaatggtactgttacataaacataaacacacaccagtgcacgtctactatttattccaaccatctactatttctgctacagagacacgttga

SEQ ID NO: 754223 - DNA, 596 bp, Homo sapiens
tggagaaccttataaacagtgttgaacacagactcatttcaattgggtttagaagtagaacaagcctgttcagactaaactttaagaagtggacaataataacctttctgaagattcaagtatgtcaaaaccaatgtcagtaatgacctcctgtgagacaacaggagagatggtattcttcagcttctcccatcgataataagttcttataacatttacagcagctgatcttcaagaccatgtactttatccgtggaagtattgttcagctcactgtcagacctaaaagttcacttctgcagttgatatagaggctcctaaggaaagcatgagtaaattcagagaattacagcaataaaaacttgagaaatgaaatatatgtgtgtccaaatatatagatacatatayacacatgtatgtttctatatataatatacataaatcttgaaaacatagaatggactgctgaaattttatgctcttagtaccattctttaaaaataaacattttctaactcttcaaaacattgacaataaaaatatacatttctccagcatcacagaaatcatcaagcctgtcttaaatactttaatat

SEQ ID NO: 754224 - DNA, 589 bp, Homo sapiens
caaataccaaaagtggcaggcatatgcagtccatagcacaaccatttccctggaagctggtgagtaagcacactccttttttcctaggatttctctgcagaggatgctgtcacttcttattccttaggcaagctgcattcaccaaaataccacaaaaagtacaaatacatacacaaagaaagcaggacatgtatggaaaaataarctaacccagtagcaaatgtaaacatttagtatctattttatttgttcacattatgttttattaccactttagtttgatttttttttaagaattctgaatcagagaattgaagaaactctacagaacttctacaagaagctacgctgttcaaaatcattgatctggttcacttccctccttttacaggtagcaatccagaaaagtccagcgacttttccaaggtcacaccaccagataagtttgctaatttactcaacttcctaaccggaaggttttagttgaccaaaaccataaaaagaccaccaataattagccttaggcacaaaggagtaaacacaaacataatctatcattttgccaggttcaataaaaaccattctgatg

SEQ ID NO: 754225 - DNA, 605 bp, Homo sapiens
gcttggctggttgctgtcttcgtttactcattgcctctgaaatctcatctgctctcgtaagtatcactgttagggaaccaggttagtaaatctacattatagaacgaaacccccttcttccagctgcaaactcctggtgggcaccttttttttttttttttttgacggagtctcgctctgttgcccaggctggagtgcagccgtgcgatctcggctcactgcaacctccgcctctcgggttcaagcgattctctgcctcagcctcccaagtaactgggactacaggcacgcaccaccacgcccagctaattyttttgtatttttagtagagacggggtgtcaccatcttggccaggctggtcttgaactcctgacctcatgatccacccgcctcggcctcccaaagtgctgggattacaggcgtgagccactgcagctggctctgatgggcacctttaaatacagatagccaaagcaatgctcacttcactccatttcgtttctctacgccatttgtcttatcatagagctttctactcttcctgggcctacatgtctagatctacagcctgatgactcaaaggtgatggttctcagctacctcc

SEQ ID NO: 754226 - DNA, 634 bp, Homo sapiens
taaggaactcaaacagataaaagagaaaaaagcccaaataacctcattaaagagttgacaaagaatatgaaagacccttctcaaaagaaaacatacaagtgtccaacaaacatgaaaaaaatgtttaatatcactaatcatcagagaaatgcaaattaaaaccacaatgagataccacctcacaccagtcagaatggctattattaaaaggtcaaaaaataatagatgttggcgaggatgtggagaaaaggaaatgcttatacattgtcggtgggaatgtaaattagtacaacccccacggaaaacagtatagagatttctccaagaactaaaaacagaactaccacttcatccagcaatcccactactggatatctacccaaaggaaaagaaattgttatatcaaaaagacatgtgcactcatatgtttatcgctrcactgttcacaatagcaaagccatgaagtcaacctaaatgttcaccactggtctattgggtaaagaaaatgtggtatttatacatcataaaatactatgcagccacaaagaagaatgaaatcatgtcttttgtagcaacatggatggaactggaggctattatcccaagtgaaataactcagaaacagaaaaccaaa

SEQ ID NO: 754227 - DNA, 579 bp, Homo sapiens
tgaccaaaaccttacatggaaaatgtggtgaatgaattgtccatagggtctgtgtgcttgggctgccacaacaaaataccagagactgatcatttgaacaacataaatttattttctcacagtcctggaggctagaatggtccagcatggtgaagtttttgtaaagcctctttttcaggcttctttctcactgtgagctcctttggttaacatgcagagacagagcaacatctctggtatctcttcttttaagggcactaatcccatcatgagttcccattcacatgatctcatctaaccttatttatccacccgaaagcctcatctctgaatatcatcatattaacatawaactttgagtggcacacatatattcagttcatacattctgccctggacccccaagatgtccttctcacatgcaaaatacattaattttatcccaaaagcctcaaaagtcttaacagattccagcatcaattctaaagtacaaagtctcatttaaatagtatctaaatcaaatataagtaagccttatccccaaaatcaaaattattctccagctgtaaacctgtaaaa

SEQ ID NO: 754228 - DNA, 602 bp, Homo sapiens
ctgggattacaggcatccaccaccgtgcctggctaatttattttgtatttttagtagaggcagggtttcaccatgttagccaggctggtctcgaactcctgacctcaagtgattcacccacctcggcctcccaaaatgctgggattacaggcgkgaggcactgcgcctggccaaggcttttcagttagtaagagtgaattactgttacatcttttatatttaaagcaaagtacatgcaaattagtgtggataccttagtagcaatcactcagcactacattgacttactgcacataaaaatattcaaactaaattttattttataaaataaatatgtttatctgggaataatattttttctagctgaaccatcttagatctcctttctgtggtccaatgtaaaaatatgttgatctttttgaatgtaaatgctataggtggaaaccctgtaatcaatgatatatttattacagtctgtaatccaccaccatctttcataaatatttattaagtatgcaaaatattgattgcaatatgttgaaatgtatgttggcaattgataataattaatagataatgccattgataatttaaaacaaaca

SEQ ID NO: 754229 - DNA, 623 bp, Homo sapiens
attaagtggaagtggatcatcataaaggtcttcatcctggtgtcttcacattgagtaggctaagggggaggagaatgaggaggggctggtcttgctgtcttataggtgacagagatggagaggtggaagaagtggaaaagaaggcaggagaggcaggcacatttagtgcaactttatgaaaatacattgtaatttctgtataactttttgctttttcatttctctaaaaatgtttctrtaagtaccaatccttctttcaccatttgctttgttttcatgggcctcctgtctcatagaggggcctatgtcgtaaaagaagtcaaaaggaatctcggataattggaacccttctgccaaactgatgactgtctggcacggattcagaagcagtcgtctccatcaagtcatcttctgttaatttctctactctggcggtccattagctcttgaatttttccaagatccatttcagaaacccttcatcctgactttttttccccaatatccacaatattttaaataatttccttgatagattctgtcataattcctgtgaagttatgcacaacatctggacacagtttcctccggcaggaatttatggtttctggatcgatggcttt

SEQ ID NO: 754230 - DNA, 637 bp, Homo sapiens
acattaagaaaaatgaacatctttccccttctaaattgggtagattatttgggcctgaaatacagaatatgaggaaagaaaaaactaattctttgtctactgtatagcggttctagcataggtgatcttcagattctgagattaaaaacatcgggttttttgttgtttcataaaaattttcttgagaaaataccttaaattctcatttggaaaatgaaaggctttgataaaataaggtcggaagcacttctttttttttgagacggagtctctctctgtcgcccaggatggagtgcagtggctcgatctcggctcactgcaagctccgcctcccgggttcacgccagtctcctgcctcagcctcccgagtagctgggactacatgcgcccgccacyacgcccggctaatattttgtatttttagtagagacggggtttcaccgtctctatcctggttagccaggatggtctctatctcctgaccttgtgatccacccgcctcggcctccaaaagtgctgggattacaggcatgaccgaagcacttcttaaccccaagggcatatatatgtatttggagttgaaattagcaaattgcatttaaagttgagagtaactatagaccaggaagttaggttt

SEQ ID NO: 754231 - DNA, 637 bp, Homo sapiens
acattaagaaaaatgaacatctttccccttctaaattgggtagattatttgggcctgaaatacagaatatgaggaaagaaaaaactaattctttgtctactgtatagcggttctagcataggtgatcttcagattctgagattaaaaacatcgggttttttgttgtttcataaaaattttcttgagaaaataccttaaattctcatttggaaaatgaaaggctttgataaaataaggtcggaagcacttctttttttttgagacggagtctctctctgtcgcccaggatggagtgcagtggctcgatctcggctcactgcaagctccgcctcccgggttcacgccagtctcctgcctcagcctcccgagtagctgggactacatgcgcccgccaccacgcccggctaatattttgtatttttagtagagacggggtttcaccgtctctatcctggttagccaggatgktctctatctcctgaccttgtgatccacccgcctcggcctccaaaagtgctgggattacaggcatgaccgaagcacttcttaaccccaagggcatatatatgtatttggagttgaaattagcaaattgcatttaaagttgagagtaactatagaccaggaagttaggttt

SEQ ID NO: 754232 - DNA, 615 bp, Homo sapiens
ttgatgcctacaccctgtaatcagagtgttattcctttacctgaaggttttgatacattcttaaacacctcaggcatctactcagagtttcaagggatttgtgcccaaaggcaagatgatgcaattctctcttttacttggtttaaggattatgctttggctgaatgaatggccaagaagggcaacaatttcactttagccaaatagaaggagaagccttcctcattctcaagtacattaattcaggtrtcttttatggtttgtttttttacatgacttactattttgcctcctgctatttcaaccttctctttaaaatgtttctaattgtccttgaatgtgagaagaaggtttcaggccaaatacatttattagaacatcccaacatccctcatgcaaaggaatgggtcattgcccttttgctggaggaagtcctctgtggtcttggttgcctagtggcttcccctgggtagtctagtgatgcttagtctccatagctttctgctgagagtcaaatgttagttggtctttaattcaatggcacaatatgacaaatctaataaaggtacttttcacaaatgtgggtaaattagattattcccacagaacatgatg

SEQ ID NO: 754233 - DNA, 618 bp, Homo sapiens
ggagggacccagtgggagataattgaatcataggggcagttatactgttctcgtggtagtgaataagtctcataagatgtgatggttttataagggatttcccttttcccttggctctcattctatcttggctgctgtcaggtatgatgtgcctttcactttctgccatgattgtgaggcctccccagccacatgggactgtgagtccattaaacctctttttccttatcaattacccagtctcgggtatgtatttatcagcagtatgaaaatagattaatacaaaagctttatttgcaaaaataggcargctgggtctggcccaaagaggtgtggtttgccaccccctgtgttgtgctatgcccccactgaacattgaatctcaagtggcagaagtacgcatgtctcctttaataaatgtatcatgggtgtggtattactatgctgaagtttaggtgcagaacagaggcctgactgcccagttctaagggatgatttgttaatagaacagggtaaagagtttagattttattccaagtaggataacaagcctttgaatggtgttcaacaggaatatgatataatcttagttatgttttaaaaagatcccactgactt

SEQ ID NO: 754234 - DNA, 616 bp, Homo sapiens
atgggtgaaccataatatagttgaccacagtgggttgttattttactccttaaaaagtggtccttatactcagaaattcaactaaagtaggcctgtaactacagtactttttgcctatgtggctggatttaaagattaacaatacaaggcattcaatctaaagacatcaaatatttttatgtgtggtagatattctgtgatctttcttataaaagggtattctttcattgttttatcatggataaacatatagcaatttacagtcatcagaaaattagaatctcaaaatctaaattataagggtataartgagctagatacctatactttttcctaatagctcttattcacaaatacatgactgaaaggatggaagaagagtgtgtgtgtgtgtgtgtgtgtgtgtgtgtgtgtgtgtgagagagagagagagagagagagagagagagattgagaattgaggaggagggcagacctacctagaaattcaataccttgtccagagagagagagagattgaaattgagaattgaggggaaggggagacctacctagaaattaaataccttgtccagcactggaagttcctaatacaacttgttagttctgccaggaa

SEQ ID NO: 754235 - DNA, 674 bp, Homo sapiens
tttcaaaataatatttatttttttaaaaaattgggttttttgatgcttgaatggttgttcaagattgttgtttaatttccatttatgtttgaattttccagtttttcttatggtatttattccttctaattttattccattgtggtaagaaaatatatttggtatgatttcagtcttcttaaagttttaaacccttgttttgtgacttaacatgtgatctatccttgagaaaggtgcacgtgcacttgagaagaatgtgtcttttgctgctgttggttagaatgttttgtgtatgtctgttagatcaatttgatctatagtattattcaagtcctctgtttccttatttgtcttctgtctgaatgttctgtccatcattgaaagtgggggattgagtcttttactattactgtattgctgtccatttctccattcagatcagtaaatgtttgctttatgtatctaggagatctgtaagggagtgcacatatacttattataycttcctgatagattaacccatttatcaatgtttaatgttcttctttgtcatccgtgacaagtcttgacttaaaatctgttttgttggatataggtataaccactcatggtcccttttggttaccaaaaggtaaacaaaatgttacccataggtaacaatatgttaccaaaag

SEQ ID NO: 754236 - DNA, 623 bp, Homo sapiens
gtaggagctagggagtctctttctgatcatatggcactgcaccagtgtcaaggtctctggtgaaaagttgtcctcaatcttcctattggcttcaatgagtctgcttttgcaccccccaggaagcaggagactttcaattagttgctgattactccaaagctaatctgtccatgaaktgttgtaaaatcattgtgtttgttgaggaaatgaaggtccagtacttcccattccactatgctgttgacgtgtctctgctatctcatgtttttgaacaaaaaactttaataacctctatcgtagatagtcgtcaaagtcaatcaaagaaacgtcttggcagggtgttctggatcacatctgcaatcctagcactttgggaggccaaggaaagagtatgcttgaggccaggagtccaataccagcctgggcaacatagtgagacctcatctgtacaaaaataaaaaataataaaaaatgagaaaagtcctatgggactttcgtccttgacacattctgtttaaaatattctgtaataaattaaaaactacataaacaatatttcaaatgatactaccctttgatgaagaagaccaaatcaagacttcaaatttttgaacaacctatcc

SEQ ID NO: 754237 - DNA, 629 bp, Homo sapiens
atcaggcagaaacacaattctacacacacatgcttacacaaaaactatttatggaaatggttaaaatttagataaatatgtgtgttttcttctcattttagttgccctaaaaataattggttttctaaagtaaaaaaaaaaaaaattaacaatgtatttgaatttatagactatgcaaagttatatacatgagaagagtatcatattggatgagaggaagaacttgggaatatattgttataaagctcttgtataacacatgaagcagtataaaattatttgaaggcagctatttttaacaccaatataatttacartaacttcaaaaatgaaatacttaaatatacatcgaacagaacatgtactgaatctgatgatgaaaacgacaaaacactcaaaaagaattcaaagatctaaataaattgaaagctatactaagattaattggaagacttactgtagcatagatttctattccccactaatctgtctacaggcttttaggaattccaaacaaaatatccgcagaaatttttttcattgaaatcaagccggttctaaaattcatatggaaaggaaaggaagttaaataaccaaacaaagtggaaaagaaaaacaaagcttaacaa

SEQ ID NO: 754238 - DNA, 578 bp, Homo sapiens
tgactcaatcacctcttttaggtcccacctcccaatactgttgcactggggatataagtttccaacatatgaacttttaggggacttattcaaaccatagtaaagggaaaataatgataaatcaagtatggtaaaatactgacatttggggaatatgagtgaagggacacaggtagagttgccagattttgcaaacaaaaatatgcaacactcagttaaatttgaatttcagataaataatgaatatttttattatatatctgtatcaaawattgcataagatatatttatattaaacattgatatttatctcggtgtcctgtacttcaaattcaaatttaactggatgtctagtgtttctctggcaaccttatataatatcttcttataatactatgtactacatttgccaccttctaatatctttaatttttttattggcaagttaaaaaatttaaattgcataagagacttggaatctaattcacttcattttagaggttttaagggatttgaacccacgcagtaaaaaagcctaggttaccaccctggaagaaccatccttctatcaagaaatt

SEQ ID NO: 754239 - DNA, 569 bp, Homo sapiens
catgggagcccttctctgggctggctgaggccggagccagctgcctcggcttgcgaggaggtgtggagggagaggcacgggcaggaaccggggatgcgtgtggcgcttgtgggccagcgccagttcctggtgggtgtgggctctgcggccccgcattcagagcggctggcccgcctgcaagccccgggcagtgaggggcttagcatctgggccagcagctgttgtgcttgatttctcgccaggccttagctgcctccccgtggggcagggctcgggacctgcagcccgccatgcctgagcctccccccaaacccrccatgggctcccacgcagcccaagcctcccggacccgagcgccactccctgccccatggctcccagtctcatccaccgcccaagagctgagaagtgcaggcccacggcgtgggactggcaggcagctgcacctgcagccccagtgcggaatccactgggtgaagccagctgggctcctgagtctagtggggacttggagaacctttatgtctagctaagggattgtaaatacaccattcagcactctgtatcta

SEQ ID NO: 754240 - DNA, 569 bp, Homo sapiens
catgggagcccttctctgggctggctgaggccggagccagctgcctcggcttgcgaggaggtgtggagggagaggcacgggcaggaaccggggatgcgtgtggcgcttgtgggccagcgccagttcctggtgggtgtgggctctgcggccccgcattcagagcggctggcccgcctgcaagccccgggcagtgaggggcttagcatctgggccagcagctgttgtgcttgatttctcgccaggccttagctgcctccccgtggggcagggctcgggacctgcagcccgccatgcctgagcctccccccaaacccaccatgggctcccaygcagcccaagcctcccggacccgagcgccactccctgccccatggctcccagtctcatccaccgcccaagagctgagaagtgcaggcccacggcgtgggactggcaggcagctgcacctgcagccccagtgcggaatccactgggtgaagccagctgggctcctgagtctagtggggacttggagaacctttatgtctagctaagggattgtaaatacaccattcagcactctgtatcta

SEQ ID NO: 754241 - DNA, 569 bp, Homo sapiens
catgggagcccttctctgggctggctgaggccggagccagctgcctcggcttgcgaggaggtgtggagggagaggcacgggcaggaaccggggatgcgtgtggcgcttgtgggccagcgccagttcctggtgggtgtgggctctgcggccccgcattcagagcggctggcccgcctgcaagccccgggcagtgaggggcttagcatctgggccagcagctgttgtgcttgatttctcgccaggccttagctgcctccccgtggggcagggctcgggacctgcagcccgccatgcctgagcctccccccaaacccaccatgggctcccacgcagcccaagcctcccggacccgagcrccactccctgccccatggctcccagtctcatccaccgcccaagagctgagaagtgcaggcccacggcgtgggactggcaggcagctgcacctgcagccccagtgcggaatccactgggtgaagccagctgggctcctgagtctagtggggacttggagaacctttatgtctagctaagggattgtaaatacaccattcagcactctgtatcta

SEQ ID NO: 754242 - DNA, 599 bp, Homo sapiens
cttgaaatgaacaagcatagttttattctaacaatgcacatatgtttgtacttggtatattgaaatgattattaagaacatttggttgaagggactgagggcttcacaaagacagtgagaagttcaagtgaacatcagataattatattaggaattttgttgaatgagtcttatttatgtgagtttcacaagatagttaaaagtacaaaaagctttcccaagtgcattttctcaaggtttcttgagatcaaattccaacagcatgtcctttgtttatgtccatttccaagcaaattgccaggtgtttcaacgtccttaaggaagtataattcaygtggggatgtgtgtgaactcttctttagctattttatgtttaagatgtacatggttttatttgttatttcccccattgtttttattaagattctaataatgtgtttgggaaaatgaatatgtctgtttctctttccacaagcaaatccagtttgtgggtaatttttgaatcgttctctcccattattcaataaattatactgtattttaacatgagacagaacattggaggaatgtttcttttacagggaaaataatataacaga

SEQ ID NO: 754243 - DNA, 623 bp, Homo sapiens
tttcctttcttggttttcatctcttccctgtgggttttttttctagacatattagcttgtctatacctcaatgacaaaatctatattttcaaagttacattaattaagagagtgtgatattgatgtaggataggcaaatagatcaatggaagagaatagaaagtacatgaataaattcacctatataaggtcaactgatttttgacaaaggcaccagtgcaatttaatgggcaatctttctaagaaatgatgctagatcaactggatatatatgtgaaaaaagcattagccttgacccttacctaacaatataaaactattcacttgagatagattataaacaaatgaaaaagctaaaactatcaagttaaagcataggagaatatctttgtgacctaggggaaggcaaatgttttcttacacaaaattttaaaatcacaaaacrtgaaagaaaagaattaacttcgttttatagcagttttaaaaacctgctcattggaatatattattagaaaaacaaaaagtcctgtagactatgaggaaatagtctctctctgtatgtgttcaacaaaagattcctacaaataaataataattttaaaacaataaaagtggctaaaaga

SEQ ID NO: 754244 - DNA, 607 bp, Homo sapiens
tttttatgtctaagaattattttttttttctgttccacttgatttctagcttggatacttattcaattctatatccaaattatttttctcgtagcttaaaaaattaaaatttgtgtcctcattatcgtctaatttccattttacttagaatgcaatttagaatatcccttttgaggttgtcttatttccatggagttctaaatattccctttaaggtatctaggtataggtttttgccattaattttatctagcactgacactttcagcctagaaaygtatacttttatcatctgcaggaaattatactgttacttatttattcctgtccattctctttgttcatttcttctgacattcagttatatggttattggatcttcatttacctcactgtctcttctttaatcttttgtaattttttttttgtttttatgttattttgttggaatatcttggattaatctaactcttaaataattcagacttccaccgaattcaaacttcgattgagctctttactttctttgtaaattttatttttcaagacttattaaaatataattgacagataaaatttttacatatttacaatgcaggatgtgatg

SEQ ID NO: 754245 - DNA, 618 bp, Homo sapiens
ttcatctatgtatctatttatccatctattatctatctattaaaaccatgaattcacactcttatatttgatttaaacacaacaccacatttctagtggtgtattctagttttttagcttttgatgttcacaacttccttcaacagtgagacagttagctcccattatccctaatttatttacttatttgttcaatttacccgaatacaatcaatctcttattctttctatcccatgtctctgtaagcacccccagtatggaccccctctcacccactctagctctaataccttattctaagctactgtggctccatcttcctcctttgctgtggtcttacctaatagctttaagacttaattgaaaaaaaaagagggggaggagataaggaagagaaggaagagaaagtggaagagagaaaaaaattctaaataatgaggtggaaagttaactggaatagtaaatcatcatgagagaagwtcagttaaacagaagctttttggtaattcctctcaagatatgaggtaagtggaaataaaaaacatagtatttagccatcaaagtagaggcaatcccagttaatatataaatgaaaattagaactaaaaagaattcta

SEQ ID NO: 754246 - DNA, 623 bp, Homo sapiens
atcttcatactcttttatcctctcatttgaaaatttgaaaccattctaagcttattatattttcttttttcttttatatgttgactaccttatcattttgaaatacattctagttaatgtctcagtaattatttccttatgaaagctttgcctattgagtcgtagacacaacattggaaagcaagggtgtgtttctktcctcctatagcgattttcctatttgaggacaaattttacattaatttctgggcgtgaggactcatggctttcttgaaaagtataaattgagctccatatccatgtgaagtagaggacggggtttttgtttctcacaaattatattttattttctcaaggaagcatcccaggcatagacaagactgtttgaactccataggtcaccagatacttactgctaataaatattttcctaagaatttatctcttttagagtcctggaattataaaagtgggagttttcagttgataaaccaagaacctatttttactccttttgagtctggctttaaattctattactatattgtattatattgccatgttttgtggtttcgttatattttattttatattttgtaaatttcatcttgcttttctatttg

SEQ ID NO: 754247 - DNA, 566 bp, Homo sapiens
acagtgtcagccctgtatgagaagactaaatgaatgatgaagtctaaattgtgctgaatgattgcaaatggatcaaatggcattcaaaataatacctcaattttttatcaggactgtgactgtacttccaacctttcagatatgcattctttatggtacaaaattatgctacataaaattagtaaaatctgttgtcatagaaaagaaaaaaattatagaaaagtaaaagtartgaaatgaactgctgtaaaaagagaaccacagagaaaacagcagctcaataatgtgtagtcaaaaaatatgctagtaaatggaaccaaaactctccccacctcatattctattatttatttatactttaaaagcctcaatggatcagagctaagttttatcatttcattttctaaagacaacacacttgtttttattcttctctcaatgattctacctaaaaataactggcttattaaaacatacatagaataaatatcctgagaaacttcactgggaaaaataagactatagggaaatttaatttaattatagatcaaaattattgtgaaatt

SEQ ID NO: 754248 - DNA, 640 bp, Homo sapiens
tgttttacataaaaacctccctcttgactcaggtccagagttatcactaggaaaacccaggcactttttcagcacctggctctttttccgttgtcatctgtatgatcttcatatttatttcctcccctttatattcctatgaaggatctagcaccatcactrtctatctcatgctcccctttcttaaaaactctactttctaaagggtattaaaacctatttatattatgttttgtgtacataacaaccccgggcaaatgattagtaattagaaagtggtggttaatcgacaaatatctaaaatggtatgtttcttagagttatctacagtaactaatacaaaatttctgaaaccaaacaagttgaaacaagaactggcgtgtcctcattttcctgttccacttttcctctactgctttatgatttttgggcttcactggatttgattctagaggctttcataacgttttcatggtcactatgtcacatattgttggtagaattttctgtaaattccctcttatgtaaacattttatctaattttaaaaattttttttctaattgcctttcccccagaagcaaatttgtatttttaattaaacagagaattcttagagaaataaagagaaattaaaaagc

SEQ ID NO: 754249 - DNA, 640 bp, Homo sapiens
tgttttacataaaaacctccctcttgactcaggtccagagttatcactaggaaaacccaggcactttttcagcacctggctctttttccgttgtcatctgtatgatcttcatatttatttcctcccctttatattcctatgaaggatctagcaccatcactgtctatctcatgctcccctttcttaaaaactctactttctaaagggtattaaaacctatttatattatgttttgtgtacataacaaccccgggcaaatgattagtaattagaaagtggtggttaatcgacaaatatctaaaatggtatgtttcttagagttatctacagtaactaatacaaaatttctgaaaccaaacaagttgaaacaagaactggcgtgtcctcattttcctgttccacttttcctctactkctttatgatttttgggcttcactggatttgattctagaggctttcataacgttttcatggtcactatgtcacatattgttggtagaattttctgtaaattccctcttatgtaaacattttatctaattttaaaaattttttttctaattgcctttcccccagaagcaaatttgtatttttaattaaacagagaattcttagagaaataaagagaaattaaaaagc

SEQ ID NO: 754250 - DNA, 621 bp, Homo sapiens
tccttgtctgccttatttcaacatctgaatttaggtccattttattttctacggaaaatatattctattgtgttagttctttacatgccagataattttggattgtatgttagacattgtggtggttaaattgggaggatttacttttgttcttttcatcttatgcctgttgattatttggttttatgaatgataatcttaactgaacttgaactgaaaaacctwaggtggcggctctagtctcaatttagatattccagctttaattgaactgccttgagttttttcacccatgcatttttccatgatcagtcactgacaacttttggagagtttgggaactctgtctgtatcttttatgtacaggatttcaccactctctctagaactcatgcattccccaatatccattttcaggtttttctaggcagaaaggcctcagtaagttttctgttagttgtcttgccaactcatacatgtcaactgcccttagcacagggttaaatgcccttaaagaggaccttggtaccctcctcttctaagtgtgcactccccatcgaagtttataattttatcattctcctatgcccttaggtagctacctataattccttaagattt

SEQ ID NO: 754251 - DNA, 588 bp, Homo sapiens
ctgttataacttgccagtgttttttattttatattctactcttgaatgaatccaagaaattatagctctgtttcagccccagtcaaatacacaactgaagctccctgaatgtgtgaggtccagaccacatgtgtgactatacataaacatcttacaccgaacactttgccaaggtttagcacattatttgtcatcagattttctttaatatgaaaccactagcaaaaccctctcttatttgggcttgtttaacctatgtccaattgtcagttcttgaacaagctagaaytatttcccccctgaaggtgagaagaacattcctgttgggaatccagagacactcaactcttaccttcattctgaggccctggtcttacatgaagaccactagggttggtgcacaaaattaaattacagcggtagtctgtctttttctgcttttattcttggctttatgtgtttagaggtgcataatataatatctaggcctatcgcacacattacactccaacacaagacaaaaagccacagctaatatttgtcaattatgcaaacattctatacgttttgaaaattttatgatattgt

SEQ ID NO: 754252 - DNA, 650 bp, Homo sapiens
gtattcaaagctggaggacagaaatgttggtgtttgatacgtctctgcgagcaacaacttctccgcagccttgtgatgaggaagaaacaatttagagcctcctctacccactgatccttgcctgctgaagacatcaagtctctaagggcctcattgacactatcggcaagtagccagcatttaccatgtttctttaaactgattgtgtagtgatgtggctaaattaatatgttctacaaggaggccyggcacagtggctcacaactgtaatcccagcactttgggaggccgaggcgggtggatcacgaggtcaagagatcgagaccatcctggccaacatggtgaaaccccatctctattaaaaatacaaaaattagctgggcatggtgatgggtgcctgtagtcccagctactctggaggctgaggcagaagaacctcttgaatccaggaggcagaggttgcagtgagccgagattgcgtcactgcactccagcctggcaacagagcaagactccatctcaaaaataaataaataaatacataaaaataaaaaaaccaaactcttctataaagaaacagaaaacagaaaccagctacagcagaaacgttcagagtctcaagcagatctctggtgttaggattcatgact

SEQ ID NO: 754253 - DNA, 636 bp, Homo sapiens
gacgaaggaaccctgtggtacattcatcgttgctgcagtgacacttaacaccccggccctttagagcttttgaaccactttcattgaaattgcaaacaaactcaattatcttgtgattttaattagtacaaaaataacctattttgttaacaagaaagaaactgattttacaacaaaattggtcaggtatatttgaaaaactagcacaatgaggtaactgcagagagaaatactaccctgcatggcaccaggcccaagagggggcttaataaatattatttcatgctgatgctgataagggtaacacttcataaggcaaaggaaacaatcttgggccactgctatcattagattttctgatggatgcctactctcttcctgtttttcaagaaacttagaattgagctgaggcattttggatacaaatgacaataacayagctcaaaggctgtgcctgttgtgttgcattcatttttgcagaacatggtgaaaaggagatcgtaaatctggatttcatcactgaactcatgtttagaatcccatgcaactcctgagaattctgctacaaaacacttctgccagagatatttgctgaggagagaatcatgcccacatggaattccttgcaactggcct

SEQ ID NO: 754254 - DNA, 611 bp, Homo sapiens
gtcaggcagacgtctgtgttgcccagatgtgaaaggcctgtttcgaaaatgaatcccacaggcagagaagataaaatggggtctagaggcagaaagtatcctggtgtgtttggtaaatgacaaaaccccttgtggtctgagctggggcaatagtgtggaggggaaggctgcttcctcttgcttctatttggggcatgcttccaggaaagagcagggcaggrgaggtaagatgccagtgccagggaggccctggaacagcagcaaggaagcccagtgagcactggcgggactgctggcaaggctctgtgggttctggaaccttccacaggagtggagtgggaaccagcaacgggactgtgtgctgtgccggggccaaaaggggagggccacatcaaggtatcccacattctggttctaaatcattctggttttcatgaatggagacacacatagtcccgaggcagccccgggtgacttctctccatccttgcagagagcagcctgtcttcccgaaacttcatgctgctggaggtttgttctcaagagtttccaggttcagacatcactaaatttctcctgataggaaattatcacgagcaacagttataccg

SEQ ID NO: 754255 - DNA, 525 bp, Homo sapiens
atggtttttaagaaaattggtttaatgcaattatcagtgtgatgtctgggaatctgagattgccatggacacacacagacacatgctcatatgcacactcatacacacagatatgtgaaaacacacaccacactcacacacactcatgtacgttgctggaatgggcatctgctttatttgcattgaggaactstcttacactgaaaaaggctgaagaaaagaaattacaacaaaacatatatattcctagattttactgtagctttgtacatagtagagttgttaccactggaaatgtcccagctacatagcatttgcactttacattggacacacagatctttctctgcaaaagaatgatgacttaattaacaagggtgataaatttaccaaagtttgtatttgtgtcacctcaaaatctaggtcttgatggatccctttgaagttgtctgctcaattaataagcaaaactaggcacacaagattcagaatgccattgtgaagccatgtgccctacaaaagttc

SEQ ID NO: 754256 - DNA, 547 bp, Homo sapiens
atgattggtcggggataggtcacggtctcaaggcatcaacttttgaagaagttttgccaagaggagaaaggggggaaaatatctctttaaaaaaaaaagtcacttaaaaaaatttttaagacgaggatacctgaaaacaataagagcagagggagctattcatgatgagaacatctgaggctaattattcactcaggtctacacctgcaggtgccatctagtttaatgctatttaaagtgtctcttcttttagtcaagatatgatgcaactcaatggatgcagaaggttgtaccaggcaagatcactcttcgtttgaagaagtggtggctgaggttrgagttcgtctttcccctgcaattagaattcttcaaacacgttacataaaaaagcaaaatttttttttttttttttaaggcagagtcttgctctgtcactcaggctggagtgcagtggtgcaagctcagctcactgcaacctccacctcccaggttccagcgatttcctgcctcagcctcccgagtagctgggattacaggcacccaccac

SEQ ID NO: 754257 - DNA, 566 bp, Homo sapiens
atgtagtaggcattcaatgaatacttgttaaattgaattaatcaaggacacagactcaggattagaaccttgctctcccagcttctagtccagtgttctgtgaaccttgctgtctctctctctctctctctctctctgtgtgtgtgtgtgtgtgtgtgtgtgagagagagagagagagagagagagagagagagagagagggacagacagacaaagacagagagtaaactttggaatatcaaataattctagtagttttggtccagtggtctgggattttacattatcatgcatactagtaggaaaactcagacaaatcagaattatttcactggataaactagaggcagatgtatctggcattcacaatggttttattttatgggctacaytgagggaaccaactcaaacttgggtggggcagtagctactcagcccagccaaatattgccatggggcaatgcaggcccaagatagcctgtatcctctgcttcctcaagagaagctggaaatctgaatttttaggtgatatctacaaaatttttaatgttgtctcaaaaatttaa

SEQ ID NO: 754258 - DNA, 622 bp, Homo sapiens
ataaatcatcttgttgctgagtttctttaattaaggaaaaactccgtctgtggatccctgtggttgctggaaggaaaggagggtggggagtactttgattaatccatctatcagcctggctttggaaagtgagtctcctgtttytgattgtagctgggcaaagatctaaataaaaatttatcttgtcaaaacctatgggctaactgaaagcaaataaagaaattttatggcatccacataaagttaaataaataacgagaaagcgtagtacgtcctacagacatttttcagtacagtacgtggctctgttctttggggagaactcattaacttaaaaaaagttacctttaatgggccactcgttatcgtcatcatcaaatgcttcgcttgtctaatgttccagtgtttaatgcctgattaaaactgaagatgggggctcatggcttggtgctgttggaactacccaggatagaatgcatggcaagtggggcttctaaagggtaaaatatggacgttgcaaacagcactgccagtatcggggagaactttttaaatggatccctctggaaggtaactgaccttcctgcaacataatgttgcaggggagggcaacagggtgaag

SEQ ID NO: 754259 - DNA, 622 bp, Homo sapiens
ataaatcatcttgttgctgagtttctttaattaaggaaaaactccgtctgtggatccctgtggttgctggaaggaaaggagggtggggagtactttgattaatccatctatcagcctggctttggaaagtgagtctcctgtttctgattgtagctgggcaaagayctaaataaaaatttatcttgtcaaaacctatgggctaactgaaagcaaataaagaaattttatggcatccacataaagttaaataaataacgagaaagcgtagtacgtcctacagacatttttcagtacagtacgtggctctgttctttggggagaactcattaacttaaaaaaagttacctttaatgggccactcgttatcgtcatcatcaaatgcttcgcttgtctaatgttccagtgtttaatgcctgattaaaactgaagatgggggctcatggcttggtgctgttggaactacccaggatagaatgcatggcaagtggggcttctaaagggtaaaatatggacgttgcaaacagcactgccagtatcggggagaactttttaaatggatccctctggaaggtaactgaccttcctgcaacataatgttgcaggggagggcaacagggtgaag

SEQ ID NO: 754260 - DNA, 622 bp, Homo sapiens
ataaatcatcttgttgctgagtttctttaattaaggaaaaactccgtctgtggatccctgtggttgctggaaggaaaggagggtggggagtactttgattaatccatctatcagcctggctttggaaagtgagtctcctgtttctgattgtagctgggcaaagatctaaataaaaatttatcttgtcaaaacctatgggctaactgaaagcaaataaagaaattttatggcatccacataaagttaaataaataacgagaaagcgtagtacgtcctacagacatttttcagtacagtacgtggctctgttctttggggagaactcattaacttaaaaaaarttacctttaatgggccactcgttatcgtcatcatcaaatgcttcgcttgtctaatgttccagtgtttaatgcctgattaaaactgaagatgggggctcatggcttggtgctgttggaactacccaggatagaatgcatggcaagtggggcttctaaagggtaaaatatggacgttgcaaacagcactgccagtatcggggagaactttttaaatggatccctctggaaggtaactgaccttcctgcaacataatgttgcaggggagggcaacagggtgaag

SEQ ID NO: 754261 - DNA, 495 bp, Homo sapiens
tcaataaagctgtttttttaaaaaaaataacaatttgatccttagcttccttccccaattctgtgcaactgggcaactgacctcccacaatcctgccactagacttaaggtttattctctggaggaagttaatggagcttctaaggactgactgaaggacagcgggcaccactgatggcaaggaattacaacaaaaaaaggaaagtccacagaaggaatgctgagactcactgctctttggccccacctgggtcccrggaccctggcagcccggtctatctccttgggcagaagactggaagacttactggcccaagaagaaatgatcaaacatcctgacattggagggtagcatagccagataacccaatggggaagatagcagtcaacaggctccactcacaagatcagagctgctaatttggctttttaataccccactcttaaatataagcagacagctaaaattagaatttcactgttctgagaaaatga

SEQ ID NO: 754262 - DNA, 706 bp, Homo sapiens
catgctcacatcctaatcttcttgatttcactccagatggaaaatagaggcaggaaactctgagtatgacatcatatcaggataataccaattcactccttcaactagaagattaatacactcacactgggcaaaatatggcatgtatcattatccctgggcactgatttttgtttaaacaactattctacttggttacttactaaatagagtttgtagaattttctacatctattkacatccatgctggcctccatggcagtggggagcatacaaacggctagaaaacaggtgcctcagaaagttgtcatttgcctaggcctgtgaccagtgagctaaaggctcaggaataataaaaagtgaaattcttccatacctgcttcctccttcctgaacagaaatgcctccttccttagggagagtacccaatggcagagctaccagtaaaggccaaagagggagttgaaatgtttcctctcggagtttgtgacggtgccacacttagttctctgtcacaattcatgaggactcctggactgaaggagactgctaatggagatccagttgcttatggatgcaaacaatcactccacagtagaatatattcagagtacctccatccacctggattctaaagcatccacatcctttttgcaattaaaactccacactctctgaaagattaggatccacacacaaagagagg

SEQ ID NO: 754263 - DNA, 597 bp, Homo sapiens
tgctgcccagagaacctccagacacacgctcagtgcgccgaggttgcaggagaagcagcaccccagagaagcagggcctgatgttgatgacactgatggccaggctcagtggtattgggatcccagggacagcagaggggtctcccttatgggacggggtgttctcatcctgaagccccccactttctcagtcagggtctctgaaaagaagtgaatggaaccatcagagggtgtaactggggagcgggtaatggggactggttacccaggtatttaaactgctcttagagaccagttaaacccatgaatgtagctcttactgtgtcctccggtttggagtgctatttgtaacttgtgagtgtcaggacattaggcatcattcctttaggtgtcatcaggkcttagagcaggatgggccttcagcaatcatctgatgggcgtctcttccatcaacagagaagtgaagcccaagaggtcaaaaaacgcatataaggggccagagctagtgaccagcagaaccagaagtagaacccaggagccctgacttccgactcagcccttcccactgccccacactgctgccatcacctggaaagg

SEQ ID NO: 754264 - DNA, 597 bp, Homo sapiens
tgctgcccagagaacctccagacacacgctcagtgcgccgaggttgcaggagaagcagcaccccagagaagcagggcctgatgttgatgacactgatggccaggctcagtggtattgggatcccagggacagcagaggggtctcccttatgggacggggtgttctcatcctgaagccccccactttctcagtcagggtctctgaaaagaagtgaatggaaccatcagagggtgtaactggggagcgggtaatggggactggttacccaggtatttaaactgctcttagagaccagttaaacccatgaatgtagctcttactgtgtcctccggtttggagtgctatttgtaacttgtgagtgtcaggacattaggcatcattcctttaggtgtcatcagggcttagagcaggatgggccttcagcaatcatctgatgggcgtctcttccatcaacagagaartgaagcccaagaggtcaaaaaacgcatataaggggccagagctagtgaccagcagaaccagaagtagaacccaggagccctgacttccgactcagcccttcccactgccccacactgctgccatcacctggaaagg

SEQ ID NO: 754265 - DNA, 560 bp, Homo sapiens
gtggtttgggtctgggtccccacccaaatctcatgtcaaattgtaatccatagcgatggaggtggggcctggtggaggtgattggatcatgggggcagatttcccttttggtgctgttctcatgagagtgagtgagttatcgtgtgatctggttgttgaaaactgtgtagcacctcccccctctctctcttcctcctgctctagccatgaaagatttacctgcttccccttggccttccaccatgaytgaaagtttccaaggtcttcccagaagccatcatgcttcctgtacagcctgtgaaaccatgagtcagttaagccaattctttcctttacacattactcggtttcaggtatctctctatagcagtgcaagaatggactaatacagtggttttctgtagcagtctcacatgagtcttttcctcatttgtgtgttttctcctctagtgggtttgtagactttcatgtctttttgtaataattagatattgtcctttggcttccaggtataggactcccttaagattttcttgctgggccagtctagatagaggtga

SEQ ID NO: 754266 - DNA, 523 bp, Homo sapiens
aaggcataatctgacagttcactttgggccatcacactgctcatcctccataccatgtgtcctcaagacccccccgacaaaggcttacatacgcaagtggttcatttcaatgatgagcctctgctttctctgtaaacacaagaagttttgcacatttatctggataagataaaaaatacattcctcactactcttctgagatctctttcctctgaccatcaattttctgccttccatcaataaacagtacgatggggatttagaaagtcaggtgtgaatctgccattatttytgagacaaactagaaaaaaaactaaattttcttcaataatttttgaaggaaagcaaagtgatatgaaaaaaaaattgccacagtggcatgaaccatcacacacacacacacacacacacacacagggtgagagagagtgagagataaacaactttcttgttttttgatgtattttatttttattgatacataccaagatgtacctattttcaggatatatgtggtaattta

SEQ ID NO: 754267 - DNA, 576 bp, Homo sapiens
ttactcatgtaacaaacctgcacatgtatccccagaacctaaaataaaagaagaaaaaaaaacacccaggtatatgctgcctacaagagactcaattcacattaaataaataaataaataaataaataaataaataaatraataaataaaatgagcaatctaatttacatccagcaggagtcccagaaagggcagggtaagagagatttgagagacagtcttcaaatgactgtggatttcccaagctgatgaaagacatggatgccatgtttaggaggacatcaaatcttaagcaaggattgttcagttgatgtaagatagaatggatgtgttttataggacatagatagagccttagaccaagcagagaacatacattcttcaccagcacacttggcacaaaaaatgcctgttggcccactattgaataggccaaataatcagtagcatgcagaccattgttttttatctcagtacaataaagttagaaagcagtaactataattgaatgattaaaattgtgaagatgttagtatcattaatatttttacattaaacttctcactgatagtacac

SEQ ID NO: 754268 - DNA, 531 bp, Homo sapiens
cattgtgtcctacaagaatcccttggcaatttctatgtgaaatccaggggaacgtgtgcatattctgaatgggtacatttctaattttttgcataggttcaatgagctacatttattaatgtctactgtgtgtgcatatatatatatatttatatatatatawataaatatatatatatatatgagacattcttctggttgatgcttaaaatgatgcaatacctttctttataaagctcacattttagagagaaggaagagcacatacaagcaattaaacacatgtaaaaagtaacaagggcttttaaaaagtgtagagaaagtggcataagagattaagaaattattttttaactctctaggacagggaaatactgctgaaggggaccacatgtatcttatgtcttgactgatgtgtaggatttagcctctccctctgatgactatagattttcaacttctgactggtatctacactgctactttcattggatcctcatttcttttgtttctccagcatttaactttaag

SEQ ID NO: 754269 - DNA, 531 bp, Homo sapiens
cattgtgtcctacaagaatcccttggcaatttctatgtgaaatccaggggaacgtgtgcatattctgaatgggtacatttctaattttttgcataggttcaatgagctacatttattaatgtctactgtgtgtgcatatatatatatatttatatatatatatatawatatatatatatatatgagacattcttctggttgatgcttaaaatgatgcaatacctttctttataaagctcacattttagagagaaggaagagcacatacaagcaattaaacacatgtaaaaagtaacaagggcttttaaaaagtgtagagaaagtggcataagagattaagaaattattttttaactctctaggacagggaaatactgctgaaggggaccacatgtatcttatgtcttgactgatgtgtaggatttagcctctccctctgatgactatagattttcaacttctgactggtatctacactgctactttcattggatcctcatttcttttgtttctccagcatttaactttaag

SEQ ID NO: 754270 - DNA, 620 bp, Homo sapiens
tgcatgattcaagtgggcccaatgtaatcacaagagtctttttatttatttatttatttatttatttatttatttatttattttgagatggagccttgctctgccacccaggctggagtgcaatggtgcgatctcagttcactgcaacctctgcctcccagattcaagcgattctcctgcctcagcctcctgaggagctgggattacaggtgtccaccactgtgcccagctaatttttgtatttttagtagagatggggttttgccatattggccaggctggttttgaactcctgacctcaggtgacctgtccgcctcagcctcccaaagtgctaggattacaggagtgagccactgygcttggccaagagtccttataagtagactagggaagcagaagagtgaagcagagagattggaagatgatgtgctgctggctttgaaaacagaggaagggggcacaatcaaggaaggcaggcacattccttcaacattgaaagctgggaaagacaaacgggttctctcctgaagcctccagaaggaatccaaccttactgacaccctgattttacacagacccattgtagaccttttatctccagaactgtaagataacaaat

SEQ ID NO: 754271 - DNA, 595 bp, Homo sapiens
gttgtcccaactaaacagattatttcatctactaccgtgagttagctaccattattatcacaaaactatcattatcaccatctgaggttatcctggcccagaggtatcaggtcacctgtccacacccatatagctattaggtggcagaacctggaacaaagtgagtcttcatgyagctcatgctccttgccattctgctcctacaagtgtgcataggaacctggtgaaaagaaaccatgactagggagatgtttacttctaaaatgtattttaaacttttatgtgaaatatccaaacacattgttgtgatagttgttatggcataacaattattcaactgcctaagaactgtcatggtttagcccaaatcctagcaagtggttagggagatcagcatgcaaagcatgaatgggtgatgtaagacttgaagttgagaattgattcagagggttgctgactgtataacctttgaaataatgtattcctatattttataatgcctgtcaatgttaagaatattgtcttacaagctagcatatttgttttgttaataagtttttttcttgtctatgctcgtggattcattttgtgtcag

SEQ ID NO: 754272 - DNA, 633 bp, Homo sapiens
acttccagaatttctgtttagttcttttttatggtatctttccttttggtaaatttctcattcatattctgaattgtgtttctgattttttttgcgttctcttgtttgttgctgagcttttaaaatattattattttgattttttttccttggatttcatgaatatctttttcattgcaatctgttgctggaaaattattgtaccccattggagatgtcatatttccttgttttttaatgtttcctgtgttcttaaatggatatctgtgcatctggtgtagcagttgcatcattcaatattttgaatttgctttcattggggaagactttttcctgacaatgtatctatggtcctggctggttaggttactttggctttgattctggrtgcaggcagtagtatagtctccatgtgatttctttgactgcaaacagcatcaatgccatctgtggttttctcagtggcttagggtgtggttgttggtggaatccatggtgaaattttgctgaggatgggagcacaaagtgagccagtccttggggcccagtgttggcagtggcaggatgaagatgattccttgggcaacaaggtggtgtaccttgccagtggtgttggtgggtccaggtggactg

SEQ ID NO: 754273 - DNA, 615 bp, Homo sapiens
acaaaacagagagatttcatttcacactcataccatattagcaaaaaattatggctacttaataacaagtgtcatttgcataagaaacaacataaatcctcaccactgctgatgggagtataaattgttttaaccacttaggaaaatgttctctagcaaaattgaacaactgcataacctacctccaaccagctaagtcatggttagctggagctgctttcagcttctcctggagataaaaggaggattagagcatggccatccatcccaatgggcagaatatgtatctttagtttctttgggggagtcagaaccctccttactcaaaaatatttctcaaaggaacattagaaggttattatatactccataattaggtatataccctaaactcttacacataaataaggagagattrcacagaagcattgctcataaaaaccaaaacaaccattgtgcccatcaactgtgagattataaaactaaggaaattatgaaagttataaattatctttacaagagaattctgctccttataatatatccatacaaagaaattttaaaaacatactatttatcaattaaagcaagtcatacataagtcaggcacagaaa

SEQ ID NO: 754274 - DNA, 571 bp, Homo sapiens
catcaagtttatgatcatttgttttggcagccctaggaaactaacacagggacacttgggctggaagtacaaatttggaagtcaccatcacataggtaacatttaaaatccaatgaaaagaagtattcttgggagagagtgtagaaagcaaagagaatkaggcctaacaattacaggtctgatataagaggctacaactgcaatagaaactgagaagaagcaagaagtatgagaggcaggtggtagtcagagaagacaaaaggggacagtttcgagggaggaattgttagcaaggcccaatgttacgaagaggccaaaaacaatgggattatcaaagaccacataatataaaaatataaaagttgtttgtgaccttaaccaggacagttttctgtggaatcactgagtagggcccaaactatggtgggtggggaagtgagattatacatatgaacaattctgttgaaaaattatgctatgaaaaatgacactaaaaaagcagccatcaatgcatgctgatgtgaggttaagatgtgtgtttgtagatatttcttttgtttgagcatgggaa

SEQ ID NO: 754275 - DNA, 402 bp, Homo sapiens
tactaatacagtgcattttcaacgacagtgatcaataatcatgcttttagtagaatacctatcctaatattccgaagtccctttttcccttaaagaataaattagggacatgaaaaaaaaaatcagtacttcaattatgctaacatctttgagatattccagagactgctctaactataacaggtatgwtaaaatcttattaataattcctctgttccataaaaatcagtttctttaaacacttaagttaaagggctaaagggttgctttatgagctgataatgcttactattggacatgatctcacaagtaattacttcgctttatataacacagaaatgtgtatgggaattatatatttgataatttactattgataacttattaataacgttagtattg

SEQ ID NO: 754276 - DNA, 623 bp, Homo sapiens
gaatttggaggcaggcactcaagcactacaatgcatgctctttataatttcactctagccattcatgtgacagtttttaaaaccaggtcactctaccatatacagaagaagtatgcctgtcctattagattaaatcaacatgcatggtaagtattctgaagaaattacggctgttacttgtgcaagaaagttttttaaaaggcacaaytttctgtgattagaaaaggcctccacagctgccttttcacttgtgaatatctattttttaattatttgtattgatacgtaattgtgcatatttatagggtacagtgcgatgtttcaatgcttgtgtatgttgtatgatgattaaatcagggtagttatcatatccatactttaaacactgatcatttatttctttgtggtggtaacattcaaaatctcttcttgctatcttgatatatacactgcattgttaatttgctatagtcaccctactgtgtaataaaacactagaacttattcttcctgtctaaccgtaactctgtgtctgttgaccaacctctccatgtcctgtcctttctccccttcccttctcagtctctggtaaccattctactctctatttctatgaaatcaac

SEQ ID NO: 754277 - DNA, 608 bp, Homo sapiens
ttcctagaagaaagggtagtgaaaatgaaaagtaatttggaacgattccaagttaagaagatctgcccattccaagaaaagattcggaggcagtatttaagcacacatttggtaagtcacatagagatactccaggcagcctacaagctccacacatggcaattatggtgtcygatgaaagaaaatgtgaggtggctatgatgctcacagcttttgtgagattgagagaactaggacctgcagcaactctggaaaccctgcctgtcagacaagcagatgacctcaaaggagtgataagaaacatctgctccatgctgactcccagggctgatgctatcctgcttgcacattggggactgaaagtaaagaagggactaaatgctggcgaggtaaattagggcagaaccaaatgagctaagttgcaaatatatacatgtatacacacacatacacatatatatgtaaatgtgtatgtacatattttaaaagactttactgcagttactcaggaacagcttttcattcacatttgagctgctttcagaaattaaaaccacttttttaaagggtgcattgataaaatctgaggttttttgcttgttttcttc

SEQ ID NO: 754278 - DNA, 628 bp, Homo sapiens
taaaatcagcatctacttggcagatgtatgtcatcattgtgtctctcattgtttcatccttaaaaatgtgtaatacttttaattgcagaggtaataaaagatatttatttaaaaaaaataaagtgattatctacttctttcctgaggcacacagactttcagattttgtttatgcacgaaagcatttaaaaatgaggtaatatatatactctttcacctactttcacggtgtttacttttctatgtcaaaacatacaaagttagatcattaccttgtatgtattgctatttaaagtatcttcattggtagataaatacccagttggttccttttgttttgctatttcttatgtaaacttggtgggatttggwtactagttactaaaatgagataaaatatgaatctggtttcaagacttctataagggtaaactactttaggagacagaaaaggaataggacaactctccctatcccatgacttggggtgggggtagatgagaaaaataaatggaggcgagaaggaaagaagttcaatctaagaatggagatttcatagcttggtcagacatgcatgtccatacagataaactagcagacagttaaaaaataagaaaagaaagttaag

SEQ ID NO: 754279 - DNA, 625 bp, Homo sapiens
tatttttctattaatatatctttcaagattctatccaacagacacaatgaaagtagtttctatttgtttttcaacccacaggtgaaaaggaactgtagaaataatagagacagctagcatcctaggacctgctctatgatcttagactgggaaacgatagaataaataaatgtgcactttattatctagcccatatcaataacaagaagataatcaagagattaaggtaaagagctgggtatcccttaggttgtatatgtgtargaacaaacaggagtaggaagtaactctaataccacgtccttcccaacctaattttaagtgtaagcaaagtgataagatttatcctctgttgtaaagaggaaatgaattagttcaataatatattaaggtacctgctctaataatgttttcatgtaaaacaaagtaattactctaaaattttctttttaattaaaaaaatccctatttcctgttgctactgataactcttatttaaaaaatgactgggcacagcatgtcagggggttacttaaatttctaactatctgcattgacttcagtttactatattcttcttaatcctagagacttatttctcaccacttttagaaaaaaaaaagtg

SEQ ID NO: 754280 - DNA, 644 bp, Homo sapiens
gcctaattcactacaccatactgactcaaagtactcaatatgaaacggagattaggatcctgatctgccactaacaaaagcccttctcaattatttacttattgcattaatgcaaatcaaataagcttcaagggagttatgagcagcaaaaaatatataacctattatgattacttaaagcatttgcagggcsgctgaattaatagttcttatgtcagttgtaagtctgcttctggtctatcaggttagatgtcacattctcagcttctatgttgtatttccattctcattcattcccagatacaaaaataaaacacaatatgtatcggactgccaagtgtgccagaaatttgaaaggaaaaaaaatctgcaaagtaagattatatttaccttaaatgtaccattttgatttttcatgtaagaaaccaaaaatatatccactggtagaagtgctgatgtgataagtgcaattgctagagaaaaaattgctgttatggtggagacaacttcactttcccgccgactttggtatttacgaacatatatccagcagaatgccaaaatagcctgaaatagaacaaaaagagatgtttgttactacccagtgtattttctctgatttttgtatgtgtttgaaagtttct

SEQ ID NO: 754281 - DNA, 608 bp, Homo sapiens
aatatgaaacggagattaggatcctgatctgccactaacaaaagcccttctcaattatttacttattgcattaatgcaaatcaaataagcttcaagggagttatgagcagcaaaaaatatataacctattatgattacttaaagcatttgcagggcggctgaattaatagttcttatgtcagttgtaagtctgcttctggtctatcaggttagatgtcacattctcagcttctatgttgtatttccattctcattcattcccagatacaaaaataaaacacaatatrtatcggactgccaagtgtgccagaaatttgaaaggaaaaaaaatctgcaaagtaagattatatttaccttaaatgtaccattttgatttttcatgtaagaaaccaaaaatatatccactggtagaagtgctgatgtgataagtgcaattgctagagaaaaaattgctgttatggtggagacaacttcactttcccgccgactttggtatttacgaacatatatccagcagaatgccaaaatagcctgaaatagaacaaaaagagatgtttgttactacccagtgtattttctctgatttttgtatgtgtttgaaagtttct

SEQ ID NO: 754282 - DNA, 561 bp, Homo sapiens
atgcatcagcaaacaaaacacactgccataggcccacaatgaagaagaaggaggaaactcttgggatggcttacctgagtccacagggaggaaactcttgggatggcttacctgagtccacaggggtgtgagtgcatgtttcaccactgtgatgtagtcaagaaacaactctgagaaaaaataccatcatctttttccaatgtattatgtggtgatgagttatgctctacctataatctacttccggctggaagcctgagggaaaaagtaggatggtccttcctgcctggacagaataagaagggaataggggagaatacagttttaacttgaactggtaccatcataagctggctttaagccctctagacctgcaaatgtttgaatttcactctttcttcctaataattcatatccctggagayctctgtcatagcttccttaaagtgaagagaggtatcgcttccaggttgatatctctattccagattgtatagagcacccttgacataagtaactacttcttagaaaaagattctgtttacatttcaaaaggaatca

SEQ ID NO: 754283 - DNA, 600 bp, Homo sapiens
attaatcactggcatccctgaaagaaagggggagaaagcagacaatttggaaagcatatttcaagatgttgtccatggaaacttccccagccttgctagagaggctaacagttaaattcaggaaaaacagagaactcccacaagattgtacgcaagacattcatccccaagacacgtaatcatcagattttccaaagtcgaaggtaaagaaagaatgttaaaggcagctagagagaaagggcatgttacctacaaagggaaccccatcaggctaacagctgacctckcagccaaaaccctacaagccagaagagattgggggcttatattcaacattcttaaaaaaaaaaaaaagtcttcaaccaagaatttcatatccagccaaactaagctttctaagtgaaggagaaataagatccttttcagataagcaaatgttgtgggaattcattaccaccagacctgccttacaagagatcttgagaggaacgctaaatctagaagggaaagaccactatcagcaaatacaaaaacacacttaaacacacagaccaatgtcagtgtaaaacaaccacacaaacaagccaacatagtaaccag

SEQ ID NO: 754284 - DNA, 600 bp, Homo sapiens
attaatcactggcatccctgaaagaaagggggagaaagcagacaatttggaaagcatatttcaagatgttgtccatggaaacttccccagccttgctagagaggctaacagttaaattcaggaaaaacagagaactcccacaagattgtacgcaagacattcatccccaagacacgtaatcatcagattttccaaagtcgaaggtaaagaaagaatgttaaaggcagctagagagaaagggcatgttacctacaaagggaaccccatcaggctaacagctgacctctcagccaaaaccctacaagccagaagagattgggggcttatattcaacattcttaaaaaaaaaaaaaagtcttcaaccaagaatttcatatccagccaaactaagctttctaagtgaaggagaaataagatccytttcagataagcaaatgttgtgggaattcattaccaccagacctgccttacaagagatcttgagaggaacgctaaatctagaagggaaagaccactatcagcaaatacaaaaacacacttaaacacacagaccaatgtcagtgtaaaacaaccacacaaacaagccaacatagtaaccag

SEQ ID NO: 754285 - DNA, 486 bp, Homo sapiens
gagcagttttgaaacactcttttcgtagaatctgcaagtgaatatttggactgctttgagaccttcgtttgaaactggaatacctacacataaacactggacagaagtcttctcagaaacttatttgtgatgtgtacattcaactcacagagttgaacctttcgatagascagttttgaaacacactttttgtagaatctttaagtggaccttcggatagctttgaggcctatggtggaaaaggaaatatctacacataaaaactagacagaagcattctcagaaacttctttgtgatgctagcattcacctcacagagttgaagataccttttcatagaggagttttggaacactcttttcaaagtatctgcaagtggatgtttggactgctttgaggccctcgttggaaatgagaatatcttcacataaaatctattcagaagaattctcagaaacttctttgtgatgtgtgcattcaactcac

SEQ ID NO: 754286 - DNA, 630 bp, Homo sapiens
ttgaaccattctttttaatgagcagtttggagacagtctttttgtagaatctgcaaagtgatatttgtgaatgctttgtgtcgtatagtgaaaaaggaaatatcttcatataaaaacaagacagaagctttctgagaaacttttttgatgtgagcattcatttcatggagttgaagcttacttttgattgagcagtttggaaagagtctttctgtaggatctgcaataggatatataaaggcggttttaggcctatggtgaaaaaggaaacatcttcacatacaaagtagacagaagccctctgagaaacttcgttgtgatgtgtgaattaatctcacagagtagaacttttcttttgattgagcaggttggaaacmctctttttgtataatctgtgagggatatttgtgagtggtttgagggctatggagaaaatggaaatatcttcacataaaaactacacagaagctttcagagaaacttctttgtgatgtgcgcattcatctcacagagttgaaactttgctttgatagagcaatttggaaacagtctttttgtggaatctgcaaagggatacttctaggagatctgaggcctatggtgaaaaaggaaatatattcacataaaaat

SEQ ID NO: 754287 - DNA, 500 bp, Homo sapiens
tgagaagcttctttgtgttgtgtgcgttgatcctgcagagttgaacctttcttttgattgaacagtttggaaacactctttttgtagaatttgcaaatggatatttcgagtgctttgaggcctatagtgaaaaagggaatatcttcacaaaacaactaaacagaagatttctgagaaaattctttgtgatgtgtgaattcatctcacagagttgaacctttcttttgattgagcagtttggaaacactctttttgtggaatctgcaaatcgatatttggagcgctttgaggccaatggtraaaaaggaaatatcttcacataaaagctagacagaagcattctgagaaacttctttgttttgtgtgcaatcatctcatggattttagcctttcctttgactcagaagtttggaaagagtccttttgtagaatctgcaaagggataattgtgagccctttaaggcctatggtgaaataggaaatatcttcacacaaaaact

SEQ ID NO: 754288 - DNA, 643 bp, Homo sapiens
cttcacataaaaactagatagaagcattctgagaaacttctttatgatgtgtgcattcatctcacagagtttaacatttcttttgagggagcagtttggaaactgtctttttatagaatctacaaatagatatttggagtgctttgatgcctatggtgaaaaaggaaatatattcacataaaaacatgacagaagcattgtgagcaactccattgtgtttcctgcattcatctcacagagctgaatgtttcttttgattgagcaattttgaaacactctttctgtagaawctgcaagtggatattttgagcgctttgaggtctatggtggaaaaggaaatagcttcaaataaaaaccagacagaagcattctgaggaacttctttgtgatgtgtgcattcatctcatggagctgaaactttcttctcactcactgagcagttttgaaacactctttttgtagaatctgcaagtggatacctggatcacttttcggcctctactggaaaaggaatatcttcacataaaactacatagaagcattctgagaaacttctttgtgatgtgtgcattcacctcaaagatttgaacctttattttgattgagcagtttggaaacagtccttttgtagtgtcagcaaatg

SEQ ID NO: 754289 - DNA, 491 bp, Homo sapiens
ataagggagagagattgaactgaactccaaattcagcaaaacagctggagatttacatacaaggggcagagcagagaggttctttctatactggcttaacaggattcttgctaaagaaagaccaagaacttagacatcaaagatgagragtaaagaacttgattagacatcagggtgggggataacttagcagagttgtttgctaagacccagctgggctggccaaagacagtttaggagccacggtcaaggcctagtggagaagagggcttgaaggagcctgactgcagtatggccaacaggaaagcctttgtcaagcagcaagatctgagctttgatggaaaagaggtctgaggctagcttatgagtagctgtgcatgccacaatgagagactggattttatcatatgagaagagagaagccattgtaacattttgtattttaggaacatatttttagaaattctttccatgtatttaaaatagttttc

SEQ ID NO: 754290 - DNA, 573 bp, Homo sapiens
cttgttgagctgtcttgagcagcaagcttatggagtcctaagcccatattttatcctaaggtaccccttgacacagaaaaacaaattcatagcacaaatacatcagtttaagactagcctcagaattatttttcgcattaatcaaaactatacagaagagaaatatagtgatttttaccatttctgtaagattttgccatttctgtaagacttcacaaccgtttgccagagagagagagagaagccagaagtctgactggtaagaaattcttacccttttgccagcatgccaggcttctgggttccttttccctgagcagccccagtgatccagcttgcaccatcatgctgggggccaagtagcatcataaaggaaatttaccttttttcrtctggctagaacaaaatatgtgtgacaaaacatagacattagcccctctgctgagcacccaatatcaaactggcaaggctcaaacttgcccttggttgggccccatcatggttaatgcaacctctgaccaggaatttcaacacgtggtctctgggcaagatggtcaccctgaataatagaaa

SEQ ID NO: 754291 - DNA, 603 bp, Homo sapiens
tagcatcataaaggaaatttaccttttttcatctggctagaacaaaatatgtgtgacaaaacatagacattagcccctctgctgagcacccaatatcaaactggcaaggctcaaacttgcccttggttgggccccatcatggttaatgcaacctctgaccaggaatttcaacacgtggtctctgggcaagatggtcaccctgaataatagaaaagataagaaaggcaaaggagagagagaacagcattgcctgtggcagggtggggaaggcaaaatgatcagagagaccagagaaagacccacctattgcagcaacactgaaaagttcaggtggctgcttcttggtagcaaagggatcttttccagcagtcccrtcagctctcgtttccccttttgaaggaggaaaaaactccccatgtcgaacccctctgtatgtgcctaattttgtcacccatagtcatcagcaaagagtgcaaggcagattattccaaagagaagagcagttggcatcccgtagtgccaaatccatacttagccaaaaggtactttaccaagagccctcatttttaaatgtacttcaatgtattgttcattccgaacgtt

SEQ ID NO: 754292 - DNA, 701 bp, Homo sapiens
actcagtaagaggcctctaactggatccaagccagttaattcccaggtcaaatctgtttctgaacccagtccagtttctgtcacaactccaaacccagtttggatcagaaatttgctcaaagaaactcggctcaaaacacaaatccakggagctctgaaatctgagagggagcttacccacgatccccagctgctctgagagatcaatggacacaagtgggtcttgcagctaccttgtgtgttcattcagtgctcctgggagttgctggaacctccgcttcagatcccacttctgacaccacctgataaaagaaaatcttcagccgaattaaatttaaaggagtttagttgagcaatgaacagttcatgaatcgggcagcccccagaatcacagcagattcagagagactccagggatgcctcgtggtcagaacaaatttatagacaaaaaaggacaggaatgcgaagtgaggtacagaaacagctagattggttacagctcagagtttgccttatttgaacacagtttgaacatttagcagtttatgttgaagtacggccgttgggattggccagcactctgctattgttacaagtgcatactattaagttaggttttcaattttgtctgactattaagctaggttactgttcatccataaggactcaaatgtagaagtacggagtccttctcaggccat

SEQ ID NO: 754293 - DNA, 588 bp, Homo sapiens
gttcattcgttcaaacttttaaattatataattcatttctgaagtaactaaagaaaaatgtctgaataaatcaagtcattaaagcaactgaatcattagtaaaaatccctctgaaccaaaaaataggattgtaggaatttttttaatgttgtaaatatataatccttaaataataaaatataaaaatataaataaaattaaaataattttaaaatatggaaagatactcaactcattttatcagactggaataaccttaagascaaaacagagtaaacagagctaaataagagaaaattatataccaattgtattgtgcacactgatggacttttcataaataaatgtcagaaaataaaattcagcaatgatttaaccataagactacataataaaatattatctcaataatgcaaggtgagttcagtatcacaaaatctgtccaagtaagtgaccacattattatattaaaggaaaaatatgatcatatctatatatgcagaagaatataatctagaaagtttggtattcattcacaataaaatattttagcaatccaaatgagaagacaacttctttaaatggtct

SEQ ID NO: 754294 - DNA, 583 bp, Homo sapiens; identical to SEQ ID NO: 742463

SEQ ID NO: 754295 - DNA, 583 bp, Homo sapiens; identical to SEQ ID NO: 742464

SEQ ID NO: 754296 - DNA, 475 bp, Homo sapiens
tttttaagaatttttgcatcaatgttcatcaaggatgttggcctgactttttgttgttgttgttgtatctctaccaggttttggtatcaggatgatgctggcctcatagaataagttagggaggagtcactcctcctcagtgttttggaatagtttcagtaggaatgataccagctcttctttggacacctgacagaattcagctgtgaatccatctgatcctgggctttttttggttggtaggctatttattactgcctcaatttcagagctcrttattggtctgttcagggattcaatttcttcctggttcattcttggaagggtgtatgtgtccagacatttatccatttctcctagattttctagtttatgtacatagaggtgttcataatattctctgatggttgtttatatttctgtagggtaagtgataatatccttcatgtcatttctgcatgtgtttattttaatc

SEQ ID NO: 754297 - DNA, 475 bp, Homo sapiens
tttttaagaatttttgcatcaatgttcatcaaggatgttggcctgactttttgttgttgttgttgtatctctaccaggttttggtatcaggatgatgctggcctcatagaataagttagggaggagtcactcctcctcagtgttttggaatagtttcagtaggaatgataccagctcttctttggacacctgacagaattcagctgtgaatccatctgatcctgggctttttttggttggtaggctatttattactgcctcaatttcagagctcattattggtctgttcagggattcaatttcttcctggttcattcttggaagggtgtatgtgtccagrcatttatccatttctcctagattttctagtttatgtacatagaggtgttcataatattctctgatggttgtttatatttctgtagggtaagtgataatatccttcatgtcatttctgcatgtgtttattttaatc

SEQ ID NO: 754298 - DNA, 641 bp, Homo sapiens
ttatgttcaaagcagtcactatgcttcctgctttacacaggcagcagggcaggtttttcttgtcctccctgaactctcctttcctaaggcttacaaataatgtagagagaaagtcattgggagaatgaggaatcayaaaggtgggaaagaaagaaaagctcttttagcacaataacgtacaggggctctgcaggcaggaggcaaactggcacagaggaaagcctcattatcttttagatactttaaactccatgcagagacacagccaggtttaacaccaccaggagtggctggggagggaggtgggtgggaggacggggcttggaggaggtgggacctatacttttatatgggagggagggtggatacataacagcacgctcacctttaactaccttctctgtgtgcctttcaggcatgcttttagtctgcttcctctaacatctttctacatagtcttgattgacacggcaccacttctaaggccaaactatggaaagggtttcttcctatcccttccctaccttctcactcattttctcaagttccctcttgatcctaaaagaaacaaggcagaatcactggccacctatgcttacagttggggttgggacaaaaagaatatggtttgagggactctg

SEQ ID NO: 754299 - DNA, 577 bp, Homo sapiens
acaagcctgggagaggatacactgcacagagctcgaggactctgcacactgcctctgagtattsagctgagtactgcccagctcgtgagcgtgagaaaactgccagaggctggggatcttttgggctgactatccaaaagaaatcagagagaactcagtgcctggccctcaaaagtagagggaaaagtgcttattgtcaccagccagaatggaaaacctcacgattcataaagtgttggttaaagcattctcaaagtcttgccctagcagtggaaacaattagctctaaactgcttgggacccacctaacaagcttaaaaacaagccgctaaggatcagatagtttccatgcaatttcactgcatctcatgacaaagctcaaaaagatttagaggaatacaaaaatatctagcaaggtagaacgtacagtgtctggcatccagtgaacagttttcagaaatgaaaagaagcaagaaaatattacccacataaagagaaaaattgattaatcaaaactgactcaaaacagacactgatgctagaattagcagaaaagcccactaatatagcaattata

SEQ ID NO: 754300 - DNA, 559 bp, Homo sapiens
gaaatttatccagtgacaaccctggatccttattagcccagaggtggcactagaggactctacataaccaagtttactgactagcccttatctgtcattagtacttaatatatttaccttcccacaatttgcttccctagagactcaaagtccttttcctttgtcttgccacttctctgcaaatttattgggggtggctgttgttaagatgctatggaagtccaagttctagcaacctctttaagcccaacatccatgggtttctcccatgtatatatgatataaacatattcataaacttgtttgtttttcacttgttagttttttgttacagagtcctgactgagaatctgaaagrgtagaagtaaaaatattttttccttctctataatagaatgagatgtttgactagtatgtaatagaaatgaggcaacctagcaacattcaggggcggcaattccttgggtttgctgatttctgtttacactctataaaatacccatcagagacttaaaaaaacaaacagccaatttcagttgatcatattggcacagatagc

SEQ ID NO: 754301 - DNA, 639 bp, Homo sapiens
tttttcatttgttgccattttgctttatctgaaaggtgatgtgtagtgtaagtgtgtaacaatttgcagccaggaaggtagctattaatggtcctaaagtcaagttgaacatgtcctaaatgctttttttttccccctcttataaaatgatttataccattcacttaaatatactgtcctaatgaaccttcttttatttccccctacaaaatacaaaacgcgcctactcctttgattaaaaagcttatgaaatacaagatattatttttacttttttttttttttttttgagacagggtctcactgtcacccagcctggagtgcaatggcacgatcttggctcactgaaacctccacctcccaggcccaagkgatcatcctacctcagcccccagagtagctggaactacaggcacacaccaccacacctggttcactttttgtattttttgtaaagatggggtttcaccatgttgaccagggtggtattgaactcctgagctcaagtgattcacccaccccggcctttcaaagtgctgggattacaagcatgagccaccgtgcccaggcaaggatattttcagtaatatattcatacatcttgtttcagtgatagcaatattgattttgctgccatag

SEQ ID NO: 754302 - DNA, 695 bp, Homo sapiens
ttttacttctatttgtttggatcctttttcttggttagactagctagtggtttattgattgagtttatattttcaaagaaccaatttttcattttgttgattctttgtattgtttttttcagtttctatttcattttgctttgctttgctctttattctttctttccttttactaattttaggtttagtytgttcttgcttttctagttttttgaggtggattttttaggttgtttattcaacatctttctacttttcaggtatagacgttaattgctataaacttccctcttagcattgctttttctgtgtcacaaaggttttggtatgtttttccattttcatttgtttcaagaatttttactttctttcttaatttttacattgacccattggttattcaggtgtatgttgtttaatttccacatatttgttcccaaagttcctgttgttgattcctaattttcactgtggtcttagaagatacttgatatgatttcaatttttaaaactttcttgaggcttgttttatggcctaacatatggtccatcctggagaatgttccatgtgttcatgagaagaatttattttctgctgctgttgcctgaaatgttctctaaatgttagatccatttggtctaaagtgcagtttaaatccaatgtttcttgaatttctgtctagataatctcttcc

SEQ ID NO: 754303 - DNA, 604 bp, Homo sapiens
gctgggcatggtggttcaagcctgtaatcccagcactctgggaggccgaggtgggcggatcacctgaggtcaagagttcaagaccagccttgccaacacggtgaaaccccatctctactaaaaatacaaaaattagctgggcgtggtggcatgccactgtaatcccagctccttgggaggctgaggcaggagaattacttgaacacgggaggcagaggttgcagtaagccaagatcacaccattgcactccagcmtgggtaacaagagtgaaactctgtctcaagaaaaaaaaaaattacctattggatacaatgtacactatttgggtgatgggtgcactaaaagcccagactttaccactacacaatatatccatgtaacaaaaccgcacttgtactccctctttttttttttttcaaaaaagaggcctccctggaccctccctcttttcttagccacatccttagaccacttccaagttgctcttctgtggtgacccttgccccaccctgctatttgtggggcaacttgtttcgctgtagaatttcattgttcctgttaaatgatgagatgatccaatgtcttcattttacagggagggaa

SEQ ID NO: 754304 - DNA, 623 bp, Homo sapiens
gatgggtggtagtagtatgtcagggagggcgttgcagggtgtggtcttcaactttccccatctttatcacatgccaaaagttgctccatttcagcatgcaaatctaaatttaaatagtcttctggcttttaagaaagccccctagctcacctgtgcagtacgactgaactactatgaaaccagcactggtgaacatatatgtgtggaaacacaacaacaacaaaatcagttgttcaaaagacatatttattattccttcagcagagaggcccatctgatgctctggggcgcaggtcccatgaatgttcagggcagtctctgcccaggccagctccttccccgattgtccacagtgatgatctcttacagactgtcctgcctgccctgcacacaatgggagccagtctggaggaaggtttggtggccatcactctggygggcactggaaagaactctgctggatgccgagggccatttctctctggacttgctggtgttcagtgtggaagtgggagggaaatcaaatgaggggacctttgggaggtcacctaatgtggtaggacctaaactcagctgggtattggaatcatctggagattttttttttcagttagggtgccccc

SEQ ID NO: 754305 - DNA, 589 bp, Homo sapiens
aaaagtacaagcaacaaatggttgcacatatctatgaacatactaaaaactattaaattgtatgctttcagtgcatgacttaaggctgtgtgcagcggctcacacctgtaatcctagcagtttggaaagccaagttggacagattgcttgagcccaggagttcaagaccagccttaaccacataagaccagccttgaccacatggcaaatccctgtctctaccaagaaaaaaacaaaaattagctgggtatgtggtggtacgcacctgtagtcccagcaactgagaggctgaggtgggagaatcacttgagcccagaagatggargttgcagtgacccaagactgaaccactgcactccagcctgggtgacaaagtgagactctttctcaataaataaatagataaataaatgcatgatcattatatggcatattaataacatctcaataaagctgctttttaaaaagtttcctctggtgattaataggataagtaggaaaaattaagctatagaagatctaaacagctttatcaaccaacttaactgacatttatggaacacttcacatgacagctgaatactttctc

SEQ ID NO: 754306 - DNA, 548 bp, Homo sapiens
ttaattaccttccaatttcaaattctcaactgtgaaataaagggccattttatttggctgctgccagttcaatatgactgtttttattaaaacatctctaacttgagaaatatttggtgttttctaaaaaactgcaaattgcagcaaatggccaggtaatttggaataaacaccctacagaaaaaatatatattcaagttgcataagtcactttgagmaatcctttgaggatatttcatttatatctaaatgaacctcaggttatagactggcttttccggaaaaccagaagcaaatagatgtatgattataatgaaaaccatctcagagcaattgtggaaatgaagtgaccacatgtcttatgctgtcccttccagtacacttgcacaagaacagcctataacaaagttgctttacttctgagatttaccaggaataattccatgagatttaaatgagatgactactaataagccatctacctttgactctattcctattaaaaatgggttaggaaagtgctttcaaaatcatagtgctgtctcatg

SEQ ID NO: 754307 - DNA, 592 bp, Homo sapiens
cctaggtttctctgaaatccttggatcccacccaacacccacttaaccttcagcaggtgcccattctacttccagagaaagtggaccccttcccttaggaagccccaccgaacccacaaacatctgcatcctcacccagcttgtcttcctgcctcctgtctctatgaaggtcctgctgtcctccagtttggggctctcctcttgttctgaacaccaatccttcccaccttctccagcaagcgttttctctcttccttcagactctcttatctcccctcttctcttgccttctcccttcatcatttaaacatatttgagtctctcctttgtttttcttgttattttcttttaatagaaacagggtttcactatgttgcccargctcacctggaactcctgggctgaagcgattctcccacctgggcctcccaaagtgctggtattacaagcatgagccatcgtgcctggcccaagtctctcctttcttaaacaaacaccctcctgcaactgcttatcctcatcatcttccagttaacaacctctctctcattttccaattgctgttcagcccactgttaactgtctttgaccc

SEQ ID NO: 754308 - DNA, 582 bp, Homo sapiens
gtctcttgtgttccttctcagtgaatagcgccactgcccacgcagccagaatatgatgtctctttattcctcattctcccatgcaattagtcacttgtcagttccagctcctaaatatatcttgattctgtccacctctttctatttcctcatcatttcttttctaaccattttttattccaatcttgctccctcccaccttcccttcccactccagccttagggatctttctaaagtacagatataacaatgtcaccattctgcctaaaacctgcccagggcctaaagaatacttggtatasaagactgctaaaaatgatgatgttggccctgcacacaccactaccccttcttctgcataggccttgccctactgatcataggcatgggcatgtgacccagacctagtccaattacgatatctcatctccctcatcacgctggttgtgtcagagtttgtttggctctctcaagccactccatgttgctgtaagaatgggtccaggagtgaatatgtgaccagagctgacccaattaggatccttttcttttcttttttctttttttttttgagatggagt

SEQ ID NO: 754309 - DNA, 462 bp, Homo sapiens
ggggtgtacaccccctggatattagaaactatcacaggggggctgtacaacctctttgatactgtgagtaataccattgtctcccctcctggatattaagaacaatatcatagggtgggtgtacaccccctgcaatattgggaataatatcatcctctcttccccgggatattaggaacagtataacaggtggggtttacaccccctgcaattttgtcagtaatattacttctggatgttattgaatatatcacagtgggggtgtacaccccgtgatatggggagtaatagcatcctctttcccactggatactacaaacaatatygcaggttgtgtacaacttcctgcgatattgttcacaatatttaggggaggagaggatgatattactccacatatcgcagggagtgttacatcccctgtaatattgttcataatatttagaagaggacaggatgata

SEQ ID NO: 754310 - DNA, 462 bp, Homo sapiens
ggggtgtacaccccctggatattagaaactatcacaggggggctgtacaacctctttgatactgtgagtaataccattgtctcccctcctggatattaagaacaatatcatagggtgggtgtacaccccctgcaatattgggaataatatcatcctctcttccccgggatattaggaacagtataacaggtggggtttacaccccctgcaattttgtcagtaatattacttctggatgttattgaatatatcacagtgggggtgtacaccccgtgatatggggagtaatagcatcctctttcccactggatactacaaacaatattrcaggttgtgtacaacttcctgcgatattgttcacaatatttaggggaggagaggatgatattactccacatatcgcagggagtgttacatcccctgtaatattgttcataatatttagaagaggacaggatgata

SEQ ID NO: 754311 - DNA, 576 bp, Homo sapiens
actactagaaagaattttatggagaagggaatgtgggcagaggatagagggtcaaatctgcattcataagggctagacttttctatatatgtttattttatacatatatatatttttctctgtctctctctctctatatatatgaagttggagccaaaatgtaataattattagtaacaggkctaatagggtgttgattactagggttaatgttaggcgaattactgtttttcggatgctatcgaaactttggaaatcatggtactatttatactaaaagagtaagatcctcatcaataaatagaaacatacaagaatagtcatactacatctacaaagtgtcgatatcaggcagcggcttcaaaggcaaagtgatgactagatgtaaagtggtattttaattggcggagaaggcagactgaggaatgttgatccaataatgacgtgaagtctgtgaaagcctgtagctataaaaaatattgagccataaataccatcagaaatagcaaagggagctttgaagtattctgagacttgtaggagggtgaagtaaatacctaatataattgtaataag

SEQ ID NO: 754312 - DNA, 576 bp, Homo sapiens
actactagaaagaattttatggagaagggaatgtgggcagaggatagagggtcaaatctgcattcataagggctagacttttctatatatgtttattttatacatatatatatttttctctgtctctctctctctatatatatgaagttggagccaaaatgtaataattattagtaacaggtctaataggrtgttgattactagggttaatgttaggcgaattactgtttttcggatgctatcgaaactttggaaatcatggtactatttatactaaaagagtaagatcctcatcaataaatagaaacatacaagaatagtcatactacatctacaaagtgtcgatatcaggcagcggcttcaaaggcaaagtgatgactagatgtaaagtggtattttaattggcggagaaggcagactgaggaatgttgatccaataatgacgtgaagtctgtgaaagcctgtagctataaaaaatattgagccataaataccatcagaaatagcaaagggagctttgaagtattctgagacttgtaggagggtgaagtaaatacctaatataattgtaataag

SEQ ID NO: 754313 - DNA, 576 bp, Homo sapiens
actactagaaagaattttatggagaagggaatgtgggcagaggatagagggtcaaatctgcattcataagggctagacttttctatatatgtttattttatacatatatatatttttctctgtctctctctctctatatatatgaagttggagccaaaatgtaataattattagtaacaggtctaatagggtgttgattactagggttaatgttaggygaattactgtttttcggatgctatcgaaactttggaaatcatggtactatttatactaaaagagtaagatcctcatcaataaatagaaacatacaagaatagtcatactacatctacaaagtgtcgatatcaggcagcggcttcaaaggcaaagtgatgactagatgtaaagtggtattttaattggcggagaaggcagactgaggaatgttgatccaataatgacgtgaagtctgtgaaagcctgtagctataaaaaatattgagccataaataccatcagaaatagcaaagggagctttgaagtattctgagacttgtaggagggtgaagtaaatacctaatataattgtaataag

SEQ ID NO: 754314 - DNA, 489 bp, Homo sapiens
tctcagttcttttgggtatatacgcttaaagggtgttgatggatcatataaatctgtgcttaatatttttaaggagcttctaaaccgttttccacagtgggctgtaccgttttacattccaaaaagcaatgcatacagcttccaatttctctatagcattgctgacagttaatattttctgtttatgtattgtatttttatagggtttgaaattaatctgaggctttttgctgataccgaaatattaggaaaggttttccaaaaataatactacttattataaagrattttacgtgttacttgatgccctgtgatctgttttctaagtaagaagaggaacttctcggctgggcacagcggttcatgcctgtaatcccagcactttggtaggctgaggcaggtggatcacaaggtcaggagttcaagaccagcctgccaacatagtgaaacccagtctccactaaaaaaaaaaaaaattagctgggtgtg

SEQ ID NO: 754315 - DNA, 645 bp, Homo sapiens
gtgcggtggctcacgtctgtaatcccagcactttgggaggctgaggtgagtggatcacgaggtcaggaggtcgaaaccatgctggctagcacggtgaaaccccgtctccactaaaaatacaaaaataaaaaaatcagccaggcctagtggtgggcacctgtagtcccagctactcgggaggctgaggcaggagaatggtgtgaacctggaaggtggaacttgcagtgtgccaagattgagccactgtactccagcctgggagacagagcaagactctgtctcaaaaaagaaaaaaaaacataatgccacctaatatccagttaatacttaaatttccctaagtgtctggagaattttttttttttttagacaagagtctcaacttcatcacccaggctggagtgcagtgttgcaatctcrgctcactgcaacctctgcctcccggtttcaagcgattctccttcttcagcctcctgagtagctgggatgacaggcccacctgtcgccatggctggctaattttttgtattttagtaaagactgggcccagggtggtctctaactcctgagctcaggcaatctgctcaccttggcccctcaaagtgctaccaagaatatctttatagctggtatttgtttgtttag

SEQ ID NO: 754316 - DNA, 548 bp, Homo sapiens
  misc_feature 233: n = A,T,C or G
agtcttaaagacactattccacaagagagagaaagaaggaatcctccctaaatcatgaagccagtatcaccctaataccaaaaccaggaaaggacataaccaaagaagaaaactacagaccaatatccttgaacatagatgctaaaatccttaagaaaattctagctaactgattccaacaacatatcaaaaagataatccaccatgatcaagggggtttcataccagggggnaatgcagggatggtttaacatacacatgygcgtagccaaagcaagactaagcaaaaagaacaaatctgaaggcatcacattacctgatttcaaacttatactataaggccatagtcaccaaaacagcatggtacggttataaaaataggcacatggaccaatggaacagaatagagaacccagaaataaacccaaatacttacagccaactgatcttcaacaaagcaaacaaaaacgtaaagtggaaaaaggataccctttgcaacaaatggtgctgggataattggctagccacatgtaggagaatgaaactgg

SEQ ID NO: 754317 - DNA, 520 bp, Homo sapiens
agggactttctgaaatagtacttccttgctatgaggactgaagttggattagaatccatttcaatgaagatcagatgtcctgagtagaattcttactattgggtcctgaatcttacattaaatattctctcaaattccttgaggcatagcaacttgagcttaccagtttagaaactggagatttgggctgggcgcggtggctcacgcctgtaatcccagcactttgggaggccaaggtgggcggatcacgaggtcaggagatggagaccatcctggctaacactgtgaaaccccatctctactaaaaatacaaaaaattagctgagcctggtggtgggcgcctgtagtcccagctactcaggagrctgaggcaggagaatggcgtgaacccgggaggcggagcttgcagtgagctgagatcgcaccactgcactccagcctgggtgacagagcgagactctgtctcaaaaaaaaaaaaaaaaaaaaacggagatttggttaacaaaatagtcaaagtctc

SEQ ID NO: 754318 - DNA, 617 bp, Homo sapiens
ttcttgccaatgcatctgagaatctagggactttctgaaatagtacttccttgctatgaggactgaagttggattagaatccatttcaatgaagatcagatgtcctgagtagaattcttactattgggtcctgaatcttacattaaatattctctcaaattccttgaggcatagcaacttgagcttaccagtttagaaactggagatttgggctgggcgcggtggctcacgcctgtaatcccagcactttgggaggccaaggtgggcggatcacgaggtcaggagatggagaccatcctggctaacactgtgaaaccccatctctactaaaaatacaaaaaattagctgagcctggtggtgggcgcctgtagtcccagctactcaggaggctgaggcaggagaatggcgtgaacccgggaggcggagcttgcagtgagctgagatygcaccactgcactccagcctgggtgacagagcgagactctgtctcaaaaaaaaaaaaaaaaaaaaacggagatttggttaacaaaatagtcaaagtctctcttatagaagttttgttttattttttgttttttaaaattttttaccattttgtagctgacaagtactgaca

SEQ ID NO: 754319 - DNA, 616 bp, Homo sapiens
ggagaggcttagttatccacctatggccatctggagccagatgcccacctgaggtctggtgtacacctaaggcctgatatctacctggggcttgggtgttcatgtggggcctgatgtctacctaagaccatgtgttcacctggagcctgggtgaccatctgggttatgatgttcagctggggcccagagttcagctggggactgggtcaaccttctgcttgttgcayacctggggactaggtacccacctgggctccggtgttcactggagcctgatgtctacctggggccttgtatttacctaggaccaatgcatccacctggggtctgagtgccctcatggagcctggagttttcctggggcctggggtctgccttaggcttaagtgtacatctgtggcctcatgtccaccttgggatggatgtccacctggggatggatattcagtagggatctgagtgtccacttggtttgtgatgtctacctggggcctggtgttcatctgaggtttgatttccacctgggacctggacatttgcctgaaacctgatgtacagctggtgcctgaagttcatctatgcctggtgtccccctggggccaggtagtcaacacgg

SEQ ID NO: 754320 - DNA, 616 bp, Homo sapiens
ggagaggcttagttatccacctatggccatctggagccagatgcccacctgaggtctggtgtacacctaaggcctgatatctacctggggcttgggtgttcatgtggggcctgatgtctacctaagaccatgtgttcacctggagcctgggtgaccatctgggttatgatgttcagctggggcccagagttcagctggggactgggtcaaccttctgcttgttgcatacctggrgactaggtacccacctgggctccggtgttcactggagcctgatgtctacctggggccttgtatttacctaggaccaatgcatccacctggggtctgagtgccctcatggagcctggagttttcctggggcctggggtctgccttaggcttaagtgtacatctgtggcctcatgtccaccttgggatggatgtccacctggggatggatattcagtagggatctgagtgtccacttggtttgtgatgtctacctggggcctggtgttcatctgaggtttgatttccacctgggacctggacatttgcctgaaacctgatgtacagctggtgcctgaagttcatctatgcctggtgtccccctggggccaggtagtcaacacgg

SEQ ID NO: 754321 - DNA, 616 bp, Homo sapiens
ggagaggcttagttatccacctatggccatctggagccagatgcccacctgaggtctggtgtacacctaaggcctgatatctacctggggcttgggtgttcatgtggggcctgatgtctacctaagaccatgtgttcacctggagcctgggtgaccatctgggttatgatgttcagctggggcccagagttcagctggggactgggtcaaccttctgcttgttgcatacctgggsactaggtacccacctgggctccggtgttcactggagcctgatgtctacctggggccttgtatttacctaggaccaatgcatccacctggggtctgagtgccctcatggagcctggagttttcctggggcctggggtctgccttaggcttaagtgtacatctgtggcctcatgtccaccttgggatggatgtccacctggggatggatattcagtagggatctgagtgtccacttggtttgtgatgtctacctggggcctggtgttcatctgaggtttgatttccacctgggacctggacatttgcctgaaacctgatgtacagctggtgcctgaagttcatctatgcctggtgtccccctggggccaggtagtcaacacgg

SEQ ID NO: 754322 - DNA, 629 bp, Homo sapiens
tcttgccatgatcctggattggcctgaaccagtgcactgaagcatcttttacgtcagacacactgtccttcagcctttctgcaccggcattgtgcacccatgcaggtgtgtgagagtggggagcaatgcctggctggagctgtgggcctgggtcccctttctagcttcaatttctttccccacagaccgagctgaactcacaaggtccagctcatactctgtgcccagggagtctccctgaatggtgctgtcacctgtgccccttgcctgggatgcacacctgccttgggtctttgccctgccctgtcccccagggtaagtgggtgagttagaagaaggtctttccagaggcaggtattttgtgggtctttgagtatgtgactgggtatttctatgtgtctctgtgtgcaaagcctgagtgtgttctttccctgccagccttactcaccgctctrccctgggcttgctgaggctccctcagggctggggtgtgtgaagaagggcagctcctcagggtgcagtgggcacttggctcagaatccttcccacacctggcagaggggattctgcatccacaggtgttgtgtggacagcaggctcttgggttctggagattgtcatgggatccc

SEQ ID NO: 754323 - DNA, 617 bp, Homo sapiens
taacatggagacattcattatggagaacccttgtgaaagcaggaggagcaaagccctcctaagtcattgtagcaggggctgagtggcttccacctctcctcccttcatttattttacaaaagctttcatcatgcctttccctatggaatcaagcccagactcttcagcacagctttcaaggccatgacctggccccctacctacttttccaatgttctttcccctaacctcctttcactgaccctttctgccagctaactggattcactgctccccatacctcctctatagtttcccctgtcagtgcataacatatccatgtattttctctcccccattttcccttcctccttctttccttttatagctcattctccagcctcgattactcytccttctgctcacatccaaatccttctcaacccttacagacaggctgaaaatacctgcttttctaagaagcgctccctgattctaccaaccatggggatcacccttcctctgaacctcgcctggagccaggggcattttccctttgggacttgttccttgtctaattcctgtactgactgagaatgcaatagggagggggcagagcctacatctggctcatctat

SEQ ID NO: 754324 - DNA, 556 bp, Homo sapiens
aaatctatagcttctttttattttgccttagtattataacaatatccttagtattacaacaatatccttagtattaccatgctaagaatacagagccttcagcaaaagccacttttacttgtgaaacaccaaattatttagtacaatacctttacttcaatatctgttacatgccttgttgatcagcatcaaccaaagctgctatagttttgaagatgagttaaattcatagtaatattatatttgctacctcacttccaggtaatctccattttggcataaatttttttaaaatctgtttagatcacacgtaggcaatatgatacaaaattctcagtcttcgccccagttcacattgttctataataaacttttattagrtggaataagttggtaattagttactacgtaaaagcaaaagatcttattaagaattacatttctctgataaagagtgaaatttgttacatttcctttcaaaaaattattttgatagttgcttcaaataacacacaaatgtttgctcttaaagctaaaaccaatgtagaaaagttat

SEQ ID NO: 754325 - DNA, 545 bp, Homo sapiens
gtcggcctcccaaagtcctgggattacaggcatgagccactgtacctgaccagcccttatgttttctgaggttcatgttgtcccagattttgatagcgggagtctcttcattccggctctcgtgtcctttggatatggccttgtcattttttcttccctttaaaaaaaaataaagagcacttctttatgccatagtgatgttccaggcttctataggaccttctttgccccatccccagaatcagtcatgtctctaaggagccctggtttctsttagtgggattcaatatatagaaaccaagatctgggtcttaggtgttctcattgatactggggtgtcattggttctagccactttcaacaaatgtatctaggaaatagactattattttttaacatactatctttaaaatcatttttagtttatactaatacttctaattctaaaccaacccctcaggatttttttggcctttccccagtccatttcattctaatttcatttccagtttatttttaatttaaaaaaattgaagtataattta

SEQ ID NO: 754326 - DNA, 545 bp, Homo sapiens
gtcggcctcccaaagtcctgggattacaggcatgagccactgtacctgaccagcccttatgttttctgaggttcatgttgtcccagattttgatagcgggagtctcttcattccggctctcgtgtcctttggatatggccttgtcattttttcttccctttaaaaaaaaataaagagcacttctttatgccatagtgatgttccaggcttctataggaccttctttgccccatccccagaatcagtcatgtctctaaggagccctggtttctgttagtgggattcaatatatagaaaccaagatctgggtcttaggtgttctcattgatactggggtgtcattggttctagccactttcaacaratgtatctaggaaatagactattattttttaacatactatctttaaaatcatttttagtttatactaatacttctaattctaaaccaacccctcaggatttttttggcctttccccagtccatttcattctaatttcatttccagtttatttttaatttaaaaaaattgaagtataattta

SEQ ID NO: 754327 - DNA, 594 bp, Homo sapiens
ctcaaagatcactgtatgacttcttttcttccttctcggctgtttcacacgaagttttccctttttctaaggctcagtccttatcgtctgagacctccctctcattatccatctctccatccttgactgtttctagttcgattgtaacactgatcaaatctccttcaagttcaaaacaaaccagcaaaaccttcccttgatactgccattacctcagagctatgtaccgtgctccttgccctcsccccggacttctccggatgctagttgatgcctgtttagcacctgtcactgtttcatatacttcttactggccactgcctggttggcatctaccacttctctggaatcagcaaccccaatagcagatttaactgctggttccatggtttttgttacttgtccttttttgcagtgttttaaataataatcatcttttcacttatttttttaaagaaggtcatttaaaaaaatcatcctgcagtggaaaatttggaaaatatggaaaagtataaagaagacaattatcaactgtaataccagcagtacctattgttaagctctagggcatgtcatttccatcgctctcttttt

SEQ ID NO: 754328 - DNA, 567 bp, Homo sapiens
attgcttatgatattgtttctgaagcacagacataatcttttgaccttttaagcaaaaaattaatttttcatttaactttttttgtttgtgtgtgtgtgtgtgtgtgtgtgacagggtcttgccctgttgcccaggctagagtatagtgatgcaatsatggtttactgcagcctcaacttcccaggctcaagtgatcctcccacctcagcctcctgagtaattgggactgcaggcacgtgccaccatacttggctaaattaacatttttttgtggaaatatggtcttgctatgttgcccacactggtcttgaactcacgggctgaagtgatcctcctgcttcagtcacccaaagtactgggattacaggtgtgagccatcgtgcctggcctttcattcaacttgtaattcacaatttccagaaaaaaagttttaaaattactgatggaggaaagatctttgggacttgcttgtaaatatgttaatatttgatcttaataagctctgtcatactaacactgtttattaaactttgtggtagaattactacccataactaaagaatgaa

SEQ ID NO: 754329 - DNA, 667 bp, Homo sapiens
gaaaaagaaagaaaatatcttgacttgcagcacagttagctgccgaaattgaaggtcatataatgcttttggtcctaatgacatcactggacttctgacttttggctgaagaatcacgccagccttggcagtccttgcaagtaccaaagggagtatggcttatgcctgcggtgcccttcccgtatcctgctttcttacctccttttttgagcattaatttttttttctttagcctttgggtaaagtatcaaaatgttgagaagatagactctcaattttgaaggtgagaaatctgtaggagacttggatagttgtttttttttttttttttttgagacggagtctcgctctgtcgcccaggctggagtgcagtggcgcatgttggctcactgcaagctcygcctcccgggttcacgccattctcctgcctcagcctcctgagtagctgggaccacaggagcccgccaccacgcctagctaattttttctattttttagtagagacagggtttcaccgtgttagccaggatggtctcaatctcctgacctcgtgatcctcccgcctcagcctcccaaagtgctgggattacaggcgtgagccaccacatctggctgacttggatagttttgatactgttttatgtatattaagatttgtaggtagttt

SEQ ID NO: 754330 - DNA, 572 bp, Homo sapiens
agcagtcccctctgtatttcctttaaacacctttagctttaagcaaccactactaatctactttcattctttgtaaatgtgcctattcttgacatttcatatgaatggactcatggttttgttactggcttctttcacttaacctaatgcttccaacattcatccaagttgtagcataaattactatctcatttatttttatgattgaataatattcaattgtatagatatacacatttatttatgcattcatcagttgatggactttgggttgtttccacttttaaggccactatgaataatactgctattaacatccttgtataaatttttgtgtgaacacctgttttaaattrtttggggtatatacttaggagaagcagctctgggccacagggtaacattacatgtaacctattgaggaagtcccatactgttttccaagatggctgtaccattttgcattcccaccaacagtgtatgagggttccaaactcttcctggcctcatcatctgggtttttttttttttagtggtatctcacatggttttggttttcatttccctaatga

SEQ ID NO: 754331 - DNA, 609 bp, Homo sapiens
aaaacattttctaatcttcgagaaaagttgaagctaaaatgctatgcaacaattacaaggtttagagttggtcttgatgctcagtggataaaagtcatgtggtattcagaagaaagatagaaatattgggtaatcacatgttggctcacacctgtaatcccagcacttagggaggccgaggcgggtggattacttgaggttaggagttcaaccatcctggcccatgtggtgaaaccccgtctctactgaaaatacaaaaattagccaggcgtggtggcacacacctgtaatcccagctacttgggaagckgaggcggtagaatcacttgaacccaggaggcagaggttgcagtgagccgagatcaagccactgtattccagcctgggcaacagagcgagacactctcaaaaaaaaaaataaaataataaaataaaaattgagtaattacagacattgttagaaaaatttatatgtagttatgtacatcaaatattaagggttcctgttaaaagaacagaaatgtattctatagcttctaagccaagagaggaatcaaaaggcaatacattttgtttctcaatccaatctaaggaaggaaaaaataaaga

SEQ ID NO: 754332 - DNA, 636 bp, Homo sapiens
ccaataaacatttattatcaagctgggcactgtgatgtatgcctgtagtcccagctgctcagaaggctggggcaggaagatcgctgagcctaggagttcaaggccagcctgggcaacatatactccgtctcttaaaaaaataaaaatacatttattatctcatagcatttatgttggagggacctagaagcagcttagctaggtgtttctgacacagagtctcacatgagatagcagtcaagatgcttgctaagactgcagtcatttaaaggcttgactaaggttgaagatccacttctagggtgtctgattcagtgctgactattagcaggtggtctcaatgcaatgtcacatggacttctccgttgggctggttgagtatactcctagcatggcagttgatttctaccaaagcaagtgatctaaaagaacacaagatggaagccacattgtcctttattatattgtctcagaagtatgagttacagaggccagctgtattcrgaatgagaggggactacccaagagtttaataccaagaaacaaaaatcactggaggtcatcttggtgggtagctaccacattccaccttctctaacccaattattcatgtccctctcatatgaaaaaatagtc

SEQ ID NO: 754333 - DNA, 505 bp, Homo sapiens
tgtaaaggggctaagaaacttacccaaggtcacagagggaatatatttagagggtatttttataagaattcaataaaataatgtatggaaagcttttaaatgcttatatgagtggtaatgaggatgcagcccatgtgggcatttaatagctaatcaaaatgactcckgctaagtaatagggtatgagccgatgggaaagtgaaaataagataaattcacgctactcctatttttcaaatctgtagtcctagggggaggcaaacatgtaaacaattatgacaagtgtcttattaatactgaaacatctaaacattggagttgatctaagatgatttttaatctatttttaattttgaatcatgtcattgtaataattgaagaaggatttctaatacctgtaggtcatggtagtataataatctacctggcttcaaaagaccaatcactgattcactgaagtcaagtttttgtgttttgttcatgaaagaagggggttggtattaaa

SEQ ID NO: 754334 - DNA, 583 bp, Homo sapiens
tttggggactggaagaaaacatctgaaatgtcagggctacggaggcctgtggacaaggcatatgaataggcctacaggagtcggcagggagtgagaggatctttatattgcatgtcagcgtccaccagagagtaccyactgtggaagaaacactagacagccaaggatatagactggctctgtcagttgacatcagcagcctctgccatcagtcagaatgagtgcctgcctggagctgctgtggcaggaatgggagctgtggatagcatggcagcatgagtgccaactgaccagggccaatctagctctgccacttcccagtgtgcagccaaccagcaagggagaccaatgccaagcctgtgatatggcctgcccctggctgagcacacgagttacctggtggaaggatgattaactggattctttccaccctggaaagagcagtgattcgtctggtctggagtctacacatattctgggtttggtttgctgtttttgcctgcagagcctcagtcagcaccacaaaacttagaaagcatttgatatcctccttcaggatcctgtgtgacagagcatggaacca

SEQ ID NO: 754335 - DNA, 599 bp, Homo sapiens
cgcttggacctggaaggctccacgccatcatctctgggggtccttacagcagccctcagggaggtgggtttgctcctctgcagatgaggaagggaggtggaggaggtagtgctgggcacacagcagcggagcccggatgactgtcacatctgggggtgcactcccttccctgacaagccctgcagcaggcctggcctccagctgtgacagtgcagagatggaggagaggccagtaggaccrtgctggcctttcacccataaggggcctggctccgagaatgctacagttctcgcaggctcgggtgtgtggcccactaggcgctcaggctctgcgcttggtttaatggtctgctgttgccatcttgaaatgtgtaataagtttagaagaaggggcccatgttttcattctgcactcagctccaccaacgatcagccaattctaaatgcatgtagggggtgacatcttggtttctcaagtcccagagatacttgggagctgtttcaggcctcaggggcgacttggtcctgggaagacaggaatctgaacgttgctgctaagagcttgcccagggagtccaacagccctgcctgcctcccca

SEQ ID NO: 754336 - DNA, 541 bp, Homo sapiens
ggggtcgggggagcttgttaagagactgctaggaggctggagtggacagacacctgcccaccagacagatgcgcctcaactccctaacacaggtctcctttgttttcaggcccagcagcctggattcctgccttgacctttatggctytgcaatacagaagagattgcagagaaataagtaaagtgaggctgcagccttccctgcactgcaggaagcttttcctctggcaggtagaaagcacaacccatcagattgggtgggcgtgggagttcctcggtgggggacacagagcacaaagtggcattctgaaacaggaatgaggccagcgctcactggttccattggatctcggcagccttggctggctcctgcctgtgagccctgggaatacttgagccccaagtttgcccttggggacatcgcaggctgggaagggacattaggtaggtaaatcagtgactcagtcccggaaccctgggttatgcactgccgagggttcaaggaaagggacaaagaactcacatggaaggttaaaggaaa

SEQ ID NO: 754337 - DNA, 541 bp, Homo sapiens
ggggtcgggggagcttgttaagagactgctaggaggctggagtggacagacacctgcccaccagacagatgcgcctcaactccctaacacaggtctcctttgttttcaggcccagcagcctggattcctgccttgacctttatggctctgcaatacagaagagattgcagagaaataagtaaagtgaggctgcagccttccctgcactgcaggaagcttttcctctggcaggtagaaagcacaacccatcagattgggtgggcgtgggagttcctcggtgggggacacagagcacaaagtggcattctgaaacaggaatgaggccagcgctcactggttccattggatytcggcagccttggctggctcctgcctgtgagccctgggaatacttgagccccaagtttgcccttggggacatcgcaggctgggaagggacattaggtaggtaaatcagtgactcagtcccggaaccctgggttatgcactgccgagggttcaaggaaagggacaaagaactcacatggaaggttaaaggaaa

SEQ ID NO: 754338 - DNA, 657 bp, Homo sapiens
gttgaaataaaaatataatgataaaaccaaatgctagcaaggatgcagagaaaccaaatttctcatcccttgcttgtgggaatataacatgatacacacagccactcccaaaaatagattgacagtttctcaaaaaacatgcacttaccatattactcaacaatcacattcctgggcttttatcagagaaattataatttaagtttgcacaaaaagctacacacaaatgctcataactgctctattcgtcatgtttttattggcaggtaatttacatacaaagaaattcaaaaatcttaaatttcacaattcaatgtgttttgtcaaatgcctgcactcctgtccctcccccactgtaagatttacaacactctagcacccccaaaaagttatttcatgcccccttcagctaacctctaccatgccactccatccataaaccccaaagcaactatttaaaaaaaaaaaaaaaaaaggcaaaaamcgcaattacttttgcaccaacctaatactagtctgatttttaaatcacagattcattttcatataaatggaatcatacaatgtttattctttcatacctgacttctttcattcaggaacacgattcagagcttctgctgtgcagtagggggcatcaatagttcattttctttt

SEQ ID NO: 754339 - DNA, 657 bp, Homo sapiens
gttgaaataaaaatataatgataaaaccaaatgctagcaaggatgcagagaaaccaaatttctcatcccttgcttgtgggaatataacatgatacacacagccactcccaaaaatagattgacagtttctcaaaaaacatgcacttaccatattactcaacaatcacattcctgggcttttatcagagaaattataatttaagtttgcacaaaaagctacacacaaatgctcataactgctctattcgtcatgtttttattggcaggtaatttacatacaaagaaattcaaaaatcttaaatttcacaattcaatgtgttttgtcaaatgcctgcactcctgtccctcccccactgtaagatttacaacactctagcacccccaaaaagttatttcatgcccccttcagctaacctctaccatgccactccatccataaaccccaaagcaactatttaaaaaaaaaaaaaaaaaaggcaaaaaccgcaattactttygcaccaacctaatactagtctgatttttaaatcacagattcattttcatataaatggaatcatacaatgtttattctttcatacctgacttctttcattcaggaacacgattcagagcttctgctgtgcagtagggggcatcaatagttcattttctttt

SEQ ID NO: 754340 - DNA, 490 bp, Homo sapiens
agagcatggtctggaccctggtttggagcagcaggaaaggacaggacatggcctttgggtgccacctgggcactctgagcctgtggtgtacccagcaggctcctcctcccaggcctcagcctccaaccttacccaagggaaactcctgtacagccgttgtggggttcctagggctcagccaggccagggaccaggtccctagagaggcccagtccctgcaagtgtccttctctgcccatagccatatggaaaagagagagcccaccctacttaccttcctcagggagagcctgtctgtccctgggagacttccctgacctcccagcctcatggytgagtccccggcttccttccctcgtggctccctgggcagagatgagacctgtctgttctctgggctgggctctgtcctctcctccccctgctctgtctgtctgcagctctctgggctgggtccgtgcaccccagctccaagggcctctatcaccct

SEQ ID NO: 754341 - DNA, 573 bp, Homo sapiens
aagatcacagtaaagaacataagtcatccctaatcacatagccagatataaccggaattgttagtatgatattttggtagaatcattccagccatatctatctatctatctatgtctccactatctatatctccattgttttacccttatatgtaagatatatatggatatatggatatatttgagagatatatatgtgagatatatgtggatacatcttttatggattatattttcagcatgcaggtaaaacttgcaggtatttccatttgaaattactttttttcattactggtcatcttgaacttttccccatgcctgctggctatttgcaattcttcctgtggaaactgcctccttgtatgggagtccctcctttgtcctactgatatgcaaaggttctttacacagtaaggatcttaacctttcacttctaatagasaatttgcttttgagacatgagtgcgatgtaagagggaacaaagttctgggaccactgttgtggttgagtctggagccctgagcgcagggtggaaagatgctgtgttcaggatggttgtgtagaaacaggaa

SEQ ID NO: 754342 - DNA, 525 bp, Homo sapiens
ccttgtatgggagtccctcctttgtcctactgatatgcaaaggttctttacacagtaaggatcttaacctttcacttctaatagagaatttgcttttgagacatgagtgcgatgtaagagggaacaaagttctgggaccactgttgtggttgagtctggagccctgagcgcagggtggaaagatgctgtgttcaggatggttgtgtagaaacaggaagcagagcaaacagggcctggagattggttaaaagcaggaatgggagaggcaaaagagttctcagkctcctgctggaagggctggaggagaagtgaggcctcccactgggcaggaggtcagggagcaagggtgtagtgccctgagggtggcaatagttcctgaggccataactgttctgagcccttgctgggtgccaggcacagtgctgctagtgcgctctgcagagctgatctcacaataacttttggaggtgcaaatactctatccagtttatgaatgaggaaactgaggcacaaagtggctccatg

SEQ ID NO: 754343 - DNA, 611 bp, Homo sapiens
tttcttttggactttaatcatggtgatcttttggggattttttgagcatttttcctacttcaatgtattattattggatatgagccttaatgacttatgtctatttggggaaaatttactaccactatctcttctcccttccctctcccctcacctctctggatttcaattccatgcaaactagaactttacaataaatcccatatgtgctttatgctcctgttttgcagttttataattttctcatgatgtgcatctacctgtgtgttttatgcttagtctgtcttccaggtcactagaaggaagtgtgctttcagcttttctagcttccagatcaccaggtctctcttggtctgtgtctaatctgttarcatatctatttactgattttgattttgataattttgtttcatttctatttctattttattttacttgtagtttttgctgtcagctgaaatttacaatactatttataatttcataaacacattaaagttggttttctttttaaaacatcataagtctaattagcctattgttggagtctctgttgatctgcctcttttatctgtcacttttttccctcatacttttcttcgtactttgtg

SEQ ID NO: 754344 - DNA, 642 bp, Homo sapiens
aagtaaaagccaacccttagctatcaatagacactcagagattcacaggcataggtaatgcagaaattataactatcatgaatattacatattaggctttaattatcggggcaggagcctgggccctgatgattttttaatgaaaggtggaataacttcctaatttagcagttttcatttaaaaactcattagcaacaatattcaataatgcaataagaytttccagatgggaaaaaaaaggagcagaggtaaagatatttcagcaacattttcaagggtagaccttgacaaggtttacttacattttttgttacccaataaataattctttaccaatttgcccagccttcattgtgctatgaaatatttaccctatattccctgccaaagaaagagtactctgtgttacttggtactggggtattttggatactgtaaaatctggaaaaccatgttacagtgattaaaaaaaaaagaggtaggtctattgacttggagagcttagatactccattacttagtttaacgtatcactagcccaatgttttttaaaaaagtgactcacagaatcaaagagcaaaaactggcttcaaaattgagttttggaaacctgccaatggtctcatctggttgataactaa

SEQ ID NO: 754345 - DNA, 594 bp, Homo sapiens
gacttagtttgtaagtccaactccctcgccataaatataaattctctctcgtgatgcaacttggacccatatacacgtatataattggtgaactgtcccattgccagccatgacttgtcaggcatacatgtagaatggaccttaaactcaagctagaggtatmcctgcttataatttagtaatttttcaggcaggaaggactagagctattgatttaattccttttttttttttttttttttttttgagatggagtctcgctctgtcgcccaggctggagtgcagtggcacgatctcggctcactgcaagctccatctcccaggttcacgccattctccggcctcagcctcccgagtagctgggactacaggcgcctgccaccacacccggctaattttttgtatttttggtagagacggggtttcaccgtgttaggatggtcttgatctcctgacctcgtgatccacccgccttggcctcccaaagtgcggggattacaagcgtgagcaccgtgcctggccgatttaattcttccattctgggtggaaacattctagaaaggaagtatcactcagtttcttctgtgtaagaac

SEQ ID NO: 754346 - DNA, 539 bp, Homo sapiens
aatgtgttcaatcttctaatttggtgatggattcatttctttagatctccttcatgctggccagaacttttgctcactgcctttgtaccaggcatgagcacttactcacatatgtccttctatcactttctgtttctctcatgtccaattcctccacaacttcccattaatgcctgctttttctatggttccatgytatgatttcccattgctttattatttaatatttaaagtgagcatataatttatcatccaaactagaaaacttgagaataaggaacaggcataagccatgcctgtcactgggcaaacctaaatatgtgatcagtctttccataaagtatatttcctgtgggcatatatgtggcaacttattactacaatcttttgatttttctttaaccttttcaaataaatttgacttgtgccttaatctaaaatgtcatctcccatagaacagagactctgtattatttcttcttttgttccaatcattgcatgacactttgctagcaggtgcatagcaggtacacagtgaa

SEQ ID NO: 754347 - DNA, 539 bp, Homo sapiens
aatgtgttcaatcttctaatttggtgatggattcatttctttagatctccttcatgctggccagaacttttgctcactgcctttgtaccaggcatgagcacttactcacatatgtccttctatcactttctgtttctctcatgtccaattcctccacaacttcccattaatgcctgctttttctatggttccatgttatgatttcccattgctttattatttaatatttaaagtgagcatataatttatcatccaaactagaaaacttgagartaaggaacaggcataagccatgcctgtcactgggcaaacctaaatatgtgatcagtctttccataaagtatatttcctgtgggcatatatgtggcaacttattactacaatcttttgatttttctttaaccttttcaaataaatttgacttgtgccttaatctaaaatgtcatctcccatagaacagagactctgtattatttcttcttttgttccaatcattgcatgacactttgctagcaggtgcatagcaggtacacagtgaa

SEQ ID NO: 754348 - DNA, 539 bp, Homo sapiens
aatgtgttcaatcttctaatttggtgatggattcatttctttagatctccttcatgctggccagaacttttgctcactgcctttgtaccaggcatgagcacttactcacatatgtccttctatcactttctgtttctctcatgtccaattcctccacaacttcccattaatgcctgctttttctatggttccatgttatgatttcccattgctttattatttaatatttaaagtgagcatataatttatcatccaaactagaaaacttgagaataaggaacaggcataagccatgcctgtcactgggcaaacctaaatatgtgatcagtctttccataaagtatatttcctgtgggcatatatgtggcaacttattactacratcttttgatttttctttaaccttttcaaataaatttgacttgtgccttaatctaaaatgtcatctcccatagaacagagactctgtattatttcttcttttgttccaatcattgcatgacactttgctagcaggtgcatagcaggtacacagtgaa

SEQ ID NO: 754349 - DNA, 553 bp, Homo sapiens
ctcacgccggtaatcccagcactttgggaggctgcgtgggcagatcacctgcggtcaggagtttgggaccagcctggccaacatggcaaagccctgtctctactaaaaayacaaaaattagccgggcatggtggtgggtgcctgtaatcccagctactcgggaggctgaagcatgagaattgcttgaacccaggagacagaagttgcagtgagctgagattgcacccctgcactccagcctgggcgacagagcaaaactctggaaaagaaaaaaaaaaagaagagaaaattctgacctgtggtcagacataaatgcaaaattgctctgaaaacataatcattaaactcctatatctctagtaaatcatcctttgccccgccccattgtaggagtatgactttcctttagacgttaaaacagggcagtgtctaaagatggctattttatttgactgctaattatgagactttaaagcaagcaacagaggttaaagtccttccaagattttccattgattactggtaaatctccacaactttgatgttcagcttt

SEQ ID NO: 754350 - DNA, 572 bp, Homo sapiens
ccggcgcggtggctcacgccggtaatcccagcactttgggaggctgcgtgggcagatcacctgcggtcaggagtttgggaccagcctggccaacatggcaaagccctgtctctactaaaaatacaaaaattagccgggcatggtggtgggtgcctgtaatcccagctactcgggaggctgaagcatgagaattgcttgaacccaggagacagaagttgcagtgagctgagattgcacccctgcactccagcctgggcgacagagcaaaactctkgaaaagaaaaaaaaaaagaagagaaaattctgacctgtggtcagacataaatgcaaaattgctctgaaaacataatcattaaactcctatatctctagtaaatcatcctttgccccgccccattgtaggagtatgactttcctttagacgttaaaacagggcagtgtctaaagatggctattttatttgactgctaattatgagactttaaagcaagcaacagaggttaaagtccttccaagattttccattgattactggtaaatctccacaactttgatgttcagctttcatgatg

SEQ ID NO: 754351 - DNA, 572 bp, Homo sapiens
ccggcgcggtggctcacgccggtaatcccagcactttgggaggctgcgtgggcagatcacctgcggtcaggagtttgggaccagcctggccaacatggcaaagccctgtctctactaaaaatacaaaaattagccgggcatggtggtgggtgcctgtaatcccagctactcgggaggctgaagcatgagaattgcttgaacccaggagacagaagttgcagtgagctgagattgcacccctgcactccagcctgggcgacagagcaaaactctggaaaagaaaaaaaaaaagaagagaaaattctgacctgtggtcagacataaatgcaaaattgctctgaaaacataatcatyaaactcctatatctctagtaaatcatcctttgccccgccccattgtaggagtatgactttcctttagacgttaaaacagggcagtgtctaaagatggctattttatttgactgctaattatgagactttaaagcaagcaacagaggttaaagtccttccaagattttccattgattactggtaaatctccacaactttgatgttcagctttcatgatg

SEQ ID NO: 754352 - DNA, 585 bp, Homo sapiens
atgaagacctttatgatgaaccactttcatttaatgaagagtaaatatattttctcttccttataattttcttaataacattttcttttttaatggcaaggcttctggtcaatagcaggctagttatagtcaagttttgggggagtcaaagttatacttggatttttgacctcataggggttggcacccctaatcccctcattgttcaagggtcaactgtaatttcatctgtttctttttgctttttaaatgtagctactagacatttttattttacttattatttgtttttcttttttagagacaaggtcaccctatgtttccaaagctggccttgaacccctgggctcaagttatcctcccgcctcagcctcctatgtagctgggactacaggtgcacgccaccatgccyggctagaaaattttgaattatatacgtggctagcataatgtctctactggacaatatccctgccaagtagcagcgcagcctcagcagacacctctaaagatggtgtattagatcattagagctgctgcaacagagaaccccacagattgggtggctttaataatagaaattta

SEQ ID NO: 754353 - DNA, 630 bp, Homo sapiens
gtctccagctcctgggctcaagctatcctcctgcatcggcatcccaaaatgctaggattacaggcgtgagccaccgcgcccagcctgagaaccactactttatatgatacaagccttagtagtaacagaaagctaattaaatcgtgacagaaataacctattggagagaagattgatttctttaaaatctgttttgttaaaacctacttggttttaatttagttgggttaatctcgcctgatagggaacaacgtccaagttagtctagaatggtaaagagtggtaggaatactcacatttgtgttcaaaaagaaatgccccttgtgtatgtttgtaataatatatacgctttctggacggatacacaaamctgttcagaggtttggagtggaagccaaatgttttattgattaccctctttgctgtttaccctttttccttttcttttttttttaaaccatatatatataatttatttcaattaaaaaagcaataaaggcctgagacacaaagttttatatagatgacaggaagcaacctttcctgggaggttgggagtttgttgctggatccataaaaaggcccacttctcgcggatcacctgaggtcaggagttcgagaccagctcga

SEQ ID NO: 754354 - DNA, 610 bp, Homo sapiens
gtgtatctatgttgtgtggggcccaaagacttacaatttgggacactccttaataaaaagaatacaaaagtatgaaaacaaaattaagtacaaaagtgggtatttacctaggaggagggggtggggaatcacagcaaattgctgacaccctacagattggccccttccttcagcaatctatgtaggcagtttaccagaaatgcgcacacagcaatgcttcctgtttgtcacctgccttcctttccctgcctagaacactcccagagtctccctgctctcttgggcaacggaagcttgtgtctcttcatctttatggtaagagcacctcggatgaggcttctgaaagctgtgggctggtggacatcacccagggcaggtgttcctaacatttttggggtcttggttgcctttgagaattgaatgagagttatggaacctcccccagaacaatgyctactcaagtctaccaaattttacctacagttttagggattcttagattccctaaagcctatctgcagatcccagatagggaaccggttacctagtgcggtccactcatttcacagatgaggcaacaaatcccaaaggggtgagcaacttgtgcaag

SEQ ID NO: 754355 - DNA, 570 bp, Homo sapiens
acaaaatttgatcacgatcatattgtagtctctcaaagtgctctagaaattgtcggtggtttacatgaagtggccatgggtgtccagagcaccctgaaactgtatcaaagttgtacatatttccaaacatttttaaaatgaaaaggcactctcatgttctcctcactctgtgcactttgcggttggtgtgacaaggcatttaaagatgtttctggcatttttttttttttaatttgtaaggtggtcttaactatatggtaattggctggaaacctaagttatcaactgtatatatctatagtttgtaaaaagaacaaaacgaccaagacaaactcttgaagctctttgcttggggttgaggctgtggggaagktgccttttggaagggccatagctcagggcatgcactgtgaggctggacctgttgcctctgcagagggcatacatttagcttcaggttgtcttgtttctgtatattgtgacacagcattcagtggcgcgatctcagctcactgcaacctccacctcccaggttcaagtgattctcctgcctcagcttctggagtagct

SEQ ID NO: 754356 - DNA, 607 bp, Homo sapiens
tcacgtggtttcaagacaagtgtcaaactttacatttgacttagaaaagccacaactcatattcagactccttctgcagtggcagaagactgctgggctctaagccccaggaagacggggactgtgtgtctttttccttgctactatattgctggggtctaatgtagcatctgacagagtaaggcactaaataaatgtttgttgattgaatgactaagtgattaaaaagtccctttaaagcactttttttttggtgttttttgttttttgtttttgagatggagtctcgctctcttgcccaggctggagtgcagtggcacgatcttggctcattagaacctctgcctccgaggttcaagtgattctcctgcctcagcctaccgagtagctggtattacaggcgcctgccaccacatctggctaatttttgtattttttagtagagacggggttttcccrtgttggccaggctggtcttgaactcctgacctcaggtgatctgcccgcctcagcctctcaaagtgcagggattacaggcgtgagccaccgtgcccagcccaagcacttttaaaaactgttttgttactccatcttacatgtgttacac

SEQ ID NO: 754357 - DNA, 640 bp, Homo sapiens
cagaatctgcagaccttattcaaaagctggaagctgcatatggcagctaagtggggcaaggaaatctggaatatatgatagaagagacaaaatggaagagtccatagtggaacaaaagagagcaagttctgttcagggtctgctgagttgaatcccctgtaggacatatatatggaggtaagcaaatatggacacattagcaataagcactgacctcacatccaaggtctctcttgaaattcctcaactagaaactagtttgtttactagaaaccatttagctaattttaaaaagaattaactctgatgaataattcaatgactgtgaactcagaccatacaacctagagttgatcttccaccygttacctgatgtatcagtccattctcatactgctaataaagacataaccaagactgggtaatttataaaggaaagatgtttaattgactcacagttcagcatagctagggagacctcaggaaactaacaatcatgacagaaggagaagcaaacaagtacttcttcacatggtggcaggaagaagttcagagtgaaggcaggggaaagccccttataaaactatcagatttcatgagaactcactcactatcatgagaacagcatggaggtaaccac

SEQ ID NO: 754358 - DNA, 596 bp, Homo sapiens
aacactctaatggtaccaattttatctttagtattaaagttaatagacaaaactattacaaacagctaaaactataacatttgttaagcaattaaattataaaaagatattaaggtgtggtatcaaaaattaaacatgtaaggagggggaataaaagtgtagtgtctcagttcattttctgctgctatcacagagtatctaagattaggtaatatataaatataaaacattatttcccaaagagtgcagtggcacattcatattttactgcagtctctaactctgggtctcaagtgatcctcctgcctcagtctcctgagtacctaggactrtgggtatgcaccaccatgcctagctaaatttttttgatagatggtgtctctctaagttgcccagggtggttgcaaactcctgacctcaagcaatgctcccaacccagcctcccaaagtgctgggattataggcaggagccactatgaccaccttgtttttgctttctaaaataaaatgatatttatttaggaataggacattgtgatagcaatatgtgtgccatagtaaaagatgtattaaggaaggtaaaggaagacaagggt

SEQ ID NO: 754359 - DNA, 599 bp, Homo sapiens
aaactttgtttggattttgtttagatattgctgttctagaagttaattactctaattataatgtttctattttgagaatactatgagaccactgagtttctcctgcctctcatctctgcacatgtaaagatatcagaagttcagaaaaatgtgtagtaatttggctgaccaaataaaacatttttattaaagaatttaatgaattggtcaaaaaagtcctatcttacactgcagaaaaaaaagagaygtaaaacaatagatatagcacttgatatttctgtgcaaagagttgctttaaaagcattatataatgcttttatataatgtatgcatagtaatactacctaacttagaaatgaattttcatgctgtcttgtaatcaggttacatattaaagaaacttgtacagctaacaaaaccaggctttgaaagagatgactaaatcacccttattttgtatttcgtgctttcaaatctgaattgagatatttcattactcttaaaccatggtgaaatcatggaaggcatcataacaagagcttaaactctggggaggctattatacaattttgcgtttacacttcctacatgattgtgga

SEQ ID NO: 754360 - DNA, 632 bp, Homo sapiens
tagagaaccaccaaagcattcttacttgtacgcatccttgtaatataaacactatagtgaggcatcacgactttcaagatctagttccaaaacagacacccattcttgtgacaattaccaaaactaatctacaaacctcgttaattgtaaagggtttagcacaagtgcttgcacaatattatcactacattatcctttttatctatttaattcttggttgttattcgggaccattaaaaataaaaataacaagtttagataaagtttcaattcatacaatgckgataggaatttataaaaagcttttttatccagagcagtcagagagaatgtgatcccttaaatgtcctgttgttgttgttgttttctgtagtgtttctctctttctggaaatataggctctctaaaagtcagcaacaatataggattttacatgtactcccttccctttgtcttctctcttgctgatgtctgcaatctgccaatttgcacctcggcaatgagataaccttattgttttgatgtccaattatcaatttgcacctataaagacatgcaatgtgtgtcacatttattgtcgcgcttctgtgcatttctgtggagatggataactctctgattagagcatatgg

SEQ ID NO: 754361 - DNA, 603 bp, Homo sapiens
aaatttagtcttgtacaagaccactccaagcaaaattggggttttatacaaaggcagacagagagggtaggaaactagcaatttctgaaacggactctgtattcccagggcaatgaggcattgcagacactgatttaaagcaatttctcatagagattaatactttacataaacaacaattgtctctagtattcaggttctgcattacaaggtccagttcatctctctctccttttgtttccattgatctctttgcaacacggcttctatggagactctctgttcatcaaatgtatcagtagatctctgtgttcatgaatgaatgggttcttttcctgtgaggttctgaaataaacttgcaatcacaggattaccctctccttcattggccctatatcatacagatgacctccaaraagtgttgcctagcttctaaatagcaaacacaagttggatctgaccccagttccctaaaaatgtttgtgttttatacaatccttaatttatggggaaatatcagtaacaaagaaactagatagaaaaaatgtaatatttaggtaataagggaaaatagaaataatgaagggtgagagagagagccag

SEQ ID NO: 754362 - DNA, 445 bp, Homo sapiens
cccaagctgtaccttggcccttttagtcacagctggagcagctgggacacagggcaccaagtccctagattgcacatagcagagggaccctgggcccagcccatgaaaccattttatcctcctaaacctctgggcctgtgatcrgaggggctgcctcaaaggtctctgacatgccctggagacattttcctcattgtcttggtgattaacatttggctccttgttacttatgcaaatttctgcagctggcttgaatttctcctcagaaaatgggattttctattctatcacattgtcaggctgcaaattttccaaacttttgtgctctgtttcccttataaaactgaatgcctttaacagcacccaagtcacctcttgaatgctttgcttctgagaaatttctttgtcagataccctaaatcatctccctcaagttcaaagttct

SEQ ID NO: 754363 - DNA, 465 bp, Homo sapiens
gggcagaggtattaggaggttaaggcttgaccttgttgactagctttttacatgtcagttagtgtgacaaatgacaaaatgcagagacactataatagcatgacagaataagggagtatgaccatataatagaactttttgtaattatagaaatrttctataactgctccatccagtatgataagccactaatcacagatggcttctagacacttgaagtgtggctgatgtgatggagaaactaaattttaaattttatttaattttaagtaatataagtttaaatagccacaggtggctaatgagcagagagtggacagtacaagtttagagcatggactttaggcttcacctcctactagttatgtgactgtgagcaagtcacctttctgatcctgagttttctgaatctgtaaaatgggagtaataattattacaaaaaatacaagaaattatgtatgtgaa

SEQ ID NO: 754364 - DNA, 610 bp, Homo sapiens
ctgcctatctgaaaatctcccacagcctcactttgaacactagtccttatatttttcaaagctttgataactgcatttcagagtatctctgcccaactttatttcttttccaaatctgtgagtgctattttgatataatggctttttttccctgtctctttaggatgtgatgactatggatggtcttctctatgatctcacagaaaaacaagtatatcacatcggaaagcaggtccttttggcgctggtaagatgaggcaacatgacaactgatggtgtgaygtttccttgttagccttgtttttgatgccatatttctcatattaatattctcaagtggtgtgtatgttttaaagaaaattagatagaagttagggggcagaaactcaagcatggataaattgtttttagtcccttccttagggatttatctagataatttaccacactattggtaatttcagggagaaagtagtcaacttagggtttatacaaggaacaggaaggatttttcagatttttcagggccaagaggtatacacccatttacttgataattttacatccccatttgtactaataatagaattaaaagagacagatagggaag

SEQ ID NO: 754365 - DNA, 610 bp, Homo sapiens
ctgcctatctgaaaatctcccacagcctcactttgaacactagtccttatatttttcaaagctttgataactgcatttcagagtatctctgcccaactttatttcttttccaaatctgtgagtgctattttgatataatggctttttttccctgtctctttaggatgtgatgactatggatggtcttctctatgatctcacagaaaaacaagtatatcacatcggaaagcaggtccttttggcgctggtaagatgaggcaacatgacaactgatggtgtgacgtttccttgttagccttgtttttgatgccatatttctcatattaatattctcaagtggtgtgtatgttttaaagaaaattagatagaagttagggggcagaaactcaagcatggataaattgtttttagtcccttccttagggatttatctagataatttaccacactattggtaatttcaggragaaagtagtcaacttagggtttatacaaggaacaggaaggatttttcagatttttcagggccaagaggtatacacccatttacttgataattttacatccccatttgtactaataatagaattaaaagagacagatagggaag

SEQ ID NO: 754366 - DNA, 617 bp, Homo sapiens
tatattaactacatttttctgctatattttttaggagcttgaaattgtaattggagatgagcacatatcttttaccacatcaaaaataggttctcttattgatgtaaatcagtcaaagtaagtatgttaaagcattttggcgaagttttcattattacagaggctcattttagaactatagtcagtttgytagccaagataatttcagtggcatcctatcagtttattatgcagatgtaatcctgatttttatgtcattaaaggcttattatcttgtctctcagtagaagttagcagagtatttcattgattgtccaaaaacttttaatccaacagctgtatataataatgcccaagttgtattagctactttgtataaaaatgtggatacagtatcagcaaatccaaaggaaagaaatccttattggattatgtcagcctcattaggcctatatcatctcactgtccttcttgggctcaatacttgggaaaaagatggaaaaaatccattatggcctaagtatgctttagctatcgatgtcttcccaagatctgtctctcctctgccccagggttttgtagcacatcccattttcttggtctgatcctagccactt

SEQ ID NO: 754367 - DNA, 617 bp, Homo sapiens
tatattaactacatttttctgctatattttttaggagcttgaaattgtaattggagatgagcacatatcttttaccacatcaaaaataggttctcttattgatgtaaatcagtcaaagtaagtatgttaaagcattttggcgaagttttcattattacagaggctcattttagaactatagtcagtttgctagccaagataatttcagtggcatcctatcagtttattatgcagwtgtaatcctgatttttatgtcattaaaggcttattatcttgtctctcagtagaagttagcagagtatttcattgattgtccaaaaacttttaatccaacagctgtatataataatgcccaagttgtattagctactttgtataaaaatgtggatacagtatcagcaaatccaaaggaaagaaatccttattggattatgtcagcctcattaggcctatatcatctcactgtccttcttgggctcaatacttgggaaaaagatggaaaaaatccattatggcctaagtatgctttagctatcgatgtcttcccaagatctgtctctcctctgccccagggttttgtagcacatcccattttcttggtctgatcctagccactt

SEQ ID NO: 754368 - DNA, 617 bp, Homo sapiens
tatattaactacatttttctgctatattttttaggagcttgaaattgtaattggagatgagcacatatcttttaccacatcaaaaataggttctcttattgatgtaaatcagtcaaagtaagtatgttaaagcattttggcgaagttttcattattacagaggctcattttagaactatagtcagtttgctagccaagataatttcagtggcatcctatcagtttattatgcagatgtaatyctgatttttatgtcattaaaggcttattatcttgtctctcagtagaagttagcagagtatttcattgattgtccaaaaacttttaatccaacagctgtatataataatgcccaagttgtattagctactttgtataaaaatgtggatacagtatcagcaaatccaaaggaaagaaatccttattggattatgtcagcctcattaggcctatatcatctcactgtccttcttgggctcaatacttgggaaaaagatggaaaaaatccattatggcctaagtatgctttagctatcgatgtcttcccaagatctgtctctcctctgccccagggttttgtagcacatcccattttcttggtctgatcctagccactt

SEQ ID NO: 754369 - DNA, 617 bp, Homo sapiens
tatattaactacatttttctgctatattttttaggagcttgaaattgtaattggagatgagcacatatcttttaccacatcaaaaataggttctcttattgatgtaaatcagtcaaagtaagtatgttaaagcattttggcgaagttttcattattacagaggctcattttagaactatagtcagtttgctagccaagataatttcagtggcatcctatcagtttattatgcagatgtaatcctgatttttatgtcattaaaggcttattatcttgtctctcagtagaagttagcagagtatttcattgattgtccaaaaacttttaatccaacagctgtatataataatgcccaagttgtattagctactttgtataaaaatgtggatrcagtatcagcaaatccaaaggaaagaaatccttattggattatgtcagcctcattaggcctatatcatctcactgtccttcttgggctcaatacttgggaaaaagatggaaaaaatccattatggcctaagtatgctttagctatcgatgtcttcccaagatctgtctctcctctgccccagggttttgtagcacatcccattttcttggtctgatcctagccactt

SEQ ID NO: 754370 - DNA, 595 bp, Homo sapiens
tcatcccatggtgaaggcattacatggagagacagcgagagagagagagagagagagagagagagagagctttttttacaacagaaccactcctgagataacgatctcactctcatgagggaattaatctattcttaagaktgaggtcctcatgactttaatcaactcttcaaggtcttacctcccaataatgtcacagtggctattaaattccaacactgagttttggaaggagcattcaaaccaaagcacctctaatggtaacatcttgtaaaatcatggtataatatcacaacttagttattgacattgatacaaatgcagagagattctatcacaaggctccctattattgcccttttagagccacacctgcttccttttctccattccttgttcctgactccttctctgtttctataattttatcatttcaagactgttaagtaaatgaaatcatacggtctgtgacctcaacgtaatttcctgaaaatctatacaagtttttgtaggtatcaataatttgttccttttattgccaagtaggtatggatgtatcacagtttgattacatttacctattgaggaatatttt

SEQ ID NO: 754371 - DNA, 595 bp, Homo sapiens
tcatcccatggtgaaggcattacatggagagacagcgagagagagagagagagagagagagagagagagctttttttacaacagaaccactcctgagataacgatctcactctcatgagggaattaatctattcttaagattgaggtcctcatgactttaatcaactctycaaggtcttacctcccaataatgtcacagtggctattaaattccaacactgagttttggaaggagcattcaaaccaaagcacctctaatggtaacatcttgtaaaatcatggtataatatcacaacttagttattgacattgatacaaatgcagagagattctatcacaaggctccctattattgcccttttagagccacacctgcttccttttctccattccttgttcctgactccttctctgtttctataattttatcatttcaagactgttaagtaaatgaaatcatacggtctgtgacctcaacgtaatttcctgaaaatctatacaagtttttgtaggtatcaataatttgttccttttattgccaagtaggtatggatgtatcacagtttgattacatttacctattgaggaatatttt

SEQ ID NO: 754372 - DNA, 587 bp, Homo sapiens
gtatggatgtatcacagtttgattacatttacctattgaggaatattttgttgttttcagggttttttgttttgttttgtttttttgctattgcaaataaagctgctatgaacaggaatagacatttttgtgtgaacataacatgtttaatttatctgagataaatgcccaagaatgcaattactgagtcctatggtagttcgtgtttagatttataaaacacttccaaactgttttccaaagaggctgtaacattttrtatacccatgagtgattcattttctttgcatactggccatcatttggtgttgtcgttatttttaaattttatccctcctgatatgtatatagtgatgtcattagaatttttttttaaatagattacaattttgagcagttttagttttacagaaaaattgagtggaaagtacagagagtttccatatactcactcaccctcctcccagtttctcctattaatatctagcattagtgtggtgtatttgttataattgatgagctaatattgatatgttattactaagtaaagttcatggtttatattagtttcactctttgtattttac

SEQ ID NO: 754373 - DNA, 500 bp, Homo sapiens
agtattgggaattcaaaatgagtatgatatagtcactgcctataaactaggctagttggcaaagggatcattaactaaaagacacatatccatgatatcaagtaaattattgataaggaatgactattccaattatggagcagttcagaatatacataatatacgttaatacaggatggccataatgttgggaaatatagataacatttactttcacagattaacccatttgattgcttcttccagaaaatgctaatggagcaggtttatattctgaaaattagagacaaaaatcattggaggcaacgtatcacagaagcatgtgcaggcaytgatagaaatgttgtattaatgtcccatgttggtccccattatgcataacacattgctaatgaggaacaacacgttgaacatatcatgtaatgtcaccatatctcagagtgataggaataaatcaatactataaaacttcgttatgtttccagacttgctgatcatgt

SEQ ID NO: 754374 - DNA, 524 bp, Homo sapiens
gtcccatgttggtccccattatgcataacacattgctaatgaggaacaacacgttgaacatatcatgtaatgtcaccatatctcagagtgataggaataaatcaatactataaaacttcgttatgtttccagacttgctgatcatgttacatatataatatatataatttaaatattttgaatgtttccctttttttgaaagaaaattgtgcyattttcttccaaatatttacacaatgtaaaacagaagagcaatgacatttatagaaatgacaattttcagtatttataatcttttctctgtctaaagagataatttttctattccccattttcccatggtttgaatttgtaattttctatagcagagttctcttgtatattttcttctttgactctgtcacatcgtaggaggtgctgtcagaatattcttgtctccaaaaggagcttttggcttggatttcctctgtcatacaaacatcaaggaaagacaagatctcaatatggaaaccacatataaagtg

SEQ ID NO: 754375 - DNA, 641 bp, Homo sapiens
gagatggaaagtgttccttcctcttctgttttttggaagagattatgtataattgatgttaaattttctttaaatgtttggtagcatctgagcatagagtattttttttgagaatttttaaactacaaatttaacaattataggtctattcaaattatctattttatattgggtgagttttggtagtttatgctttttaaggaattcattgtctctaaattattrccacatttgtgtatgaagagttataatgattttttagattttatttttaagtctttggggatggtagtaaaatctctgtttcactactgatatttgtaatttgcatcatttttttctttgtcagtctcacaagaggttttcaatttcatcaaaattttcaaagaaccagctttttgttttattgatttttctctggttttctgttttgcactttattgacatctgctctttattatttcttttttcctgcttgttttaggtttattttgtcctttttctgattcttaagattggagctcagattatttatttttgacttttttcctattctaatataaacacttatgctataaatttccttctcagcatggcattaattgtgcccacagatttcaaatgttgtattcatattttca

SEQ ID NO: 754376 - DNA, 612 bp, Homo sapiens
tatataccaaggaaaaagtaaacatgtccacacagaaacttgtatgtgagtatccacagcagcattttttataaatgtgaaaaagtgaaaactatccaaatgcccacccactgataaatggctaaaacagaatctgtgtatatccatacaatgcaatattatttagcctcaaaaaggaacgaagttctcattcatgctacaacatggataatccttgaaaacatttgcaagtaaaagaagccagccagatacaaaagtccacatactgtatgagtcaatttatatgaaatgtcctgaataggtgaatccataaagacagaaaataattcatgattgccaggggctagggaagggagcagagtagggaatgaytgctattgggtaggggtttctttctggggtaacggaaatattctaaaataaggtagtggtgatggttgcatacttttgtgactataataaaaccactaaattgcacactttaaaaaggtaaattttatggtatatgaattatatctcaatttataaaacacaagtaatattaaaggtaattctaattttgcaaaaaaatactagtttttgagaatttactggacaaacagtataggacag

SEQ ID NO: 754377 - DNA, 612 bp, Homo sapiens
tatataccaaggaaaaagtaaacatgtccacacagaaacttgtatgtgagtatccacagcagcattttttataaatgtgaaaaagtgaaaactatccaaatgcccacccactgataaatggctaaaacagaatctgtgtatatccatacaatgcaatattatttagcctcaaaaaggaacgaagttctcattcatgctacaacatggataatccttgaaaacatttgcaagtaaaagaagccagccagatacaaaagtccacatactgtatgagtcaatttatatgaaatgtcctgaataggtgaatccataaagacagaaaataattcatgattgccaggggctagggaagggagcagagtagggaatgattgctattgggtaggggtttctttctggggtaacggaaatattctaaaataagrtagtggtgatggttgcatacttttgtgactataataaaaccactaaattgcacactttaaaaaggtaaattttatggtatatgaattatatctcaatttataaaacacaagtaatattaaaggtaattctaattttgcaaaaaaatactagtttttgagaatttactggacaaacagtataggacag

SEQ ID NO: 754378 - DNA, 634 bp, Homo sapiens
ttacacttctgaattctcatatgtaaatatattttatatatcttagtttcattatagttctactttcttgggtactcctcatgaggtatcaataaataatcataagatcttgtatttgtactgattgttatacatctcaaatactttacatgcaactctctagaaaaggtatgttaattgggccaggcatggtggatcatgcctgtaatcccagcactttgggaggccaaggtcgagaccatcctggctaacatggtgaaaccccgtccctactaaaaaatacaaaaaaaaattagctgggcatggtggtgggcacctgtagtcccagctactcgggaggctgaggcaggagaattgcgtgaacccaggaggcggagcttgcagtragccgatatcacgccactgcactccagcctgggcaacagagtgagactccgtctcacaaaaaaaaaaagaaagaaaagatatgttaattgacttgccaaaggtcacacaggaagtcattgacccagtgtcataattgagatctcctgactcctttccctatttcaggagaagtttcttccttttcaccaagcatttctcctagaactttccattgagaaataatttaggtgaggaaaacaagatgaat

SEQ ID NO: 754379 - DNA, 572 bp, Homo sapiens
aaaagtatctgtttaagtccatggattcaattattttgggtatataccaaggagtgatattgtttaactttatgaggaacctggatactgtcttccacagttactgtaccattttacattcccagcagcaatgctcaagggttcatatttctccacatccttgtcaacacttgtattctgttgttttgttttaatatagctatcctaatgggtakgaagtggtaccttaatgtggttttatttgcatttccctactgactaatgatgttgagcatcttttcttgtgcttattgtccacttggatatttcctttggcaaattatctgttcaagtacttttcttattttcaattgggtggtttatcattttgttcttgagttataggagttctttgtatattctagataacatgatttgcaaatattttttcccattctgtcagttgtcactttcttgataatgtccttttatgtacagaagtttcaaattttgatgtagtccaatttaccttttttctttttttgcttatgatatgaagcataagcaaaaacctttttttttttttttttttg

SEQ ID NO: 754380 - DNA, 540 bp, Homo sapiens
ggcaggagaggactccccaacccccaaccaggaatgtcaggcaaccatcaggtgatggtcaggcggttgttaactgtctttccaaaataataattggtcaggtgcagctagtgccagggaaaggcagtctcccgataagatagaaaatgcctgaaactggtaatcagcagcttcccaataagacctcaggagttgggcaagtgagctcaagcatgagcattaagaagcaaaatggtasagtttaaatggtatatgaccttctagggacattcgactggtaaggggagaacgcctcaagagagcatgcgtacaactccactaaacacaccactcatgttcccctcccaaacgctagcaggccactgcctatgtggacagcccaccccacgggaagaatcagggaagtaatgcaagaccctggaagtcagaggtcaaagcatgcatttgatctctcaagtcgcctgtttggccctcttcctttcattcctgccctaaagctttttaaattattaataactttgattcctgctctaaaacttg

SEQ ID NO: 754381 - DNA, 540 bp, Homo sapiens
ggcaggagaggactccccaacccccaaccaggaatgtcaggcaaccatcaggtgatggtcaggcggttgttaactgtctttccaaaataataattggtcaggtgcagctagtgccagggaaaggcagtctcccgataagatagaaaatgcctgaaactggtaatcagcagcttcccaataagacctcaggagttgggcaagtgagctcaagcatgagcattaagaagcaaaatggtagagtttwaatggtatatgaccttctagggacattcgactggtaaggggagaacgcctcaagagagcatgcgtacaactccactaaacacaccactcatgttcccctcccaaacgctagcaggccactgcctatgtggacagcccaccccacgggaagaatcagggaagtaatgcaagaccctggaagtcagaggtcaaagcatgcatttgatctctcaagtcgcctgtttggccctcttcctttcattcctgccctaaagctttttaaattattaataactttgattcctgctctaaaacttg

SEQ ID NO: 754382 - DNA, 527 bp, Homo sapiens
tgctgttgtatcatatggatgatttgtctcttttcctctggctactttggaacctttttgtgtttgctcttctacagtttcactatgatgtgtctacatttgggtttcttttattctacttaggaaaatagatttatatttatcatcacttctgtaaaawtctcaattactatctcttcaattaattcctttttctcagttctctttactgtcttagagttcagaatacatatgtttctgtttcctcttctgttctccgtatctcttaacttctttcatctttttcatcttactactctctgtgctctattctgggtaatttcctcagatgtgtattccatatcactgttcaactatgtttcatctgttgataaacccatacattgagacttttttaatttctaaaagtctatttttcattttagaagttccattttattgttatgcgtatcttcccagttattcctgatactcttgtattccttcccgatctttgtggttccatacttcatttctttaaatgtttc

SEQ ID NO: 754383 - DNA, 631 bp, Homo sapiens
taggactgtgactgcacacatgaagttgaagacaaaggaatgccaatgacaatactgctcattaatttgttcagcagattccattcacatttcttgagctccctcctttgtgcccagccctgagttcaggactttctagtctttcctttttgtaataacagcccctctggcctggcagttattccacaacagagtcttgtacagtggctcagaaggacagagctactggctcagacaggagatcaaggacttgggccttcctcccatctcaacataaggcctgcttcttaatggatgccaactgagaattaaacaaggccaagctccatgatttctatttgaccttgttcatgctagtcacaactctgagattcaaggtcctctttagcaaaatggagctgataaaagtatatacccatagggctgttgtatagtctgcttaggctgccattaaaaaaaawaccagtctgggtagcttaaacataattcattttcttacagttctggaggctgggcgtccaagatcaaggtatcagcagggctgttttctggtgaagcctccgtccttggtttgcagatgccaccttcttgctatgtcctcacatggtttgtttgtttgtttgtttttcaa

SEQ ID NO: 754384 - DNA, 653 bp, Homo sapiens
tcagagcctgcagggaaatggagcaggaaaccacagaaaaggcagcacagaatgcaagccatgaaaagttgggctagggctgtttgtgcaaggtgggctacatcttccggggaggaggagggccaaggctgggcagttaggcaaacttcccagaggggccgagagggatgatggtgaggttttagagggctggagggatttggtggggtggagtcagggtatgatgyggtcagcttcagtcagggaagactcctgggtaggagtctgggggctgcagtaggccagcctggctctctgaagaggggtggctgaggtcttgaactggagaggtggcagtgaagtaggccatgaagactgtatgtgaggggagtggtacccatggggcagcagccgctgcatggcaacactaagaatggcgaatacttggaagaggatggcagcagctggtgtcagcctcctggagggtagctgcatggtgatgcagcctttggagcctcagcagcaccagtctggtctgggatgtgtccaggagaacttgagagccttctgggcctgcccccactctttccttccctgactggttgcccctcactggcacgtccccaagccccccacagccatcccacccagggatcctggctctccggagctgc

SEQ ID NO: 754385 - DNA, 653 bp, Homo sapiens
tcagagcctgcagggaaatggagcaggaaaccacagaaaaggcagcacagaatgcaagccatgaaaagttgggctagggctgtttgtgcaaggtgggctacatcttccggggaggaggagggccaaggctgggcagttaggcaaacttcccagaggggccgagagggatgatggtgaggttttagagggctggagggatttggtggggtggagtcagggtatgatgcggtcagcttcagtcagggaagactcctgggtagragtctgggggctgcagtaggccagcctggctctctgaagaggggtggctgaggtcttgaactggagaggtggcagtgaagtaggccatgaagactgtatgtgaggggagtggtacccatggggcagcagccgctgcatggcaacactaagaatggcgaatacttggaagaggatggcagcagctggtgtcagcctcctggagggtagctgcatggtgatgcagcctttggagcctcagcagcaccagtctggtctgggatgtgtccaggagaacttgagagccttctgggcctgcccccactctttccttccctgactggttgcccctcactggcacgtccccaagccccccacagccatcccacccagggatcctggctctccggagctgc

SEQ ID NO: 754386 - DNA, 603 bp, Homo sapiens
ggctggagtgcagtggcgcaatctcggctcactgcaacctccacctcctggattcaagtgattctcctgcctcagcctcccaagtagctgggattacaggcatgcgccaccatgcccggctaatttttgcatttttttttttccgagatggagtcttgccctgtagcccaggctggaatgcagtggcacaatctcggctgactgcaacactccctgtcctgggttcaagcaattctcctgcctcaacctcctgagtagctggaattacaggcacgcaccaccacgtccggctaatttttgtattcttagtagagatggggttccaccatgttggccaggatggtctggatctcctgacctygtgatctgcctgccttggcctcccaaagtgttgggattacaggcgtgagccactgtgcccagccaattgcccttatttgtatcctgctaaatcataaaggtttggggagttcctttaggccccaataaacttgtttgtggaggcctggggagtttcttcagacccccaataaaacttgtttaatcctaaaagggtcctgttaagaattgcttcattattttgtcatgcttcaaggcccagga

SEQ ID NO: 754387 - DNA, 690 bp, Homo sapiens
ataagtattgattagcttattggatccatccagtccttggactttcagtaaccttagttcactaattccctcttttgtgtttaagccaatttgagttgggttctgtcatttgcaaccaaaacaatatagaatttatgccrataatttaagatttgtatgttgctcataagattggaaacctaagccttcctctgaacacaaatatgtgagtaagaataaaaaaagtcaaatacaaagtcttgatgataacagtcaatgggatggatttggaaagtgtctcagactaggagtcagaaaacctgggtgctgatcctaggaggttcacttagccatgtgactttgtaaaatgtgtgaaactaacgctgtaaaatatgaaaaattaaccctgcaacaaaaaagtaatgtacacatacgtattttgaatgttgcatgatataaagtcaagtaagtaatttattagagttgctcccagaactttttctgtatatccaataattagttttcaataatagtgaaggaaagacctaggagtggacatttctcagtctctcatacaccatatgcactgatctgggtgacagaatacctttaaagatacacttaaaaatgcatcttaagagaataagacaagccacagactgggaaaaatatctgcaaaacacatatctaataaagttttgtattcaaaat

SEQ ID NO: 754388 - DNA, 690 bp, Homo sapiens
ataagtattgattagcttattggatccatccagtccttggactttcagtaaccttagttcactaattccctcttttgtgtttaagccaatttgagttgggttctgtcatttgcaaccaaaacaatatagaatttatgccaataatttaagatttgtatgttgctcataagattggaaacctaagccttcctcygaacacaaatatgtgagtaagaataaaaaaagtcaaatacaaagtcttgatgataacagtcaatgggatggatttggaaagtgtctcagactaggagtcagaaaacctgggtgctgatcctaggaggttcacttagccatgtgactttgtaaaatgtgtgaaactaacgctgtaaaatatgaaaaattaaccctgcaacaaaaaagtaatgtacacatacgtattttgaatgttgcatgatataaagtcaagtaagtaatttattagagttgctcccagaactttttctgtatatccaataattagttttcaataatagtgaaggaaagacctaggagtggacatttctcagtctctcatacaccatatgcactgatctgggtgacagaatacctttaaagatacacttaaaaatgcatcttaagagaataagacaagccacagactgggaaaaatatctgcaaaacacatatctaataaagttttgtattcaaaat

SEQ ID NO: 754389 - DNA, 690 bp, Homo sapiens
ataagtattgattagcttattggatccatccagtccttggactttcagtaaccttagttcactaattccctcttttgtgtttaagccaatttgagttgggttctgtcatttgcaaccaaaacaatatagaatttatgccaataatttaagatttgtatgttgctcataagattggaaacctaagccttcctctgaacacaaatatgtgagtaagaataaaaaaagtcaaatacaaagtcttgatgataacagtcaatgggatggatttggaaagtgtctcagactaggagtcagaaaacctgggtgctgatcctaggaggttcacttagccatgtgactttgtaaaatgtgtgaaactaacgctgtaaaatatgaaaaattaaccctgcaacaaaaaagtaatgtacacatacrtattttgaatgttgcatgatataaagtcaagtaagtaatttattagagttgctcccagaactttttctgtatatccaataattagttttcaataatagtgaaggaaagacctaggagtggacatttctcagtctctcatacaccatatgcactgatctgggtgacagaatacctttaaagatacacttaaaaatgcatcttaagagaataagacaagccacagactgggaaaaatatctgcaaaacacatatctaataaagttttgtattcaaaat

SEQ ID NO: 754390 - DNA, 632 bp, Homo sapiens
tttcctctctttctagtcttaagatgtaacctcgaaactgagtgtagaaactctcttttccttagtcttaaaatataccttgaaatgtactttgaaactctgcttccctctctttcccaccagactctcccttgcaccatggacacgtatctaactgtatacttgttaataaattccaggggctgattttacacaacagccaggcaaggagacccagctgcagaattctcccctacttggagattacctcatgacagacatctataamctgactgcaactgagatggcaccagccagcactccaagtggacaacaactcaaaataacccttggaagaagacatgcaggcctgtatcttgtgttactctggcatggttctcatactaagtatcccctttttattttttatttatttttaacatattttttgaaacagagtctctctctgttgctcaggctggagtgcagtggtgtgaacatggctcactgcagcctcaactcccaggctcaagcagtcctcccaactcttagcctccagagtagctgggactacaggtgtgcaccaccacatctggctaattttttttgtatcttttgtagagatgggttttcactatgttgcccaggctagt

SEQ ID NO: 754391 - DNA, 632 bp, Homo sapiens
tttcctctctttctagtcttaagatgtaacctcgaaactgagtgtagaaactctcttttccttagtcttaaaatataccttgaaatgtactttgaaactctgcttccctctctttcccaccagactctcccttgcaccatggacacgtatctaactgtatacttgttaataaattccaggggctgattttacacaacagccaggcaaggagacccagctgcagaattctcccctacttggagattacctcatgacagacatctataaactgactgcaactgagatggcaccagccagcactccaagtggacaacaactcaaaataacccttggaagaagacatgcaggcctgtatcttgtgttactctggcatggttctcatactaagtatcccctttttattttttatttatttttaacatattttttgaaacagagtctctctctgttgctcaggctggagtgcagtggtgtgaacrtggctcactgcagcctcaactcccaggctcaagcagtcctcccaactcttagcctccagagtagctgggactacaggtgtgcaccaccacatctggctaattttttttgtatcttttgtagagatgggttttcactatgttgcccaggctagt

SEQ ID NO: 754392 - DNA, 598 bp, Homo sapiens
atctaggaggaaacttatccctttgtgtttagaacaaggcaaaagaaatttctgattggatattgttatgggcccatgacttctgttgcagagaaggtaatagaaaaaggtaaaatacttctacgctctataattcaccttgctggaaaaaaaacaactggattggcttgacaggggcttagacgggtgaccaggttactgtttggttggttgagagacggaagcagtacagaatgacaaaagtgtgtggtgggccaccggccactggttcatcatagcaggacctcaaaccaatgtctagtccatgaatgtttatatatgggttggtatatgaaggtggatatttgcaaacaaatgcttagttttagtgtcaggattttcttcctaattaatgaaaagagactgtatgttttcaagttctgtaggcctaactagaaagraaagagttcaggatttcagattgtgctactttcacaagatgtaggtatatctttaccaaaacacacatggctatgcacatgttcaagtatcttgttataagaagggtgtggtgtaagtggaaaaattgcttctgttattcttgtgaggcagtgtaact

SEQ ID NO: 754393 - DNA, 533 bp, Homo sapiens
cttatgatcacctactatgtgactgtaaagcactgtactttattacattagctctaattcttacaatcatccttgaaggtagttagtactcccattgttatgaatgaccactcttcagaagcaggagggaccctcatccaaatttgatttggatgtcaaaactgatgatgccacacatccacctcacataggtatgaaaactattattcrcataatgaggctttctggggatagcagtgtggtttccaagcagataaaaaaaaatggcttgagagagagcacagaaaggagactggcttagggtttgttttgttggtggttgaggtggggccagggtgagggttcccacacatggtttgaagttgccatgcagcttcctagtagcaaaggagggaatatcctggttttcttatcagttctcctggatatgggcagatgaggaagagggaggggtaaggcttaaaagctggcagtagtcaaaagtcaaaaaatggagtcagattccttattatacccattttaccaatgaagaa

SEQ ID NO: 754394 - DNA, 533 bp, Homo sapiens
cttatgatcacctactatgtgactgtaaagcactgtactttattacattagctctaattcttacaatcatccttgaaggtagttagtactcccattgttatgaatgaccactcttcagaagcaggagggaccctcatccaaatttgatttggatgtcaaaactgatgatgccacacatccacctcacataggtatgaaaactattattcacataatgaggctttctggggatagcagkgtggtttccaagcagataaaaaaaaatggcttgagagagagcacagaaaggagactggcttagggtttgttttgttggtggttgaggtggggccagggtgagggttcccacacatggtttgaagttgccatgcagcttcctagtagcaaaggagggaatatcctggttttcttatcagttctcctggatatgggcagatgaggaagagggaggggtaaggcttaaaagctggcagtagtcaaaagtcaaaaaatggagtcagattccttattatacccattttaccaatgaagaa

SEQ ID NO: 754395 - DNA, 511 bp, Homo sapiens
gatccataaccaggaaaaaaataatcagataacagaaatagacccagaagtgacagaggtgatgaaattagcagacaaaggtatcaaaaatgctattataagtatgcacaaagatttaaatcaaaatacgaaaatacaaaaatagtgaaaagtgaaatggaatgttgtttgggctgaatcatgtcccttgagtatttgtatgctgaagtcctaacctcctgtacctcaggatgtaactgtattcrgagacagagtcttcaaagaggtagttaaggttaaatgaggtatttggggtgggctcgaatgcaatataactggtgtcctcataagaagaggcaattagaacccaggtacatagagtgaagaccctctgaagacacagggagaaggcggccatctacaagccaaggagaggggcctcagaagaaatcaaccatgctgacgtcttgatcttgaacttgtagcctccagaaatgtgaggaaataaattgctgttgtttagccgcccagt

SEQ ID NO: 754396 - DNA, 625 bp, Homo sapiens
ggttgtttttctttaccatcacagtcagttccaccctctggaacaatgaacccctaagctttggctaggtgtgcctggcagttttctttgaagatattatgttgcattgtaatgaggtcttaactggattgatctaagtcactctcagatcatcctgggcatcttttaaaaaaaaatagatttccttttttaagaacaggagcataaaacaaccaccaccacaacaaacatattaagtaggtctcattttgaaggtttcagtgactagtttaatttttccaaaatcatctacttatctttttacttcaaagcaacaaggtaggacagtcatccaacttagacttatttgaattaaaccaagagcttgtttctctcagcagcttagtatagatttaaaatgacatgaagtgaacatacatgttggagaaattacaytggagtatatgatatgttcaagagacttctaggtttataacagacagtatagccaggcttgaaatattctctgtgttgcactctccactctctaatcatgtgggcagcatctggggtgagaaattaacctaggtgtctccactgaacacatcttcatatttgcattaatcaaaaatattaattcattcct

SEQ ID NO: 754397 - DNA, 629 bp, Homo sapiens
caatttactttttgtagacaagtgcacaaatatgattagcttttgcaaattgctccttattctgttactggtaagtaatttttatattattacaccgtaaacagatgctattttccactacatattcagctgtaattagctaatttaatgtgttaaaacaacaaaagaacttcaagaatgattcaatgattcaagctgcatggaaactaagagaaatcaagcatgaagtttgtaaaaktattccaaaatttagtttttgataaggaattgtagagtgcctgttccttaaagttgtttatctgtagttgtgttttcacctttgcagggctggtcctgcacacaaacttccaagcagaagggctacacaggtgcctctgctcattgctcttccatttcctaaaacttgagctattagttcaagtatcactcctctgcattgaagactagttttgtttatatatttgttcatttcaatattgatacatgcggcaatgtttctgcctgtgacatagcaatatatctatatatacattattgcaaaagtggtgcaagaagaggagatgtagaacatgcagccatggagataggataaaaactcaaaaaaatctagtgtcatggaagcaagagtg

SEQ ID NO: 754398 - DNA, 617 bp, Homo sapiens
aacttaaagtattaaaaaaaacaaaaaagaatagatggcaaatagacgttctcctgcgtgccaatacattggtaatgtcatcttggggcactatttggggatctcttcagcacttcagaaaaagtgctgtgaccaatttttgaaatccaattatatagtattagaggaggaacagcaacttcaatgcaacgaatgcatttgccactccatctctggaaaagcatcaatggaaaaacattaatcaatcaatccatattkattgatagtcttctatcacttgtatgaaatattgcccacaactggggttggcactatggaaatataaagaggattattagacattgtccttgcaatataactaagtacagtatgtccatgacatagattgcagtacagactcaagaagaaatgaaatcctcacttttatttttgaacgaggttttgatgtatgaaaatgttcgtttcctgcaggacaattagatggagagctagagagaactcttgcataatctctcaaatgtcctggtgaccagacacgatcagggatttggggagggaggtcaacagactgaaagtatcaaccaagcaggtcctgagtaaagtgcaggccaaacaaa

SEQ ID NO: 754399 - DNA, 554 bp, Homo sapiens
atggtcacatatcaaagcactgatgtaaggatcttcatagaagcactatcacagtgattgcaaacaggaaacaatcaaaatacatgtcaataatagaatggataaattaattgtcatattaatataacaaagtatagaacaaaaatgaaaataagcaaactactcttatgtgcaacatgaatgaatcttgtaaacatactgttgaggtaaattctaatactaaacagtatataaagtcctagccagagcagttaggcaagagaaagaaataatatgcrtccaaataggaaagacaggagatcaaactatctctcttcacagactatatgattctgtacctagaaaaccccatagtctctgcccaaaggcagaactgataaacaacttaagtaacgtttcagaatacagaatcactgtacaaaaattagtagcatttctatacaacaataatgtctaagctgagagccaaatcaagaatgtaatcccattcacaatagccacaaacagaataaaatacctaggaatatagccaataagggaagtgaaagatctct

SEQ ID NO: 754400 - DNA, 592 bp, Homo sapiens
tcttcacagaattataaaaaattattttaaaattcatatggaaccaaaaaatagcccaaataactgaagcaatcctaagcaaaaagataaaaactggaggcatcacactacccaatttcaaactatattacaaggctacagtaactaaaacagcatggtactggtacagaaacaggcacatagaccaatggaacaggttggagaacccagaaataaagcgccacacctacatagccgtctgatctttgaaaaagtttccaataacaagcaacagggaaagaattctctattcaataratcatgctaggacaactgactagccatatgcagaagattgaaactggatcccttccttttaccacataccaaactcaactcaagatagattaaagacttaaacatgaaacctaaactataaaaaccctatatgaaaacctaggagatacaactccagacatagaccttggcaaagatttcatgtcaaagactccaaaagcaattgcaacaaaaagaaaaagtaacaagtgggacctaattaaacaaaagagcttctgcacagcaaaagaaactatcagcagattaaatagcctac

SEQ ID NO: 754401 - DNA, 616 bp, Homo sapiens
tttctccaaagaagacatagatgtggcccataacatatgagaaaatgctcaacatcactaatcattagagaaatgcaaatcaaaaccacaatgaaataccatctcacaccagtcagaatggctattattagtaagtcaaaaaatgacagatgttggtgaggttacagagaaaagacaacatttatacactgctgatgggaatgcaaattagttcagccactgcagagagcagtttgatgagttctcaaagaactgaggactaccattcaacccagcaatcccattactgggtatatacccaaaggaatataaattgttctatcctaaagatacatgcatgtgtatgttcattgcagcactttcacaatggtaaagacatggaatcaagctagatgtttataaatggtggactagataaagaaaatgtggtacatatattccakggaatactacgcagccatgaaaaaaatcacgtcctttgtagcaacatttatacagctgaaggccattatcctaagtgaattaacacaggagcagaaaactaaacactacattctcacttataagtgggagctaaatgttgagtatacatggacaaaagaggacacaagaggag

SEQ ID NO: 754402 - DNA, 585 bp, Homo sapiens
ctggaataaaagctacttttttcagggaagctcacatattatcttatcaaaacaatttatagtttaaatgaatcttggagattagctattccagggatcagcgaactgcagctctgtttttgtacggaacatgagctaagaatgattttatattttaaagggctgtaaaaaaagaaagaggagaaggaggaggagcatatactgcaaaaaccatatatcatcttcaaaacttaaaatatttgctatcttyccctttagagaaaaaaaaattgcttaactctatggtccatcaccctctcattgtacaggtgattaaactgaggccagaaagacatgtccaaaatcatccagctggttgggagtagaactaagacaagaagctaatttttttttggctcacatggtactgttctttccaccagttaatgtacttaatctgtaccatcaacacagagccctcactagacctgggtacccatcttcatattgcccacaggcaactcctcatttttccgtttctacttgccacaccaagcctactcttaatccttcacacctgtcttagcacccacccttctgtgcagt

SEQ ID NO: 754403 - DNA, 597 bp, Homo sapiens
catgcccatcatatgactgtgaagttttcctctttgtctctgacattcagctgaaagcccctgaagggacttgaccatatcttattcctctttgttttcctagggatgttgtagttgggcacatagtagagctcacaaaatgttgctgaacatagtgcaccattgacacaacataattccagatttctaactttgatttctgaaaggtaaacattgctacaatgtattaaccacacagaagactcaaacaaacccaacccccttccaaacaaagcaggtttgtttgttttttgttagggcacccacttctacaaacaaatttctggccccaggataacacaaagagccagagtaggatttcaagcagaactgtgttttcagttgatgtgtcagtcccctgagagtcatgyggaaaaaaaaaaaaagaaaaaattcaaggtccaggttatttccaccactcctgggaaaccaggcctggagagctctctagggaaagaggtatgtctgctctgggcttttgcaaccttattttataattcactttcttatctactgcttcacaaaaccaaagggaaataggtacaaactgtatcgaca

SEQ ID NO: 754404 - DNA, 619 bp, Homo sapiens
ctaattttttcatgaacataaaactccaagtcatttatgtgaactatatctcaatgtagctgtaggaaaaataaaaacctgtgctaacctggactttggtctcatttaagatttggttctggaatgcaaatatggtttttgaaagcccaataaaattaattcttgtmtagtctgtatatattgtttacaaggactacaaacactgcatcacaaatcggaggctttggtaaataactaagtgtccaacatagaaaataactatttggtcaaaagtataaaaggtctgaccttatttgaaatacgaaaaagctgagtacttggaagatacgtgaaaatactcagcatagatattatgaaaagctgaataacaaagtaaccttttttctcaaattatttcaggccacagtatataacggaacttattgctatttgaagtttcattaaaaataggttcatatatagaagaaattgtgtcagtaatacctcttcactaatataaaatatgccccttttagaagacgtgttctctagatctcatttctaaaactctgtatttttctcatttctaaaacttaagtatccaatcaaactgaccttactaaaatcccacaaattataa

SEQ ID NO: 754405 - DNA, 619 bp, Homo sapiens
ctaattttttcatgaacataaaactccaagtcatttatgtgaactatatctcaatgtagctgtaggaaaaataaaaacctgtgctaacctggactttggtctcatttaagatttggttctggaatgcaaatatggtttttgaaagcccaataaaattaattcttgtatagtctgtatatattgtttacaaggactacaaacactgcatcacaaatcggaggctttggyaaataactaagtgtccaacatagaaaataactatttggtcaaaagtataaaaggtctgaccttatttgaaatacgaaaaagctgagtacttggaagatacgtgaaaatactcagcatagatattatgaaaagctgaataacaaagtaaccttttttctcaaattatttcaggccacagtatataacggaacttattgctatttgaagtttcattaaaaataggttcatatatagaagaaattgtgtcagtaatacctcttcactaatataaaatatgccccttttagaagacgtgttctctagatctcatttctaaaactctgtatttttctcatttctaaaacttaagtatccaatcaaactgaccttactaaaatcccacaaattataa

SEQ ID NO: 754406 - DNA, 636 bp, Homo sapiens
aaattgttttgacaaacatccgcccaagggaggtttttttgtacttggtgagctcagaggttaaatacagtcagccttgcaagtggggtcttccggggaacttcaggagaataacagttctttgggaatgaatctctgaaagaactgtaactccattctctttttttctggtgactgccaggctttacctaggatcccaacaagctattatttttatttatttatttatttatttatttatttatttatttatttattttgagatgaagtctcgctctgtcaccaggctggagtgcaggggcrctatcttggctcactgcaacctctgcctgccgggttcaagtggttctcctgcctcagcctcccgagtagctaggactacaggcgcgtgccaccacacccagctaatttttgtatttttagtagagacgggggtctcaccatgttggctaggatggtcttgatctcttgacctcgtgatcttcccacctcggcctcccaaagtgctgggggcgtgagctactgtgcctggccgtgagctatttttaaaggctacaggattgctggggatgggactgaagtactgatattcagctgtttattctttttattcttgaataaatgttacccagattt

SEQ ID NO: 754407 - DNA, 524 bp, Homo sapiens
ttctcaggttacagtccttctcctcttctttgcaataactagcctgttcctgaaagaaacaaagacctatgttttctcaactctggctgttatgagcagatgtacttaacaaaacttgcaggcagtgtcaggtagcctgcttgtgtcagtacatcttgtctctacctggtatcaagtttacaactggaagttgcatttcactcctgtgttcatttctctattgatttcggatttccccttcctgccttcacacacacaaggattaaaactttcttttcwcaaatttttatagcataatacaatatagccaagttacttgtgtcaattttctcatcaccaaaggtaagtaatattggtatcatttattaagttttttatgatttgtcatctacacaatattacatataaccatatttaatcccttaggactaaattatactttgtacttggtatttatatgtaatgattagatattatagctttatattttgtggcttaagtgctatagaaatctgtgaaaggta

SEQ ID NO: 754408 - DNA, 371 bp, Homo sapiens
ttttcaaactcacacagctctttcctagtaaactaactataagcatttatatcctatttatcaatagtcaacaataagctgaaataaatcctttgtttttgctgggtgtgcagccatttcttattttgctgataacagractctcattttctctcaagaatccccatttctcatcttcggtttacatagttattttaaacctgatgtgaaccctagttccagagttgggtataaaacccagtcttcgttaatcagttcccaaaccctgactgactttagtgaatggcttattaatatacatgacttgaggcagcccattcagggatgactatcctcaattcaagtacctttgaaattaaagaagataaaca

SEQ ID NO: 754409 - DNA, 534 bp, Homo sapiens
catcatttacacataatgtaatattgatatattagggcttaactctgctacttcatttttcatttttaacttacttttttgtttctctgctttcttttttctgctttttctcagagttctttgaatatcttgggaacatgtacaatatccatacaataagaaacaaatttgatatagtcactcacagaggtaccgtatctggtcttcatcattactttgtgtagatccatatttccatcttatatcattgtatttctgcctgaagaacawtccttaaaacttatttttttttttttttgctgtgtgggtctgatggtgacaaattccttcgtctttttcatgtttgaaaaagtatttatgtcctatttttaatgaaagaaatttttctgggtataacagattttgtttcatgtttttgtcatctcaagactttacagatattctactctcttctcacttgctatcatgctcattttattcctctattcatgtgtccttttttcaagctacttagaaggttttattttcatctgt

SEQ ID NO: 754410 - DNA, 613 bp, Homo sapiens
cctctacccactctgtcaccaaccctcaattcttcactgaaaatagactgaaacccagatgtcattggaatctgttggctattctaaagtaagcactcctgctctgcagctttgaaaagcagctgtcaaatgcccttggcctatatacatgtatgtatagtgtatacaagaagccatagggcatatatatttagagcagcatgacattgaatgtgctgaatatctcctttcttgctttggycatgtctaacgtgagacatcacagtatttatgaaatttcagtcagctttatgagaagcactctccgttgtcacgtgtagaaagactgagatggtcctaaaagcaaattcactctgagtataaaaatctctcagtgccatcttgtttaacacatgtaatgactcctgctagagacctcaaaaaggaaggttcatagatcaatttaatttacctaattaatcaaaagtaaaacttctataatgtacccagagttccattactggactactattatttagattttttgcaagtttataattccatgtaaatattcacagttagttgtttttattctataccttaaaatataaatttcatatttatgtcatcaaat

SEQ ID NO: 754411 - DNA, 607 bp, Homo sapiens
agcatggtcgtagcaggaataggcatggctcttattctagcagctccttggggagggttcacttaccatgaggttactttgcataatttaatgcaacagatagggcatatggtggaccaggcaaggccgaccctggaggatctaaaaatctccctaaattctcttggtaacgtggtgttggacaacgaattggcactacattatttattagctgaacagggtggcatttatgcagtcaccagcagatcctactacacttggataaatactacagagcaagtagatgttaacatccaagcaatttataatcaggcaaaatggttacgctttttttgcaaaggggactcaacagctgcctcaaygtgaaatgctctcagttcagccttacaccccatatcttggtcccttcctctcttagggcatctagtaactatctttcttcttttaattttaggaccatgcttatttaacctaatgataaaatttgtgtcttccagactacgacaattgcatgtcaagttaattgtcatgcaagccttcgatcttgttccagagaccaccaacccagaacagtattggtccttccactaagccatgatagatttct

SEQ ID NO: 754412 - DNA, 610 bp, Homo sapiens
tataatgatctagtttcattttttcttttgcatgtagatacccagtttcccccaaaccacttgtttaagagactgtctttttttccattgtatgtttttggcacgcttgtcaaagatcagttgaccaaatatgcatggatttatttctgagctctgttctgtcccgttggtctatatgtctgtctttatgccaatatcayaccattttaattactgtagctttgtgatatattttgaaatcagaaagtatgatatctccagctttgttgttcttaagattgttttggctattcatagtctcttgtggtcccatatgaattttagaatttttttttctatttctgtaaaagatgtcattgggattttgatggagattacattaaatttgtagattgctttgggtggtatgaacattttaacaatattaagttttccaatccataaaaatggaatgtctttgtatcttgtttaatttctttcattagtattttgttgtcagtacaaatctttacctccttagctttttcatatttttattcttcttggtactattataaaggggattgctttcttgatttccttttcatagttcattgttagtgtatacaaa

SEQ ID NO: 754413 - DNA, 625 bp, Homo sapiens
gtcagtctccttttctgagagtccatctatgctgatttctcttcctgatcaaagttcctaccaacctgtcacaaagggcaccctattacatcaggtggtgtctcacctatgtgaaactagaaagggtgctaaacataccaaggcagtattttaagccaactgtaacctcttgaaacacacatgaggcaaatctagaaccagagacttaaaaagtgagtcagagtctatactgggaactttatatgcaaacaaatttcatgtacatgggcatacaattcagatgtacttacattcattatattattccaatcacagaaccgaaggagaccatgtactctttcaaacacacaaatcccacccttcttatctgcatgccttagcttatttcctatctacagcctgaaatgccctttctctgaatctgtaaatayacaaatacaattattatgggttgaattatatgcaccaaaaaatgctcaagtcctaacccccaggacctgtcactatgaccttatttggaaattgagtctttgcaaatgctcacatttagatgaagtcattagggtgggccctaacacaatatgactggtgtcctcacgaaaaagggaaatttagagataaagac

SEQ ID NO: 754414 - DNA, 604 bp, Homo sapiens
tcacctgcttccttctttccgctggcttggtctgggatttggggcaaggagcatcagtaagtaaacagtaggctggcatggtcggatcttatcttattatcttattctccttattccctccttccccgtccacaccttggcgtgcctcctcttgagaaggcagaagggctgtgtttctgttcctgtgtctgtgacagctccctctgtgcctctccttttgtcgsgggctatttcttctctcgggggtgactgcgtttgcgtgtgtggggaagggggtcctgtggtctgttctctggggagaggtctgtttacctgttcctttcggggagtttgtacatctgtctcctggtggggaggagggtctgtgtatctggaggagatgtctgcaagtctgtcttctggggcttggggtggggggaggaagggctttcctccctcggacagtcgtcctccgttcagccgggctccgcctgcctgctccagccccgagcaggctccggcgccctggagacgagcgcccctggcggcggctacgcgctctgcggctctcccggctgtgtccgtgggctttagctacacagctcccgcagatgttgaacccttc

SEQ ID NO: 754415 - DNA, 551 bp, Homo sapiens
ttcccgcctccctccggagaagacaaggaaccctcagcttctgccctaaagacttagccctcttgtgtcagatgccccctcccatagagctgaccccacatcatctttcctttttgcctcccacaccgggacgtgaggcgttggagcacagcttacaggactatgactgaccatccccagtgcagatggcctggacgctggtgccattgggtagaggtggccagcttacctggaccaagaaccctgmccctctgaactgttcccaccccttctttccagggacttctctgcaataaaaagttgtggagtggtctgagctgccaggagtttaaacccggattctccaggccattcccagagcacagacaaacctggctgcggtggaggggtcagggcgagaacagtaccaggaagcaacctcctcccctcctgctgtgagggtctatgtgacttaagtatatgatgattcgatattatagaaccagagtctttaggatggggagcccggagtccatggggaaagcgagagaaagggttcattcatgcagaag

SEQ ID NO: 754416 - DNA, 602 bp, Homo sapiens
cacccactgtgttttctgaagggtgtctccacagcttggggcgggggaaatcctggtgaggacgggagagaagattcaacctagggccaggggctgggtttcagttgccctcctcctcctcctcctccaactccagcctcccgcttcctatccctctcgcatagggaggcgggcagagaaacacgcctacagcagcccatttcaggagactgagtgctgggtcactgcagctgtgtcctcagctcagggtgtctcccctcaccacaggctcattgccgcccagatccagggaacccccacggacacccgctccccccagtccttaccccaactgtcgacccctgcccaagtccacacggaccccttcactggcctcagcggtccccctcctgccgcacactgcttcaaagccatcctcaggaagccccagctggagagggcagtgctgctgactgaggtggccygggtgagaggcgcagtgctttgaggactcacgtggctttccaaatcccatggccacccatgtggaggagatattttcagtttacagttgaagcatgctgaggctctgagagcttaaacgacttgtctcagtgtgagca

SEQ ID NO: 754417 - DNA, 591 bp, Homo sapiens
ggcctgatggcttcttgctgcatcatgacatggcagaaggcatcacatgggatacagtgcatgacagagaacaagagaaggccaaactcattttttttttgagacggagtctcgctttgtcgcccaggctggagtgcagtggtgcaatctcggctcactgcaagctccacctcccaggttcacgccattctcctgcctcagcctcccaagtagctgggactacaggcgcccaccaccacgcccggctaatttttttgtatttttagtaragatggggtttcactgtgttagcaggatggtctcgatctcctgacctcatgatccacccacctcggcctccaaaagtgctgggattacaggtgtgagccatcgtgcccggcccaaactcatttttataacaaacccattcctgcagtaacataaattcattcatgacagtagagcccccatgacctaatcacctcttaaacatcctgcctctcaacatgctgcattgggaattaagctctaatacatgaatttgtgggacacactcaaaccatagcattctacccctggcctctaaaattcatgtccttctcctatgcaaaa

SEQ ID NO: 754418 - DNA, 507 bp, Homo sapiens
tagatatctctaggtatcactttcccctggcgaaaaatgagttttttgtaaatgatctctaagatcatttcagatatagtattttatgacactagctgcaagctatgcatcctgctagaagatacctgaccttattgacctaaattccaggaacttctttatgcttattgccgcaggggaaagaaaggactcttttttccattgtttctcaggccccaaaatatgtgctcaatatatatckagtgaatggatggatatttagttccaaaaccaacatacaaatacaacaaatctccatcagcattatcatgtggttttttaagggcacaattctaaatctggctctgagacaaagtcaacatgctccatagctgccttcatttaaagttatttagttagagggagtgggaaaaggctcagttccacattgagacatagaaatgtacacctttagtcatttttaatattctattgacatttcacagctaaggatatctgagatccttg

SEQ ID NO: 754419 - DNA, 507 bp, Homo sapiens
tagatatctctaggtatcactttcccctggcgaaaaatgagttttttgtaaatgatctctaagatcatttcagatatagtattttatgacactagctgcaagctatgcatcctgctagaagatacctgaccttattgacctaaattccaggaacttctttatgcttattgccgcaggggaaagaaaggactcttttttccattgtttctcaggccccaaaatatgtgctcaatatatatcgagygaatggatggatatttagttccaaaaccaacatacaaatacaacaaatctccatcagcattatcatgtggttttttaagggcacaattctaaatctggctctgagacaaagtcaacatgctccatagctgccttcatttaaagttatttagttagagggagtgggaaaaggctcagttccacattgagacatagaaatgtacacctttagtcatttttaatattctattgacatttcacagctaaggatatctgagatccttg

SEQ ID NO: 754420 - DNA, 614 bp, Homo sapiens
ctggctctgagacaaagtcaacatgctccatagctgccttcatttaaagttatttagttagagggagtgggaaaaggctcagttccacattgagacatagaaatgtacacctttagtcatttttaatattctattgacatttcacagctaaggatatctgagatccttggaagtggagtgatttttccagcatcccactggcagagagtggcagagctggaactaggtcccaggtcttctgaccccaagtctaatgcattttaaccccctatgttgcttccaataagtcaataatctttgctcaccaagaccagcatcctgaaaatccatatcactgatcacacaagaatgatttactgcaaagctgttacttgagataatggcagatacataccctgctccttaacaccattacaatgatgatgttgagatgagggcatgacttacagtccatagaacayctttgttcgatactattgaaatttccactgagaatcaggaatttcctgcctgtccttgcctcattcaagaggatcactaaacgattgtgttgtaccaatcagtgtatctatgtgttttctctccagactgtcaggttcctcagggcagtgacc

SEQ ID NO: 754421 - DNA, 645 bp, Homo sapiens
ttattaaagacagacatgaatttttccagcagtgtctccagagtttgtactctttagttttctcttgttggccacattttgtaaaatccacattcttccttgcctctcctctatgcaggagggagggaatctttctccaggggccagaacagtgtcttggatatcaacccaaggactagtatgttataaatgcgttctcttctcacactcacatgtgatggtgctgtgtcctcagcaaagcaagaccacagaggcccttggtagggggtcctgggatgctatmgtaggagcctgcatccctgtactaattctgatatatattctgactataggtggctttcctttgttttttgtccaagaaagcccctaactttttcaggattccttgttatttctcaccaaagccaacacaaactttataggagggagaatcctcaagcagagtagaagaaattggggactctcagaggtgtataacaggtggcacaggcagaaagaatggcttagaatgtctttcttccctacagtctcaggaagggacacattctgtgcaacggtgaatccaggatttctacatattaacttgaaccacgtgaaattgaggacagtcaactgtgcttgacatataaaaagggttatttaata

SEQ ID NO: 754422 - DNA, 645 bp, Homo sapiens
ttattaaagacagacatgaatttttccagcagtgtctccagagtttgtactctttagttttctcttgttggccacattttgtaaaatccacattcttccttgcctctcctctatgcaggagggagggaatctttctccaggggccagaacagtgtcttggatatcaacccaaggactagtatgttataaatgcgttctcttctcacactcacatgtgatggtgctgtgtcctcagcaaagcaagaccacagaggcccttggtagggggtcctgggatgctatcgtaggagcctgcatccctgtactaattctgatatatattctgactawaggtggctttcctttgttttttgtccaagaaagcccctaactttttcaggattccttgttatttctcaccaaagccaacacaaactttataggagggagaatcctcaagcagagtagaagaaattggggactctcagaggtgtataacaggtggcacaggcagaaagaatggcttagaatgtctttcttccctacagtctcaggaagggacacattctgtgcaacggtgaatccaggatttctacatattaacttgaaccacgtgaaattgaggacagtcaactgtgcttgacatataaaaagggttatttaata

SEQ ID NO: 754423 - DNA, 645 bp, Homo sapiens
ttattaaagacagacatgaatttttccagcagtgtctccagagtttgtactctttagttttctcttgttggccacattttgtaaaatccacattcttccttgcctctcctctatgcaggagggagggaatctttctccaggggccagaacagtgtcttggatatcaacccaaggactagtatgttataaatgcgttctcttctcacactcacatgtgatggtgctgtgtcctcagcaaagcaagaccacagaggcccttggtagggggtcctgggatgctatcgtaggagcctgcatccctgtactaattctgatatatattctgactataggtggctttcctttgttttttgtccaagaaagcccctaactttttcrggattccttgttatttctcaccaaagccaacacaaactttataggagggagaatcctcaagcagagtagaagaaattggggactctcagaggtgtataacaggtggcacaggcagaaagaatggcttagaatgtctttcttccctacagtctcaggaagggacacattctgtgcaacggtgaatccaggatttctacatattaacttgaaccacgtgaaattgaggacagtcaactgtgcttgacatataaaaagggttatttaata

SEQ ID NO: 754424 - DNA, 520 bp, Homo sapiens
cattcattcatttacttattctttctttctctgctgtgttttaatggatagaaggtcaaaccccaggggatattggccttacttctacttcaggataaatactgactttcaacaagtggaattttggactgtgggcagaaaaggagtaaggcattttgtcttggattaattgtctaatattccttagagatgggttcttaccttggggcctatggactctgtatgccaatatgtttcattttaggaagaaagtctgtagctttatttasattatcaaaggagtccaagaccctaaagatattaagaacattaccttagagaaaagtatgtgtgtgtgaaagtatattcaaaacactctttttttattctcagaaaattttcttccatttttgatcatttctcatcacatactatttgcaataaattgtttttcttttgtgcatttccatttatgactcaaaaaatctttgctgatatttaaagccattctttattttttcaatgaaaccatgttagtaaa

SEQ ID NO: 754425 - DNA, 558 bp, Homo sapiens
cttccaaggttaggttagaaaaggccatgccacttctacctagtctgcctggaatgcttgctctgagaatctagactccatgttatgaggaagtccaggttacatggagatgcccttgtgagcccccagctcccagcccatgtccagcaacagttgccagacatatgaatgaggaaacctttgagatgcctccagtcccagccaccagccgacagcaacctcatgagagaatacaagcaagaacgacctagatgcattgaatctccaccaccatgaagataggagtcacaaaacattgtgactgttgttctaagctgcaatgttttggggtgattttccatacagtaacagataactagaacacagaaacaagaggaagcctatgtaacagcacagagatgctaarcaacagctagaccttggatgttgcaggttcactgagattgaggaaggcaatagaaggaaggaatggccaagcagcaggatcaggggcaggatgtggctgatcactgaggccatacccaagggtgaggatcctaccctatgggcaatacggaa

SEQ ID NO: 754426 - DNA, 630 bp, Homo sapiens
cagtctctacaaccacttctctggcctagcactatcgtctctcacatggcccgctgggataaagtcctgactggtccccctgcttccgtccttctcgtccaagcccaacacacacacatcccttcctgactcagcatccggagtgaaattctcttaaaagataaaccagagtgtgccacttaccagcatcaagcggcttcccgtgcatatgggatcaaatccaagctcctcttcctgacctatgtgatgtagcccctatttttctctcccagctcaactcctgctattgttgccttcatccagacacgctggcctttctgtgcctcccattcacttacttycttcccaactttgggcctttgtacaggctggtccttctgatcttcacagagctggtttcctcatcattcggatcacaaagaagggtcacctcctcagacaccttctttgaccttccactcaatttcacgtcactaccactgtaattttccgcataccacttatcaaagtctgtgatttaccctccttttttggcttatttgattcttgtttgtctactaccactagaacagaaactctgtgtctatcttgtctgctactgtatccctggggcctagaattttgcctgac

SEQ ID NO: 754427 - DNA, 602 bp, Homo sapiens
actcccttccatctggtaagtcacaccgtgaagttcttaccactttgtaatgttacatttcatagggctgccagatttataaaatataggatgctcaattaaatttgaatttcaagtagacacaatgtttttagtataagtatgtcccatgcaatatttggaacatatttatataaaaagtattcattgctcatctaaagttcaatgttttagaaaaatgatttagtgtaataatagtataaaaagttttcagtattcaaatagtataatagtaaaataattcagcgtatagtgtataatatttataatgtaacataagactattatatagtttataatacagtgtaatatatagtatacagtattatagtgtaatagtgtaataattttgtataataatttttggtataaatctgttycatgcaatatttgggacatgcttacacaaaatttttttggtgtttatctgaaatttaagtttaaatgggagcactgtgttttatctgtgaaccctgcatattttggcaagtgtatttcaaggttacagaagccaagagaataaagaaatggagcatcactgacactttatctgccttgacccg

SEQ ID NO: 754428 - DNA, 645 bp, Homo sapiens
catttcctctattagtatatataagtaagccagaacaccctagagtcaatctgtaattctcctgctctatcagtcccatatccaaatagtcagatttatcacacaattttctctcaaattagtcaccttctctccgactccaatttcacatgttaaattagatgctagccaacttcttcatctagattaactctaacatttaattctatctaggtagcctcaaagcacaaactctaaccccaagtgggtatataaaagcttcagaaaagtgaagcagtgggtgtagtttgacagtttcccatgtgattctaacataacataccactcctctccyttattttctctgtgctcaggggttaaaatcattcctctaatccctttaagtggttcttatccttgactgcacactgaaatcccctggggagacagaaaaatttcaatgtccaggtctcacacctagattcagaaataattgttttgaaaggcagcctggtgattccaatatacagataaggttgagaacaactcttcttgattcatactatctagagtgagtgaacaacattccagggctatagaaaacaatccattggtgtaagataataatagaaaatttaacaatatgtatttttaatcttagtgctt

SEQ ID NO: 754429 - DNA, 592 bp, Homo sapiens
acagaggctggcgtgcaatggcacgatctcagctcaccacaaccgccacctcctgggttctagcaattctcctgcctcagcctccggagtagctgggattacaggcatgcatcactgtgcctggctaattttgtatttttagtagagacagggtttctccatgttggtcaggctggtctcaaactcctgacctcaggtaatccgccctccttggcctcccaaagtgctgggattataggcgtaagccaccacacccagcccaattcaataggttttaaaagataaataacatttatcaatccaaatctgtgcacttaacatactaataaacattttcagtaccatgttaaattaggttaccaaaatggttcacattctactacacatcagatcaaggaaagcagggtggaggaaygataactattggactttgtactgaagtatatatatgttcatccctcttttgtgaaaagggaagcaaaagtattaaatagttatgttcaagattgcatgtctagtatacaacagagttgtatttaagactaacatgccacataattcatgatttcttgatgttatcaagatactgggg

SEQ ID NO: 754430 - DNA, 538 bp, Homo sapiens
cttccatatatcttttggctatttgtatatcttcttctgaaaaaaatgtttatttgtgtccattgcccactttttagtggaattatttgttatttttgttgttgttgacgagtttgaatttcttatatattctggatattagtcccctattggatgaatagtttgcaaatatgttctcacttaatatgttgtctcttcactctgctatttcttttgttgacaaagatttttagtttaattaagtccctgaatatggcttggatgtgtgacccttcctaatttcatggtgaaatcctcggtgttggagctggggcttggttggaggtgtttgggtcatgggggtggttccctcatgaatggcttggtgctgtccttgtgataatgaatgagtwcttgctctgagttcacatgagatttagttgttatagagtgtgacacgtcccccactctcttgctcctgcttttgccatgtaatatacttgctcccctgttgccttctgccatgatcgtaagcttcctgaggcccttaccagaagca

SEQ ID NO: 754431 - DNA, 624 bp, Homo sapiens
cacattttacaatcaatttgtacggttaatgcaatcatcacagtggccctgaggggatgtacatcctcagcttatgaagataacaggattaagagattaaagtaagacaggcataagaaattataaaagtattaattttgggaactaataaatgtccatgaaatcttcacaatttatgttcctctgccrcagctccagctggtccctccgtttggggtccctgactttctgcaatatcttctcccatctgcacagtgctcctgctccaataaccaaaaagcactagaacaggatctatgccttctcactcagatttgattatcaccttgcttcttcacatttatcataatccaaattaatcccattcatgtatctacacccatccttaaccagtgactagactgccaaggcaaaaggatttggaggtggtctggacacagcatttgccatatttgccaattagcctgaagaattttagtagctgtaggcttattcagctaacatacatggattatactcaccccaatagaataaataagtaaataaaattttatgagtgcatgaactatcaccttactttattattctgaaaattctaattatctaaatcacatctgaatattt

SEQ ID NO: 754432 - DNA, 592 bp, Homo sapiens
caagtgcaggtaacataggtaaatttttgtcatgggtgttttttgtacagattatttcatcacccaggaattaagcctagtacctgttagttgtttttcctgatcctctcctttctctcacccttcaccctctgaaaggccccagtgtgtgttgtccctctctatatgtccaygtgttctcatcacttagctcccacttataagtgaaaacatgcagtatttggttttctgttcctgcattagtttgctaagaataatggcctccagctccatccatgtccctgcaaaggacatgatctcattcttttttatggttgtatagtattccgtggtgtatatgtaccacattttctttctccagtctttatttaggttgattccatgtctttgctattgtgaattgtgctgcagtgaacatacaagtgcatgtatctttataatagaataatttacattcctttgggtatataccctgtaaagagattgcttgattgaatggtatttctgtccttacgtctttgagaaattgccacagtgtctaatttacactcccaccaacagtgaatgtgtttctttttctccacaaccttgc

SEQ ID NO: 754433 - DNA, 513 bp, Homo sapiens
ctgctcaggaagctgaggcaggaggatcagttgagcccaagatttcaaggctgcactgagttgtgactgtgttccagcgggggtgacgggttaagaccccatctttaaagaaaaaaacttttaagtaaatagctgtatagtatttcattatatagatgtatataacctgactgtataggtacaaaccaaaactatttactttgatcatttaattcccttactcagactcttttaagtattggacctcttggatttatcctatgttctttttactgtatgttttggtcattcaatttaatattctgagaaattttgcaggcccaatttaatrtatcttttgaattttttcctgtgccctgaattatgtttgtttcggttgaaatttttccttaagtgtctggtgatccctggatttctgctcataattaaggaaaagaatgctgactcactggacccaggcagggcttctctcccagattgcaggcttgcctcggggatacacgggtttcccaa

SEQ ID NO: 754434 - DNA, 537 bp, Homo sapiens
ttatccagtcttagagtagcacacaagtaaaacgggtcatactctttgcacgaagcaataattatttttatcttaactaatcttaagatcttcaataatttttaaaagtgaaaataagctttactccaaattatcaacacttaaaactgcttacagtgggcattataataatttacacacataactgttaccaattctcttgtctaactgctccccacaagattataaactccctgaggacagaaattatgccttgtctttctacccccacagtccagtgcaatgcctactacacaggaagtgctcaaaaactcttggtgaatatttgataaataagtgcatgagagtataatggtatccctgagtcagaaagttgtgtgctaccctttgyataccatttacaagtatgacattagttaagacacaagttctttagacttcaatttccccatttatgaaatggtcatactaaggtctgtcaccccaaccccagagaatcagatgcaaataaaataattcaatatatttgaaggtata

SEQ ID NO: 754435 - DNA, 644 bp, Homo sapiens
gaagttaaatgtaattttaaaaaatcatggcatactgtgttgttcatttactagaaaacagtgtgcaaaacatcaggtctaacaaaaatatgagaaataactttagagatcatctccctacggtcaggcttgctctgtttcaggagggcagggatgccactgaatcccagcatcctgcacaatgcctaccacagagtagacaaaaaataaatatttgttgaataaaaaatgaacatggaaaaagatgactgccctataactcccaacaatattacctcacctttaccyctacacagagactaataacaagtttctaaaatcaaattccaaattcttaggacaaggttctgaatagtccaactggggctaaccgctcattcttggtctaatcaattgtgcccaaagaaagtccaaatggccctcagaggctcgctgtggaatgactgaagatttcgaaggtggggcaaaactgtcgattgtatgaataatagatttcagatgcatatacaactacttttcaaatgtttggagatgctgctgtgattgataggctattatatttctcattgtgataaatacacataacttaaaattcaccattttagcaattttaagtgtacagttcagtggctttaagtacattc

SEQ ID NO: 754436 - DNA, 644 bp, Homo sapiens
gaagttaaatgtaattttaaaaaatcatggcatactgtgttgttcatttactagaaaacagtgtgcaaaacatcaggtctaacaaaaatatgagaaataactttagagatcatctccctacggtcaggcttgctctgtttcaggagggcagggatgccactgaatcccagcatcctgcacaatgcctaccacagagtagacaaaaaataaatatttgttgaataaaaaatgaacatggaaaaagatgactgccctataactcccaacaatattacctcacctttacctctacacagagactaataacaagtttctaaaatcaaattccaaattcttaggacaaggttctgaatagtccaactggggctaaccgctcattcttggtctaatcaattgtgcccaaagaaagtccaaatggccctcagaggctcgctgtggaatgastgaagatttcgaaggtggggcaaaactgtcgattgtatgaataatagatttcagatgcatatacaactacttttcaaatgtttggagatgctgctgtgattgataggctattatatttctcattgtgataaatacacataacttaaaattcaccattttagcaattttaagtgtacagttcagtggctttaagtacattc

SEQ ID NO: 754437 - DNA, 597 bp, Homo sapiens
attttttttttttttttgagacagagtctgactctgtcgcccaggctggagtgcagtgctgtgatctcagctcactgcatcctctgcctcctgagttcaagtgattctcccacctcagcctccgagtagctgggattacgggcacccgccaccatgcctggctaagtttttgtgtgtttttggtaaagatggggtttcagcatattggccaggctggtctggaactcttgacctcaggtgatccacccacctcagactcccgaagtgttgggattacaggcatgagccactgagccyggcctaaaattttattcagcttttaacatctgcttcctgcttcacctcctccaactttactgcagttgggaattttctctccttttctgaactcctcagtcatggtctgatcacaccttgccttaaattgaagttatttgtgaatatgtctttctccccgacctacctgagagcttttccatgcaaagactttgtctttttcttctttgtatcttccagagcttctaatgttgaggctcagcatgtgcttgagtaaatgagtgaatgaatgggcccccacagaaatactccctcattgca

SEQ ID NO: 754438 - DNA, 569 bp, Homo sapiens
aggagccaattttgtattttcctattttagaaaggtgtgtataccaaatataaccttatatctcaagctgagtctgaggcagcactctgtaatcaaatatattttcatatttctgtagcaaaatatgaatattaacactaagtgggatgaataaggattatacatagtctaatttcagaccaaaccaagctttcctgccaaataagtttgtcagtttttgtctctaaaggggcacaaaaatcttttaggttttcacttctttggtttgagaattttaaataagtgatagtatatgtgtactcatttatttaatcctcacaatcaatctgaaataggcaatataattatrgccatttttaaaatgagagaaatgaagcatagaatgttaagtaacttggccaaggtcatacagccatcacagggtagatccaggattcaaatccagacaacctggcctcagaacctggcatcttatccattgtacaacactggttctccttaaggagcctccagccagggcaatccagggggtcaagcctgacctctggtacttttcatgaatgaagtct

SEQ ID NO: 754439 - DNA, 575 bp, Homo sapiens
attcccatggggtaggcattattattactagattgtagatgaataaactgaggtatatatataataggacatacaggttatatatgtcagcatggggactggtgtatcacagtgttcaaatcaagagtagaggttttggcttcagacagaactggatttgagacctgcctctgacaagtcacttgacttctctgagtctcaattctttcaccatggggcctagtaagtgcttggtacatagtgatgtaagtacaatgggtatgaatttgcaaatatgctcaggtgcagaaaatatccagttatatttttsccctaaaatcaagctaaatctgattgtaacttacattttgatgatgtagcagagaagtagcggagaattcactgcttggaatcattgggatttccttctcctttgccccatttgtagagatatcaagcacattttatttaagaaaatgtgatgagttaatgtcactttttttgaaatgtgctgctgacaacgcacactcacatttgaatgtaccatcaccaaaaaaaatcatatgacttaataactcactactagctcttataag

SEQ ID NO: 754440 - DNA, 624 bp, Homo sapiens
catgtgcagattcgttacatgggtaaattgtgtgttgctgaggttcagtgtacgaatgatcccatcactcaggtactgaacataaaatctaagagatagcttttcaactcttgctcccttacttcccttctaatagtccccagtgtgtcttgttttcagttttctgcccatgtagaattttcattgtacaaatctttcacctcccttgttaaattcattcctagatattgtatccttttgaatgctattataaatggaatttttaaaattttccttttggattgttgattgctagtatataggaacttaacagaatttttgtttgttgatcatgttccctgcaactttgctgaattcatttattagctgtagtagattttttgtagacttttgtagattttctatatatagaattatgtcatctgtaaagaggtagttttgttttttttccccactctgmaatttgtaagccatttatttatttggcctaattgctctagccaggacttccagtacaatgttgaatagcagtggtgaaagtggtcatcctcttgttactcatcttgggggaaagctttcagtctttcaccattgaatgtgatgttagctttttttccttcaaat

SEQ ID NO: 754441 - DNA, 610 bp, Homo sapiens
tcccgggttcaagcgattctcctgcctcagcctcttgtgtagctgggactacaggcatgtgccaccatgcccggctatttttgtattttttgtagaggtgggactttgccatgtttggtcaggctggtcttgaactcctgacctcaagttatccgcctgcctcagcctcccaaagtgctgggattataggcgtgagctaccgcgctyggccattatatctagattttgaaacctcatgtttgtttaccagtagtaacaggtgtacagactatcaggtgtcattatgacagatagcacacttgttgcttctgctgtcaagcatgtatacatttctttctttataaagacaggttcctgagtatgtaatgaaatgggcctgtgaaatctgcaaacgacaaggataaactactagactttttttttttaacttgatttattgatgaagactagtaaaagcttatgggggggtgttaagtctgttcattatctgttctattaatacttaggatactttattttgatatatttgaatgcatagaatagataccatttaatgaataagacgcagtttaattgaacaggttggaaacctaatgtttctgtatttctc

SEQ ID NO: 754442 - DNA, 613 bp, Homo sapiens
attgcttgaaccttggaggcagaggttgctgtgagctgagatcatgccactgcactccagcctggcatggagtgcaggcactctattaaatattttacttggattatcttaagaaatcttataacaaccctgtaagaaagaaaatctgacagagcaagattctgtctcaaagcaaacaaacaaacaaacaaacaaacaaacaaaaaggccgggcaccgtggctcacgcctgtaatcccagcactttgggaggccaaggcgggcagatcacggggtcaggagttcaggaccagcctgaccaacatggtgaaaccctgtctctactaacaatacaaaaaaattaaccaggagtggtggcacacgcctgtaatcccagctactcaggaggctgaggcaggagaatcgcttgaacccaggaggcggaggttgcactgagctgagatcatgccaytgcactccagcctgggcgacagagtgagactttgtctccaaaaaaaaaaaaaaaaaaagactaaagggagggaagacctacagaaacaagaatgtgcacatagggacctggctaccaagcctggtttataaagatagacaccatagtcagaagggaggatcct

SEQ ID NO: 754443 - DNA, 613 bp, Homo sapiens
attgcttgaaccttggaggcagaggttgctgtgagctgagatcatgccactgcactccagcctggcatggagtgcaggcactctattaaatattttacttggattatcttaagaaatcttataacaaccctgtaagaaagaaaatctgacagagcaagattctgtctcaaagcaaacaaacaaacaaacaaacaaacaaacaaaaaggccgggcaccgtggctcacgcctgtaatcccagcactttgggaggccaaggcgggcagatcacggggtcaggagttcaggaccagcctgaccaacatggtgaaaccctgtctctactaacaatacaaaaaaattaaccaggagtggtggcacacgcctgtaatcccagctactcaggaggctgaggcaggagaatcgcttgaacccaggaggcggaggttgcactgagctgagatcatgccactgcactccagcctgggcgacagagtragactttgtctccaaaaaaaaaaaaaaaaaaagactaaagggagggaagacctacagaaacaagaatgtgcacatagggacctggctaccaagcctggtttataaagatagacaccatagtcagaagggaggatcct

SEQ ID NO: 754444 - DNA, 645 bp, Homo sapiens
ctactaatacaaattagactgttgaatctcaggggagttactggagtgtcctaacttccagttcttctgagaatcattatcacccttatgtcaaggtcaaatcatgccctctcacacactccacatcgtttcatttgatactggagagccatcctgtacttcttcacttgttggcattttgcctcatagacaagctgaagagctcttacataaatataagtaacctatttgtatttaattagatgcttacgattcagggtgttcttattctcccttttgaatctgtggattgcaggataaaaacttgctggaaattattaatttgtggccaggcgcagtggttcacacctgtaatcccagcactttgggaggccaagacgggcggatcacctgaggtcaggagttcgaaaccaggctggccaacatggtgaaaccccatctctactgaaatacaaaaattagccaagcatggtggtgtgtgcctgtagtcccagctactygggaggctgagtcaggagaattgcttgagcccgggaggcagaggttgcagtgagctgagatcatgccactgcactccagcctgggtgacagagcgagcctctgtctcaaaaaaaaaaaaaaaaaaaaatatatatatatatatat

SEQ ID NO: 754445 - DNA, 483 bp, Homo sapiens
cattaggaagatttctttggcatctgggttttaaggttgggattgaaggtagagaaaagctctcagaatagacgtgggaagcatggaggtgaaggtagaaactaagaataagtaagattggaataagcagaagaccatttctggttctgaatctgtgtgtgataatgtctgaatgagttagtccagatggaagagcacagatggagggtgtgacgttctagctttagagaattaagctatatattccttgagaccaaaggaagtgtgaaagatgtaaacwcctgtctcttaggtttaaggagttatagtaccagtccatagaaaagaaagtcctagctgttttagaactgcatggttgctccacaaggtaaaatgcctttgagacgcttatttttttttagctattttcaaggaagtatttaatcctcctgactttgagaatagtgaatatgtcttgtgttcataaatttaagcaaggatgaa

SEQ ID NO: 754446 - DNA, 558 bp, Homo sapiens
gggggcttttgaggacaatttttaaagttaaatttcttatttggaaaattgttctgaatttgatatttaggagtggcactccaatcttagtgaatttgctcatctcttccagtaatcagccctgcatgcttacgaaaataaattttaaggkgactaaatgccttctacctcttccttactgaagatttttttcccccgtacaatatttttttgggggggaagggcagattgtggtaccaaagattgcagatctaaattccccatttttgattaaaaatataaaagagccaaatgtcaccattgctatccctgtttcaggcagtgacacaaaatagtggcattaaaaacctgagtaatttccagaattcaaatgttcttgagcatgtgattcttatttggaaaactgagaagctacagtgcttggtggaagaaggatggcatttggctaccctgttctttctctaatgcctcggtgttgcctgtctgcgccggccattgttgcaatgtaagcaatactgtttgatgcactgccaccctctattgtctgtttagtgttta

SEQ ID NO: 754447 - DNA, 644 bp, Homo sapiens
ttccaatagctcaagactctggctcccactcaatgtcaacactgcagaattaagtatgtttactccacctttctcaacctactgttctgagaatgaataaattcacaggagcattgtgctgtttgttggctaaatgagctgcatacattaatcttgttcgtgatcatttttctttgtcctcctctttctttgctgcattgttattatatctccaaaaattgtggagtaaagtggaagaagargcagatagtatagaaaaaattaggaagatgatcagaaagattccatctagttaatatggagataaaagagggcaataatttgaaaaaaagtttcagagatagaatcaaaagtatttaactcctttggatagttaagagagaggaattgtagggtgtatttgtctattttcacactgctgataaagacatagctgagactgggcaatttacaagaaaaaaaaaagaggtttaattggacttacggttccacaagggtgaggaggcctcacaatcatagtggaaggcaaggaggagcaagtcacatctcacatggatagcagcaggaaaagagagcttgtacaggaaattcccccttataataaccatcagatgtcataagacttactctccattatgagaata

SEQ ID NO: 754448 - DNA, 521 bp, Homo sapiens
tgcattcatctcacagagttgaaattttcttttgattgagcagttttgaaacattctctttgtagaatctgaaagtggatatttggagtgctttgaggcctattgtggaaaaggaaatatattcacataaaaactacaaggaaacattctgagaaacttctttttgttgtgtgcattcatctcacagatttgaacttttcttttgcttgagcagtttggaaacactctttttgtagaatctgcaaggggatatttggagcactttgaggcctattgagaaaaargaaatatcttcacaaaaaaccacacagaagcattctgagaaacttctttgtgatgtgtgcattcaactcacagtgttgaacctatcttttcaatgagcacttttgaaactcccttttttagaatccagaagtggatatttggagccttttgtggcctatgttggaaaaggaaatatcttcacatgaaaactacacagaagcattctgagaaacttctttgtgatgtgtgcattcacc

SEQ ID NO: 754449 - DNA, 644 bp, Homo sapiens
tgcttcaataatcccactcctaggaatttacccaggagaaataaaagtatgtgttcacacaaaaacctgtacaaaaacaaatttatcagctttgtttaaaaataccaaaaactggaaagcatttaaatatccacaagctaatgaataataaactgttgtacatccatacaatggaatattacttagtgacaaagtakaacaaatgattgctttgtgcaaacacagacatgaatttcaaatgtacaatattaagtgaaaatacacagattcaaaaggcaacaactgcaggatttcattaatacaacttcctagaaaggacaaaaccatagtgacaaaaattaaatcagtaattgccatggacaaggtgtggaggaagcagattgatcacaaagggacatgagggaactttgggagatgacagacgtgttccatatctttatcatagtggcagttaaattagtgtatgcatttgtcaaaatttatagaactgtccaataaaaagggggaatttaactgaatgtaaattgtacctcaataagcttcatttgaaaaaaatcaatcatttaaggacaaatgtaattttttacatttgtttttagcacacaactagtggcattagcaatctggaatcactgccgtcacta

SEQ ID NO: 754450 - DNA, 635 bp, Homo sapiens
catgcatgttcagttaggagaagtactgacctagatgattccaagcaaaagaatgtcatgatctaacttgatcatttgtcataataagctgcactgaaaattttatatgattatttttataacatggtagagacaattctgaccttattcaggccctatgactgaacaatataatcattagctttttccattggaattaataagcatttcattgccaggctagaagtacttgaaactgtaaaagacttccatgtattgatcataagtagagtggccatgtgatttatattccaaatttgggcatgctggagaataaaatgggggctaaaaatatttaacagttatagtttatctacagcatggtataaattggaatttccctgggcaaaccagcacatatgagaccacatgtcactcatttattctataaaatatctcaggctattttgcagaactttctcctaaaaagagatctagtcaccaagggagacttttatraactgaaaagaagagaaagaggaaaatgacactaagtgtagcttcccagtccagaaacatttgtgtctcacaggcaatacccagcttgaaattgacaggaaggatatctcacttgaaagtacagtcaacttactata

SEQ ID NO: 754451 - DNA, 566 bp, Homo sapiens
ggactagtttccgatgatctttaactaacacatacacacaaaagcacactcatacaaacacgaacacactcacactcacacgcaagcctgcacctacatatgatgaattgctcgcacaggagaagatatttcttaaatgtgcaataaatattttgaatgaaactgttcatttacataaaatgtagtataagtattttgtgccytttataaaaaatatccactcatatgtttaaaaagccggaaaaagaaacaagtaaaatggaaagttacagaaaatgtgacaaaaatttactgtaaatctcatcaaccgtcactcaacaaacagcctaaaaaataggttagacaatgaaatagtatcatgtaaagtattgtgaacttaagcttaattttacttgactttgatgcaaaaggaaactgagctgagacctaagaattactgaagcttgtgtgtgcgtgtgcacgtgcacgtgcgtgttgcatacacatatatgtatgcaagatgtagcttttaaagccagcattttattgggaataataacatttgggttgtttttattttaacaagc

SEQ ID NO: 754452 - DNA, 566 bp, Homo sapiens
ggactagtttccgatgatctttaactaacacatacacacaaaagcacactcatacaaacacgaacacactcacactcacacgcaagcctgcacctacatatgatgaattgctcgcacaggagaagatatttcttaaatgtgcaataaatattttgaatgaaactgttcatttacataaaatgtagtataagtattttgtgccctttataaaaaatatccactcatatgtttaaaaagccggaaaaagaaacaagtaaaatggaaagttacagaaaatgtgacaaaaatttactgtaaatctcatcaaccgtcactcaacaaacagcctaaaaaataggttagacaatgaaatagtatcatgtaaagtattgtgaacttaagcttamttttacttgactttgatgcaaaaggaaactgagctgagacctaagaattactgaagcttgtgtgtgcgtgtgcacgtgcacgtgcgtgttgcatacacatatatgtatgcaagatgtagcttttaaagccagcattttattgggaataataacatttgggttgtttttattttaacaagc

SEQ ID NO: 754453 - DNA, 582 bp, Homo sapiens
ctgggatgatttttcatttttagagacaaccctagatctcatctaataattaatctagttaattctgatgattttttgtgtcatctaactttgaggaagtctatacactgtctgtgatccctcattttgattatcatttaacaatatttggcaagtgatcttaattgtttttcttaaaaatttgcttctttcccttgtgatagaatatcttcttctttatttagttgttttttgttgtggtgaaagttgaagaagcagagggaggaaaaatgttcttctgcctttttaaactagaaattccagtttgtttttatacccttaagtatwtttagaatcatgtataattgatcttgctctctgctcctgaatttaatttctgttctgacattaaactactaatgttttcagctgtgcagaaaaaaaaatcactaaaatttatttaaacttaatgatctgatattcttaggagtatcctttcaatttgaatacaagacttatgctaataaaagtgaacagcaaagtccttcgtaaatacaacatccattatttcttccacaaaaaaagttgacttttaaataaacc

SEQ ID NO: 754454 - DNA, 650 bp, Homo sapiens
atttgggtagctctattttagaaaatagagcccatgtcctgaaatatacaatatcactagtgtaaaacctttcagtgttactcaattttccaaatagtagcctataaaaattgggagtagccacacttgaaatctaccctcttagatcctgcgatataacagatattaaaagttcttccaaaggttatcacgtttattaaggtattctcttccaatctctctctctctctttgtatctctctctctctctctctctctcwcacacacacacacacacacacatttccattatctcgctcaaatcctacttgcagccaaatgacttattcagtatctttagtgggaaatattatccattgtgcaggtttaagtttctttaatggcttttcaaaattatgttttctgtttcccttcaattactctatttggtcaaactttgttattaaccatagcattttattcatttatttctttcatcttccaccaattcctccatttaagagctttatagatttagatcttgtcataaaaggttttaatagagactattttctaagatagcttgtgatatggtttggctgtgtcccaacccaaatctcatctttaattcccacgtgttgtgggaggagcccagtgggaggtaactgaat

SEQ ID NO: 754455 - DNA, 513 bp, Homo sapiens
tgtgactaatgggtggggatcatctaaatgtagatacactggtcaagggaagattcacgttctgggcgggatggggcatggcatggcgtgaaattttagctccacccagaatggtgcacaatttaaaacttatgaattatttatttctgaaattttccatttaagaattttggactatggttgactgcagaagttgaaaccacagaaaatgaaacaaggagtaaatggactggggagggggggctactgtacataggaatacattatccatttcttaatcrggtcctaagtgtacccctctgcttaacgttttaattgggaagaattctaggttcgctttcggggctcagagattctcacgtattaattctcctttagcctttcgccttatttcagtacctctgactgatgaagcggacagtcatgtagcttggggcttgcttgctttgggggaacaacttctgaaagtggaggtgacacaattttgtgttccagagtatttatattttgaag

SEQ ID NO: 754456 - DNA, 603 bp, Homo sapiens
tctacaagcccctgactggggctctgccttttttcagagatgccctgcccagagaggaggaatctagagaggcagtctggctacagtggctttgttgaacttcagagggctctgcccagttggaacttcccagcagctttgtttacactgtgagggtaaaaccgcctactcaagccttagtaatggtggacgcccctccccacaacaagctccagtggcccaggtcaacttcagacttctgtgttggcagcaagaatttcaatccagtggatcttagcttgctgggctccatggyggtgggatctgctgagctagaccacttgggtccctggcttcagactcctttccaggggagtgaacggttctgtcttgctggcattccaggcaccactggggtatgaaaaaacaaacaaacaaacaaacaaacaaactcctgcagctagcttggtttctgcccaaacggccacccagttttgtgcttgaaatccaggccctagtgacgtaggcaccagagggaatctcctggtctgcagttgtgaagactgtgggaaaagcgtagtatctgggccggagttcaccgttcctcatagcacagcccctcat

SEQ ID NO: 754457 - DNA, 640 bp, Homo sapiens
cactgtggtatgaatttactgtattatttcatactcatgctgctatagggacatatctgagactgggtaatttagaagggaaagaggtttaattgactcacagttctgcatggctagggaggcctcaggaaacttaccatcatggcagaaggggaagcaaacacctccttcttcacatggtggcaggaaggagaagtgccgagtaaagtgagaaaaaccccttataaaactatcagatctcatgaaacctaactcactatcaagagaactgcatgggggactgccctgatgattcaattacctcccactgggtccctcccatggcatgtggagattatgggaaactacaattcaagaacagatttgggttgggacacagccaaaccatatcaytgagtgagggacacagagaaggcctcttttaaaatgtgcaagagatgaaggataagaacttatcatgttatatggctcaggatctcatgttcaacttttaggagttaagacaggcatttactatcattctcccaggagctgctttaggttctaaacttgtaggttttctagaatccccaggaggcagggtgagtgaggagcactgggagaaatacacagcatgttactgtgcatcatggcttcacta

SEQ ID NO: 754458 - DNA, 576 bp, Homo sapiens
gaattccatttgcagtgttcttcccagtacattgttttaaaattatagtatttaaaagcaaacaatgacaacaacaaaaaaaccctcttaactctttttaccttgcaaggagctgattcctttctcctgaacctcttccattgttatgactccatgaaaggggacagagaagtttccttaggaacaaagagaggaaagaagatgtacagcagatgggaaatctgtgcaagcatagagcctaccttattctcatactacataacctttcctggtctttcccctcttcttcttcaagcctttttcctatcacacacatacacatrctacaaaatctttctggaacagataccttatcttctttctcattccaggttaaacttagtctaggacagtgatatttttagttcaatgaagtttttataaactctagtttatcattttaaccccagagcatccttatctcaaggatctttccctattctccaccccctagttttaaccctttgctgcagagcttagaaagaagcttattagaatgatgatcccttggttaaaccaaggtctcctgcagctcat

SEQ ID NO: 754459 - DNA, 556 bp, Homo sapiens
caagatttttcaaaatctggcataaattcttaaacagtttgagttcctcaacatgagtcaagtggcttgtttacaattagctaggaaaacttacagcttccatttacctgtagtacaaattatcacctttaataaaaaatcaatctgkaatctcaagtttattgatggatatctaaaatctaaaatctctcaagtatttcagtggtaaaattaaaaatttttacaaagtttcctaacttctacataaaacatttttcttaacttttgaagtattttgtacattacctgagcttctgtgataagagaaataaacacattttaatatgcttttcatctgttccttcctattaattataaagtagcatatttctgatgagtcttttggctcttccatttcatttccttcataatataatagacggaactgtcgttgtgatatattagtagtcagaaatagttttcagtttattaagttccttaactatactacattcctctctgaatctgattacttcctgcattatttactcatttatttcatcttcttttgaccagc

SEQ ID NO: 754460 - DNA, 623 bp, Homo sapiens
tatatagtgtgtatctatatatagtgtatatatttagtgtacatacacatatccctatatatgtatgtgtatatacatatatatgtgtatatacatacataagtctctctctctatatatagtgtatctatatatagtgtatatatatagtgtacatacacatatccctatatatgtatgcgtatatacatatatgtgtatatacatacatgtctctctctctatatatatagtgtgtatctatatgtagtgtgtgtatatatatatagtgtacatacacatatccctatatatatttagcatatatatgtatgtgtatgtagcatatatccctatatatgtatgtgtatgtaaactatatatatacactacatatagagtagcagcagctgctatatatgtgtatatatatacacatatatatgtattgtgtgctgtgtgggtatatatatatmcatatatagatgaaattctttgtggaaatttattgtgaaaattggctcacatcatgattttggaggcggagaagtcccatgataggctatctgcaaactggagtaccagcgaagccatgacatagcgcagtccaagtctgaaggcctgagaacaagaggagttgatcg

SEQ ID NO: 754461 - DNA, 718 bp, Homo sapiens
taacatgcttgatacacatatgtaacctaaaagttcaagagaataaatgaccgtgaggctacttttgacaaatacaggatcaagcatcagtcacctgcaacatggccaacttgataatgcaatattgtatagtctctcttcttctctgcttcacttcccaactccttcattcccactctttagaatcacttccaaattaaactgctcttatacaagkcttcatctcaagctgactttaagggagaccaaggataaaacagcaggtatcaggattggctgtacaaagatatgacaatgggcttttggagctagatcccctaccagtcaaatagcaatgcagatcccattgttgatggtcagtgggtggtggtaatccccagcatgtggtggcatcacaattgttctcagctgtgataaagtgacatgagctagataggagaaacttcagcaaagcctgataggaaaaacatagtttcttctcgggagtaaataatttatacaacaaagggactggctgacatatgcacatatacatatatatgtgtatgtgtgtgtgtatcaggaggaatgagtagattatgtataggagtggatcatgaggatttttgattggggtatggggaggaatcaagctgaataggaagtataaggaggaattaagctgatgttcaaagtcctggcaggcacccatggatccagtcctaatatgctgctggat

SEQ ID NO: 754462 - DNA, 545 bp, Homo sapiens
attcccactctttagaatcacttccaaattaaactgctcttatacaaggcttcatctcaagctgactttaagggagaccaaggataaaacagcaggtatcaggattggctgtacaaagatatgacaatgggcttttggagctagatcccctaccagtcaaatagcaatgcagatcccattgttgatggtcagtgggtggtggtaatccccagcatgtggtggcatcacaattgttctcagctgtgataaaktgacatgagctagataggagaaacttcagcaaagcctgataggaaaaacatagtttcttctcgggagtaaataatttatacaacaaagggactggctgacatatgcacatatacatatatatgtgtatgtgtgtgtgtatcaggaggaatgagtagattatgtataggagtggatcatgaggatttttgattggggtatggggaggaatcaagctgaataggaagtataaggaggaattaagctgatgttcaaagtcctggcaggcacccatggatccagtcctaatatgctgc

SEQ ID NO: 754463 - DNA, 598 bp, Homo sapiens
tgatcaagcaaaagaaaggatatcagtgattgaaaatcaaattaatgaaataaagcaagaagacaagattagagacaacacagtgaaaacaaataacaaagcctccaggaaatatgggactatgtgaaaagaccaaatctatgtttgattggtgtacctaaaagtgacggggagaatggacccaacttagaaaacgctcttcaggatattatccaagagaacttccccaacctagcaagacaggcccaacatccaaattcaggaaacacagagaacaccacaaagataattctcaagaagagaaaccccaagacacataattgtcagattcaccaaggttgaaatgaaggaaaaaatgttaagggcagycagagagaaaggctgggttacccacaaaggaaagcccatcagactaacagctgatctctctgcggaaaccctacaagccagaagagattgggggcaaatattcaacaatctcatagaaaagaattttcaacccagaatttcatatccagccaaaataagcttcataagtgaagaagaaataaaatcctttacagacaagaaaatgctgagagattttgtcaccaccagg

SEQ ID NO: 754464 - DNA, 598 bp, Homo sapiens
tgatcaagcaaaagaaaggatatcagtgattgaaaatcaaattaatgaaataaagcaagaagacaagattagagacaacacagtgaaaacaaataacaaagcctccaggaaatatgggactatgtgaaaagaccaaatctatgtttgattggtgtacctaaaagtgacggggagaatggacccaacttagaaaacgctcttcaggatattatccaagagaacttccccaacctagcaagacaggcccaacatccaaattcaggaaacacagagaacaccacaaagataattctcaagaagagaaaccccaagacacataattgtcagattcaccaaggttgaaatgaaggaaaaaatgttaagggcagccagagagaaaggctgggttacccacaaaggaaagcccatcagactaacagctgatctctctgcrgaaaccctacaagccagaagagattgggggcaaatattcaacaatctcatagaaaagaattttcaacccagaatttcatatccagccaaaataagcttcataagtgaagaagaaataaaatcctttacagacaagaaaatgctgagagattttgtcaccaccagg

SEQ ID NO: 754465 - DNA, 561 bp, Homo sapiens
aagaggcaaccgcacatgcactgagaaccaaacccctcacccatgacttaggcactgttggcaccagtacttctgcatgtggggataaccatagagtttcgaaagggaggacaggttcaaaaaaggcatagaggcagttagacacacagatgtcctcttctgctttgtagaaacactaactgttctttckcaacctggcagaagtctgaaaatctattatctggagacagtacaacacaaggtctgtggacctactgcagggcatcagacactggagagagcaagctactgtactgataccaggagaacaagcaaatgcttgcatagtaactgttgagacctcttctttgccctgtgtttcaattcccaagacgctgtcacctcaggcttctgctttcatggcagaagagcagaaaagacttccgatgcactggtcagatggtcagagaagacacaaaatatgtaaaggtattgaaattgctgttctatgtcccccactcaaatcaccctttaataaagcctgcagctgacaaatttgaagtatgtatgcaaagctcctaa

SEQ ID NO: 754466 - DNA, 619 bp, Homo sapiens
tgtctggactgcaaactttcatgactatcattgctccactaaaaaatttaccaaagaattactacactcttccaacacacaaccacaggcagtagtttctgagagctgtacaggagctcttcaggcttttgaagtatcagatctgtacaacatctcagagggcagagccagggaacacagaaactgaatgaaggagtaaaatactgcctgaccaagagcttacactgctcttggttcagggagtccttgtcattcctgatcagtaagatttgagagatgcgagatcagtaacctctctgtatttgcttaatcccatcttttcctggattaaatttctcaaaatagctgatctatttcttctcaaatattgtacatgttttggggacagatgctttgtcttttaggtaatacaatgccagacaagcaggaattgctagttgttctattgttgagattacatatcaccaagatcacacactttgractctgagttggatggcataactagaagagagtttgagatatctctagtggaaaagaggtaattatgttacaccatttaaaagaagaatgtttaaagaacgttaagtgttaggtagccaatgtatgaactacagaa

SEQ ID NO: 754467 - DNA, 628 bp, Homo sapiens
cccataaacagggaaaatgttcatcttccttaaagaaaagtcaaacagaccattttcagcaacagttagtatgcacacatgggataagctcattacaaatgaacactgtcagttactaatgagatttttataatagggcatacaatttgggcttgtcattctcttccttatgtaagcagtattattgcttgtacttgaaaccataattctttggaaaagttctttaaatcaggcatttcacaaaaatttggataagttacaaagactttgctatgttttgtttgagcattagatatattcaggaaggtcacgtgaaataaagattctgccttatgaagagaaatttcccttgctctactccacatcttcgaatggacatgggaggatggagaaggaagttggggcaggggcttgacttcaaacyccgaaagacaggcttaagcaagcctgaagatccagaaatgataaatggctcaaccacctgacttccttatcccccctccctgaagctcaaactcctcatcattacatcaagcagtaacatatagaaagaacatgaatgataataaaattgaaagatacaccatcaatgcttcatatacagtaagttcccaataaacgatggtgt

SEQ ID NO: 754468 - DNA, 501 bp, Homo sapiens
atgtccataattattactataaataataataaaagtccttagatagtttgaaataaattttaagagatatgaatcaacctaacccaagggcattcatttgcattttaagcagaagacagcaattcactacagtgccttcragaattggacctcttttaaatatcatgtagcaaaatataaaatatattcggaggaaaagagatcacaataccacgtggtagagcctctatcatcgagaagtaataaattaaaggtctgaggaaaagttcccaaggcacacccagtttttaaacatcaacaattaattgttacacacaattaaaaatatggagcagagagcatggagagtcacatacatattttccatcttatatacattctcaaaaaggaattgcttaacctttgtagatattgcactttgactcattcatgtgtagctcaaactagcatttttcagagctacatgtttaaaaaataaataaataaatatatatatatata

SEQ ID NO: 754469 - DNA, 501 bp, Homo sapiens
atgtccataattattactataaataataataaaagtccttagatagtttgaaataaattttaagagatatgaatcaacctaacccaagggcattcatttgcattttaagcagaagacagcaattcactacagtgccttcaagaattggacctcttttaaatatcatgtagcaaaatataaaatatattcggaggaaaagagatcacaataccacgtggtagagcctctatcatcgagaagtaataaattaaaggtctgaggaaaagttcccaakgcacacccagtttttaaacatcaacaattaattgttacacacaattaaaaatatggagcagagagcatggagagtcacatacatattttccatcttatatacattctcaaaaaggaattgcttaacctttgtagatattgcactttgactcattcatgtgtagctcaaactagcatttttcagagctacatgtttaaaaaataaataaataaatatatatatatata

SEQ ID NO: 754470 - DNA, 513 bp, Homo sapiens
actgagtataacaaaaagtgccattgaaagtccatcaaatcattaatgagatagagtgtggtatacagcagaagcatcctctggcatggaaatgtcagagagaagccctctaaaataaaatgatatttattcagcgcattgccatgagaatacacatgcyacagtaaactaggtgtgtattcaaggaggtaaaggaaggcaaagatttttaaaggaaaactgcaggagaactatgtaattgttttgagataatcatccttggctacaagggtcaataacgagggtgatactggtctgagattcgacagacagttgctgggcagacgtcctcacagaagtattttttgtgtaaggctgcaatggcgtttgtgcaagattgcagattttgtggggtcttttgtcccagttttgttgtcaggaatacaagcgtgagaaccctctcttcatagccttccctgccctattcgtcaggatttttgtttgtttttttaaacacaaacgactccattttga

SEQ ID NO: 754471 - DNA, 603 bp, Homo sapiens
ggaaaacccaaattggatcatgtcaacccttcaaagggctcctgtgccttcttgcagcatgtaagaagtcaaatctcaattccccaccatcacccacctagcccagcctgtgcctatctcttccccatcatctcctgccccttctcccactttttcattgtactctaacctcactggtctttcgtgccagctgattctcacctctgggttaccctggctgttccctctacgcctaccctggctgattccacctcattatttaggtctstgctcaaacatcaccactttggaacaccctttcttgaccacccaacctaatggagctccctgtcaccttacctcgtatggtctccatggcacatgtcagtatctgaaatggttttgtgtgtgcattggcttccctgcctgctgcttgtctccttgctcatgcagggacttcttcgtatttttctttgctttctcccactgcctagaagagtgcttggcacatgacaggggctcatggatatgagctaagtgaacacagttgatcttatcaccctcattcccagatgaggaaactgaggctcgaagaaggggaaattacctgctcacagtcttgca

SEQ ID NO: 754472 - DNA, 639 bp, Homo sapiens
gataattttaacaatatattttatttaactatatacatccaaaatgtaatttatgtaaactattgatgagatatttaactttttttcatgctaaatcttcaaaatctgctgtgtatttcatgcttccagcacacatatccctatggatgacaaattttcatcggaagtctctgacctctatttagatgtcataaaatgtgtgattgaaagagtagattcacatactcaagtgttccaagtatacagttattttctactaactgaattgagtatgtgattttagttgtaaattaattgaaatgaaatgaaataaaaaattcagttccacagttgcactagtcaaatatcaaatgctcagtagctacatgcagctagtggttattctattggacggcacgtgtatataaccaccccagatcacaaatcagcctcccttccctgttgtaaacaggaggtagtcttaaatagaaatacaatgacsatacaagagtcacattaaactccagctaggtgctgctgcctgccaaggtctgggcccaaggcctgctctgtgtctattcaaaagagagatttaaactgagtgcagtggcatgtgtctgtagtcctagctactcaggaggctgagatgggaggatccct

SEQ ID NO: 754473 - DNA, 626 bp, Homo sapiens
taactattataaataaagctgctataaacatccatgtgcaggtttttgtgtgaacatcagtattcagcttccttgggtaaatactgaggagcacaattgctggatcatatgctaagaatatgtttcgttttgtaagaaactgtcaaactgtcttccacagtggctgtaccattttgcattcccaccagtgagaaatgagagttcctgttgctccacatccatggcccatttgatgttgtcagtgttctggattatggccattctaagtgtgtagtggcattttatttttatttttatttggatttccctgatgcaatgtatgcatatattatcatgtggaacatcttttcatatacttatttgacatctgtatatcttctttggtgaggtgtctattaaagtgtttggtccattttttaaatgagttgtttgttttctttgtatatttggacaacagctttttatctaatatgtcttktgcaaatcagacagtctgtgcttgtcttttcattctcttgacagtgtctttctcagagaagaaatgtttcattttaatgaagtccagcttatcaattctttttcatgggtaatgcctttggtgttgcattaaaaaatcattaccatac

SEQ ID NO: 754474 - DNA, 620 bp, Homo sapiens
tacctctgtgaataaagtgggctactttttggaagtctttttccaaaagtccacgggacgtcagtgctggggtccccagccgcagtccactgggccgcagagcgcttctgtcacctacaagataaacggggctctgtccctaagtcacattgtcaccactgtgatggtggtgcatttaaaaagggacatgtgggcaaaagagaactggcctgaggatactggctgtccctagcaaggagtacaactgattcagaaactaaagtagaacccaaggcacaaggaggcacaaccacgtttggccactctgacttaattactagtacacaaagtggtctgatgtgccccttgctcctaaaaatgagggtaacakctgtctgggtctgagatgcgtcatcaatattttgttaacaacccacagagaaatgcagcctctggattccggaggccctgacctccctcatctgatgaatgtaccacctccaacagctctacatcagtctttttgctccctggcagggtcagggccaagtacaaaggcacagccaagagacagccaaggtatggtccctgcccccgctccattttttgtttttgtttttgtttttttgagacggagtctc

SEQ ID NO: 754475 - DNA, 614 bp, Homo sapiens
catttaatattttaatcatcttgtaatgtattttggtttgtgggagggaactaattttaatttctctatctgcttatttatttacatttaacaattatcccagaaccatttattgaatagccttttcccccatcagttactatgtcactccttgtataactgaattatataaattaaattgtaaaaactaatttaatgtgttcacatgcaaaaaaaatgaagttggacccttaactaacatcctatacaaaaattaactcaaaatggattaaagacctaaacataagagctaaagttataaaactcttagaaggaagcttaggggaaaagctttacaaccctgggcttggcagtgatttcttggatatgatgccaaaggcataagcaacaaaagaaaagtggcaaactggacttcatcaaaattaaaaacttstgcatcaaaggacactattaagagagtaaacaggcaacccacagaatgggaaaaagtactggaaaatcacatatttcatcagaaattattatccagaacatatagaaaactcctaaaactcaataacaaaaaagtaaagaacacaattcaaaaatgggcaaaggatttttggcaacatgga

SEQ ID NO: 754476 - DNA, 601 bp, Homo sapiens
aagaaacagctgggttgctcagaaggaccaggactgatagtctggctggggacgcatggagtggtgcgggaggctggctgagccccgcagcaggaaataatggaaatcttagcttcttgggacccctgttgattggatgggtcggagaaagagtcagtgggtgcagaacaatcccttgtcaaccctgtgtggcagctggcctggtgaagtttgcctgccctggagattgggtctgttcctcttgctctgcgcctgggaacatgtgggaatcagcaccggacacctgctgaatccacgcctgccattagcaagtcctrgctctggataagtctcctttgtgtgagggaaagcaaacagaaaatgtaccaaggagtctgtggaaaaaatactaccccattaaggaaagggaatggtttcctgaagagtcagaggagacgtattctgctgaaagtgaacgtgagtacaaaccagaaaaaaacgtttgtgttcaagcatgtgttatcctcagcagagaatcctcctttttcatataaaaatgtactattagctatgattgtttgacattatggtgctggagaagttgggtcgactgaggatccag

SEQ ID NO: 754477 - DNA, 555 bp, Homo sapiens
ccagctactcgcaaggctgaggcaggaaaatcacttgaacctgggaggcagagattgcagtgagccaatatcgcaccattgcactccagcctgggcgacgagagcaagactccgtctcaaaacaaaacaaaaacaaacaaaaaacatcgaaccctaatttaacaccaatgaatgtgagactttctaagacctgagaaggagggaaaaaacagaaagaamccatgatggaaaataagccagaattgctccaagtcgcccgacgccgattgccaatggaaaggcagaggcaaggatttacaccagcccaaaacagggccagtgtctggggactatgcacacatgttgctctcacctgagcaccttcttgtagggcttgttggggtccctgtagtaggggacaatccggggtttgaagtcttcatcactttggtctagccgagctctggaatctggattctgtggccctcctcgctcccctacagcctcgacacagggatcttctccctccccctggatccaggaaacccgcaggaggctcaggctgcaccccagaga

SEQ ID NO: 754478 - DNA, 599 bp, Homo sapiens
tacaaactctttgaatatgtatctttctctgtgggtatagaaaaacccaaaccaaagtgctttttctatcctatcactcaacaatcaacacagaacactgaccaaatgtagggggattgttccccaccagcaagcaagcacttctgcagcagacaccagctgggttctgacaccatcgatctgaagacaacatcggaccacaggctgaggaggrgacagagcagagacccctccctcttaaggggacaccagcactgccaccctaccccacacaaggagataaaggaaaatcttgagtcctttcaggggaacttccaggtacccagctaggcctgagaagtaaatgagcagcttgataagcaagaaggtaatagtaacataaaacaatagccaaggaagttagagtcagatgtttggttccctatagaaactgaagataagatcttcacgtatgtccctgagttgtttttcagcaccacactctaaccaactgagctaaccggccaccgaccctgagcttttcaaaaacctggacccccaccacatggagtctgctggcacatagactccagagaacggggagctgagcactgaactct

SEQ ID NO: 754479 - DNA, 599 bp, Homo sapiens
tacaaactctttgaatatgtatctttctctgtgggtatagaaaaacccaaaccaaagtgctttttctatcctatcactcaacaatcaacacagaacactgaccaaatgtagggggattgttccccaccagcaagcaagcacttctgcagcagacaccagctgggttctgacaccatcgatctgaagacaacatcggaccacaggctgaggaggggacasagcagagacccctccctcttaaggggacaccagcactgccaccctaccccacacaaggagataaaggaaaatcttgagtcctttcaggggaacttccaggtacccagctaggcctgagaagtaaatgagcagcttgataagcaagaaggtaatagtaacataaaacaatagccaaggaagttagagtcagatgtttggttccctatagaaactgaagataagatcttcacgtatgtccctgagttgtttttcagcaccacactctaaccaactgagctaaccggccaccgaccctgagcttttcaaaaacctggacccccaccacatggagtctgctggcacatagactccagagaacggggagctgagcactgaactct

SEQ ID NO: 754480 - DNA, 626 bp, Homo sapiens
tgttcttgaggaggaggttggcaagtcccagaggggacctgttaaagtcacaccaacaccagacagacgctcttcttggcctcagaggctgaggactaaaagggcctgcagctgtgctctttcatgtccgtgttgctcctacagttgtcttgggtcgctggagttcagtgtmccttcctggagacagcaatggtttggataatgtgagacttagcctttagaattgtcccaacgtagcagctgaagtgacttcctgtgggtgagccccacgtgcattgctccaaagcaagaagcccagccacagcccggttcagctgatggcctttgagcaaccttcattgctcttggattttcaaaccagtgtttgaatatggacgtttgccagcagggttagcgatgctgccattccactttctcttttctgtctttagagggtttttgcccctttctctttcatccttaaattctgctggggaggtctaaaaagcacgatttttatttggttctgccttcaggtatctgatgaagttcaaagacactttccactttgctctttaagccccttggtgtttcacatcatgccaaaaccagagacggaaaaataaaaccaattagcttttccaaac

SEQ ID NO: 754481 - DNA, 580 bp, Homo sapiens
gcccaaatgggtagaaaaataaagttccccaatggaggggatgttggagagaccaaaaaaaaaaaaaaaagccagatattcactatagtgtagtggggtggaaaggggggtgactagaaattggcctcattggagtggagagtacatattatacaagtggagagatgatttttagatgaggtgggaaagtattaagaatggctttgaaatccaaatttagattaataacaaggaatattcgcaccactgcactccagtctgggcaacggagtaagactccgcctcaaaaataaataaataaataaawaaaaaaaaaaaaaacggggaatactagcattaaaaagaagaaaaaaataataatactttatagacttttttttggcaaaaaaaaaaaaattattttttctgtaccaaagagtaattaataccgtggtgacagttaaacaatgttttgtgtgattcatattctaggtctgcctatgaattaaggcaagacagtagcaggataaataagttattttaagtttcttgattcactctggtttagtctaatttatgctgctatagcagaatacttgtg

SEQ ID NO: 754482 - DNA, 580 bp, Homo sapiens
gcccaaatgggtagaaaaataaagttccccaatggaggggatgttggagagaccaaaaaaaaaaaaaaaagccagatattcactatagtgtagtggggtggaaaggggggtgactagaaattggcctcattggagtggagagtacatattatacaagtggagagatgatttttagatgaggtgggaaagtattaagaatggctttgaaatccaaatttagattaataacaaggaatattcgcaccactgcactccagtctgggcaacggagtaagactccgcctcaaaaataaataaataaataaaaaaaaaaaaawaaaacggggaatactagcattaaaaagaagaaaaaaataataatactttatagacttttttttggcaaaaaaaaaaaaattattttttctgtaccaaagagtaattaataccgtggtgacagttaaacaatgttttgtgtgattcatattctaggtctgcctatgaattaaggcaagacagtagcaggataaataagttattttaagtttcttgattcactctggtttagtctaatttatgctgctatagcagaatacttgtg

SEQ ID NO: 754483 - DNA, 613 bp, Homo sapiens
  misc_feature 1, 2, 3, 4, 5, 6, 7, 8, 9, 10, 11, 12, 13, 14, 15, 16, 17,18, 19, 20, 21, 22, 23, 24, 25, 26, 27, 28, 29, 30, 31,32, 33, 34, 35, 36, 37, 38, 39, 40, 41, 42, 43, 44, 45: n = A,T,C or G
nnnnnnnnnnnnnnnnnnnnnnnnnnnnnnnnnnnnnnnnnnnnntacttagggaagataactttcgggatcatttggttcaatcacttcacttggtaggcttgatacaggactgaaaataaagaaataatttgctaacagttatatagctacttactcgttgtttcctaaagccattttaagtaattttggggtcagggtagaaatagttcagaaaaattatattttaaaaaggcattaagttataattaataatttaatagttaaatcttccagaaaaatggaatacaggaattacaagcattagaattgttctttttaaaaaaattttcagaaatgaatgactttggcataagctaggggtttatatattataataaatagtagaaaacaagttatatattatggatttaactatatactaaatgaacasaggctaaattcaactgaaacaattgtcttttattaggccaaagattacttatatttatcccttatgaaagaatataattcagcatctaatggacctaggtgaaaattttgtctctgttctttgtcactacatgtggtagggctagttaccagtaacttttctcagttttagttttcctgt

SEQ ID NO: 754484 - DNA, 612 bp, Homo sapiens
ttctggtctctgaaatacgccataaaattttataacttataaaagagtaatattcaccaagaggctagtggagactttggttttgaggaggaaaataaaaaaattaaatgaaaaaataattacatgccttttagataagattttgtgtagtaaaaataaggttattttatataatgtcaatgtaatttttatatgaagaggtgaacaaaacaattttacttataggcttcaatagaaagtatacaagatactgactaaaatataataaaaattttatgattttctggcttatggaatcagtattttactactcatacktttacatttgctttttctcaaaactatatgctataaaaactttgataagggagtacatcttattaatgatttcacaatgatgtctaatatagtttagtgtcttgataatttaggtaatgaataaatatgtgatttcttttcaaccgtgtgatcatttgaatacaattttgcaggcacacaattagttttacaacgcgcatatctgaaattattttctttttggtgcatgggattttcaagaattgaacttccaaagctcctaaaaccctgtataaaaacagtttgctttaaaga

SEQ ID NO: 754485 - DNA, 620 bp, Homo sapiens
ccccattaaaaaatgggcaaaggacctgaataaatgtttctttcaaagaaacttagaaatggccaagaggtatatgaaaaggtgttcaatatcaccaatcatcagggagatgcaaatcaaaaccatgatatcattttacatctgtcagggtggctataatcataaaaccaaaaggtacatgttaaggaggatgtacagataaggaaaacctgtatacttttggtagaaatgtaaattggtgccaccattatggaaaactgtatataaatttctcaaaaaatttaaaatagaactaccattttgtgatagttaatactgagtgtcaacttgattgggttgaaggatgcaaagtattgatcctggrtgtgtctgtgagggtgttgccaaaggagattaccattggagtcagtgggctgggaaaggcagacccacccttaatctgggtgggcaacatctaatcacgtgccagtgcagctagaatataaggcaggcagaaaaacgtgaaaagactagactggcctagcctcctagcctacatctttctccctgtactggatgcttcctgccctcagacattggactccaagttcttcagttttgggacttggggtggctctcct

SEQ ID NO: 754486 - DNA, 628 bp, Homo sapiens
gaaagtacttagcaggatgtccttattaggcttaccttttgaaacaaagaactccacccctccccgcactggtctgggctattctgcttttccacctgtaacatgagctagtagggaaggctacattaaggaagaactcatttcttarggaaaatgagaagggaaagacataaaactcaggaaggaaaaacacacaagagaaaaacacaatacctcgaaaagtcctctctctgtgaatttgggcaaggtttttaagctctgtatactttgtttttttatctataaaatagaataatcattgtactcactattaagattaatgtatgtaacacattcacatagcgatgattaatattctcactcttatctttgagagagtagagcatcgtgtagaggagcatcacctcttaaaccagactctttgagttcatatccctgagctagttgattttggtagaatttactggttgcagtttaagtttccttgtctgtgtaatggggataaaaaaatgaacaatccgatatggcttggctctgtatccccacccaaatctcattttgaattgttataatcctcacatgtcaaaagcaggaccaggtggagataatttaatcattaggggcggtt

SEQ ID NO: 754487 - DNA, 575 bp, Homo sapiens
aatcccaatagaatttttacataataagaaaaataatgctaaaattcattaaaaaaaaaagaaaaaaaaaacagaaaagatcctaaccagccaaagcaattttgaaccagaatataattggaaccatcatgctccttggtcttaaagtctactacaaagctataataatcaaaacagcatggtactgtcataaaaacagacagatcgaccaatggaacagaayagaaagcccaaaaataaactcacacatgtacagtgaactgatcttcaaaaagagtgccaagaatacacaatgagaaaaaaaagtctctttaataaatgaggttgggtaaattagacatatacatgcaaaagaataaaattggtctcttattttgcaccatatacaaaatcaactcaaaactgattaaagatttaaacataaatcctgaaattataaaacttctcaaataaaacataggatgcaatggtatgtgcctgtaatccaagctacttgggagggtgaggcaggaagttcactggtgtccaagaggtcaagagtagtctgggcaacatagcaagaccccatctcaaag

SEQ ID NO: 754488 - DNA, 575 bp, Homo sapiens
aatcccaatagaatttttacataataagaaaaataatgctaaaattcattaaaaaaaaaagaaaaaaaaaacagaaaagatcctaaccagccaaagcaattttgaaccagaatataattggaaccatcatgctccttggtcttaaagtctactacaaagctataataatcaaaacagcatggtactgtcataaaaacagacagatcgaccaatggaacagaatagaaagcccaaaaataaactcacacatgtacagtgaactgatcttcaaaaagagtgccaagaatacacaatgagaaaaaaaagtctctttaataaatgaggttgggtaaattagacatatacatgcaaaagaataaaattggtctcttattttgcaccatatacaaaatcaactcaaaactgattaaagatttaaacataaatcctgaaattatraaacttctcaaataaaacataggatgcaatggtatgtgcctgtaatccaagctacttgggagggtgaggcaggaagttcactggtgtccaagaggtcaagagtagtctgggcaacatagcaagaccccatctcaaag

SEQ ID NO: 754489 - DNA, 626 bp, Homo sapiens
tgaggtatggggctgctacatgcagtggttcacacctgtcatctcaacactctgtgaggcgaggcaggaggattgcttgagcctgaaagttgaagaccagtctgggtaacataacaagaccctgtttctgcccaagaaaaagttttaaatttcttgggcatggtggtgcacacctgttgtcccagccattcaggaggctgaggctggaagatggcttgagcctgggaggttgaggctgcaatgagctgtgatcgcacatggtggcctgtagagctttgggaggttgaggtggaggattgcttgagctcaggaattcaagagcagcctgggcaacatagggaaaccctgtctctacaaaaaaaaaaaaaaaawttttttaatttaaaaaattagtcctggtggcttgtgcctgttgtcccagctactcagggggctgaggtgggaagattgcttgagcccagaagttttaggctgcagtgagcttatagttgcaccactacactctagcctgggcaacagagcaagactaaaagaaaaaagaatcaggtatgactcaggattttatttggattatacctaaaatcaacatacgttatttctttcagataacagatagcacattaatc

SEQ ID NO: 754490 - DNA, 548 bp, Homo sapiens
gcgtctcgctctgtcgcccaggctggagtgcagtgtcgcgatctcggctcactgcaacctccgcctcccgggttcaagtgattctcctgcctcagcctcccgagtagctgggactacaggcacatgccaccacgcccggctaatattttgtatttttaatagagacagggtttcaccgtgttagccaggatggcctcgatctcctgaccttgtgatccgcccacctcggcctcccaaagtgctgggattataggcgtgagccaccgtgcccggctcttcctccctyttttgacccaatctttcccctccaaactaaggcagaatcacaaacatagcactgtggctcccttgacttcctatgcccagctcacccaccattctgccagcgctcctcatggagaaatgccaggccctgggccagggacagtgccatccgcagggaacttccccagtcactggtgtactgggtcaagtagtggcacagggagccctggggaaacgcagagagaaaaggatggtacacaaagctggagacggctgatccatcc

SEQ ID NO: 754491 - DNA, 627 bp, Homo sapiens
atttttaaatggtaatttttagttgtggagtacatgggcaggatgtgcaggtttgttatgtaggtaaatgtgtgccatggtggtttgctgcacctgtcaacccaccacctagatattaagcccagcatgcattggctattttctttttagctatgtttcctaatgctctctctttccccatcccaactcccaacaggccccccccgccccccgcccatgtccatgtgttctcattgttcagcttccacttgtgagaacatgcggtatttggttttctgctcctacattcgtttgctgagaataacagcttccagcttcatccatgtccctgcaaaggacatgatctcattcctttttatgactgcatagtattccatggtgtatacgtaccccatttgtcaaaagctattaaaaaaaaaaaacrtaattcataggacaagggttgtcattgcacagagagggggatgacttgttagtgggccaggtgcgcaccctggcttgtccctcatctccaaccggtgccctgacagccctgcgtgatcaggcaggaaaagaagggctggggacagctggagctttctctgggggctgctgttgtggggaggaggtgccactgcgtggcttaaa

SEQ ID NO: 754492 - DNA, 667 bp, Homo sapiens
aaaaaaaaaaaacgtaattcataggacaagggttgtcattgcacagagagggggatgacttgttagtgggccaggtgsgcaccctggcttgtccctcatctccaaccggtgccctgacagccctgcgtgatcaggcaggaaaagaagggctggggacagctggagctttctctgggggctgctgttgtggggaggaggtgccactgcgtggcttaaataggtgctgggggacagtattcacaggctgtcctctcaggcatctcttccttcccctttccattcttcgaggctccaaagtcttttctgaacttcttcagtgagtcaaggctgggtataatctacagctggaatgaggtcttttctgggaagccacagggtgtggggctgagtgaggaacagagcacctgcctggcttccagaagagactttgcccaagaccaaaagcgacctggggctccatggagcttgaggtgaggtagcccaatttcccaaaggtcattttcctgaaatccagtgcaccccatggccagtcctccaaagggtccatttgctgaatttacttgctgccttcaactcttcatttttgttgactggttttcattttgtcttcataacagcattttaagggattgacctacagctgataacaggtgctttaggttgttag

SEQ ID NO: 754493 - DNA, 616 bp, Homo sapiens
ctatgcagatgtggtaggatgcccatgagaccaagtttgagcagggaaaattagtctccaccagcttctgatttcccatctatctttgggtgagggggatgttttcaaactctctaatggccagaagaccaaggcagaggggagaacacctgagattagcaggctgagtgcttttgtaaatatttaccttcttggtgccccagggatgtaaccatacaaaatgtaaccctcccagcacccccggcttccaattcagacagggtagagatgccatgcctcagtgtacctccagggttggaagtgaacacctgccaytgtcccacccgcatttctttctctagagattgccaggttttgaaacataaaagcttctatgcaatccccttccagccatagagtggcgccatttgctcttcagcctcccttccaagtaaaactcttgagagattccagtgtgcattgctttctccattctaggggtacctatcatcagtgggtccaaagtgagttctctggcttctttcttactaaagcagggattaaaaaaaaaaaaatcttaatatcaggatccattccacctctgactatatacatgcatgtacatacagcctgacag

SEQ ID NO: 754494 - DNA, 562 bp, Homo sapiens
ctttgaattctatttcatctaaaaattttatcttaatgtaacattcttatgcttgaaattcctttatcatacttccctgaaacaaaaaaaaggacgtaaattgaaaatttaaaaacattaaaacattgctgtagagctgatggtggtggctcatgtctgtaatcccagcaactcaggaggttgaggagggatactagaggccaagagtttgagaccagcctgggcaacatcacatgaccgagattccaaaaaaaatttttttaattagctgggcatggtggtgcatacctgttgccctagctattcaggaggctgaggcaagaggattgcttcaatccaggagtctgaggctataattagctatgatcacaccactgcactccagcctrggtgacaaagcaagacccaatcttggaaaaaaacaaaaacaaaaacaaaaaaaaccccaaaaccaaaaaacaaaacattgctcaaaattatttcatctgatggagttaacaatacaattactgtatgcaattaaccaaagcaatggaaataacaatttgtacaaatatactac

SEQ ID NO: 754495 - DNA, 534 bp, Homo sapiens
aacagaagcaaaaattgacaggtgggatctaattaaggtaaagagcttctgcacagcaaaagaaaatgtcaacagtaaacagacatcctacagaatgggagaaaatatttgcaaactgtgcatctgacaaaagcctaatatccagcatctgtaagaaacttaaacaaatttacaagagaaaattgttaaaaagtgggcaaaggacatgaacagacacttttcaaaagacatacatgccaccaacaagcatatgaaaaaaagctcaacatcaccaatcgttaagagaaatgcaaatcaaaaccrcaatgagatactatcccacaccagtcagaatgactattattaaaaagtcaacaaataatagatgctggcaaaattgcggagaaatgggaaaacttacttatacactgttggtgggagtgtaaattaattcaattgttgtggaaagtgattcctcaaagggctaaaagcgaactatgattttatccagcaatcccattactggttatatacccagaggaatataaattattc

SEQ ID NO: 754496 - DNA, 662 bp, Homo sapiens
cagtcctcttgtgctttaactgaactacttatcttggtaaccactgctttgtgttttgtcttcaggattgcgctggtaaagccatgtttcatctcctgttacaatttttcaatgaaaggcttcaagatcctgatcccayttatttaaaatttccattgaaagctctattcttgtctgtagctgatctgggtgcaatggttttggtacctatcaggtataaagtttgctgaacttttccagtcaaaattgtgtaaggtgaaccaactgagatgtctatggtgttggctgttgtttctgctgttaattgttggttttcttcaattacgccatgaactaacttttttctcacaaactgatgtggatgatctgccactgtgggcttcttcttcaacattaccttatgccttcttaaaacgagttatccatttgtaaactgatttctttggagcactgtccctatcaacttttcataaagcatcaattagttcaccattcttccacccaagtgtcaacatatatttgatgtttgttcttgcttcaattttagcagaattcgtgttgttctgatagagcctcttttcaaactgatgtcttattcttcttagtgcttcaaactagatcctgttcagacatgttataacaagttagtaggagtttatttt

SEQ ID NO: 754497 - DNA, 643 bp, Homo sapiens
cagcagttttcaagtctgtcaatgagaggaaaaaaatctgggtagaaataagatcagatacatcaaagattacaaattttattagagggcgttggaaaggagtttcatgtgattatgtgacttagtgttgcctgagtgcwagatacttgtggattgagacgagagtaagaatgtttgcttctagttttgtgttcccatatgacttatattatagattcttgcaggttgaggatgtgttaacatgatttaacccagataagcttcaggaatattcttcattcaattatatatcaatttaaaaattgtcattttgccatttgcattttttttgaatttttttcttacatcttttgaaacctagtaacttgttcatttttcaacttttattacagtgcctgatcaactttctagcgggagaacgatcatggaggtggtgccagctgaggtgaatagtttgcttccagaggaaataatggacactggtataactttagtggatgatgatagtattgaggctgttattgtttcatccccaattcccatggagacagaactggaagaaattgtcaacataaattctactggtgactctacagccacgcccatttccacggaaccaatcacagtgtacagtaaccacact

SEQ ID NO: 754498 - DNA, 607 bp, Homo sapiens
cactaaatggtatctttattgatgggttgtcgataaacctcctgctttatcctgtatccaattaaaatgatccctcgtcagtttttcctctgattcaaacattttaccccacattgtttctgcaattagacagaaaartaagcatctgtgaagtcaacctttttgctttttttactctgaagtgctgcttttttttttcagtaagttgtggttttaaaaaaatccagttatttgaatgacatttattatttttgcagttaataaatgtattttaagtttttaaatccacagtgtagataaggccctagaagcaagtgtagacttcgtccacagctgtactccatcggccactgacagtcttattgcattatttcaacggcacaagcaatcatttacacttgttattacccaggggcatttcaaactgttactgaaatgcatccatccctggagtaaccatctgtgaatggtaatgccataaggtagagagactaaatctaattgatatgcaaaaaggagaatttcagctgtccagctatggagattcaaattgaacctttaataggctgaggatttcagctaaatttttaaaatcatgatatctagt

SEQ ID NO: 754499 - DNA, 606 bp, Homo sapiens
taatatattaatggaagaaattgtaggctgggccagaaggattgcgtgattccaggagtttgaggctgcagtaagtcatgattgtgccactgcactgcagcctgtgtgacagagtgagaccaaaaaaaaaagaagaaaaattgaagacagaaataaatggaaaggtatcctctgttcaaagagtggaatagttaatattgttaaaatgtccatactactgaaagcaacatacagattcaatgcgatgcctatcaaaattttaatggcatttttcacagatatcagaaaaacaatcctaatatttgtatggaatygcaaaagaccccaagtaaccaaagcaatcttgagaaagaaggacaaagctggaggaaccacttcctggtttcaaactacttcctggtttcaaactacattacaaagctctagtaattaaaacagtatggaactggcctaaaaacggccactagggtcactgggacagaatagaaagactagaaataaacccaaacatatatggtcatctaatctttgacaagggtgccaagaatacacaatggggaaaagatcatctcttcaataaatagtgttggaaaaactggatatcta

SEQ ID NO: 754500 - DNA, 679 bp, Homo sapiens
agataagagatataaaattcgtaccaaaatgccttggacacagtaaatgcttattaaatatcaataccaatcctcctctcttctgaccttggaaagtctcagattgaacactggcaagctgttgcttcctctggtgtaaaggttttccttggacttatccaagaatcaggtggccgtttacctcattatgagagcagctccctactcatttgtgaaacactaaacctcctgctaggaaaggagtcctgatgaatcttttttctcattaagtcattaaaaatgtacaaagacaaacacagagaaatttcaagaggcataggctcttacggtttatattagcaaaggttgcagctttttcttttttctcttaatgggaattttcaattctttcttaacttcttcagtttttctagcttttaacataactccacccaattataaagtccrtccatttgagaaacacagaatatctaattaccaatttttgattctcattttgtattctgaaaaccatttttcaataatcataaaaacaaaagacatgcattttaaatgagatgtttttttaaaaaaaatctatcacatattcttaactgatttaatcatcacattacatgcctaccgagtatcattcaaataaatagcatatcatattttccatacttctcaactaaatatt

SEQ ID NO: 754501 - DNA, 624 bp, Homo sapiens
agcattgcacttttaacagagcggccacctttttccacatacgataggacaggttttggatatatggagtattaactgaaaagagcactatatatttcatagttctttaaagaccattgatatgtaaatcaatgtgtaagaagatatcgtttaagaggggttatggcacatggtggaaggaatgctgctttgcatttatcygtgtgaagtaatctgcctgtgcatctgaagaaacagcaggccccgccgcaagtgatgaagcagttctgtggagaaacccatttacaccagtttccagatgctattccaccagaaataattccaagaatatacttatattttaaataaatgataaaatcaatttccagatgaagtgtacattacaaagagaaacttggtattattatgtattaatccatattaactaaagttgaacctgacatcaaaatattgatcccttcttaaaatagacaaaaatactttgagttaaattgtttttcttcctatttgtgctagccggtgcttaaagtctaatgatgtgataattgaatagtaaaggaatctaaatctctactttcttgattcccagtgtgctaactttactaaaattgtgggaataagcaa

SEQ ID NO: 754502 - DNA, 500 bp, Homo sapiens
atataatttctgtaaaagatagcctgtaatttggttttagtttttattctgcaatggacttcttaatatgaaaacctattaaaataacttctttacctatgataaattttactaaataagtgaaaataaaaatcatcaaatacattaataataattttaaaataaaataattacataaaagagcaatttgtaagttttatagtctatagtaataaaatgcttaaacacctatagaatgaacagattactatcacacaattttaaattttctgtggraaaaaaacctaagtaaaattccagtctctgactttgcaagacagaaagaatcaaaatatcttgatttttgctcatgcagttacttctttataattcgctcttctttctctattctttcctaaaaagatgtggacttcaatgagtatcttctttctctaattctaccacataaagccaaactaattcatgtcccttcatagtattttatacatatatagattatg

SEQ ID NO: 754503 - DNA, 611 bp, Homo sapiens
aaggccaaaaaaagtgatcatttgaacagatgcagaaaaagcatccaataaaatccaacatcccttcatgatacaaaaaaactgggtatagaagagcatacctaacatgataaaggccatatatgacaaatccacagatagaattttaccgaatgtgaaaaaaatgaaaaccttttctctaagacctcagacaatgcaaggatgcttgctttcatcacgtttttcaacacagtactagaagtcttacccagagcaattagacagagaaagaaataaaaggcattcaaactgaaaaggaggatacattttctttctttgcaaattacatgatcttatatatatagaaaaacctacagacaccagcaaaaaacacctacaattgaagamcaaatttagtaaagttgtagaacacaaaaccaacatagaaaaattaatagtttctatacacccataaaaaagtaactgaaaaagaagttaagaaagtgatcctacgtacaacagctaaaaaaataaaatgagacacttagtaacaaatttatccaagaaggtgaaaaatctttacaataaaaattataaaacactaataaaatattaaagaaaatgcaataaaa

SEQ ID NO: 754504 - DNA, 566 bp, Homo sapiens
caggtgaaaggcaaacgaaaactacagtgagttgtcatcccatcccacttaaaatgtctagtattaagaaagatgaataataatgaacactagagaggatgaggataaaggtgaaagcatgtacactgatggaggtgtgtataaattagtagagccactatggaaaacaatatataagttccccaaaaatctaaaagtaaaactaccatatgacrcagcaatttcactgctacattcatatctaaaaataataaacagcatataaaagaggcatctgcattcccatgtttttgcagcactattcacaatagcaaaggcctagaatcaaccaaattgtccaacaacagatgaatggataaagaaaagagagtgcgtatagacgatggaatattattcagccataaaaagagtagaaactttacatttacaacaacatggatggaactggaagaccttaagtgaaataagttaggcacagaaatacaaatattgcatgttctcactcataaagactgatggttaccagaggctgggaaggtagtgcgaaggaaaggataaagactgat

SEQ ID NO: 754505 - DNA, 594 bp, Homo sapiens
agcccaagtgatcaacctgcattggtctcccaaagtgctggaattacaggcatgagccactgcccctggcttatagcaatatttttgaaaagatattccaaaagaaagaacagccagtgatttgttaacaagacatgcagaaatctaagagacacaagaagcattgtctaccaatattctgcaagtcacttttgtcaataaggtctccttgttttcccttcatagcttgctgctttgatgtatgcattctctcatcactcttcaagtaccgagttaaaatattttacaaaggaatatgtattgcctacttccacttatctaaacttcaatacgtcatgarataaacaacatattaatgagggaaaacaattcgatataaaacaataaataacaacaaacaaaagacaaaagtttcaaggtatccctacccactgaggagaagtaggtatatataatcagattaatttaccaaaatcctgtacatttatgtatatgattagtaatattctatacttaaactaaacacttagatagattttctactgagaaaagttagaaacctcattttatatatacttatcaatatttaataaa

SEQ ID NO: 754506 - DNA, 580 bp, Homo sapiens
tttcatatcatataaatttaattatgctaaatttaatttaatttactttacatgtggacaggctcaattttattccacatagaaaaaaatatttgaacttaactatttcagggaagcatttctaacaacatttggttcaaatgttattttttagaaaattatttcctgtggtgtttgtataatcagatatctagaacctgctagtttgatatagcctaaggagtttagccttcctgttcacctctcttctcccaaccagcagtagaaacacagagaccaaagcataaagaatttcagggtttgggctgctttttgacttatatcctctgtgttcagagcatttctttttttttttttttttcttttgagacggagtctcgctctgtcgcccaggttggagtccagtggcgcgatctsggctcactgcaagctccgcctcccgggttctcgccattctcctgcctcagcctcccgagtagctgggactgcaggtgcccgccgctacgcccggctaatttttttgtatttttagtagagacggggtttcaccgtgttagccaggatggtctcgatctcctga

SEQ ID NO: 754507 - DNA, 639 bp, Homo sapiens
gatatgtcagaagctgttcatagctaagggcaccaggcattaaggatggagactatcagaaaaaataataaataaataaaataaaatttaaaaaggctgaagaagtaaggaatcggtgggaaaagtagaaaataattgaaccctaattcttccacaagcactgtgggaatactgcagtaatgaacacgaaccatcgatgaaacggaggagacagatttgtgattttggtgcccgcagaagtaactcagccacarctccagtctaggaagtgaccaggacctgaggagtccaggggactttctggcagtcaggctgcacctggagactccacctcaccactagaaagcagaacacatctcctatgataacgttcggtttacccgatcccagggacagctgattcatatacagcatgattagatgctacaaggagaggaaaacaacagtatacaagaaatgtacaaattaaccggattacattctaggtggggagttgtaacacgcaacataaattataggtcattggttttctcagcacacagctggtgaacctttactgggtgcaggtactgagctaggaactatgaacaaaacattaaatatagcacttgtctcaaaggctgttctagagagatgcat

SEQ ID NO: 754508 - DNA, 639 bp, Homo sapiens
gatatgtcagaagctgttcatagctaagggcaccaggcattaaggatggagactatcagaaaaaataataaataaataaaataaaatttaaaaaggctgaagaagtaaggaatcggtgggaaaagtagaaaataattgaaccctaattcttccacaagcactgtgggaatactgcagtaatgaacacgaaccatcgatgaaacggaggagacagatttgtgattttggtgcccgcagaagtaactcagccacaactccagtctaggaagtgamcaggacctgaggagtccaggggactttctggcagtcaggctgcacctggagactccacctcaccactagaaagcagaacacatctcctatgataacgttcggtttacccgatcccagggacagctgattcatatacagcatgattagatgctacaaggagaggaaaacaacagtatacaagaaatgtacaaattaaccggattacattctaggtggggagttgtaacacgcaacataaattataggtcattggttttctcagcacacagctggtgaacctttactgggtgcaggtactgagctaggaactatgaacaaaacattaaatatagcacttgtctcaaaggctgttctagagagatgcat

SEQ ID NO: 754509 - DNA, 639 bp, Homo sapiens
gatatgtcagaagctgttcatagctaagggcaccaggcattaaggatggagactatcagaaaaaataataaataaataaaataaaatttaaaaaggctgaagaagtaaggaatcggtgggaaaagtagaaaataattgaaccctaattcttccacaagcactgtgggaatactgcagtaatgaacacgaaccatcgatgaaacggaggagacagatttgtgattttggtgcccgcagaagtaactcagccacaactccagtctaggaagtgaccaggacctgaggagtccaggggacttyctggcagtcaggctgcacctggagactccacctcaccactagaaagcagaacacatctcctatgataacgttcggtttacccgatcccagggacagctgattcatatacagcatgattagatgctacaaggagaggaaaacaacagtatacaagaaatgtacaaattaaccggattacattctaggtggggagttgtaacacgcaacataaattataggtcattggttttctcagcacacagctggtgaacctttactgggtgcaggtactgagctaggaactatgaacaaaacattaaatatagcacttgtctcaaaggctgttctagagagatgcat

SEQ ID NO: 754510 - DNA, 639 bp, Homo sapiens
gatatgtcagaagctgttcatagctaagggcaccaggcattaaggatggagactatcagaaaaaataataaataaataaaataaaatttaaaaaggctgaagaagtaaggaatcggtgggaaaagtagaaaataattgaaccctaattcttccacaagcactgtgggaatactgcagtaatgaacacgaaccatcgatgaaacggaggagacagatttgtgattttggtgcccgcagaagtaactcagccacaactccagtctaggaagtgaccaggacctgaggagtccaggggactttctggcagtcaggctgcacctggagactccacctcaccactagaaagcagaacacatctcctatgataacgttcggtttaccygatcccagggacagctgattcatatacagcatgattagatgctacaaggagaggaaaacaacagtatacaagaaatgtacaaattaaccggattacattctaggtggggagttgtaacacgcaacataaattataggtcattggttttctcagcacacagctggtgaacctttactgggtgcaggtactgagctaggaactatgaacaaaacattaaatatagcacttgtctcaaaggctgttctagagagatgcat

SEQ ID NO: 754511 - DNA, 642 bp, Homo sapiens
cagattagtaggaacagagggaaaatttctcaatttgagctatgaagaaaaatctacagctaacattgtacttgatgatcaataggacagggcagagaactcatacccacacaaataagccaaattaatttttgacaaaggtgcaaaggaaawtcaatggaagaaagccttttcaagaaatggtgctaaggaaattagcatacagaggcaaaacagagaaatgaacttttaaataacctacatcttgtacaaaaattaactcaaatgactcaaggatttaaatgtaaaatgtaaaactataaaacttttagaaaaaaaaaacaggcgacatttggaatctagggctaggcaaagagttcttaaactagtcactaaaaacaagttttataaaagaaaaaattgataaattggacttccccaaaattaaaaccttttttttctgtggaacagcttgttaagaggatgaaaaaacaagcttccgactgggagaaaatatttgcaaactgaaaaaagactggtatctaaaaatatattaagtactctcaaaactcaacagtaaataatgataatccatttacaaaatgtgggggaaaaaacatgaagagatattttacccaagggaatatacagatggcacatata

SEQ ID NO: 754512 - DNA, 578 bp, Homo sapiens
aaacaccttcgcagtcaagcaaacaatgatggaatttatcaccactatgctggctttacaagaaatgcttaaaggagtaagtactacaactcaaaataaaaggacagtaatttctgtcatgaaaacacacraagtttaaaactcagcagcagagttaagttcattaatcaaactcagaatattccagtgttgtaaagtattatgtaaatctttcaatcctatagtatggaggcttaaagacaaaataatcaaaacaacaatagctataattagtagctaagaaacatacaatacataaagaagtaaattgaggcaataaaatgtcaattgtgtgtgtggggataaaatctaaagtatttttatgcaaacaatgttaagttgctattagtttaaatcagtcaattataactacaagactcttcatgttagacctatgcaaatcacaaataaagaaattacagcagatacagaaaataaaaatgaaaaaggaaataaagttttgaagcacagaaaaccaccaaacgaaagaggtaaacaacaagagaaaaagacataatcaaaagatctacaaagcaata

SEQ ID NO: 754513 - DNA, 605 bp, Homo sapiens
ttcactgagacaggaaaaaaccaaactgttttcattgctctcgtgctcaacacaggatactttacttctggtcaagaaaatgtgtggtttccctacactgaccagttccttgcagacttccacctgggaatcctaaaatttaactcaattcttacactatctacaaggagatagtgtcagatcccatgggtgaaaagctcagtcccacaagactacccttcaccttagaagctgtacacaagtagtagttttcacctctacttctgactgaccagataaacaccayggttcccaaatcctctcctgcattcaactaattttctagaactgctattccatctgtctatctgcaacctttgtaatatcctttaaaacaaatgagtaaacccaactaaaacgtttctgagttctgtgagctactctggcaaattaataaatactgaagactgggtcatgggaatcctcaatttatatccagtagcttagaagttcaggttccaatctgggacttgtaaccgacatctgaagtggagaagtcttgtggactgagcctttaatctgtgggatccgatgcttacaccaggtacagctgtcagaagtgaggt

SEQ ID NO: 754514 - DNA, 605 bp, Homo sapiens
aaaggaccagcagcctccaagcgattttaacctccgaatttcttggcgacgtattaatatacctaggatggagggaacggcgggaggattttaagatccgtaagaacccctccgccaacaccaggtatagaagcgctggaagcatctaatctagacaaagggaaactcacccgctgctccaagaccggctccccacgcgatcggcttccgggtcttcaggaaactgcgcttggacgttcacgccccatgattcacttccgggtttccaggaaaccgcrcgcagctgaggccagggatgggcgagacccgagagaagagagggtggggcggtgaggggcggcggggtctgcgctgccttcggctgtctctgggcgcgtctgttctccaggtttttgaggaaagaccctatcggtgaccagcagccaagcagtctgggacctgggatcaaagtaggggacagtgattggacctaagatagttcctgcaattaaagttaattttagtattttaatttaaaagccctggaattgtctgggagaggaagcgaactagaatatgaaatgcaaagccctgcctgggcggaacatgcaatttgatgctgtcgt

SEQ ID NO: 754515 - DNA, 617 bp, Homo sapiens
tccaacttggatgacagagctagaccctgtctcaaacaagcaagcaaataagtgagaggcgtaattcctccttcaaaaataaaggaagagattttctttcatgtagtctcttttcttaggatatttatttagaaaatgtgtaaatgaattttctctgtcttctgaagcggtatgttatttgagacagagtttcgcgcttgtagcccacgctggagtgkaatggcgtgatctccgttcactgcagcctccatctcccgggttcaagccattctcctgcctctgcctcccgagtagctgggattgcacgcatgtgctgccacgcccggttaatttcgtatttttagtagagaagggtttttccgtgttggtcagactggtctcaaactcctgacttcgagcgatccgcccgcctctgcctcccaaagtgctgggattacaggtgtgagccgctgcactcgaccagaagtggaatttttttagaaaagaactaaactgttttttagcttaatgacccagggatgtatttccgaaggacttgggagctctctttgaaaggcaaccaacaacagagatagcacttgtgtctcagtaggaaattaaattattcaaacatcaag

SEQ ID NO: 754516 - DNA, 617 bp, Homo sapiens
tccaacttggatgacagagctagaccctgtctcaaacaagcaagcaaataagtgagaggcgtaattcctccttcaaaaataaaggaagagattttctttcatgtagtctcttttcttaggatatttatttagaaaatgtgtaaatgaattttctctgtcttctgaagcggtatgttatttgagacagagtttcgcgcttgtagcccacgctggagtgtaatggcgtgatctccgttcactgcagcctccatctcccgggttcaagccattctcctgcctctgcctcccgagtagctgggattgcacgcatgtgcygccacgcccggttaatttcgtatttttagtagagaagggtttttccgtgttggtcagactggtctcaaactcctgacttcgagcgatccgcccgcctctgcctcccaaagtgctgggattacaggtgtgagccgctgcactcgaccagaagtggaatttttttagaaaagaactaaactgttttttagcttaatgacccagggatgtatttccgaaggacttgggagctctctttgaaaggcaaccaacaacagagatagcacttgtgtctcagtaggaaattaaattattcaaacatcaag

SEQ ID NO: 754517 - DNA, 644 bp, Homo sapiens
caaggtagggagagtggcagcgaagagggaggctcatcagagtgagggagagagggaaggatttggagccagggcagacagagcagagtggtgctggtgtcaaggagaacagagggagaaacacagcagggaggacacctggggatctggggtgccacagggtcgggacacgggagtgtatcagggaagagaaaatttaacagggagaacagaggaggcrcagagatgggagaagaggcagaaatagagattgaggatgattgatatattggggagaaggagcaataagaggttaaataagttgtgaggatggagcagaagagttggaagagaaggaatagagagggaagaaagggataaacggcagaagaggagaggggcacaaaatgaagagcagaatcccaggaagaaagaaaagaaaacaagagctagagagagaaggggagaatgagagagatatacagaattagggagggaagtgcagtaatgaagacagaggggctgggtgcagtggctcaagtctgtaatctccacacttcaggagaatgaggcaagtggattgcttgagtccaggatttcgagaccagcctgggcaacatagtgagaacaccatctctgccaaaaaaataataataataataagt

SEQ ID NO: 754518 - DNA, 575 bp, Homo sapiens
cagtaagaaataactcagtctcgggctaaaaactttgccacattcattacatttgtaaggcttctctccagtatgaattatccaatgttctgcaaggtgtgaactctgagtaaagaccttgtaacattcattacatttgtaaggtttctctccrgtatgaattctctgatgtcatgcaaggtatgaattattcctgaagactttaccacactcattacatttgtaaggtttctctccagtatgaattctctgatgattgataagggataactcatacctgaagactttgccaaatttttttacatttgtaaggttctctccagtatgaattacaagatgggcagtgaggtctaaccactcgttaaatattttgccacattcattatgtttctgagactttctccagtatgaattcttcgatgttgtgcaaggtttgaattgcaactaaagaacttgccgcattcattacatttgtaaggtttctgtcctgtattcactcactaatactctgtaaggtgtgaattgcgactaaagactttgccacattccatacatttgtaaggtttctctccagt

SEQ ID NO: 754519 - DNA, 575 bp, Homo sapiens
cagtaagaaataactcagtctcgggctaaaaactttgccacattcattacatttgtaaggcttctctccagtatgaattatccaatgttctgcaaggtgtgaactctgagtaaagaccttgtaacattcattacatttgtaaggtttctctccagtatgaattctctgatgtcatgcaaggtatgaattattcctgaagactttaccacactcattacatttgtaaggtttctctccagtatgaattctctgatgattgataagggataactcatacctgaagactttgccaaatttttttacatttgtaaggttctctccagtatgaattacaagatgggcagtgaggtctaaccactcgttaaatattttgccacattcattmtgtttctgagactttctccagtatgaattcttcgatgttgtgcaaggtttgaattgcaactaaagaacttgccgcattcattacatttgtaaggtttctgtcctgtattcactcactaatactctgtaaggtgtgaattgcgactaaagactttgccacattccatacatttgtaaggtttctctccagt

SEQ ID NO: 754520 - DNA, 575 bp, Homo sapiens
cagtaagaaataactcagtctcgggctaaaaactttgccacattcattacatttgtaaggcttctctccagtatgaattatccaatgttctgcaaggtgtgaactctgagtaaagaccttgtaacattcattacatttgtaaggtttctctccagtatgaattctctgatgtcatgcaaggtatgaattattcctgaagactttaccacactcattacatttgtaaggtttctctccagtatgaattctctgatgattgataagggataactcatacctgaagactttgccaaatttttttacatttgtaaggttctctccagtatgaattacaagatgggcagtgaggtctaaccactcgttaaatattttgccacattcattatgtttctgagactttctccagtatgaattcttcgatkttgtgcaaggtttgaattgcaactaaagaacttgccgcattcattacatttgtaaggtttctgtcctgtattcactcactaatactctgtaaggtgtgaattgcgactaaagactttgccacattccatacatttgtaaggtttctctccagt

SEQ ID NO: 754521 - DNA, 530 bp, Homo sapiens
aagtaaattgtgccatgttaagatggacttataaactaaatcaactggaaaacagctgatttgttggtatggttcagcacaaccttaataagtattgtcatttccccagatttttatagaattatttcatgtgatagaacttcactaacgcaaatctatgaacattttactaagattcagattttacattatttatgaagaygggatatgccgagcaaattgacagatgaagatcctaggaatgttttatctatttgcagctgttttcaaatactgtagtagtaaccatgtgtgctaaagcaattaatgtgctaattacagatgtgcctttattctagtccttggagcagagtcagcaaggcctccgttcggcagggcttttcactttagtttgaataactgaatgtacttagaaataaaattgcctttaaaagaaagaaagaaagaaagaaaaactccaacttcatatggctcatgattccccagatttggatatcccactcattgaattcaccctgtaaaacacaaca

SEQ ID NO: 754522 - DNA, 359 bp, Homo sapiens
aacttagcctctataattgtgagaaacaaatgtctttcatttaagcctgactagactaagacactacccaacagaaaaaggcaacccaattccaacatttcctgatgctcaaccttacagcaaaagatggcccagagaggctcattcctctcccaaatcaagccaacaacaacaccaggcaagcccaataccattggcaaaggtgatggatagagaggygtgatgacaataagcagacagagattcatgctcttgccctgagattaccttcactgacaaagagacactgaatagtcaggcagcactagcaaggggatcctgccacaacaagcactagttttgggacatgctctccatct

SEQ ID NO: 754523 - DNA, 435 bp, Homo sapiens
acaatttacagaatatacgttgttttaaagatgtaaagtactgtgccttttggacatgctttcagctctttttctgaatcagatgaaaccaacgccaggttattgattaaaacattattaccttactgcattatagagtcatttttactgtgttccatcactctaatttatcaaagagcactatatgaaaaagacatatgaaacatactactacactttaaaaagtttcagwtgatattgtccaccatatcattcaatggttccatgcaaaattctatgtaagaaacgagtgtgtgtgtgtgcacacatgtgcatgggctagtgtgagggagggggtagagagagggaaaaaacgagaaaggtttaaggaggttgagtgcaaggacaaatcagacagcagttgtttaacccaagaaaatagtgtaaatcacgtat

SEQ ID NO: 754524 - DNA, 610 bp, Homo sapiens
aaaggatagttaaagcagtagaagcaggttaaagctaaattgttttgaaggatgctatgtactgacattatcatctgtggagagcaaaatatcattctttgcattttggagtgggaacttccacttatggggataaggttgagaacatggaktccagggcaaagacagtaagaacatggattatctgaatgtactgcatattgagtagggttgtcagatacagaaaaatcaaacagcaaaaacaaaacagaatgctgggttaaatctgaacttcaggtaaataataaaaatctttttagtacagcaatgttccatatgttccatgcaacattagggacaaacttatacaaaaagttatttgttgtttacctgatattcaattttattagggtatcttgtattatatctagtaagcctaatattgagggaaagaagaaaagagtttagaaaactggtatttgctctaactttatttctaaatgtaaatgctttcttaaactccagaaatgtatgcaattcaaattaaattgcattgaaacattctgtactatttgaatgtagttaattctgatattgcttaagttatgtcccttcctttggaaactctgga

SEQ ID NO: 754525 - DNA, 534 bp, Homo sapiens
tgcatggaaggcaaggatccagtactgttagaattcatcacctgctaactgggaagtccttgggctttgaataaccagcagtgatacccaggcactatgccaagggcattggatgagactctgaaacttgcttgcttcagatgagactcagcacattcccagatacagtggctatggagtgaaactctttccacttgagaaaggtgtaggaaaaatttaaggagactttgtcttataccttaggtaccagcttggctataggggcataagagcaccaagtgggctcttagggtcyctgattctaggacttggcttttggacatttctggacctgccctaggccagaggggagctcattgccctgaagggtgagtgctaggtcaggcagcattcacaagcttactggagagcccttgggacttaagagaacattggtagtagtctgacattacctcctgtggcctgtggaagtggtggccatggagtgaagctcctctgcctttggaaaggggaaggaagagtgggaaggatggc

SEQ ID NO: 754526 - DNA, 624 bp, Homo sapiens
cttccttgcccctcagcttgcagacagtctattgtgggacttcaccttgtgatcatgtgagtcaatactgcttaaaaatctccctctcatatatacatccatcctcttagtcctgtccctctaaagaaccctgactattacagagaaaaagtaaatacttccattttttttcacaaaagtatactttaccaaagtgttgtaaactatgttgtaaagcttaagtgttgtaaagcttaagagataacttttttaaaaatcttgaaaatatttaagtgaataatcattgttttacataaaaatcataaaaacattagctttgtcaattacttaatttcatgtaactaaatttttactgcctgatcttgatgatcacttctataaactcatacatttcttctttggaattctggaaatttttgttcagtccattgatcttaaagttatcagaagtctgtgttccagrgtacttcttagagactttttcttgaaaagcaattttgagctgtagctgattacatatgctattagagaataatttaaaacaataactgtggatgacaaaaacttaaaataaccatggttaaaagtctgatgaaaattcaaagttgacaaggaaatgtagtt

SEQ ID NO: 754527 - DNA, 576 bp, Homo sapiens
atacagtatatatcacatagataataaaggaacttcaaatcagacaaaatgacttcatatcttaagacatgcacccaacttcatcagttgattaaacactatacaaaatagctggaagctgacaggagtgacatcttttagaatgacttggattctctagattcaaatatatacaggaaaaatatgaagagaaaaaaactcttaattacatcttaacacatacaataaaaatagctcagacacccattgtgtttagggtttatttgaatagcatagtgtttattggcccccaactcgaataacatttgctttatcctgttttcattccttcttgacatytgatatccagatcacttcagctctaccttatccaagggtataaagtgggacatcaaatgttattttaaaagttataatgctcgggcaaggccatgtggtggcaagaacttgttttggagtcagtacacctaggttgctgtaatatagattattaggaggtgaatactatgatcaagtgaatgtaaatgaaaatattttataacctgaaatgttacccataatagtaaatactattat

SEQ ID NO: 754528 - DNA, 636 bp, Homo sapiens
cattagcaaagtcatgttcttgctgggaaggaactcagcgaagattttttgtaatacagtattaacccactgaaatgtaactgagctctaactgggtcatcaaaggaagcccctgagtttaggaaaataaaaccctgccttgactctggctagtgctaattatacaaaaatgtccagtygatgcacttaaccatgcttgaaactttcaattttagataatttgtattcaaacttacatggttaccagactaaccatgagagacagacagagaagaaatacaggtgagaggactagcaaaatttttctttccagtttttaatttcatgttccattatatgggataatagcatcgtcttgcaattttaatgtgatgtcccggaccataatattcaaatacaatatttatgcagtcatctccaaaatgaaatattcatgggattgggagatgggttgctgtatttatcacattcaaaaactgatatgctgcaaacgcatgctttggttaactaagagtaaatggagacaaccaattccctaggtctcagaaaagtttctggagtcacaggggtgaatggggacttaagtcttggactaggagatggtggcagaggcccagcaacagggtatctaccagg

SEQ ID NO: 754529 - DNA, 636 bp, Homo sapiens
cattagcaaagtcatgttcttgctgggaaggaactcagcgaagattttttgtaatacagtattaacccactgaaatgtaactgagctctaactgggtcatcaaaggaagcccctgagtttaggaaaataaaaccctgccttgactctggctagtgctaattatacaaaaatgtccagtcgatgcacttaaccatgcttgaaactttcaattttagataatttgtattcaaacktacatggttaccagactaaccatgagagacagacagagaagaaatacaggtgagaggactagcaaaatttttctttccagtttttaatttcatgttccattatatgggataatagcatcgtcttgcaattttaatgtgatgtcccggaccataatattcaaatacaatatttatgcagtcatctccaaaatgaaatattcatgggattgggagatgggttgctgtatttatcacattcaaaaactgatatgctgcaaacgcatgctttggttaactaagagtaaatggagacaaccaattccctaggtctcagaaaagtttctggagtcacaggggtgaatggggacttaagtcttggactaggagatggtggcagaggcccagcaacagggtatctaccagg

SEQ ID NO: 754530 - DNA, 636 bp, Homo sapiens
cattagcaaagtcatgttcttgctgggaaggaactcagcgaagattttttgtaatacagtattaacccactgaaatgtaactgagctctaactgggtcatcaaaggaagcccctgagtttaggaaaataaaaccctgccttgactctggctagtgctaattatacaaaaatgtccagtcgatgcacttaaccatgcttgaaactttcaattttagataatttgtattcaaacttacatggttaccagactaaccatgagagacagacagagaagaaatacaggtgagaggactagcaaaatttttctttccagtttttaatttcatgttccattatatgggataatagcatcgtcttgcaattttaatgtgatgtcccggaccataatattcaaatacaatatttaygcagtcatctccaaaatgaaatattcatgggattgggagatgggttgctgtatttatcacattcaaaaactgatatgctgcaaacgcatgctttggttaactaagagtaaatggagacaaccaattccctaggtctcagaaaagtttctggagtcacaggggtgaatggggacttaagtcttggactaggagatggtggcagaggcccagcaacagggtatctaccagg

SEQ ID NO: 754531 - DNA, 636 bp, Homo sapiens
cattagcaaagtcatgttcttgctgggaaggaactcagcgaagattttttgtaatacagtattaacccactgaaatgtaactgagctctaactgggtcatcaaaggaagcccctgagtttaggaaaataaaaccctgccttgactctggctagtgctaattatacaaaaatgtccagtcgatgcacttaaccatgcttgaaactttcaattttagataatttgtattcaaacttacatggttaccagactaaccatgagagacagacagagaagaaatacaggtgagaggactagcaaaatttttctttccagtttttaatttcatgttccattatatgggataatagcatcgtcttgcaattttaatgtgatgtcccggaccataatattcaaatacaatatttatgcagtcatctccaaaatgaaatattcatgggattgggagatgggttgctgtatttatcrcattcaaaaactgatatgctgcaaacgcatgctttggttaactaagagtaaatggagacaaccaattccctaggtctcagaaaagtttctggagtcacaggggtgaatggggacttaagtcttggactaggagatggtggcagaggcccagcaacagggtatctaccagg

SEQ ID NO: 754532 - DNA, 525 bp, Homo sapiens
tgttcacccaagcaatgaaccgactcaaccatcaatcccttcttacctaaggatgacatccctcccccatgcctggcatcctcaatcctcctttcatgctttgtatttctccacaggacttttcactttctaacacaatatacaagatatttatttagtctgttgtctatttccactcactaratgtaagctgcaagatggcagagatttttgcctatttttgttcactgctgtatccctactgcttacatcagtgcctaccatacaactggtgcttaataaatatttactgaaaaaatgaataaaaagaagggtaacagccacacctgttgggcaatcaggcagtcacagactttcgttaactaggtattggatccttctaacacacatttaacagaaaagaaaattgaagctcagaaaagttatgtaactttcccaaggtcacacagccagaagtcttgaatttaaatgcaggtctagctggatccaatgcaagctcttaactactctgccatctttgatgcc

SEQ ID NO: 754533 - DNA, 525 bp, Homo sapiens
tgttcacccaagcaatgaaccgactcaaccatcaatcccttcttacctaaggatgacatccctcccccatgcctggcatcctcaatcctcctttcatgctttgtatttctccacaggacttttcactttctaacacaatatacaagatatttatttagtctgttgtctatttccactcactagatgtaagctgcaaratggcagagatttttgcctatttttgttcactgctgtatccctactgcttacatcagtgcctaccatacaactggtgcttaataaatatttactgaaaaaatgaataaaaagaagggtaacagccacacctgttgggcaatcaggcagtcacagactttcgttaactaggtattggatccttctaacacacatttaacagaaaagaaaattgaagctcagaaaagttatgtaactttcccaaggtcacacagccagaagtcttgaatttaaatgcaggtctagctggatccaatgcaagctcttaactactctgccatctttgatgcc

SEQ ID NO: 754534 - DNA, 525 bp, Homo sapiens
tgttcacccaagcaatgaaccgactcaaccatcaatcccttcttacctaaggatgacatccctcccccatgcctggcatcctcaatcctcctttcatgctttgtatttctccacaggacttttcactttctaacacaatatacaagatatttatttagtctgttgtctatttccactcactagatgtaagctgcaagatggcaragatttttgcctatttttgttcactgctgtatccctactgcttacatcagtgcctaccatacaactggtgcttaataaatatttactgaaaaaatgaataaaaagaagggtaacagccacacctgttgggcaatcaggcagtcacagactttcgttaactaggtattggatccttctaacacacatttaacagaaaagaaaattgaagctcagaaaagttatgtaactttcccaaggtcacacagccagaagtcttgaatttaaatgcaggtctagctggatccaatgcaagctcttaactactctgccatctttgatgcc

SEQ ID NO: 754535 - DNA, 571 bp, Homo sapiens
ggaattatgacaaatgctttctttgcagttcctttaaggactgtgtctctcttgatatagctttctggcttaaaaaacgtttgcctagtgcctgcatctgtttacagaaaatctgacgtgttggtaaatttgcaccttgagtgtsctccaagtaacagctttagtccaaacccaggttctaagggcaaccatccctagccttttaatcacatacatcactctctattacttaatcattgttattattattattattgagacagagtcttgctctgtagctcaggctggggtgcagtggcccaactgctgctcattgcaacttctatctcccgggttcaagcaattctcctgcctcagcctcccgagtagctgggactacaggagtgcgccaccacacccagctaatttttgtatttttagtagagacggggtttcaccatattggtcaggctggtctggagatgcctttttcatcaacagatcagcatggccatgtgtgcgctgaaggcttaaggttgctagatctttccatttatcttgagggaagctggagatcttgaaatttaaatac

SEQ ID NO: 754536 - DNA, 611 bp, Homo sapiens
tgttgccaacacaagcccaagtgtggccggcaagcactgtccttgaccacgcaagaaaattgctgggatctcggaggactaggcacgagagatgttactaacgtgaaacctgaagagggatcccaggcagaatgcaggatggaagatgaggatgttttagaggctgtcaaggtcctgttggtgaccaatacaggatatactgttataaccaatacaggcttttcacagggcagtttgatgctgtctatcacaatttaaaatgggcaagctgtttgacctgccaattctattcttcagatgctctgtagcagccagtctcaactcaggatccccaagagaattaagctcgaatgtcctggggcatccrttgtaggtagcaaattagcttttctctgatgtatccagaatggtactagttatgtacatctttgagagatctgagaaaacagtcacttagtatagtaaaaaactggcaacaacctaaatgtccctcaataggggaatgaccaattacactgtggtgtatccatacccagagttatatggtcagctactataaagaaataacttaggtctctagctccaggcaaggaaacagacctcagacctgg

SEQ ID NO: 754537 - DNA, 634 bp, Homo sapiens
tgcaaagccatccggagataacctcagcatgaccaggagaagtgcaggaacccctggcctaagatgctgaggttctgatttttttgaacaactgtggagcagtcataaagcaaatagggatgcaatgtacattagcactaccaggtacagttcttagctgtgtactaggcccttggaaaccctctaagctaagtgtgatgatgctcatctcccctttacagatggagaaactgaggcacagagaggtcaagcaacttgcccaaagtcctacagcttgtgcacgggacacctgggattcagatccacgtggtctgcctccaccaccccaggctcttaagcactgacagcatcagcacccctggyttcccaataatgccctgccttcttctcccttgcaacttgagagagagagagagagagagagagagagagagagagagcgagcctgcaggtggaagaacacctctggggcttgacaatgtgagataaagtgacccttctgcctccccaagagggacaggcttatggaaagggatacaggctctgtaacatgagttccagtaccagctctgtcatctgctggccatgtgtttctggccaaggactccccttccttgagcctcgatttcctcac

SEQ ID NO: 754538 - DNA, 473 bp, Homo sapiens
ttctttcaacagagatgggcgtctcactatatggaccaggctggtctcgaactcctggccttaagcgatcctcccatctcagcttctcaaagtgctggggttacaggagtgagccaccgtgcccagcctctatttgggtctttttttttttttttttttttttttgtcttttttttggagacggagtctctctctgtcacccaagctggagtacggkggtgcaatcttggctcagagcgacctctgcctcccaggttcaagcaattctcctgtctcagcctcccaagtggctgcaactacaggtgcgtgccaccatgcctggctaatttttgtatttttagtagagacagggttttaccatgttggccagcctggtcttgaactcctggcctcaagtgatccgcccacctcggcctcccaaagtgccggcattacaggtgtgagccaccgcccccagcctatatggggcgttt

SEQ ID NO: 754539 - DNA, 740 bp, Homo sapiens
aggaaaaccgtattttctgtcagtccttattatctctgtatcttcagcacatagctgcttttaagaactactggagaagcagttacttgatgacttaatgtcaggagagcaaacttcagtgatgcttaccactaagtagctgtagggccacacctggaacacagcgtttctttgcaccayggtagtcccatctttgaaattcatgcagcttagaattacaatatgtaattatataaaatatgttatataaggccgagtgtggtggctcacacctgtaatccccgcagtttaggaggctaaagtgagaggagcctaggagttcaagaccagcctggacaatgtaggagagaaactgtctttactaaaaatcaaaaaaattagccaggcatagtggcatgcacttgtggtcccagctacttgggaggctgaggtgggagaatctcttgagcccaggagatcgagactgctgtgagccaagatcacaccactgcattccagcctgggtgacagagtgagaccctgtctcaaaaaaaaaagaaaaaaaaagagaagttatgagactttaggaaatgctacttatataggcaatggcttaaagttatttagtatggaaaatgctttacttgacctttacaagtttgaaaactgctctactttatccaaagctctcccttaaggagctgatagaaaagatagccattgaggcattgcctttgctggctgcctgtcttttcgccgtg

SEQ ID NO: 754540 - DNA, 487 bp, Homo sapiens
ggtggcgccatcttggctcactgcaacctctttctgcctcaagcaatcctcccacctcagcctactgaatagctgggactacaggtgtgcaccaccacacccagctaatttttgtttttttaagtagagatagggtttcactatgttgccccggctggtcttgaactcttaggctgaagcgatccccsatctctacaaaaaagttttaaataaagttagccgggcacagtgctgtgcacctgtagtcccagctacccaggaggctgaggcggaaggatctgttgagcccaggagtttgaagctgcagtgaactatgatggcaccactgcactccagccaaggcaactgaacgagaccctgtctctaataaataaataaataaaaatgaggcttttgaacttctttcagttagtgaaatagtatcagttggagtaagagctccttttctgaagattaagaatatgtgtcttactttgctcttctcatt

SEQ ID NO: 754541 - DNA, 623 bp, Homo sapiens
ggcaggctgggcagcatggctcgcgtggcttccaggcagcaactcctctcccaaggcgaaggaagccagagccagagcgcaaggctctgggctttgtggtcagagagcggctgagttcagatatcatttcctagctctgtgacactgggcaagtcacttaaccactctgagcctcagcttgctttatstgcaaactgtggcttccttgcaccactctcacagggtctgtgtgaggattaaaggaaaaaacccatgcaaagtgtttggttgggcctggcacggagtaaaggctcaagagctgtggtgccagagagcagcttcaggggcttagcccagcagcatctcagagcaatcccctatcaacaaacaaaaaggatgttccggctctgcaaacacggttactagacgatcttcgaatgcctcttcttgcatggaatgactgctctcggcttctgctctttgcaacctggaggtgccattgggatgccctggcagcctcgcatcttactttaattattattttattttatttttatttattgttgttttattgtttattattgttggcaagacgccgtttgcatagtaaactgagactgctgcatgacttttattttattggc

SEQ ID NO: 754542 - DNA, 429 bp, Homo sapiens
taatgtattcttttgtgcccatatgagatgcctccatgctattgcttgtagctagtttattaattttcattcccatagaatattccattatgaaaatataccacaacttatttatctattctaaaactgctagctatttagatctccagtttagggttgttatgcgacaatgaatgttttttggggtgaagcaaagatggccaaataggaacagctccagtctacagytcccagcgtgagcgatgcagaagacgggtgatttctgcatttccaactgaggtaccaggttcatctcactggggagtgtcagaaagtgggtgcaggacagtgggtgcagcgcaccaagcatgagccaaagcagggagaggcatcacctcacccaggaagctcaaggggtcagggaattccctttcctagtcaaagaaaggg

SEQ ID NO: 754543 - DNA, 621 bp, Homo sapiens
actgtgaagtgtaatgaaataaggcagtggaagtccatttttaaaatttagttattcatcttctgaaaaagtacaaagaagggctacctattggtgtcagtccttgtttttgagtaggacccctcctaacacagcactgattaccattctttaaaaaatgactggttcaacgataaacactaaaacttgtcatctgtggcttatttgttcactatraaaacctgtttctggtttacattaactatttttaaactaaaaacctcattctcttctgattgctcataagatattaatctttaaaagttctgtttcaaaatatttcatgaatataaagctttttccgtacttctaagactactacttataattctattaattcttttagaaaactgtaaacacagtattttccaagtgaaacagaatcaaggattgtgagattctgtttccaataaagcccagctcaaactcctttggccccttatcctggtacaaatttcttttgggccctcactatgtcagtttccacctatatactaatagctttgcatttcatgtgcttctggcatttgatattttttctttatctaaaggttatatatgtgtgtacaactttaacgtgtt

SEQ ID NO: 754544 - DNA, 574 bp, Homo sapiens
tcctgggctcaagggatcctcccacctcagcctcccaaggtgctaggattacaggcatgagccactgcacctggctttcctttcttttaataagactacaacgactgacttatttagccaattgaaatgcaatgccataggatcccctgggagtggcttcaaggaaaagggaatatatcactgataactcctcagggtttaatgggctttgaacatgactgccaaagttccacattgcaaataagcatttcactgcttttcaagactaaagaaaatgtagaaggaggaaattgcctttgaaaactaaaactttctccctgcattccacattcactctactgtgttctaaccaaygacaatttagttggaagccccagtcttctgcttttctttcttctctccctttggcactcctaggatcccagtaagtttggaatgaagaagtctggattgaaatgtatagttgttggtatttcttcccacagctgctggtgctttatttatttatttatttatttatttatttatttatttatttatttattgagagggaatcttgttctgtcattctgtt

SEQ ID NO: 754545 - DNA, 810 bp, Homo sapiens
cctgtgaaaactggcacaagacagggatcccctctctcaccactcctaatcaacatagtgttggaagttctggccagggtaatcaggcaggagaaggaaataaagggtattcaattaggaaaagaggaagtcaaattatccctgtttgcagatgacatgattgtatatctagaaaaccctatcgtctcagcccaaaatctccttaagctgataggcaacttcagcaaagtctcaggacgcaaaatcaatgtgcaaaaatcacaagcattcttatacaccaataacagacaaacagtcaaatcatgagtgaactcccattcacaattgcttcaaagagaataaaatacctaggaatccaacttacaaggaatgtgaaggacctcttcaaggagaattacaaaccactgctcaacaaaataaaagaggacgcaaataaatggaggaacattccatgctcatggataggaagaatcaatattgtgaaaatggccatrctgcccaaggtaatttatagattcaatgtcatccccatcaagctactaatgactttcttcacagaattggaaaaaactactttaaagttcatatggaaccaagaaagagcccgcattgccaagtccatcctaagccaaaagaacaaagctggaggcatcacactacctgacttcaaactatactgcaaggctacagtaaccaaaatagcatggtactggtaccaaaacagagatgtagaccaatggaacagaacagagccttcagaaataataccacacatctacaaccatctgatctttgacaacctgacagaac

SEQ ID NO: 754546 - DNA, 610 bp, Homo sapiens
gcatctgggctgtatgttacagacacaatcaatccaaagacatattttactgggtattataaaaactttttgtgtttctgaggcagtccccaaattacagatagtgctatattttaatcctgttgatcacagagattgcagccagttatgttgtttcagcttcaatgtgaatgatgtatgtgtgtatgtgtttattatacagttacggagttatctgcaaaactgtactgctaatttgtttaaaaacatgatttgggwccatatatatttatttcacactagaaatcaaatcatgtgtgagatttatatatacacatataattttatagtgtatgtgtgggggtgtgtgggtgacgttgcaatagtcccccctcttccacagttttgctctacatggtttccgttacccatggtcaacctcagtctgaaaatattaatgtattttgagagagaccacattcacataacatttattatagtatattgtaataattgttgtattttattattattgttaatctctttaaacttgatcacaggcatataggaaaaaaaagtgtatatagggttcagtacaatctgtggtttcagacattcagggggtcttgga

SEQ ID NO: 754547 - DNA, 626 bp, Homo sapiens
ggtttttttttatgttatttttcctataaagttgattttatctcaatatttagcaatgacaaattctatgaatctcataaaaacatttataaggagaacatttgagtgaccttacacaattttacctaaatatacagatatggtacgcaaggttttgcacacacacatttagactcttctctgtattcaccatgagttatttaaggtatctcttgagagactattttgacaacaaggttttaagctagcagataagcttccacattagtcctgtccagacacaaagcccccgttaaaagagcaagagaaatagcagtacttacagcacttccaggtcccggagagccctgaatgccccatcttcaatacagctgatctggttgtaatccagttgcctgttaaaaagattagaagaatatatgtagaagggatggacagtagctggggtaggtgatgagaagtttcctgaagggtctatgatamcctggacacactcactgaagtgccctcacaaacacactcatctgcttacgaatgtcataagccattctcgcctctatgccgccactgaaatctttttgttctgaactgtctgtgcaaatagcagcccttggaaagctccagta

SEQ ID NO: 754548 - DNA, 611 bp, Homo sapiens
atgtttatttaattcctaggaagggtccttgagatttttttattaattaatgaattcattaagcattaatttattcaattaatgtttacagagcaccagccctttacaagatatcatgatatcccagagctacagcagtaagaagatgcagtggcaggaaatttccattgaattgaattattttccttcttcttttttatttatttatttarattgtcattctagcatatttttcttctttttttaaaatttttctagtcttccatagctccctgttgcagttatggtacttaccattttatgggacatttacttcattgaatgcccaagtctccaccgtgattgtttgttcttccaggacagagcacaatagcttatttattttggctctcaattatctagcataggggttggtaaactatggcttctgggccaaatttagcttgctgcctatttttatatggcctatgagctaagaatggttttcacatccttaaatgcttgaaagaaatcaaaagagtaataatttatgatacatgacaatgaaaattatatatgaaatataaatttcatgggtatcaccagcggagcctgcagaacagcaaaaattg

SEQ ID NO: 754549 - DNA, 591 bp, Homo sapiens
taattttcttctaatgatccaagttttccaacttttcactgcccagcactgccagggctctgaaaagattccacttccttacaccatcaagacaaagggacaataatactaacagggaatgtctgtggtaaaaaatgccagcgtgactcatgtcatactctccaagggtctccaggagtataaaattcttgaggtcaggtattgggttacacaaacctttatgccatctataaaacctaacaagaaacttttcaaaaaaagtccctgattaaaattgtcaaatgttaatgactaaaagaaggcaactaggtggagatagatgggctaaaatgtgttagtgttttatatatagcatcaggaatgtatttgaatatgggtttattcccagaagaatgtctcatgtaataatgtgttgaaacaaccaaattaactgtcagtaytacgtatgataccaactactacaatgcttgccagaaggcaagagtatctagttgaggtcaactgtttataggctttttctttctctttctcactgatcactccaagaccaggagtgtctcccaaacaaggatcatttttatgcatatttta

SEQ ID NO: 754550 - DNA, 646 bp, Homo sapiens
taaagcaaatatattaaactaattttcattttggtaaagaaataatattttgagaaatattaatgtaacttgggtttgaaaaatgctgtatcaaatgtgagatttttttaatctcatggacagtaaaatgctattctctgaaacagatgaaaatatgcttttttattaaataatatatttcaaacgtaacatatttattatgaaattgtgctatgatcttaaatatattctaaatttaggtaaattaaaaattattctagtaattggacaaactatttctgtcgaattgtgatttgtgtgcatgcaaatggagataaatttgactaaactccataatgtaacattgtcaattttttctaaaacgtgtaacctcttcaggttctgagtctaggaactaggcaattgcctctttgcttacaaataaaatatttgggatatgtaaacagtggttaactgtcacttgtgaattattattgttcaaatggtaggctcttaggagtaamttcaaaattattttaacaatatatttttcatcaaaaatatgtctttaatgttgatgtttcattctttattactacagaaatggtaccttagtttattaaagtttttctaccacatgaagcatacacagtatttagtatatggt

SEQ ID NO: 754551 - DNA, 611 bp, Homo sapiens
  misc_feature 438, 439, 440, 441, 442, 443, 444, 445, 446, 447, 448, 449,450, 451, 452, 453, 454, 455, 456, 457, 458: n = A,T,C or G
ctcttttagaattgggtataaagtgatatgctaaatgtcttttaattttacatacaagcaatcaaaggagaaatggcttggcgttcagatcagcatgtcagagataggtgaagttacactggtgtgttgggtgtttcctgatgaatatctctgaagacaatggagaaatgacacacatgagacatttccagcagacctgagttaactctacgcagctcagcaggactccattcatctgcytcacaacaccaccaaatcaccacaaaatatttatttaaattagaatacaatatattggattcttttgaaaaattcacaatattctaaattatattttagaaattatgcaatagataaatgagaacataattacaaaaataattttcaaattcattgcatttattgtaaactttcttcttccaagggtttgaatgaacnnnnnnnnnnnnnnnnnnnnnataactaataaataaatgtaaaaactttaactttttgcaagctagataccaactgcagagaagatgagaccctgttttatgtaagtgttgttagtacctgttctcatatttttttctcttagaaacagagaataaaaagctaaaaacaaaggt

SEQ ID NO: 754552 - DNA, 600 bp, Homo sapiens
aacaataccatatactctccctagcactttccatgaggcgacccaaagtggtaacaattaacagttgctgtgtatgaaacggcctcgctcaggaggaaacacggcccctcagatgaactggtaagtcaaaactgtgaaaggtctcaatttcagatttgaccataattacaagactggyataccacaatttcacatgtgtatactgagaaaaggcatcagatccctggatcagagacacaggtgtttttttggtaacaatagaagccacagctggcttctcttcatcacttccaaaacccccacagagtgacacaaattgcagctatatgttcacccgtgcatgcaggaggtcatatcacagaattagaaccccaaaattaagagaatctgatttttcatcagagtttctggtgaccaatctcttccttagagacagattacgcatgttaaacgcaagtttagactaaaactgcctccttacatattttaagctcgaacgaaaggtttttgtgtacgtagtgaacaataacaagtggagctgtggtaaacagaccgtagcctacacttgtgccaatcactgagttttggccagtcaaatgt

SEQ ID NO: 754553 - DNA, 600 bp, Homo sapiens
aacaataccatatactctccctagcactttccatgaggcgacccaaagtggtaacaattaacagttgctgtgtatgaaacggcctcgctcaggaggaaacacggcccctcagatgaactggtaagtcaaaactgtgaaaggtctcaatttcagatttgaccataattacaagactggcataccacaatttcacatgtgtatactgagaaaaggcatcagatccctggatcagagacacaggtgtttttttggtaacaatagaagccacagctggcttctcttcatcacttccaaaacccccacagagtgacacaaattgcagctatatgttcacccgtgcatgcaggaggtcatatcacagaattagaaccccaaaattaagagaatctgatttttcrtcagagtttctggtgaccaatctcttccttagagacagattacgcatgttaaacgcaagtttagactaaaactgcctccttacatattttaagctcgaacgaaaggtttttgtgtacgtagtgaacaataacaagtggagctgtggtaaacagaccgtagcctacacttgtgccaatcactgagttttggccagtcaaatgt

SEQ ID NO: 754554 - DNA, 523 bp, Homo sapiens
gtttttatgattattaatatggtcaagctcaagattgaatattaacctaccagaatgattccaaaactaggtagttcccttaaatactatctaacccagaaattttatagatatagttaattaatgaagttagctggaagccttcactatataaactactgtgggctgataaacacctaagaagtgtcatattttttcatttgtacaaaagggaagattataccagaccatctttaaggtctactccagttctaactttttatgatttataaagytaacttattcatatttgtatacaaagaataaaacaaggataattatgacctcatcatcatattaagggaggtttcgctgtatttcctgattcaactttataatgatgtcaatcaatttgtggtagtgttagtagtttataaccacatagtcgcttaagcagatgattttctttttacagattcactttttggtgaaaagaaaatacgttaagattttttaaggaacattctcaccttttgtttctatt

SEQ ID NO: 754555 - DNA, 543 bp, Homo sapiens
ctgaggaactcaggaataatctgcatgggatcacttaaaggaatatttacaaaaattgggctctcccatttcttgaatcgaactcagtttcagtccacaacctcatccacagacagaaagcaggatcagtatccaagagtctctgaacagttatctctttgcctacctttccagcatcccagaaggattttccccccaattctacccctgattctcattcartgctctcttatctggttggtgctgataaagagtttggtcagagaaatttgattagaaatccaattctctgtaagagtcatccatctggcactaatgaaaacatgtttggaatgaatttcttttgatctgcattcacagccagtttaagagcctcacccctgcactctagcctgggtgtcagaacaagactctgtctcaaaaaaaacaaaaagaacctcacccaacctttctactttgtggccttgcctcgtttttgaccccaaactattctttacattattaactgaactttgtttcaagtcatctctagtgaagggcaaa

SEQ ID NO: 754556 - DNA, 635 bp, Homo sapiens
ttatagaagtaatttcaatccaaaagaattaagcttttaaataagacatatttattgtgctaaaaaacatgtattttcatcttcctaatacactaaaatggcacacagaataatagtgtagcacacaatacaaactgatatgtgcaatcaataattctaaaaattgttgttttaagtctttctttggaagtccttaaatgcaaaagaagaaatttttaattttgtttaatttttaaaaacatttttcagggttttctaatcctggtttaaatagtttatgctgaaatcccagttaatctggcttattcactcaaaagaaaggaattgtttaaatcaactataattaagctgatggttgcatttcargctttgaattccgatcaagtttcaaattggttattattttggaggttgtgctttcatgttcctaggtatttctttgtttgactgtgaaaatatttaagtgtgaaaaacctagagagagagctttcttttaagtcactaaaatcggattcttttgatgttagaaaaaaaagagactctagattgaaggaagaagcttaaattgatttgaaaaattaaagtgtgctttatatgaacttgtttcaacatcctcttgaaagactggcgtgtct

SEQ ID NO: 754557 - DNA, 600 bp, Homo sapiens
agtgaaataactcatgaatggaaaactaaacatcgtatgttctcacttataagtgagagctaagctatgaagacacaaaggcataaaaatgatacaatggactttggggactcagagggaagggtggaagagggggtgaaggataaaagaatacacrttgggtacagtgtacactgcttgggtgatgggtgcaccaaaatctcagaaatcaccactaaagaacttatccgtgtaaccaaaccccacctgttacccaaatacctattaaaatattttttaattagaagaggagagaacacttttcaattcattctaaaatgctaacattatcctaaggccaaaacaagataaagacattacaagaaaataaaactaccgacaagtatccttaataaacatagatgcaaaagtgctttacaaaattttggcaaattgaattcaacaatatataaaaaggataatatgaataacagctgggagatatcctaggaatgcagcattcatttgacattcaaagatcaatgaatttcaatatattaacaaactaaaaaagaaaaataatatgaccgtatcaattcaggcagaaaacacatttgacaa

SEQ ID NO: 754558 - DNA, 605 bp, Homo sapiens
aaaaaaaaaaagaaagaaaagaaaaggtctaggaaaaaatgaaaattccaacagtaatgagaatcaaattataatttgaatgattcaaattataatttagaaaatatcaatttagaaaagattaagagacctaatttattcaattgtttagagaacaaatttaggctcacctyaatcctaactattctgtcattttgagtaatcaatggagacaagttctgttaaaaatgtccacaattaatatttatttgaaaagtgtagatagataaaatgatcttagactcatttgtaggaattctgaaagaaagtttttaattacctttaaacacagagggctctggagatctgagaaatatttctgatttatataaaggggcagatgtcaggatagcaatttccagtttaaaaatagtgctactaaacatagcttttatatgatagtaaaaataatttgactgcttagtaaggtagaagacagtgcaataagaacaaataaaacaaggtatgagataataggggtggctctagcttcagaagagtgcctagaaacagtacagagatatgaatgttttggacactcactgtgtttgtggagaagaataact

SEQ ID NO: 754559 - DNA, 602 bp, Homo sapiens
ttccagatagctgaacatgtagagatttggggagggtggctccacgtcatttctcacatctcttgccctatgcatctcttcatctgtatcgtttgtaatatcatttatagtaagccagtaaatgtaagtaaagtgtttccctgagttctgtgagctgcttcagcaaattaatccaacccataaaaggggttgtgggaaccccagtttatagccagtggatcagaacrtagacataataacctgagctgtgcaattagcattggaaacggggctctgtgagactgaactttcaaccagggggatataatgctgtcttcaggtacatagtgtcagaattgaattgaattagaggacacccaactggtgtccactgcagaattaattgcttgcttgccggtagagagaaaaccccagacatctggtcagacatgtgttttgagtgtatagtagaagaaactgaatgttttttcctactcagccccaaagttcatgtgttggaaacttaatccccagtgcaacagtgttaggaagtggggcctaatacaaagtaattgggtcatgagggccctgctttcaagaatggatgaatgtcattattatgg

SEQ ID NO: 754560 - DNA, 459 bp, Homo sapiens
gaccaataagaagttctgaaataatagtaataaatagcctagcaaccaaaaaaagcccaggaccagacagacatatagctgacttctaccgcaggtacaaagaggagctggtaccatttcttcagaaactattccaaacaattgagaagtagggacatctccctaactcattgtatgaggccagcatcatcctgataccaaaacctggcagagatacaacaaaaaaagaaaacttcttcttcttttttttttttttttttttttttgtggycaacatccctgatgaacactgatgcaaaaatcctcaataaaatactggcaaacagaattcagtagatgctggagaggatgtggagaaataggaatgcttctacactgttggtgggagtgtaaatttgttcaaccattgtagaagacagtgtggtgattcctctagaatctagaggaatctaaagtttc

SEQ ID NO: 754561 - DNA, 619 bp, Homo sapiens
atcttgtttgcagcctgtgagacccttagcagaggacctagctaagttgtgcctggtctcctgattcacagaaatattacaaaaaagtatgattttaagcaactacatttatggcaacttattacacagcaataaaaaacaaatgtaataatttattcagaarttatgtataccactcattctaatagaaccatacagacactttctagaatctaggcttaggtagatacattcctgaggctctttcaattctaaaactttgggctcaggaggtaagtgtcataaactcaaatgcattcacagttgacattgtgacatgtagtgtgaagtggtcctacagtaagacaacgggtctacacttgtaccattgctatcaccaaaggcacacttcctgcctagttacagtattttaaaacactcttcagaccaaatgaaatgaccagaaacattctatgatcacatgaattttatggcctgaagagtgagattctactctaggattacccgtttagaagaatgattgagagatgacattttatagtctatctctctaaaataaaatttaaaacaatatagttttttgtgccaagcagttaggaaatctgatatacaaatatgt

SEQ ID NO: 754562 - DNA, 618 bp, Homo sapiens
tgtatttatccttaacttttgagagactgattactaaatgccttgaggtagtcctttttggaccatggtaaatctgtttggtattctataacctccttgtacttgaatgttgatgtttccctaggtttaggaagttttctgatattatccctttgaataaattttctattcctgtctttttctctacctcctcttaaaggccagcaagaactagyagacttggccttctgaggttattgtctagatctcataggcatgcttaatactatttttacccttttctattgtctcctctatgtattttcaaatagcctgtctttaagctcactaattttcttctgcttgatcaattctattaaaacactcttatgcattcatcagtaggtcaattgcattttgtcagctccagaatttctgcttgattcttttttattattttattctttgttaaatttatttgatataactccgaattccttctctctgctgttttgaatttcttttgagtttcctcaaaacagctattttgaattatctatctaaaaagtcatgtagctgtgtttctccaggattggtccctggtgccttatttagttcatttggtgaggtcatgttttc

SEQ ID NO: 754563 - DNA, 566 bp, Homo sapiens
ggctcaaagatggaaacgacatagcagcaagtagttttgtttcactattaaaacaaaaatcatgaggagaggcgaagtgaatagtatattttctattaacatagtatgaagtaacttaaatagcttaaaaaacaatgacatgaggtattagaatggagactgggtctgaaaggacatggggaaattataaaactgccaggctggaaaaacaatgatatataaaaagtgcttagtattgctttatttcctaaatatacttgtgttttaatggacaataaaggcatttcttacagtaatcaatgtatttaacggaatgctttttttacttsaaaatgcagatgttgtacttctgaccactcagcttcaattggcctcatggtaggttgtaatatcattaaaaaaggaactggttgtaaaactaagtcctcatctcagtggaggaatttatggctccaataaaagaaagaaccccaaggttcactgactggactctactgaagaaagggaaagtaatgcttaggggtttttctgtactatatgactaggtcatggtaacaaaggtgggt

SEQ ID NO: 754564 - DNA, 724 bp, Homo sapiens
agatttggatccatcttaaaattcagggattctgcattctgaacatactatatcccctgaatcctcagccaacaagagcaggttttggttttttaaaaagaataaatattgtattttaagtgtccatacaacgtatccacatacgtaatttcaaaaaattgtaaataatttcagctggataaatttagaatgyttttattaaaaccagttcaacaatactctctggcactcttcccagaacacttccatttgattgggaattgcttaaattttaatccgttttaagttcctctctttctcaattgtgctcttcttaaaatgtcgcatttgaaatattcactgcaatatcactgactcttttattaaatcatgtatctcagcagtgatactgctagccgttggatgttttgggggccacatgtagtgtgtggtgtggcggggaaaatgcatggatgattatggttgtatttctgtggatttcccttttctctcaagagcacctgccggaggcctacatctcccccatatcagcattaatactatttactactctggtcttactactcttatctttccctttctcctttaaaacatttaagataatacaaaactatcttcctaaacatgtgtgccaacatgggcaaactcagaaaaataaacaaaaaacaaattgtacatattccctaagtcaaacaagcttcttttctgtaagttcatcatcaca

SEQ ID NO: 754565 - DNA, 629 bp, Homo sapiens
aagatttggatccatcttaaaattcagggattctgcattctgaacatactatatcccctgaatcctcagccaacaagagcaggttttggttttttaaaaagaataaatattgtattttaagtgtccatacaacgtatccacatacgtaatttcaaaaaattgtaaataatttcagctggataaatttagaatgtttttattaaaaccagttcaacaatactctctggcactcttcccagaacacttccatttgattgggaattgcttaaattttaatccrttttaagttcctctctttctcaattgtgctcttcttaaaatgtcgcatttgaaatattcactgcaatatcactgactcttttattaaatcatgtatctcagcagtgatactgctagccgttggatgttttgggggccacatgtagtgtgtggtgtggcggggaaaatgcatggatgattatggttgtatttctgtggatttcccttttctctcaagagcacctgccggaggcctacatctcccccatatcagcattaatactatttactactctggtcttactactcttatctttccctttctcctttaaaacatttaagataatacaaaactatcttcctaaacatgt

SEQ ID NO: 754566 - DNA, 629 bp, Homo sapiens
aagatttggatccatcttaaaattcagggattctgcattctgaacatactatatcccctgaatcctcagccaacaagagcaggttttggttttttaaaaagaataaatattgtattttaagtgtccatacaacgtatccacatacgtaatttcaaaaaattgtaaataatttcagctggataaatttagaatgtttttattaaaaccagttcaacaatactctctggcactcttcccagaacacttccatttgattgggaattgcttaaattttaatccgttttaagttcctctctttctcaattgtgctcttcttaaaatgtcgcatttgaaatattcactgcaatatcactgactcttttattaaatcatgtatctcagcagtgatactgctagccgttggatgttttgggggccacatgtagtgtgtggtgtggcggggaaaatgcatggatgattatggttgtatttctgtggatttcccttttctcycaagagcacctgccggaggcctacatctcccccatatcagcattaatactatttactactctggtcttactactcttatctttccctttctcctttaaaacatttaagataatacaaaactatcttcctaaacatgt

SEQ ID NO: 754567 - DNA, 603 bp, Homo sapiens
ttaagccaatgaggccataatgacggactgagttcaattccagtttggtgtcactgggcagctcttgaccgtgaaaggtgagtgagaggttgataatgtgaacgtcagtactgcagggatgggaggccaggatgccagtgacagctcgagcagtagctttcttcatttcaaagtcctctagctccttggtcagcaaatccacttctgcggtgtctttgccattggcctcatttctgccacctgtggttctgtgacagcgtctccattttcttcatgtccttttctgggctgctgtagagctttggcagmctccttctttttggcagccttcttcttggccaggtcagagggcatgataatgacccacagggttaggttactgttatttcagggagatgggcctcgctgctcggcctctgagtccctgattttttttattgttttaggtatatatacccaaaagtgaaattcttgtatcatattttaattctatgtttaattttttgaggaactgccatgctgttcacatttcttcttgtatccccctgtactccaaaatgtctccttaggtcggtgtgaacattttaatataaacaatgaggg

SEQ ID NO: 754568 - DNA, 605 bp, Homo sapiens
accatctgacaatttcaacaaatgttagaaaaagcattcaatataattcaataccctttcatgattaaaaaaaaaacagctcacaacaaacagagtataaaaggaacacacctcaaaacaatgggggccgtgtatgacaaatccatctatcacactgaatgtccaacaacagaaagcctttagtttaagatcyggaacaaggcaaggatgcctattttcattactttcattcactatagtattggaagtcttagccgaagtaattagataagagaaagaaataaagggcacccaaattggaaaagaaaaagtcaaattatctttgcagatgatatgattttatattttgaaaatcctaaggactccagcaaaaaactattagaacttttaaatgaattcagtaaagttcaaagatacaaagtcaacatacaaaaatcagtagcatttctatatgccaatagtaaacaatctgggaagggaaccaagaaagtaatcccctttacaatagctataattttagtaaaatacctggaataaactttaccaaagaagtgaaaaatctctacaatgaaaattataaaacactgatggactgggagcagtgg

SEQ ID NO: 754569 - DNA, 608 bp, Homo sapiens
cacccatctcagcatcccaaagtgctgggataacaggcttgagccaccatgccttgccacacttctacttttaaaaattaaaattcctatgcagctttaaatatagaaaaaacatgggactttggaataagtcttagatgagggagagaaaggatttaggttatagggaatatgttcatacttttatatgtatagctcttcttaaattaatccatacaataagtactcattgagccctcccaaaaagaccactagtaaacttaaactaattctctctgaagcatttttgagatcctgtactttttccaaaaataatttttaaatcctgcctttttcaactcttccccataaataatttattgatgactaaaaaaattatattcagaaataacacacatatttattgttcatactcttgtttctctatcctgggcagtgtcratctttcttttacttatatcctctatcctgaactgataatgttacttagcatatgtcatgtgtaactgaagagaaggcaaaagcttaaaagttattttgtctaggaaggtgttctcagtgagtttgtttaataggataaatgcaaatttttatctgtagcatgaccc

SEQ ID NO: 754570 - DNA, 522 bp, Homo sapiens
tacagcaagattgacagtgtacacttgtggggaaagtgggcagatgaggaggtccacttggggaagggaaagcgaagtgacagtaattggtcatgatctgcatgaccactggaggccccagaagggagtgctttgttttcctacctttgtatggccttcatttctgcttcctataccctagtgttttcatatttgggattaagtttacagtgctctaaaagcccctgcatttatataccagtagcttccaggagacagaagatcaaaaattctttctctgccaacccaccacttagttcttaattwaaaaaaaaaaaattactttttaagaggtaccaaagtcgtcaatgtctttgtttgcttctgactgcttctagtactttttccatttctgtacatgcccatttatgggtctggttggtctctacagaggcagcaaagggaaaggaggaagactttttcccagatctctctaccttaaagcatggagccaagtagcttgtattagtcctaggattcctt

SEQ ID NO: 754571 - DNA, 365 bp, Homo sapiens
tgttcaaagagatgtcttctttacctgccatcctctgctcagcccgttgtttccaccacacccgtgaggttatacctgccaaggtccctgttaaaatccggtggtcatctctttgtttccatcttaccagacctcagtggtattccattctcttgaccacttcttcctattagaaacactttcctgattttcctcctacctctctgcctattctttctyattctcctttgcctactttcctctgtttgactggcctctgaatgttggaggtctctatctcttctctttatctgttcagtctccctaggtgagttcatttagtcctttgaatttaaatgtcatctatacattaatgactcccaaat

SEQ ID NO: 754572 - DNA, 553 bp, Homo sapiens
ccttccttgctgttctgaattgcataaagtactctctcaggaataacaactgctttctttgatttattttaactgaagtatacgaggttctcgacatttcttataaatatatcctatatctctctctttcttggattttatctttattttgctagagtaaattctcagatagctccttccaaagcactgcttttttaggcatatttggaaatgtttgtgtggaacatttttgattatcacattttctgggggtagcagcactactaaatccttgaaaacttgagtccttaaaaatgagtgaaaataatttttttcctcctttgcccttttacacaactgataatttsgctgaggaattctaggttcaaaatcattttctccaacatctgagaactgcttaaattattttcagcatccatggttgctaatgagacagccaatgccagtctgattctttttcatttaaatgtgcttataaattggtaaaatttggttttgagtggatattgcaaacacatatatatatgctaacaaataaattgcatcaaatact

SEQ ID NO: 754573 - DNA, 622 bp, Homo sapiens
atgattattgaaaaaaattttacactaaaagcagattttcagattagccagatgattttctttagcattaatactcctacattatttttcttgttcagcatatctttgtttttcttcagaatttctgttttggattgggctatagataagtattatttaatattttgaagcaagtgaactgattctctagggtctcactccatcaccctgtctggagtacagtggtacaatctcggctcactgcaacttctgcctcctgggctcaagcagtcctcatgcctcagtctcccgagtagctaggattataggtgtgcaccaccacacttggctaatttttgtatttttagtagaaayggggtttggccatgttggccaggctagtcttgaactcctgacctcaagtgatctgcccacctcggcctccctgtatgtggtgtataattttaacatgcgtaggtaattacagtgttggtacacacacacacacacacacacacacacacacacacacacagaaaatgaaaagttatttatatttaataactttagtaggaaatagaattttatatatttaacctcacaatttttttttttttagattatcagatgtattttaaaatag

SEQ ID NO: 754574 - DNA, 629 bp, Homo sapiens
ctttcttcaaatagtagatttttatagaattttgaagtagacaaaataagtcaatttatgtttagatttaaaaaaaatgtgaaagcttttctatattctcctccccgtgccagataggtgcttggcacagagtacttaataactatttaataaatgacagaatttcttttcytaaaatttttaggacatatgcaaggaaatttctcttgcatctaggtttactgatgtatatgaggaagagttacatctgcttcagtgaaatacaaaattaaaccaggtgatctttctgaaaaattattcttatggtgacatatcagaaatcttatcaacagctatagtttattctgttggaattttcaaaatacactgtgccttaacttagaaacactccaatgaacttgtattcattagtgttttgttgagttaaagaaaaaatatctgtacaaagtggacacattgtttaattttgttttgcattttactagattgcagtgcaaggccaataaattaaacctaggcagttctcttgctaattacacacaacttatcttgagtatcagatattcaaatccattttatgaatatggtagagagaataacaactgtaaaacaaagcagtgtgcatgtaa

SEQ ID NO: 754575 - DNA, 629 bp, Homo sapiens
ctttcttcaaatagtagatttttatagaattttgaagtagacaaaataagtcaatttatgtttagatttaaaaaaaatgtgaaagcttttctatattctcctccccgtgccagataggtgcttggcacagagtacttaataactatttaataaatgacagaatttcttttcctaaaatttttaggacatatgcaaggaaatttctcttgcatctaggtttactgatgtatatgaggaagagttacatctgcttcagtgaaatacaaaattaaaccaggtgatctttctgaaaaattattcttatggtgacatatcagaaatcttatcaacagctatagtttattctgttggaattttcaaaatacactgtgcyttaacttagaaacactccaatgaacttgtattcattagtgttttgttgagttaaagaaaaaatatctgtacaaagtggacacattgtttaattttgttttgcattttactagattgcagtgcaaggccaataaattaaacctaggcagttctcttgctaattacacacaacttatcttgagtatcagatattcaaatccattttatgaatatggtagagagaataacaactgtaaaacaaagcagtgtgcatgtaa

SEQ ID NO: 754576 - DNA, 629 bp, Homo sapiens
ctttcttcaaatagtagatttttatagaattttgaagtagacaaaataagtcaatttatgtttagatttaaaaaaaatgtgaaagcttttctatattctcctccccgtgccagataggtgcttggcacagagtacttaataactatttaataaatgacagaatttcttttcctaaaatttttaggacatatgcaaggaaatttctcttgcatctaggtttactgatgtatatgaggaagagttacatctgcttcagtgaaatacaaaattaaaccaggtgatctttctgaaaaattattcttatggtgacatatcagaaatcttatcaacagctatagtttattctgttggaattttcaaaatacactgtgccttaacttagaaacactccaatgaacttgtattcattagtgttttgttgagttaaagaaaaaatatctktacaaagtggacacattgtttaattttgttttgcattttactagattgcagtgcaaggccaataaattaaacctaggcagttctcttgctaattacacacaacttatcttgagtatcagatattcaaatccattttatgaatatggtagagagaataacaactgtaaaacaaagcagtgtgcatgtaa

SEQ ID NO: 754577 - DNA, 624 bp, Homo sapiens
cacatctgctatatatattcgtgttgcaaggactagactgcgagcttaaggttttattatattatgcttacatttgaactggttatcataaaaaagaaacattatactataaaacttcagagaaaaagatatacattaaaatagcaacaacctaaatttactctataatataaagttccatcaaagcagctccatctaaatgttaacatgtctaaatattctgtgcatgcttctgagtacatgcatatgaataaaatgctaaggggaaaacaacataattgccaaaatttgttttataaaaggcatttcccccatcacataacttcaccatttctagtaatcatcacacccccagaccaaagcacraagttaaagaaggcccttataatacacataaaaagtcaacaacttccttcagactaagaagaacaaattctaaactagagaaccctggatgagaatgacctgcccaatccccactgaaaaagatggaaaattttttcctaaatggagagaatcacataatgattcatgtcttcaataaaacatcaactaactcagaaaaagaaataccatggcaaattatacctcaaatattatattagacatgagcaatgtaaaaac

SEQ ID NO: 754578 - DNA, 585 bp, Homo sapiens
aattatctttaaaataatttttaatagaaaaaatgttttatattcataaagtagtcattttaagtgttctcttttcctttgtgttggtatacattttcatctattacattttccttttgcataaaaacttcctttagcatttgtttttgtagtgcaggtctgatagccgtaacttttgttagcttttatttgtgtgagaaaatctgcattttgtcttaagatgtttccctttctttaaaacagttttgctgagttaataacaaattataaataatttgtacatatttaaagtgtacaatctgataacttttgacccatgaaatcatcaccacgataaaaataacatccccacaaatgttctcctrtacaggagattttaggaggaaaggtgcatttgaactaaatcttcaagaacaggtatgttccccaaataagattagctcattcaatcaaaagtatgtattaaatgcttactgcgttcgctaggatgaataaaacagtcatgatttctagaaggagatgcatattataaaataataaaacaaaataaacccaataaatataatggcaacagagtgctgtagt

SEQ ID NO: 754579 - DNA, 612 bp, Homo sapiens
gaggaagtagtgttaggttgacatttgaagggtatgtgggaaggaacttcctgtgctctgatgagagaagcctgttgagcatgagactttagggcacggctgtagatgcagtcatctttttgcaaggatgggctgaatacctgttcacttactaaaccgtgggagtacagctacactctagtgcagttcctgttaggctattatgagagagagttatggagaaaatttcttcctaatagaatgatgaaatatgcttgtatatttagtagtttgagttaatgcattttacattactgyattcctatagcatggctaagcttaacaataaaaaaaaactatgtagtctttgcctttataaaggaacttaacttgataaagataagctccctattttagcagcaaataattcactttcctttttgaacaaagataagattattcaactattatatatgatttttaatacttccaatgaaaatattttacctcaaaaaccttaaggatgatttttcttataattttttgagaggtatttctgaatttaattttattttttgcaatacatatttatgaagaatataatatgtgtcatatactaggcatggtgctgaa

SEQ ID NO: 754580 - DNA, 576 bp, Homo sapiens
tgccttttatggttttcactttttttgtgtactgtccaagaaatgtttgtgtaccccaggtcacacatctttctcctatttgttatgtgtcacgtgctatataataagtttctgtcaacagtgggccatgtatatgacaataccataagattataatgtagctgaaaaattcatattgcctagtgatgtaaatgttgtaagtcatactgcagtgcattactcacatgttttggtgatgctggtgtaagcaaacctgtgctgccggttgtgtagaaacatagcacatgcagttagatacataatacttgattgtgatagtacatgactrtgttacttctttattttatatattgtacttttcattgtttcttaaagtgtattactttcacttatttaaaaaaaaataggtaactgtaaaacagcatcaggtgggtccttcaggtgatattccaaaagaaggcattgttagcgtaggagatgactactcgatgcctgctccgaaagaccttacagtgggacaggatgtggaggtggaagacagtgatactgatgatcctgactgtgtaggtttaggct

SEQ ID NO: 754581 - DNA, 693 bp, Homo sapiens
ctgataatgattcgatactcaggaaaccctaagggctccaccaaaaggctattagaactgataaatgatttttgcaaggtttcaggagagaaaatcaatgtacaaaaatcagtagcatttctatatactgataacatccaagctgagagccaaatcatttacaatagccacacacacaaaaaaatccaggaatacatctaaccaagaaggtaaaagatcattacaaggagaactacaagacaccgttaaaagaaatcatacatgacacaaacaaatgaaaaaacgttccatgctcagggactggaagaatcaatatcagtaaaatagccatatttccctgcccaaagcaatctayagattcaaggctatacctaccaaactaccaacatcatttttcacagaactggaaaaaaaaaactacaaaattaacaagaaaccaaaaaagagccagaatagccaaagcaatcctaatcaaaaagaagaaagctagaggtatcaaattacctgccttcgaaccatactataaagctacagcaaccaaaacagcatggtactgtaaaaaaacagacacaaaggccaatggaacataatagagagcccagaaataaagccagccacctacaataatctaatctttggcaaggctgacaaaaataagcaatggggaaaggactccttattcaatatatggtg

SEQ ID NO: 754582 - DNA, 606 bp, Homo sapiens
tcagttttcctgtaatttatggttttgattgaattttttagttttgatttctagtttgattgtgctttggtccaagatattgtttgttataatttcagttattttgcatttgctgaggagtgttttacttctcattatgtggtcgatttcagaatatgtgacaggtggcagtgagaagaacrtacgttctgttattttggggtagagagtagatatttatcagttccacttgatttaatgctgagtttgggtcctgaatatctttgataattttctgtctcgatgatctgtttaatattgtcatagggtgttaaaatctcccactattattgtgtgggagtctaagtctctttgaaggtctctaagaacttgctttgtgaatctgggtgcgcctgtcttgtgtgcacatatatttcggatagttaaatcttgttgaactctttcccattacttaatgcccttctttgtctttttttaatctttgttggtttagagtctgttttgtcagaaactatgattgcaacccctgcttttttctattttccatttgctggtagatttttctccattcctttattttgagcctatgtgtgtaattgcttgtga

SEQ ID NO: 754583 - DNA, 606 bp, Homo sapiens
tcagttttcctgtaatttatggttttgattgaattttttagttttgatttctagtttgattgtgctttggtccaagatattgtttgttataatttcagttattttgcatttgctgaggagtgttttacttctcattatgtggtcgatttcagaatatgtgacaggtggcagtgagaagaacatacgttctgttattttggggtagagagtagatatttatcagttccayttgatttaatgctgagtttgggtcctgaatatctttgataattttctgtctcgatgatctgtttaatattgtcatagggtgttaaaatctcccactattattgtgtgggagtctaagtctctttgaaggtctctaagaacttgctttgtgaatctgggtgcgcctgtcttgtgtgcacatatatttcggatagttaaatcttgttgaactctttcccattacttaatgcccttctttgtctttttttaatctttgttggtttagagtctgttttgtcagaaactatgattgcaacccctgcttttttctattttccatttgctggtagatttttctccattcctttattttgagcctatgtgtgtaattgcttgtga

SEQ ID NO: 754584 - DNA, 617 bp, Homo sapiens
aaagctgggactaatcctaaaaatatattcagatgcagctgaaacagctaacctttagattctctcttaattgaaattcatttttctaagattacttgttaatgaaatatattgcaacagatgtaaagaatataccactggtgttgattaaaatatcaaacgaaatgcacttttaaactacataatactttgtctaatttttcctgagaagactaatgcttaagatttagtaactaaaataggtagtccaatattgatcttggccttgctataaygaatacttctaaccagtgacactatagggactctgtaatttattaaacaaacatttatagaatgctcattttgtgccaggaatagaaaataaatagtcacgagttgcttaatgatggagattaattctgagaaatgcattactaggccatttcgtcattgttggagcattccagggtacacttacatcaacctatatggtactacgcacctaggctatgtggtatagcctgttgttcctaggctataaacccatacagcatgttactgtactgaatactgcaaacaattgtaacacaatgatgtttgtgtgtctaaacatagaaaagctaaggtatatgttc

SEQ ID NO: 754585 - DNA, 601 bp, Homo sapiens
agctgaaacagctaacctttagattctctcttaattgaaattcatttttctaagattacttgttaatgaaatatattgcaacagatgtaaagaatataccactggtgttgattaaaatatcaaacgaaatgcacttttaaactacataatactttgtctaatttttcctgagaagactaatgcttaagatttagtaactaaaataggtagtccaatattgatcttggccttgctataacgaatacttytaaccagtgacactatagggactctgtaatttattaaacaaacatttatagaatgctcattttgtgccaggaatagaaaataaatagtcacgagttgcttaatgatggagattaattctgagaaatgcattactaggccatttcgtcattgttggagcattccagggtacacttacatcaacctatatggtactacgcacctaggctatgtggtatagcctgttgttcctaggctataaacccatacagcatgttactgtactgaatactgcaaacaattgtaacacaatgatgtttgtgtgtctaaacatagaaaagctaaggtatatgttctaaacatagaaaaactaatg

SEQ ID NO: 754586 - DNA, 615 bp, Homo sapiens
aatcctaaaaatatattcagatgcagctgaaacagctaacctttagattctctcttaattgaaattcatttttctaagattacttgttaatgaaatatattgcaacagatgtaaagaatataccactggtgttgattaaaatatcaaacgaaatgcacttttaaactacataatactttgtctaatttttcctgagaagactaatgcttaagatttagtaactaaaataggtagtccaatattgatcttggccttgctataacgaatacttctaaccagtgacamtatagggactctgtaatttattaaacaaacatttatagaatgctcattttgtgccaggaatagaaaataaatagtcacgagttgcttaatgatggagattaattctgagaaatgcattactaggccatttcgtcattgttggagcattccagggtacacttacatcaacctatatggtactacgcacctaggctatgtggtatagcctgttgttcctaggctataaacccatacagcatgttactgtactgaatactgcaaacaattgtaacacaatgatgtttgtgtgtctaaacatagaaaagctaaggtatatgttctaaacataga

SEQ ID NO: 754587 - DNA, 582 bp, Homo sapiens
agctgaaacagctaacctttagattctctcttaattgaaattcatttttctaagattacttgttaatgaaatatattgcaacagatgtaaagaatataccactggtgttgattaaaatatcaaacgaaatgcacttttaaactacataatactttgtctaatttttcctgagaagactaatgcttaagatttagtaactaaaataggtagtccaatattgatcttggccttgctataacgaatacttctaaccagtgacactatagggactctgtaatttattaaacaaacatttatagaatgctcattttgtgccaggaatagaaaataaatagtcacgagttgcttaatgatggagattaattytgagaaatgcattactaggccatttcgtcattgttggagcattccagggtacacttacatcaacctatatggtactacgcacctaggctatgtggtatagcctgttgttcctaggctataaacccatacagcatgttactgtactgaatactgcaaacaattgtaacacaatgatgtttgtgtgtctaaacatagaaaagctaaggtatatgttct

SEQ ID NO: 754588 - DNA, 686 bp, Homo sapiens
aatctctgggatcctgccaaagcagtgtgaagagagaaatttgtagcactaaatgcctgcatcaaaagactaaaaagatctcaagttaacaacctgacaacacaactaaaagaaccagagtaccaagagcaaacaaaccacaaagctggcagaagacaggaaataaccaacatcagagctgaactgaaggagatagaaacatgaacaactcttcaaaaaaatcaacaaatccaggarctagttttttgaaaaaattaataagatagatagactgctacctagactagtaaaaaaaaaagagagagagagagaatcaaatggacacaatcagaaatgataaggaagatatcaccactgaccccacaaaaatacaaccatcagataatattatgaacacctcttcgtgcagaaaatagaaaatctagaagaaatgtataaatttctggacaaatacaccctcccaagactgaaccaggaagaaattgaatccctgagtagaacaataacaaattctgaaattgaagcaacaataaacagcctaccaatcaaaaaaagcccaagaccagatgtatttacacctgaattctaccagaggtataaagaagagctgatatcatttctaatgaacctatttcaaaaaattgaaaaagggaactcctccctgtttataaagccagtattatcct

SEQ ID NO: 754589 - DNA, 545 bp, Homo sapiens
cattcaaggtggctgttaggcatacaacttctctgtttggaatttaaaaggcatctctttctctgggtggttacagccccaattggacaggcgccccactgcagagcacaacctgcctgaccatacgtggctctgagaaggattattcataacattttacaaatcttaaaagagtaatatgagtacgatacaaacaatttaaattttcaaccccttgcttgaaatgttgtaggatttctctcctctgcacttgcactaatatgcatgcagatttgtttggctttgatgagacaacatgtacagtaagaggcattttacttcctctgggtccgtgtgtctcttcaagtggggtcttcaaatgagtcttgacagtcatttctcacactcgcccatggtttcaaatatgaygcttccaactcaacagaccctgggcaatggaggtagaagcaggtgtctgctcagggcggtaatccacagggtggtcaggcaacaggaatacagaggtgcagtggtcagttggttgtgcagatagaaaacagccttga

SEQ ID NO: 754590 - DNA, 618 bp, Homo sapiens
taaataaataaataaataaataaaattcaagacttgggtgttaggcgtgctcactgctattggggtgttgctgctctcaggcacttttagtggatagtttctcttgatttaatgtatgtgcatgtatataagtacatacatatttacattggttatatccacctgtatctattgaaaaccaggatttcacrccaatacctccaattccaatccaacaccatagggcttacttattcattcctttacatatttgtacctctcttccgcacgagaaacctggcttccattatcttcactttagccctttgattaacccctctgcatataaccagtctgccatgccttcccttgcgtaggtgtcccccttgctccgagggtactgacaccccttgctgggcccctccacaaagacctccttcttacccttgccccagcgtcccatctggcactttccggcagggatatcctctgcctcctgctggggctttgacgcacctcactggcctgcccccgcctgtgaacgctgttcttgttgggctctgcaccctgctctgggctatcagggctctttcgtctcctggtgaagatgcctatcttgttctgtgtagctttaggact

SEQ ID NO: 754591 - DNA, 586 bp, Homo sapiens
ttggttgatactcccaatggtcactgtcttctatgactaaaagctcattatcagtctctctgggagaaaactctagtaactgaagtccacatatgtcaggtactgtgctagattctttcataaaccttattttatttaacctgcccagggaggtaaagattgtaatccccatttacagatgaaaaaagtaagggtcagagagattctctgccatactcaaggccctaagctaataataataagggccagtatttgaacactggccagttcaactccacggttctgcatccttcccttcctgttctccttgtcaatgctccaaaaaaaatgatttgagaagctaaatcaagaacattccctattcctgtagatagtggtgatttcctctgagaaacaataattcaaggtatcttcaaacaaaattgggactcagaacaaawactaaactgccacctctttccaatgagtcaagttcggctaactagggtgtattcttagtcactttatttacacaatgtagacccactgggatcagagtgccaggccatgcagcagaggccgcaagccaatgggcaactcatgtgca

SEQ ID NO: 754592 - DNA, 586 bp, Homo sapiens
ttggttgatactcccaatggtcactgtcttctatgactaaaagctcattatcagtctctctgggagaaaactctagtaactgaagtccacatatgtcaggtactgtgctagattctttcataaaccttattttatttaacctgcccagggaggtaaagattgtaatccccatttacagatgaaaaaagtaagggtcagagagattctctgccatactcaaggccctaagctaataataataagggccagtatttgaacactggccagttcaactccacggttctgcatccttcccttcctgttctccttgtcaatgctccaaaaaaaatgatttgagaagctaaatcaagaacattccctattcctgtagatagtggtgatttcctctgagaaacaataattcaaggtatcttcaaacaaaattgggactcagaacaaatamtaaactgccacctctttccaatgagtcaagttcggctaactagggtgtattcttagtcactttatttacacaatgtagacccactgggatcagagtgccaggccatgcagcagaggccgcaagccaatgggcaactcatgtgca

SEQ ID NO: 754593 - DNA, 534 bp, Homo sapiens
tttttcccttaaattatatgtcagcatggagttggtgtgtattttctgttaatgatttggaatttttaaagccatatttcaaaaacagacaggctcttctgagttaggctccgccatccatcctggtttcctgtcttcattccatcctgagtgcaagaggatggcagttttcagtttgcaccagaacacagaaccaatgaaatccccatatcccaggttgcagcaaatctggaatgtgaattggtcctgtgggaatagctggacttggcccagcacaactctggrcacagaaggtcaccctgagatcagaaggtgaagataaacgcttaaaccccccgtcagcagcagcaactcctccgacagtgatgctggaggctgaaggacctgttaaaacaaggactactaatcttatttttccaattacccttatctgacatttctatctcttcctccttcccacctccccactgctgccttagagtgacaccttttggaaaaggttgaaactgaaaatccccagactgctttcagcct

SEQ ID NO: 754594 - DNA, 658 bp, Homo sapiens
tttggcatcccgggaatatagccaaactctcattattttaactccccctgtcttggtgtccaattgttttttggactgatagggatgcagcatgatggattttctacccttaattgtcttttaaaaatgactatgtttttcttagttgtaaaaataatatatggtcacagtagagaatttgcaaccatatggaagcctatagaggaaaattaaaaaataacaggacatctcacggcacagaaataattgctggaacatttggattgttctccacctagacatctttttgttgttgctgttcttcttctctctttttcttttcttctttctttcctctctcctcttgccttctccttccctttattcctcctttccttctctcactcttgtgttactttttctttttcttatctaacactctacttcaaagtgtttatttgggtttctattctatttttttttacattattagmattttctcatataatgaactattcctccaaaatactattttaatgattgtatactattctactctatttgcttattcctctaatgttggtaatttcttcccccatcactttttttttttttttaaacttaagacgaagtctcgctctgttgcctaagactggtctcaaactcctgggctcaaggg

SEQ ID NO: 754595 - DNA, 601 bp, Homo sapiens
ttttcgctgtagtgtctaaagtatgatagatccaagtctgttacctacttttgatctctatcgggagctgctagtcagattaaagaactcatgttgttatttgaaaaggcgagaatattgcctaaatacaaataaagtgcttatttcattccatttttggaggaagctcaggactcataattttgaaggaagcattggctttaataagctcaatttcctccactattttatttagtgtagaatcactcatgtctgtagatcatggtagaacacattcatgctggttactagttaaaaatttcagcccatcctctgaaaagttgtgactcaggctgaatagagctggttatgtacaatatcttttgtaaattctttagaggctttwgcctccaatacctaagcttagctggggactcaccagccttcccagtcatgtgaaactctctttcattgagtctttacatggaccctagtaatgatccaagaagcagcggtttccctgtcatctttatatgactttttcttaaagctttctgttgatttaaaaacatttaaatgacattttaatagctctcccaacaattctggcaccaagattgaa

SEQ ID NO: 754596 - DNA, 517 bp, Homo sapiens
tgccatgggtttggtacagggtttattcctgccagcatccaaaagcactcttgccctggctcctgcacctacctgctcacctgccttctccccctcctacagggggttttagagctgctagcttagaaagtgagccaccccttcacaagtcctgcaaaggggtcaagggaaccatcccatctcactggtaagacaaaaaaagtaactggcaaattgttgtgggaagtcagggaccctgaayggagggaccggctggagccacggcagaggaaaaaaaattgtgaagatttcatggacatttaccagttcccaaataatactttcataatttcttacacctgtcttactttaatctcttaatcctgttatcttcgtaagatgaggatgtacgtcacctcggggccactatgataattatgttaactgtacaaattaattgtaaaacctgtgtttgaacaatatgaaatcagtgcaccttgaaaaagaacagaataacagtgattttagggaacaaggg

SEQ ID NO: 754597 - DNA, 591 bp, Homo sapiens
tgataggagaataaatcacttcctaatacaaaagtctgaaaagtcaagggggtgggttgtgtaggaattgtgaaagaagggtcattttaatttgggtttggatatatcagagaggaaggacatgtgcagagggaaaaatgaaacataggaaccggggagggctcaggctacagtgagaatgggtgagtccccaagagggaaatgagaggatttctgggtggggtcttggggatcacaggcaaatataagtttgattaaagtctcacatgccatgctacagaacattgactgcaagcagtaggcaatttgaaaacaaggattttaacacaaaaatgagaygaatcaaatttaaaggaaaaacgaatgacagagagttccattagtaggttttcaaaataatccagatgtgattaaatgagcaatggatacaagatagtggcagtgagaaagggtatagatatttatagaatatagatatttataaatatatacacatttatacatttatagatgtttatagtttccaagcaactgggattgtaatgacttggcatatgttccataaatccaaatgcagactaataacaatga

SEQ ID NO: 754598 - DNA, 557 bp, Homo sapiens
ttacaaattttgaaagcaagtatattaatatttattaatattaatgccttaacaactcttgattcatattcattcttaattagggtaaatagcctcctatttgttcatcttgccttaggcttacccttccccctttcagtctctactttatagccaagagctattccaaaatcaaaagtctaattatgttcttcccttgcttaaatctctgtaacgactgtgtgtgtccatgataaagttcaaattctttgccatggcttgccagatctttccattctagcccctwcaaatctcttcagtcctatctctctgcattctcaactcaatctaactaaaacccctaaaatgtcattttgcactctacacctgtcatcacttgttttagtttcctttttagcatagacctttttgaatgttgcttattctatacctcttttgtaaatatcccctatcatctcctttcagttctttggtgtcctttcaggttagggattggcttaaatgtcaactagccctatatgcctttcttcaccaactctacactctttcctcctgca

SEQ ID NO: 754599 - DNA, 593 bp, Homo sapiens
cagtgtatatgttatattgaatttaccattttaataaccattctcttgataaaatattaggctcgtaatagtcaaaatcttgtatatttagggactattctatagagttttggtttaactacttatatcaattacyacctttaagtcatgaaaaattaaacttaagtaatgtattaactaaaatactctgcaaacctaattttttatgttggtttcttaactaaattaaatcatcccaattgattcacagatttaattagcatcaggaaattaatatgaactcttttaatataatgtataaatttctatatttataaaccagatttttaaagagtcttgaattaatatctaaaactctaagtgtctagtttttttattcagtagttaagaacaaaggtcattacctaaactcgtagttaaatattttcttctgcattaccattttctgataaaaaaaaattaacatcctaaaaggttaattatctccctcttcagagaaagagaagacttatatgtagaaaaacatatcttatcccatataatcaaaagagactttttatagctggtcttaataataatttgggctcttgact

SEQ ID NO: 754600 - DNA, 528 bp, Homo sapiens
atttacttcttttcccacttattctccacagttgtttgtttgccagccctacttgctctcacctctcacccatcctctttcctctggtctcactgctcctgccctcatcagctctctgcctcttggcctgattctcagcctagtttccagcctccttaatgtcctccctcactcaagctgatccacttccaaccctcagagcagaccactttcagacttcttctatagcatcctcttgctggaaaacatcacctgttctccagagcgaatataactaaatcaaggctgkaaatttagaatccttcatctgccccaaactaccacactaacagtacttcctcctgcctccttttaacctttctcatctctggcagttctggatcattcagtgtttcttatgtccatcttgtgcttttcttctttattacgtgtacttacacaatcactctgacttctgtctttaaccgctatagatgtttcaatttcttatggcactcgattctcctttgtactacacaagtttgacta

SEQ ID NO: 754601 - DNA, 583 bp, Homo sapiens
acaagcaacagaaattcgactttggctcacttaagcaaaatgagaatattggataattcacagagaagaaaaagtaaagtaggctttgaaaggataggaactaagtctgttctgtgtaacaggaactaacagctcagtgaagaatcggttccaactgatttactatcttttgtgactcagggagtcctgggaaagttggttaggggaccactaggcactttaattggcagtcctaacagtaytttatttatttatttatttatttgagatggagtctcgcttggtcacccaggctggagtgcagtggcgtgatctcggctcactgcaggctctgccccccgggttcatgccattctcctgcctcagcctcccgagtagctgggactacaggcgcccgccacctcgcccggctaattttttgtgtttttagtagagatggggtttccctgtgttagccaggatggtctcgatctcctgaccttgtgatccgcccgcctcggcctcccaaagtgctgggattacaggcgtgagccactgcgcccggccctaacagtactttcaaatgcagaaggggtgaatctca

SEQ ID NO: 754602 - DNA, 583 bp, Homo sapiens
acaagcaacagaaattcgactttggctcacttaagcaaaatgagaatattggataattcacagagaagaaaaagtaaagtaggctttgaaaggataggaactaagtctgttctgtgtaacaggaactaacagctcagtgaagaatcggttccaactgatttactatcttttgtgactcagggagtcctgggaaagttggttaggggaccactaggcactttaattggcagtcctaacagtattttatttatttatttatttatttgagatggagtctcgcttggtcacccaggctggagtgcagtggygtgatctcggctcactgcaggctctgccccccgggttcatgccattctcctgcctcagcctcccgagtagctgggactacaggcgcccgccacctcgcccggctaattttttgtgtttttagtagagatggggtttccctgtgttagccaggatggtctcgatctcctgaccttgtgatccgcccgcctcggcctcccaaagtgctgggattacaggcgtgagccactgcgcccggccctaacagtactttcaaatgcagaaggggtgaatctca

SEQ ID NO: 754603 - DNA, 583 bp, Homo sapiens
acaagcaacagaaattcgactttggctcacttaagcaaaatgagaatattggataattcacagagaagaaaaagtaaagtaggctttgaaaggataggaactaagtctgttctgtgtaacaggaactaacagctcagtgaagaatcggttccaactgatttactatcttttgtgactcagggagtcctgggaaagttggttaggggaccactaggcactttaattggcagtcctaacagtattttatttatttatttatttatttgagatggagtctcgcttggtcacccaggctggagtgcagtggcgkgatctcggctcactgcaggctctgccccccgggttcatgccattctcctgcctcagcctcccgagtagctgggactacaggcgcccgccacctcgcccggctaattttttgtgtttttagtagagatggggtttccctgtgttagccaggatggtctcgatctcctgaccttgtgatccgcccgcctcggcctcccaaagtgctgggattacaggcgtgagccactgcgcccggccctaacagtactttcaaatgcagaaggggtgaatctca

SEQ ID NO: 754604 - DNA, 581 bp, Homo sapiens
ccaatgcaacaatgctgcacaatgtgctttttcccccttaatatttaatcttagaaatttctcccatatttactctagatcaaccttattcattctaatggcttcagggaattctattttatatatatatatatatatatatatatatacatttttttttttttgagatgaagttttgttctgtcacccaggctggagtgcagtggtgcgatctcggctcacttcaacctccgcctccctggttcaagcaattctttggcctcaacctccctagtagctgggattacaggcacatgtcacccctcctggctaatttttgtatttttagtagagacagggttttgccatgttggccgggcttgtttcraactcctgacctcaggtcatccacctgcctcggcctcccaaaatgctgggattacaggcgtgagccaccacgcctggccaaatctatctttttttaaaaaactactttcacactgatgaacatttagattattgtaattttttgctactagaaactgtgctgcgatgaagatcctttcagatatttttacatacttctgcaaaattaaccttag

SEQ ID NO: 754605 - DNA, 698 bp, Homo sapiens
ttatgacaggaatacgttctgagaaatgtgttgttaggcaattttgtcattgtgcaaacatcatagagaggacttacctaaacctatatggtatagcctaccacacatctagcctatatggtatagcccatggctcctaggctacaaacctgcactgcatgctactgtactgaataattcgggcaattgtaacacaatggtaaatatttgtgtatctaagaacatcyaaacatagaaaagggtatggttacaataaaaatacacgataaataataagaaaaaggtacacctgtagagggcacttaccatgaatggagcttgtaggactgaaagttgctctagtgagtcagtgagtgagtggtgagtgaatgtgaagccctacaacattacagtatgctactgtagacgatataaacgctgtacacttaagctacactcacttaataaatttttttaataataacctcttactggaactttttactttacaaacttttgaatgtttttaactttttcactcttttgtaataacacctagcttaaaacacaaacacatcgtgcagctgtacaaaagtattttttctttctatccttattctgtaagcttttttttcctacttaaacacttttaaatttaccatttgctttctaaactgttcattagaaactgagacacaaacacagacattagcctaggc

SEQ ID NO: 754606 - DNA, 618 bp, Homo sapiens
tgtgagtgctatccagcccattctatttttgagtttacttggctgttccaagcctactatgaagccttgacctctactgctatagcttttctcaggcaatgttaatgttagataaaaagcaaagtagtagtttaatccttctattctttgctagcaattcttaatcttatcttctctgttctataagtcttatttttttgtcacctgctttaaatgaagrataaagaatatttacttttttaaagcctctcttttttggtcagaattccttaaaccttgacctttttccaaatctctgtggcaccatctccctttcctgtccctatcattcatcagagctattactgacactcttcttgaacaccattagaaaaacaggctaaatgaatacttcatagaagttccttcctaatctatgtatataaaaatctatgattaagattttatatatcagaaatattactagactaaaaggtagtttagatatatgtaagctgacagcttggttcatttaaaataaattattccatatgacgctaacacacaatttggtaacttttttgtttcttaaggcttacctgagcaatgtgggtaagaaaatgcctaaatcatgtaatc

SEQ ID NO: 754607 - DNA, 664 bp, Homo sapiens
acagaactcaaaaaggttttgtttttttttttaatatcagaaggcaatactgtttctgaaaactgtaggaaaaggatttataatgccttgccagaaagcctttttccctgaatgtgcacttatgtgctttgttgtacagcaaatctccaagagtgtctcttaatgctcattgacatactagttctcaacagcacaggcatacttatcatgttttctgagtaaaaccttggttttataatatatctgaaaccaaatatatgtcctcatgatgacttgcagtggcttatctgtaatgattgcaatttttttcttgtraaaaatatcattttgggttgggtgtgttggctcacgcctgtaatcccagcactttgggaggccaaggtgggctgatcgcctgaggtcaggagtttgagaccagcctggccaacatagcaagaccctgtctctactaaaaatacaacaattagccggcatggtggtgggtacctgtaatttcagctacttaggaggctgaggtaggagaatcgcttgaaacccaggcagcagaggttgcagtgagctgagatcgcgccagtgcactccagcctgggtgacaaagtgagactccatttcaaaaacaaaacaaaataaaccttatgaatctttaatatatttatgctacatg

SEQ ID NO: 754608 - DNA, 664 bp, Homo sapiens
acagaactcaaaaaggttttgtttttttttttaatatcagaaggcaatactgtttctgaaaactgtaggaaaaggatttataatgccttgccagaaagcctttttccctgaatgtgcacttatgtgctttgttgtacagcaaatctccaagagtgtctcttaatgctcattgacatactagttctcaacagcacaggcatacttatcatgttttctgagtaaaaccttggttttataatatatctgaaaccaaatatatgtcctcatgatgacttgcagtggcttatctgtaatgattgcaatttttttcttgtaaaaaatatcattttgggttgggtgtgttggctcacgcctgtaatcccagcactttgggaggccaaggtgggctgatcgcctgaggtcaggagtttgagaccagccyggccaacatagcaagaccctgtctctactaaaaatacaacaattagccggcatggtggtgggtacctgtaatttcagctacttaggaggctgaggtaggagaatcgcttgaaacccaggcagcagaggttgcagtgagctgagatcgcgccagtgcactccagcctgggtgacaaagtgagactccatttcaaaaacaaaacaaaataaaccttatgaatctttaatatatttatgctacatg

SEQ ID NO: 754609 - DNA, 602 bp, Homo sapiens
atcatcagagagatgcaaatcaaaaccacagtgagatatcatctcacatcagtcagaatggctattatttttcaacatctgtcaaaaaataagagatgttagcaaggttatgaagaagaaggaacacttgtacactgctgatgggaataaaaattagttcagctcctgtgaaaagcagttcgtcagagagttctcataaaactaaaaataraattaccatttgatttagcagtgcgattactgggtatatacccaaaggaaaataatttgttctctcaaaagacacaggtactcccatggtcattgcagcactatacacaacagcaaagacatggacctaggtgactatcaacaatggactggataaaagaaatgtagtacatatatgccatggaatactatgcagccataaaaatatgaaatcgtgtcctttgcagcagcatggatacagctggaggctattatcctaagtgaacacaggaacagaaaactaaatatcagatgttctcatttataagtaggagctaaactttgggtacacatggtcaccaagatgggaataataaacactggggattccaaaagtggggaagaagggagga

SEQ ID NO: 754610 - DNA, 645 bp, Homo sapiens
aaatgaagtatgcctatcatttgaaatttacaagaaagttgcaagaacactacaaagaaatcagtatctgcttcatcaggattttctagtttgataacattttacattttactgtgtttgtgtactccctctcactctctttttgtatagcaattatcatcaatcttttcctgaaccatctgagagcaggttgcaaacatgatgtcccatcactctcaagtattccagtgtgatataatcatcattcaacccycaagtcaggaaatcaacattgatataacactaccatgcaatccacagactttgtttagattttgccaactgtctcaaaaatgttcccttttcgtttctgatctaggatccaatataagataagttcttctgttccttggtatccacaggggactggttccaggacccctgcagatactaaaatcatgaatgctcaagcttcttatataaaatgctgtattatttgcatataacctatgtacattctttcatatactttaaatcatctttagaatacttataatacccaatacaatgtaaatgctatgtaagtagttgttatactgcattttcaaatgtattatttttatttttgtattgttactttttatcttttagaatattttcgctccg

SEQ ID NO: 754611 - DNA, 629 bp, Homo sapiens
gtcttctgaatgtgttagactgcagaaataatatttaaattactcacaatatcatattatgtgaatcatgctaaattccattttcttcagctaatgttgattaataattatatatatgtgtagtgagtaataatgaagacgacaaaaatasccatgatgattgtccctgatatttaatgagattaggaaacactggcaatttttcccactgtataagaagagattgtcttgataataaatgaaataagccatgcttgtagaatgagaggcaaagcagaattttaaaaaaaaagatctcaatatcacttctaaagctcttttcaaaaatttttaagaggtcaacatgttctttatgaaaaacagtcactacctacaaaaatataaagtctaatctgatgacgatcaacatgacattttcaaaggaaactagaagattgtagtttgttattgggtaggatgacagatgggctgcagaatgagcaatgggtaattctgtgttacaatgtcagctcaagtcaagtgtggctctataatatcatttctaaattgtaaatgaataattcttgtagcttcacaactgatctgattgacaaagtggggagtacatcagtgaaactctcagataatga

SEQ ID NO: 754612 - DNA, 607 bp, Homo sapiens
atgggaaggtgcatctcccaagatgagacgggctccttgaaagagattaaatcattctggatctatagcacagtttactccccatcagaaccaagtagaaatactttctgattgaaggcacacataatttatatcttcagaattcccacagattatgtttaacaaaatatgaactatcaataaaaattatgaacacgtgatgtaacaaggcaccctaagagtgtgagcaaaacaacaaagatgacattgggatccacaaacagaaaaacaataaggtcactgtatccagtgtttaaaatagaaattataaaagccaacacagccatctgctgatgtggaaagggtaaagagcctttgcataccaagaattctgcaccaacatgaagcagagatcagctacagccaagagaagggacrggaaacttgctccaacaccagagcgctccccaaaacactcctctggctcaaagcagatttcagccaccatgggaaagtgtcagaaacgctgagaaagcccctcccttgagccaaaagcacaaatggcctccctaagactgtggctggcgcagagctgcgcaaccccatctgctcctaatcatgagctttg

SEQ ID NO: 754613 - DNA, 536 bp, Homo sapiens
ctgggctctgatttattacatggcttaactcattctttaggtggcaaaactttttttaaaaagtatgtaaatagacaaaatgtaatgcttgcttatatttcagttggaagtagcaactaattatatataataaaaaagacaaagattatcatatagactttgaaattcattatgttgatatatattcatttgaagtattaatagtctaaaagttgaatgcataacttagatgcaattaaaagtaccrtatgaaaattggcatagcgtgtttcagacaaacgaacagttttaccattaaaatattactccataagtcattgtaatggaatcacgagaaaaggccaatccaagaacatgtttcctttataattctaacacttaaaattaaacaggaacattgtgttacataagccaatactgggtaatttgtctttaaaatgaagaatacttcgactctgtagaataactggcctagaaattctacatcctcttgaaagcactctatatatgcactggaggaaatgggaaaaggctaa

SEQ ID NO: 754614 - DNA, 635 bp, Homo sapiens
ggtcaaacaccaactgatggcttttactcaaaatctgtttcaccagagcttatgacaggacatgctattccacccagccaattggattctcagattgatgacttcactggtttcagcaaagataggatgatgcagaaacctggtagcaatgcacctgtgggaggaaacgttaccagcagtttctctggagatgacctagaatgcagagaaacagccttctctcccaaaagccaacragaaattaatgctgatataaaacgtcaattagtgaaggaactccgatgcgttggacaaagtaagtagtataagaatgtctgttttataaaactataggaagtctctctttctatgattcagaagatattcatgttgcctgttgagtttcattctttgccagagttgagattgcacataatttatggtggttcctcttttctttgactaaagcatgtacattttttctttttcttttcttacttggttatggttaaaggagttacattcgtatgtatgtgcaggtgtcttttttattatttaggttttgtatgtgcaggtatcttgatttaagcatttaaaacatttcagcctctgaagcatgattgctgaggtgtagattcacttctattcttctttat

SEQ ID NO: 754615 - DNA, 635 bp, Homo sapiens
ggtcaaacaccaactgatggcttttactcaaaatctgtttcaccagagcttatgacaggacatgctattccacccagccaattggattctcagattgatgacttcactggtttcagcaaagataggatgatgcagaaacctggtagcaatgcacctgtgggaggaaacgttaccagcagtttctctggagatgacctagaatgcagagaaacagccttctctcccaaaagccaacaagaaattaatgctgatataaaacgtmaattagtgaaggaactccgatgcgttggacaaagtaagtagtataagaatgtctgttttataaaactataggaagtctctctttctatgattcagaagatattcatgttgcctgttgagtttcattctttgccagagttgagattgcacataatttatggtggttcctcttttctttgactaaagcatgtacattttttctttttcttttcttacttggttatggttaaaggagttacattcgtatgtatgtgcaggtgtcttttttattatttaggttttgtatgtgcaggtatcttgatttaagcatttaaaacatttcagcctctgaagcatgattgctgaggtgtagattcacttctattcttctttat

SEQ ID NO: 754616 - DNA, 635 bp, Homo sapiens
ggtcaaacaccaactgatggcttttactcaaaatctgtttcaccagagcttatgacaggacatgctattccacccagccaattggattctcagattgatgacttcactggtttcagcaaagataggatgatgcagaaacctggtagcaatgcacctgtgggaggaaacgttaccagcagtttctctggagatgacctagaatgcagagaaacagccttctctcccaaaagccaacaagaaattaatgctgatataaaacgtcaattagtgaaggaactccgatgcgttggacaaagtaagtartataagaatgtctgttttataaaactataggaagtctctctttctatgattcagaagatattcatgttgcctgttgagtttcattctttgccagagttgagattgcacataatttatggtggttcctcttttctttgactaaagcatgtacattttttctttttcttttcttacttggttatggttaaaggagttacattcgtatgtatgtgcaggtgtcttttttattatttaggttttgtatgtgcaggtatcttgatttaagcatttaaaacatttcagcctctgaagcatgattgctgaggtgtagattcacttctattcttctttat

SEQ ID NO: 754617 - DNA, 566 bp, Homo sapiens
tatatttctgggctatatgagatattgtgatacggacaacaatgtgtaataatcacatcaaggtaagtggggtttctatcacctcaagcttttatcctttgcgttacagagaatacaattatactcttcattatttttaaatgtgcaattaaattattaccaactatagtcaccctgttgggctatgaaatacgacatcttatttattccatacttctacgtattaatcatccccacttcccacaccctccacccccactaacctttgtagcctctggtaactgtcattctactctctatctccattagttcagttgttttacacttttactcccaaaaataagtgagaacatgtgaagtttgtctttttgtgcctggyttatttcacttaacataagggccttcggttctatccgtgttgttgcaaatgactggatctcattcttttttttatggctaaacagtactctatggtgtatatgtaccatattttctttacccattcacgtgttagtggacacttaggttgcttccaaatcttggctactgtgaatggtggtgcagga

SEQ ID NO: 754618 - DNA, 582 bp, Homo sapiens
ctaaataataaaaaagacacctgcacatacatacgaatgtaactcctttaaccataaccaagtaagaaaagaaaaagaaaaaatgtacatgctttagtcaaagaaaagaggaaccaccataaattatgtgcaatctcaactctggcaaagaatgaaactcaacaggcaacatgaatatcttctgaatcatagaaagagagacttcctatagttttataaaacagacattcttataytacttactttgtccaacgcatcggagttccttcactaatttacgttttatatcagcattaatttctcgttggcttttgggagaggaggctgtttctctgcattctaggtcatctccagagaaactgctggtaacgtttcctcccacaggtgcattgctaccaggtttctgcatcatcccatctttgctgaaaccagtgaagtcatcaatctgagaatccaattggctgggtggaatagcatgtcctgtcataagctctggtgaaacagattttgagtaaaagccatcagttggtgtttgaccactttctttcccctccacatagacctcatgaatgacagctctgg

SEQ ID NO: 754619 - DNA, 582 bp, Homo sapiens
ctaaataataaaaaagacacctgcacatacatacgaatgtaactcctttaaccataaccaagtaagaaaagaaaaagaaaaaatgtacatgctttagtcaaagaaaagaggaaccaccataaattatgtgcaatctcaactctggcaaagaatgaaactcaacaggcaacatgaatatcttctgaatcatagaaagagagacttcctatagttttataaaacagacattcttatattacttactttgtccaacgcatcggagttccttcactaatttacgttttatatcagcattaatttctygttggcttttgggagaggaggctgtttctctgcattctaggtcatctccagagaaactgctggtaacgtttcctcccacaggtgcattgctaccaggtttctgcatcatcccatctttgctgaaaccagtgaagtcatcaatctgagaatccaattggctgggtggaatagcatgtcctgtcataagctctggtgaaacagattttgagtaaaagccatcagttggtgtttgaccactttctttcccctccacatagacctcatgaatgacagctctgg

SEQ ID NO: 754620 - DNA, 635 bp, Homo sapiens
ttgcaaatccctaaattctccgggtgtctttgtcaatagaagcagccctcccactcctcctgcccgaggttcccctttacccgaagagctgtgagggtctcacctgagatcgttgccttgaagggcaccgctgctcctcctctgaaactaacaccagcacccctcattgcttcttaacctgcacttaaattcaagttcctgctggccaaaacagtgagttaaacactgasccctgtcaagaggtgtgatagtcaccgaaacaactgtatgatttttccaatatagtagtctctggtaaatgtgtgagagtagttcttaaggctggggtatgaaggtgtacaaaatataatattggatctggcttcaaatatttgtgtgcaagttttgctgtggatatatgcttgtatttctcttggatatttagctagaagtggaatttgcaggttgttcaataactttattatcaattctgtgaagaaatgccagactatttttcaaagatgctgcatcattttacattcccagcagcaatggtggagggttcaatttctcctctataacacttgttaattacttgttaatattcatcccagtgaggtgaggtagtatctccttgtggatttgatttccatttc

SEQ ID NO: 754621 - DNA, 572 bp, Homo sapiens
aattagctgggcctagtggcctcgcacctgtggtcccaactactcgggaagttgaggtgggaggatggcttgaacccgggaggtggaggtagcagtgagccactgcactccagcccaggcggtagaggagaccccayctcagaaaaaaaaaaaaaaaaaagaaagaaagaaggaaaagaaaagaaaaagaaaaagaacaacaacaaactgcaattttcatttgagggggttgtgttttaaagtcaaccccgacccgccacagtggctcacgcctgtaatctcaacactttgggaggccgaaggggctggaccacctgaggtcaggagttcgagaccagtctgtctgaccaacatggtgaatcccgtctctactaaaaatacagaaaattaccgggcgtggtggcatgcacctataatcccaccagctacttgggaggctgaggctggagaatcgcttgaaccgggcaggcagaatttgcagtgagctgagatcatgccactgcactccagcctggggtacagagtgagactctgtctaaaaataaaaatcaatcaatcaataaataaagtca

SEQ ID NO: 754622 - DNA, 572 bp, Homo sapiens
aattagctgggcctagtggcctcgcacctgtggtcccaactactcgggaagttgaggtgggaggatggcttgaacccgggaggtggaggtagcagtgagccactgcactccagcccaggcggtagaggagaccccacctcagaaaaaaaaaaaaaaaaaagaaagaaagaaggaaaagaaaagaaaaagaaaaagaacaacaacaaactgcaattttcatttgagggggttgtgttttaaagtcaaccccgacccgccacagtggctcacgcctgtaatctcaacactttgggaggccgaaggggctggaccacctgaggtcaggagttcgagaccagtctgtctgaccaacatggtgaatcccgtctctrctaaaaatacagaaaattaccgggcgtggtggcatgcacctataatcccaccagctacttgggaggctgaggctggagaatcgcttgaaccgggcaggcagaatttgcagtgagctgagatcatgccactgcactccagcctggggtacagagtgagactctgtctaaaaataaaaatcaatcaatcaataaataaagtca

SEQ ID NO: 754623 - DNA, 494 bp, Homo sapiens
caaacccgtaaataagctttatctcagccaccataatcatgatgcaccattactgcttagaagatagaggggtgcacccaagtaggtatggaggggtctcaggtagcttagagtggcctcagccaagaccgcaagtatacggctacctcagttccacaactttaagaagttagacctgccygtaacccaaatgtgcttgaaaacaggttctctctgagtccttagttagtcagcagcctggttgataccctaactttgattttgtgagatcctaagcagagaaaccaatccaggctgcatggatttctgatctacagaactgcttatatatttgtgttattttaagctgctgaatcggggacaatttcttttgcattagtaacaaacctaatagatgtggtgcctgcatattctgaagtaacaaatgaaaatcaggcatgaagttttttattttctagtcaactggtctcagggaactccacatgagatcacag

SEQ ID NO: 754624 - DNA, 484 bp, Homo sapiens
agccaccataatcatgatgcaccattactgcttagaagatagaggggtgcacccaagtaggtatggaggggtctcaggtagcttagagtggcctcagccaagaccgcaagtatacggctacctcagttccacaactttaagaagttagacctgcccgtaacccaaatgtgcttgaaaacaggttctctctgagtccttagttagtcagcagcctggttgataccctaactttgattttgtgagatcctaagcagagaaaccaatccagsctgcatggatttctgatctacagaactgcttatatatttgtgttattttaagctgctgaatcggggacaatttcttttgcattagtaacaaacctaatagatgtggtgcctgcatattctgaagtaacaaatgaaaatcaggcatgaagttttttattttctagtcaactggtctcagggaactccacatgagatcacaggtgcaggattaggga

SEQ ID NO: 754625 - DNA, 497 bp, Homo sapiens
caaacccgtaaataagctttatctcagccaccataatcatgatgcaccattactgcttagaagatagaggggtgcacccaagtaggtatggaggggtctcaggtagcttagagtggcctcagccaagaccgcaagtatacggctacctcagttccacaactttaagaagttagacctgccygtaacccaaatgtgcttgaaaacaggttctctctgagtccttagttagtcagcagcctggttgataccctaactttgattttgtgagatcctaagcagagaaaccaatccagcctgcatggatttctgatctacagaactgcttatatatttgtgttattttaagctgctgaatcggggacaatttcttttgcattagtaacaaacctaacagatgtggtgcctgcatattctgaagtaacaaatgaaaatcaggcatgatgttttttattttctagtcaactggtctcagggaactccacatgagaccacaggtg

SEQ ID NO: 754626 - DNA, 497 bp, Homo sapiens
caaacccgtaaataagctttatctcagccaccataatcatgatgcaccattactgcttagaagatagaggggtgcacccaagtaggtatggaggggtctcaggtagcttagagtggcctcagccaagaccgcaagtatacggctacctcagttccacaactttaagaagttagacctgcccgtaacccaaatgtgcttgaaaacaggttctctctgagtccttagttagtcagcagcctggttgataccctaactttgattttgtgagatcctaagcagagaaaccaatccagsctgcatggatttctgatctacagaactgcttatatatttgtgttattttaagctgctgaatcggggacaatttcttttgcattagtaacaaacctaacagatgtggtgcctgcatattctgaagtaacaaatgaaaatcaggcatgatgttttttattttctagtcaactggtctcagggaactccacatgagaccacaggtg

SEQ ID NO: 754627 - DNA, 506 bp, Homo sapiens
tccattccattccactcgggttgattccattgtattcctttccattctattccattccattgcaatcgagttgattccattgctttgcattccattccattccattccattccggatgattccattccattgcattccattccattccattcccctgcactcgggttgattccattccattccactccattctgttccattccattccattccattgtattcgggttaattccattccattccattccattccattccattccmttccattacaatcgagttgattccattccattccattccattccagtcctttccattccattccactcgggttgattccattctattagtttccaatccattccattcccttccattccactctggttgataccattcctttccattccactcgaatacattccctcctattccactcggaacgattccattccattccattccattccattccattccattccattacattccatttcgtt

SEQ ID NO: 754628 - DNA, 506 bp, Homo sapiens
tccattccattccactcgggttgattccattgtattcctttccattctattccattccattgcaatcgagttgattccattgctttgcattccattccattccattccattccggatgattccattccattgcattccattccattccattcccctgcactcgggttgattccattccattccactccattctgttccattccattccattccattgtattcgggttaattccattccattccattccattccattccattccattccattacaatcgagttgattccattccattccattccattccagtcctttccattccattccactcgggttgattccattctattaktttccaatccattccattcccttccattccactctggttgataccattcctttccattccactcgaatacattccctcctattccactcggaacgattccattccattccattccattccattccattccattccattacattccatttcgtt

SEQ ID NO: 754629 - DNA, 529 bp, Homo sapiens
gggttaattccattccattccattccattccactccattccaatcgagttgattccattccattccattccattccattccattccattccattctattccactccattccagtcctttccattgcattccactcgggttgattccaatgtattcctttccattccattccattccattgcaatcgagttgattccattgctttgcattccattccattccattccattccggatgattccattccattgcattccattccattccattcccctgcactcgggttgattccattccattccactccattccgttccattccattccataccattgtattcgggttaattccattccattccattccattccattccattccattmcaatcgagttgattccattccattccattccattccattccattccagtcctttccattccattccactcgggttgattccattctaatagtttcctttccattccattcccttccattccactctggttgattccattccttt

SEQ ID NO: 754630 - DNA, 518 bp, Homo sapiens
tcctttccattgcattccactcgggttgattccaatgtattcctttccattccattccattccattgcaatcgagttgattccattgctttgcattccattccattccattccattccggatgattccattccattgcattccattccattccattcccctgcactcgggttgattccattccattccactccattccgttccattccattccataccattgtattcgggttaattccattccattccattccattccattccattccattacaatcgagttgattccattccattccattccattcyattccattccagtcctttccattccattccactcgggttgattccattctaatagtttcctttccattccattcccttccattccactctggttgattccattcctttccattccactcgaatacattccctcctattccactcggaacgattccattccattccattccattccattccattccattccattccatttcgttccattcc

SEQ ID NO: 754631 - DNA, 655 bp, Homo sapiens
aatcgagttgattccattgctttgcattccattccattccattccattccggatgattccattccattgcattccattccattccattcccctgcactcgggttgattccattccattccactccattccgttccattccattccataccattgtattcgggttaattccattccattccattccattccattccattccattacaatcgagttgattccattccattccattccattccattccattccagtcctttccattccattccamtcgggttgattccattctaatagtttcctttccattccattcccttccattccactctggttgattccattcctttccattccactcgaatacattccctcctattccactcggaacgattccattccattccattccattccattccattccattccattccatttcgttccattccattctattccgtatcattccattccattccattccattccattccattccattccattccactcctgttgattccattcctttccattccattcggtttgaaggcattccattccattccattccattccattccattccattccattccattgtactcgggttgattgcattccattgcattccattccattccattccgttgc

SEQ ID NO: 754632 - DNA, 617 bp, Homo sapiens
ccattccggatgattccattccattgcattccattccattccattcccctgcactcgggttgattccattccattccactccattccgttccattccattccataccattgtattcgggttaattccattccattccattccattccattccattccattacaatcgagttgattccattccattccattccattccattccattccagtcctttccattccattccactcrggttgattccattctaatagtttcctttccattccattcccttccattccactctggttgattccattcctttccattccactcgaatacattccctcctattccactcggaacgattccattccattccattccattccattccattccattccattccatttcgttccattccattctattccgtatcattccattccattccattccattccattccattccattccattccactcctgttgattccattcctttccattccattcggtttgaaggcattccattccattccattccattccattccattccattccattccattgtactcgggttgattgcattccattgcattccattccattccattccgttgcattcc

SEQ ID NO: 754633 - DNA, 617 bp, Homo sapiens
ccattccggatgattccattccattgcattccattccattccattcccctgcactcgggttgattccattccattccactccattccgttccattccattccataccattgtattcgggttaattccattccattccattccattccattccattccattacaatcgagttgattccattccattccattccattccattccattccagtcctttccattccattccactcgggttgattccattctaatagtttcctttccattccattcccttccattccactctggttgattccattcctttccattccactcgaatacattccctcctattccactcggaacgattccattccattccattccattccattccattccattccattccatttcgttccattccattctmttccgtatcattccattccattccattccattccattccattccattccattccactcctgttgattccattcctttccattccattcggtttgaaggcattccattccattccattccattccattccattccattccattccattgtactcgggttgattgcattccattgcattccattccattccattccgttgcattcc

SEQ ID NO: 754634 - DNA, 655 bp, Homo sapiens
aatcgagttgattccattgctttgcattccattccattccattccattccggatgattccattccattgcattccattccattccattcccctgcactcgggttgattccattccattccactccattccgttccattccattccataccattgtattcgggttaattccattccattccattccattccattccattccattacaatcgagttgattccattccattccattccattccattccattccagtcctttccattccattccactcgggttgattccattctaatagtttcctttccattccattcccttccattccactctggttgattccattcctttccattccactcgaatacattccctcctattccactcggaacgattccattccattccattccattccattccattccattccattccatttcgttccattccattctattccgtatcattccattccattccattccattccattccattccattccattccactcstgttgattccattcctttccattccattcggtttgaaggcattccattccattccattccattccattccattccattccattccattgtactcgggttgattgcattccattgcattccattccattccattccgttgc

SEQ ID NO: 754635 - DNA, 598 bp, Homo sapiens
atgagaacacatggatacatagaggggaacaacacatactaaggtccattggatggtggagggtgagaggagagatagaattgggaaaaataactaatgggtactgggcttaatacctgggcgataaaataatctgtacaacagatccccataacgtaagtttacctatgtagcaaacctgcacatgtaaccctgaacttaaaataaaagttttttwaaaaaaagaatgaatgaattttctggttagtatgtgacttacccaggtagacctagtatattaactgtttatgaacactattttggcagaaaatgaccaatacatcctatcacttcatctttaagtgctgcaatatgataaaaggagatgtagaggcttccagttaattgcatagaactgaatatgcactcaattcctgttatcccggtgatagtctcatagtcagagtagttggataacgtggagatttgacaagactttttcttctctcttttgacttgtttcagtgtgaaacaccttcctgagtaggtgttttgactcttttcctgagtaggcattttgactcttctgtcacaaacttctcataggatacctgaccca

SEQ ID NO: 754636 - DNA, 466 bp, Homo sapiens
gttgattccattctattagtttccattccattccattcccttccattccactctggttgattccattcctttccattcaactcgaatacattccctcctattccactctggacgattccattctattccattccattccattccatttcgttccattccattctattccgtaccattccattccattccattcctttccattccattccwttccactcgtgttgattccattcctttccattccattcggtttcaaggcattccaatccattccattccattccattccattccattccattccattccattccattgtactcgggttgattccattccattgcattccattccattccattccattccattccgttgcattccattccattacattcggattgattctattcaactcccttactctccattccattccattccattcgggttgttccattccatt

SEQ ID NO: 754637 - DNA, 466 bp, Homo sapiens
gttgattccattctattagtttccattccattccattcccttccattccactctggttgattccattcctttccattcaactcgaatacattccctcctattccactctggacgattccattctattccattccattccattccatttcgttccattccattctattccgtaccattccattccattccattcctttccattccattccattccactcgtgttgattccattcctttccattccattcggtttsaaggcattccaatccattccattccattccattccattccattccattccattccattccattgtactcgggttgattccattccattgcattccattccattccattccattccattccgttgcattccattccattacattcggattgattctattcaactcccttactctccattccattccattccattcgggttgttccattccatt

SEQ ID NO: 754638 - DNA, 497 bp, Homo sapiens
cattccattccattccattccattccattctattccattccattgcaatcgagttgaatccattgcctttcattccattccattccattccattccattccggaagattccattccattgcattccattccattccattcccctgcactcgcgttaattccattccattccattccattccattccgttccgttccattccattccattccattccattccattccgttccgttccattccattccattccattccattccgttccgttccattccattccattccattcyattcgggttgattccattccattccattcgactgccatcgagttgattccattccattccattccattccattccattccattccattccattcctttccattccattacggatgactccaatccattgcattccattccattccattcccctgtactccggttgattccattccattccattccactccattcggttccgttgca

SEQ ID NO: 754639 - DNA, 471 bp, Homo sapiens
tccattccaatccattccattccattactttccactccattccactcgagttgacttcattccattcctttccattccattccattccattcctttccactcgagttgattccattccattccaatccattgcattccattccatgccattccactcgggttgattccattcctttgcattccattccattccattccattgcattccattccattccattccgttgcattccattccattacattcggattgattctattcaactcccttactctccattacattccattccattckggttgttccattccattccattccattccactccattccattgcactcgggttgattccattccattccattccattccattccattccggatgattccattccattgcattccgttccattacattcccctgcactcgggttgataccattccattccattccattccattc

SEQ ID NO: 754640 - DNA, 638 bp, Homo sapiens
ggtatgtcagttaagtctggttgaggcatcgtaaactgtgatactatgtcctcagacaagtggacagtctagtcttcctcagggagggggagcagagtagagggatttaaggaagggaaaactgaaacttttagatctggattttctaagagcagagcttggtatttaagggttctgctgcccgttagccataaatggccttttccttctagaagggaagtgacctgatcagaaaggtatacagtgagaagctatgttaaaataagcttagaggcttcttctattagcagggagagagccacaatagcccttagacaactaggccttcattgtggcactaggtccagcctctttgacaggtatccarcaagtctttggaggagtcttagttcttgcaagtatgccccaagagcaattccttgctttcctgctatgtggagttgaaaaggccaattgaccttagggattcctaaggctggagcctgggatagtagagccattagctgttgaaaggcttgtatttgatttggaccccaaattaaaggctcagagtcaaaatgaccttttaaagctttgtaaaaatggctgagtccttaagctgtaattggggatcaaagtctataatacccagtgagact

SEQ ID NO: 754641 - DNA, 589 bp, Homo sapiens
cttctcagtctgttatctattctgttatctatctttccactccttacctctatgtgatcatttttttaactcataagtgagaatatgcaatttttattttttgtgcctggcttatttcacttaggatgatgacctccagttccatccatgttgytgcaaatgacatgaatttgctcttttttatggccaagtagcatttcattgtgtatatgtaccacattttctttatccattcgtctgttgatagacactcaggttgcttgtgtatctggtattttgagtagtgctgcaataaacatgtgagtgcaggcatcgctttattagtttattttcctttgggttgatacctagtagtggcattgctgtatcaaatggtaattctaggtttagaattcaagaaaattccatactattcttcatagtgactgtactggtttacattcccaccaatggtgtttgagaattcccttttctccatactctcaccatcatctgttattttttggtctttttagatgcctaatagacattctggctgggataaaaggatatctcattttgtttttcatttgcatttctctgatgatta

SEQ ID NO: 754642 - DNA, 589 bp, Homo sapiens
cttctcagtctgttatctattctgttatctatctttccactccttacctctatgtgatcatttttttaactcataagtgagaatatgcaatttttattttttgtgcctggcttatttcacttaggatgatgacctccagttccatccatgttgttgcaaatgacatgaatttgctcttttttatggccaagtagcatttcattgtgtatatgtaccacattttctttatccattcgtctgttgatagacactcaggttgcttgtgtatctggtattttgagtagtgctgcaataaacatgtgagtgcaggcatcgctttattagtttattttcctttgggttgatacctagtagtggcattgctgtatcaaatggtaattctaggtttagaattcaagaaaattccmtactattcttcatagtgactgtactggtttacattcccaccaatggtgtttgagaattcccttttctccatactctcaccatcatctgttattttttggtctttttagatgcctaatagacattctggctgggataaaaggatatctcattttgtttttcatttgcatttctctgatgatta

SEQ ID NO: 754643 - DNA, 591 bp, Homo sapiens
taaatttatagaaatcctattggaatataaatcaaatataagacaaatatatttaactggatttttgcatataaaaacatgcaacaagaatatattttattactatgtgataaaatagttttcaaaaggtatttaaaataagtaaaaattaggccagggtggtgactcacgcctgtattcccaacaccttgggaggccgaggtgggcagatcagttgagttcaggagattgagaccagcctggccaatgtggtgaaaccctgtctctactaaaaatacaaaaattagctgggcgtggtggcaaacatctgtaaccacarctacttgggaggctgaggcaggagaatcgcttgatctggaaggcggaggttgcagtgaactgagatcacgccactgcattccagcctgggtgacagagtgagactttgtctcaaaaaataatagtaataataaaataaaataaaaaataagataaaacaactgaaaatcaaataaaaacctaaactatttgattggtattaaggtttttatccagaaacatttgtatattttctatcattgattgctttacgatattttagccataaaggga

SEQ ID NO: 754644 - DNA, 591 bp, Homo sapiens
taaatttatagaaatcctattggaatataaatcaaatataagacaaatatatttaactggatttttgcatataaaaacatgcaacaagaatatattttattactatgtgataaaatagttttcaaaaggtatttaaaataagtaaaaattaggccagggtggtgactcacgcctgtattcccaacaccttgggaggccgaggtgggcagatcagttgagttcaggagattgagaccagcctggccaatgtggtgaaaccctgtctctactaaaaatacaaaaattagctgggcgtggtggcaaacatctgtaaccacagctacttgggaggctgaggcaggagaatygcttgatctggaaggcggaggttgcagtgaactgagatcacgccactgcattccagcctgggtgacagagtgagactttgtctcaaaaaataatagtaataataaaataaaataaaaaataagataaaacaactgaaaatcaaataaaaacctaaactatttgattggtattaaggtttttatccagaaacatttgtatattttctatcattgattgctttacgatattttagccataaaggga

SEQ ID NO: 754645 - DNA, 558 bp, Homo sapiens
actatataatgatttgcctgaaagacataaagcccctacagggtcaagatcctgtcttacacacctctggagcctcactttgctactgcaatgccttgcacctagaatcattcacactcagtaaatatttgttggatttaattggatggtcattatcaacccctgggttaatttactactcctatcaccaaaaagttactaatgctttcaattacttataatagctacattttaaacttgcaaattaaattactttattttaaaacaaatrccatgtttctgacattggtacaaggaaaataagcattgatggaaaagatcttggtcccctagaaaatgtaggtataaccacatgactcaaatggacacaataatccctcattttattctgctatagctaaaaaaaggaagagaaagataactcattgcttcatggctgtgaagtttgttatgaagcttcaaaaaaatttaaattcttattttagtatttgctagaaaatctaaaagaaaatcgtctttaaaattccagcaacttttcctctgtgaaaaatttagttc

SEQ ID NO: 754646 - DNA, 558 bp, Homo sapiens
actatataatgatttgcctgaaagacataaagcccctacagggtcaagatcctgtcttacacacctctggagcctcactttgctactgcaatgccttgcacctagaatcattcacactcagtaaatatttgttggatttaattggatggtcattatcaacccctgggttaatttactactcctatcaccaaaaagttactaatgctttcaattacttataatagctacattttaaacttgcaaattaaattactttattttaaaacaaataccaygtttctgacattggtacaaggaaaataagcattgatggaaaagatcttggtcccctagaaaatgtaggtataaccacatgactcaaatggacacaataatccctcattttattctgctatagctaaaaaaaggaagagaaagataactcattgcttcatggctgtgaagtttgttatgaagcttcaaaaaaatttaaattcttattttagtatttgctagaaaatctaaaagaaaatcgtctttaaaattccagcaacttttcctctgtgaaaaatttagttc

SEQ ID NO: 754647 - DNA, 627 bp, Homo sapiens
tggaagaatccagcaaattttgaagagatcataaaattagtcttggtgtttaccaaggagaccaaatttccaaacagagaaacattgaccatgcaaaggcacagaggtaggaaacagcatttcatgttagaggaactttacgtagttaatgtgtgcgaagctaagagtttaagattgggctgggtgaggggtcatggtgaacactaaaactgcagaggtaggcaaaggccagatcacggaaggatgactacaccctattaaataatttgggttctttgcaaaaagtaaacggggctattataaaagaaataaaactatcatatttgtagtttagaaagatgacttcagcactagcatagtgggtgagttggagggattaagcgaatgttaccagttcatgcaagagaagctaagggcttgaatgcaagcagtgtcattgtcctatcggttcttaaacrcagttatcattatttccatttcatagatgaagaaaagaagccacagagagaacttgggcccaaagtcacacagcaagtcaaaagtggagttgggattcacattctagctaagggacctggtctgaattctaaacagcaccttcctctgatttcatagtatattgctctt

SEQ ID NO: 754648 - DNA, 658 bp, Homo sapiens
cttaccacttgttattggatcctttttataaggtttttgtttgtttagcactagaaattaattttgagagcttattacaacaactgtaggtgacctagaaaaaagtgtataaatttagatgtctcttttatgtgtatctgagggcttttaggaatacaaataagaaaactagatcctgagcctttatagttttaacagaattttcttaacttactgttttattgggggaggttcccctgggagtgtatgctcaagttcgaatttcttatctagcaaaataaagtttatttctcccttcttccagtttgtcccaaaggtgacacagtgctacatttgttcttagacaagattgctgatgaaggacgatgcttgggatgttggtggcmcatggcacagcagtagccaagtgcccactgactactggctccctcagatttccccctgacgtgattcatttcacagtgggctaattacaaagtggatttgctacacatgaaacagcctcctcagttgcaatgttaatgcacattttcatggtaatgtgatcagaggctcattagccagtttccaaaatgatcttctgcattaattaaatataaaaatgactgctttatcaccatagacaggaaaaagaagattaacattgttaattacacca

SEQ ID NO: 754649 - DNA, 579 bp, Homo sapiens
actataagctaagtaggattgtttttgcaaaatccagaagagtatagttttttctgaggaaatataaaaatcattgaaaagtatttgaggctgtgaaatcattattgtaatgcttagtatgtgcaaacaatattagcgttcatatgtcaagatcaatggctatttattatatgacctatacattcatttatttattatcatgaaatttatatgcaaatttcattcttttctctaagaacaatcaaatacaatcttaaaaaaaggacagtcagtgtaatctcaagatcttacttgcctattggggaatgctcttttcttccagttatcatgcagctgacctctattttcataagctatttaatatctctcaaagtaaagaagtctatgacctttaaatgctctactgctacacatgatcccttagaaartgcaagcattgatgatcctaaacacatttttttttcacttcacttgaagttcatcaacatactgttagcccatcaaaaggtcaccattttatatattatgcctttcccaagaaaagaaaagaagagcttaattgggattttctggcaattg

SEQ ID NO: 754650 - DNA, 629 bp, Homo sapiens
aaatggcctcctggctccattttagattctttgattaacctgttgtcattttccttcttcagatcctaacaccaatttctgtcacatcttgagtataaaaagcaataataaatatgaaatttcataagcccaagtaaaatatytctcctctttacattcacgtatttcttctgaactggaataaaatatcccgcatataaccaattatttttctttgccgagcaacagatttattattcatttatgtgaaaaaagtttagcacaaagatatgtcatgtagaaagataaagcatgacactttttatattttcactgattttttaaaaagagacatttctcaacttgtagaactatataaacacagacatgaaagacaccaacatcacatttttaaacaattggcaagcacattgggccttaataaaaataaaattaaactggtaattttggaaactgcatactgtgagatgtgtacatgtttcttctggaaaaatctacatgttggttcctaatgaagattatctattggagtaattcaaaggcaatgaatatttcaacctagttgtgtcaagaggagaaacaataatgacaggcattagatctggaaagaactgagcacttaagataga

SEQ ID NO: 754651 - DNA, 617 bp, Homo sapiens
aaagtaccgtctaaatgactacctttgcaaaacgtacagtattgcactaggtcatcttcaagtctcctttacctctgaagtggatttctatgaacttcagtttcctgatgtgtaatacgaagggatggaaccccatgatctttgtaggaggtgccttcctatgatgatcctaaactatggaaacttgaattagatgagcacagtgttctaacagacattctcactaacctagtgttagtgaatarataagaatgttttatagtcagaatggaaatctcatgcatgtaaatcctggaagaaaccatcttcatgattttttaaaatgccctctacaaattactgataccacattgtttgcattaagtgagaaaagtagtttattatataatggtaaactttatccaagggcacagaatcatatagtctgaattaataataattacaccttattgttgaaactgtgataaaatgcttgataaatgtaatataatttcattcaaagaaatcactcccattttacagataaggaaatacaagcagaggaatgttagaaacttactcaaggcagagccaggatctgaacccaagtcagtctccttaatcacatttaaggcttg

SEQ ID NO: 754652 - DNA, 615 bp, Homo sapiens
cctgctgctcattgcttcccagactggagatggcctgcaatgcgatgctgtgtgccgctcacccaccgatgtccacgttgctttccagtaactccatgttacatttctcctggctgatagctgttcccttccaggtcctgctggaggacctcctccttgatgagctggcaggcatggagtggttgggtgcaccatggaaagagcaggcatgcagggctggccctggcatttgggtgggcccagggatttctgcaattgatttgtggatgagtcgagaaagtacctggattcagccacgctgcagtcccaagtaggagctctgtctggagtacacctctgcactgtctgcagcccccayccatgaatgcagctgctgtcattcggccagcaggtattttcaggcaccttccataaaccagacacttattaagccctgggtagctgacattctggggaaggagtgagaagttagggagcaatcaacaaaaccactctcacttctgacaccatttcaagtttagggagttcccaaaccatcgttaggtttgacagttctccatagagggattcacagaactcaccaaaaactgtcgtatccctggttccagttcctta

SEQ ID NO: 754653 - DNA, 594 bp, Homo sapiens
aacgttggggatcgctgctctagaggtagcaggagtttgtcaaggtttcctgactgagtttctaggaataagataagaagtgtgaggaagatttcagctgctagtagaagttacaagtactagacttggggaccaccaaaggaagcttttctccacttacaattctggtattaggaaaaaaaagtggcaacaccaataacccagttattggctgtcactctgtgatgccacagaaagttaatattcgaggggtagctttgtgcccagaacttgaaaatgtaaggtgactaaagtaacagcatcactgaaagaaagaaaaactgactagaagcagcaagctttatatcagctacctaagaaggaagggactcgaggaagagttccaaaattactmtgatgaggctcaggtccataaagtcagttttatggttggtgttctgactgctattctttgaattgacccctttggttatagaaagcacctgatacttaaacatacaaaaattctaagttgacgtacaactttctttataggatgtttaatatgattgagatgaaagagcattccagtgtatttttcccactttcaagaat

SEQ ID NO: 754654 - DNA, 591 bp, Homo sapiens
ttaacaaaacactgggaagaatttaacctcaagtcaattaattaatgttattgaattctggtttgttgcttgatgaattaataagagtttgctgtaatcagccatagcatcaactttggactcacaaggatgccagatatgcaatctggtgaccttgaataggtgacacgtttctatcaactctcctctgccacccatcttctccttctactcaatttcacttttgcctgacaaaaagactagagcagcttgctggagatgcagcatggttcagctggtggataagagcacagacattggagccgaactgtctggagttgcaatcccagcccaactactttctagctaggagaacttaagcaagttagttaattgttcagtgctgcagtacgctcacctataaaatggagatgttaataatgattcatgastcatagggttgttttgaagattaaataagttcgtagttataaggtaatcagagaggtacctggcatatagaaaactccatagtagtacttataataaataaatattctcagcaaacactatgagcaggaaattataattaacttggatgaccataaccat

SEQ ID NO: 754655 - DNA, 624 bp, Homo sapiens
acattgcacagcagggtgactatagtcaaaaataatgtattatatattccaaaataacttagagagtagattttaaatttctcaccttaaaaaatgataggtaagtgggctgggtgtgcttacacctgtaatcccagcactttgggaggctgaggcgggtggatcatgaggttatgagttcaagaccagcctggccaagatggtgaaaccctgtctctactaaaaaagttacaaaaattatccgggcacggcacggtggcaggcgcctgtaatcccagctactcaggaggctgaggcaggagaatcgcttgaaycagggggcggaggttgcagtgacccgaggtcacgccactgcactccagcctcggtgacaagagtgagactccgtctcaaaaaacaaacaaacaaacaaacaaacaaaaagtgataggtaagtgatgtgatggatatgatagtttaatttcatcatgccacattgaatacatatatcaaaacatcaccttgtaccccataaatatatataattatgatttgtcaatcaaaaaatattaataataaataaaaataaagtaaaataaataaatctactcgaagcaatgaaataataaatatgaagcataatgg

SEQ ID NO: 754656 - DNA, 638 bp, Homo sapiens
ctgtagcaagcaccaaatcacaggagctttgcgagacaatcacactggcagcaaataaaaagtctccacctgccagggtggccttattttcctccttcagtcagggtgacagaaattctctctctctaattgaatatccagtggccctttagtctgcttttaactgcttatttaacaaagcacttgaagaaattgttgtaagaactagtccccttttagattattttagtggcagaacttttttcaaagccacaaatgcagtatcagcattcatagtgtgtattcataataaaaatgaaacwccctttccactccataatgacagggtcatgcaaaaataaatacctgagttatttgcttatttcctccttgccttgagtcagaaaccacagactccaatgcccactaggaccaggcaatttacataaataaatgaagccagctgggtgtaagacagaatgtggagagatggggacttaggatagcagatagcgtacacctgtccaaaaattacagccgttttccaatctttaaaatctggcgctgcccaaagaaaacatctccaggctgaattcagcacacagggtagatgtagcaggccattttatcacttttatgttaattaagttaaagttaat

SEQ ID NO: 754657 - DNA, 582 bp, Homo sapiens
agggatccctcctcttctatttcctggaagagtttgtgaagtataattattttttctttgaatgtttggtagaattcacgagtgaagccatctggccctggtcttttctttgtgagaagatttttaatgactgatttaatctctacttgttacagacctggttagaatttctgtttcttcttgagtttcagtattttgtgtctttctagaaattagttcattttcatttaattacctaatttgttggcatgaaattgttcatagtatttctttataatactttttgtttctgtaagttctatagtgatgcccccgttttcatttctgattttagtaatttcaacctcctctctttttttcttaatcaatttagctaaagatctatcaactttattgatcttttcaaaatatcagcttttggtttgttgattttctaarctttttaaaaatactctatcacacttagttccatgccggtgtttaaaattttcttctttttccttgatttgggttcaataagctctcctttttctagtttctattgtgaaaaattaggttattgatttgagatatttcttcttt

SEQ ID NO: 754658 - DNA, 556 bp, Homo sapiens
atatgaactttttcatacaaatcttggatggaaaattatatttatttctcctggacaaatagttaaggatggaataacagattatttggtagatgtgtatctaaaaatttaagacactaccaaactattcatcaaagtatttaaaacattttattttccaaccagcagtgtaagagagttccagttactccacattcttgccaatagttgtaataaatattttctatatttcttatgatagatgcacacatatatattagcataacagtgttcagatcttataatattcattgataayaaagattaaaaaatacagtttattttcaaaggtgagaggacagaggcaaatagccatttttcaaaggcatctttagaaatctgtcacctttctgttaattcccagtcattatcattagccacaataaaaatgatgactcaaaatattaaatagatagatattatttaatgctaaagccacagcgattatttatttatggatacagaagttacaaataagcctagcaaaactataggtgaagatcaaaaaggaaataaa

SEQ ID NO: 754659 - DNA, 600 bp, Homo sapiens
tatgtacagctaagagcaaatgaatttgaagaataagtaagagctcatcactctaagaagcactgacaaaagtaaactaagaaataagaaaatgaaaataaaaatgatatgattacagctgattttcatcttgacaaacaggtcactgactagtttaccatagaaaggatattagcaattgttgagtggttcctagggaaaagctgagaacaatgatggggytggggttgtggggggtggattcttacaggacctgacccactggtacacttcatgtaagaaagatgcaatagcaaaaataaccagtgcttttcacgagttttatcaataaataatagattttcacctaaaatgttaaataaggggaaaattatgtaatatcaatgcagactttcttcattttgcccattaaaagaactttcttataaagtgagagaagaatattttgattattctttcaactacatattattttaagtctcaatccagttgagatcagttgattgataattattcatcagattttggctctatgcacggcaaagtcaaatattaagggcagaagacaggttatgtttcaaaaatgatcctatgttgtaa

SEQ ID NO: 754660 - DNA, 607 bp, Homo sapiens
taaccacatttatttaagaatgtattccaaaatcaaatggcaaatttcaacaattacttttgcactcacttagtaactttataacttttttttttttttttttttgagatggagtcctgctttggcgcccaggttggagtgcagtattgygatctcggctcacggcaacctctgcctcccgggttcaagtgattcttctgcctcagcctcctgagtagctgggattacaggcgcatgccaccaggcctggctaatttttgtatttttagtagagacggggtttcaccatattggtcgggctggtctcaaactcctgacctcaggtgatccacccgccttggcctcccaaagtgctgaaattacatgcatgagccacctcacccagccaaacttttaaattttttaaacttactcttttgtcaataagctcattaataaatgttattacacttagcttaaagtacacattgtacagctgtacaaaaatatttcctttctttatatccttattccagaagctttttctattttattttatttattttttgatacggagttttgctcttgttgcccaggctggagtgcaaatggcatgatcacggctcac

SEQ ID NO: 754661 - DNA, 513 bp, Homo sapiens
agctgctgttcccagatacagtatctttcttggagcaaattagtatttgtaaggctgctagtttgtttgtttttttccttttttttttttttttttttttttgagacggagtctcactctgtcaccaggctggagtgcattggtgccatctgggctcactgcaacccctgccccctgggttcaagcagttytcctgcctcagcctcccgagtagctgggactacaggtgcgcaccaccacgcccagctaattttggtatttttagtagagacggagtttcaccatgttggccaggatggtcttgatctcttgaccttgtgatccgcctgcctcggcctcccaaagtgctgggattataggcatgagccaccacgcccggactttttttttttttttttttttttttttgaggcagagtctcgctttgtcgccaaagctggagtgcaatggtgcgatctcagctcactgcaacctctgcctcccgggtttaagagattctcctgccaagcagca

SEQ ID NO: 754662 - DNA, 649 bp, Homo sapiens
gagatccgggaaagtgaggggcaagggaaggggcccaaaataagggatccatcagacctgaccccttttccctgaattcttctcaccacagaataacagcaagaattaagaacagaaatgtgcaaactaggccgggtgtggcagctcacacttataatcccaacactttgggaggatgaggtggacggatcaccagaagtcaggagttcaagaccagcctgtccaacatgataaaaccctgtctctactaaaaatacaaaaaaaaaaatttagctggatgtgatggtgggcacctgtaatcccagctactcaggagggtgaggcaggagaatcacttgaacctggcaggcagaggttgcactaagccgagatcacaccactgcactccagcctgggcaacacagcgagactccgtctcaaaaaaaaaaaaaaaaaaaraaagaaagaaagaaagaaatgtacacactgaggaataaatatacgtggagagaacgagctacagggcgatgatttcctagctcagcctttactaggtaactaccatgaacgaggcactggaaatacagagatagaaaggaagagattcccatacagaaaagcagcatgacatgcacatacaaacacaacacgacccagtggcagctgacgc

SEQ ID NO: 754663 - DNA, 598 bp, Homo sapiens
tagaaagggcttggtttacacatgccaaatgatacatggattttcttttggtttcacactttggttttctaattccctatctcttttttatttatctccttatttgttcataatattaataactcgaattttatcttatgacccacagtgttttatcaactctataaatgagtcacattttttcatatatttttcatatatatatatataaacaattgtgatcactggaaattcctaaactttaaattccaaatatttaaagtattccctctgttgctgagggaaatcaggagcatttaataatgtgtgtagattaaatagtgtatactcgtttaagggcgatcttctctggacacccatttgcctcctggaactccatgtcctattccataaaggacctatttactgtgccaaaagatagatcctaaatcaaaragaaacaataaaaggagagctgaaaaaaacagccaaagatattcagtgttatttagactcagcaacaagttttctctattatcagacttcaatatcttgaaaagaatgatagatttttgtgctttttaggacagtttttcacaaaaagctaaggatatttaca

SEQ ID NO: 754664 - DNA, 555 bp, Homo sapiens
agcaaaatatgtcctagctctcagggccatacacatttgcccaagggcactctggaccagtgctccctgtgctaatctttcctaaaaatctttcccacctactaaaaatccttcccacctactaaactataattgggtactttccagaagtcaaccactggctaagtaattgtgctaagtataccatcttgggagaccgtcaaagtgatctgatcacagttttggaatttgcagttgaggaattgatgattataaagagaagcaactttggcaaggtgcagtggttcaygcctgtaattccatcactctgggaggccagggcaggctaatcacttgaagccaggagttcgaaaccagcctggccaacatggtgaaatcccatttctactaaaaatacaaaaattagctgggcttggtggcacacacctgtagtctcagctactcgggaagctgaagcacgaaaatttcttgaacctgggagttggaggctgcagttgctccactgcactccagcctagacggcagagaaagactgtttctcaagaaaaaaaaaaa

SEQ ID NO: 754665 - DNA, 587 bp, Homo sapiens
tcaccattacagtattaaatgttctgaatttgactattttttttaccagtgaattttatatcttcacatgttttcatgtcctgattattgtcctttcatttgaacttgaagaactccctttagagtcttgtaaggcagatcaggagatgaagaacttcctyagcttttgtgtgtctgggaaagtctttattttgccttcatttctgaaagacagctttgccaggtttagtattcttgactggcagggttttttccttcagaactttgaatatattatactactctcctggcctgcaaggtctctgataagaaatccatagctttatggaggttcctttatatgtcatgagcaggttttttcttgccgttttgaaaattcactcttggctttttacttttgatactttgattatcatttttctcagggtaatctttttggagttgatccagtttagggacttttgagataaatgaagctggatggctacatctctcccaagatgtaggaggcattcagcagttgtttatctaaatagcctttctgccctttactctcttttcttttttttaaataatcctgtaatgca

SEQ ID NO: 754666 - DNA, 587 bp, Homo sapiens
tcaccattacagtattaaatgttctgaatttgactattttttttaccagtgaattttatatcttcacatgttttcatgtcctgattattgtcctttcatttgaacttgaagaactccctttagagtcttgtaaggcagatcaggagatgaagaacttccttagcttttgtgtgtctgggaaagtctttattttgccttcatttctgaaagacagctttgccaggtttagtattcttgactggcagggttttttccttcagaactttgaatatattatactactctcctggcctgcaaggtctctgataagaaatccatagctttatggaggttcctttatatgtcatgagcaggttttttcttgccgttttgaaaattcactcttkgctttttacttttgatactttgattatcatttttctcagggtaatctttttggagttgatccagtttagggacttttgagataaatgaagctggatggctacatctctcccaagatgtaggaggcattcagcagttgtttatctaaatagcctttctgccctttactctcttttcttttttttaaataatcctgtaatgca

SEQ ID NO: 754667 - DNA, 619 bp, Homo sapiens
gcatgggtgtgttggtgggaaagatgcaggtgatacatcctactagataaatgggtaggcctcttgtgaagtcataaggcagttagtagaaaccatggccctttgttgtattccatgcctggttgctgtgaggccccaccccatttccctgctcctacctgcccccagactattcagccatgctgatcccctcagtattctgagtgcagagagaaagaagtgggcctttgggcaggaagctgcatggctagagaagcagacactcaactactctctcactttcccccgtggataaattcataaattgagaggatctgtattggcaatgaactgtgctaccttcgggaggagtgatgtgggcagggtaaaactgttcttatgctcttcagtgtgcctactcacaaatttgtttcttcyaatagaatgccaggacatctctgcttaactcctgggctcttctccacggatggttgtcaaaatcagtgtttctgtcaggatacaaaggttgaaaattctgattctgccatctttctgacatcctcaaggccttatatgctgaatcatatgtcattttcacaaagaccttacggggcaaatattaatatccacatcctatgga

SEQ ID NO: 754668 - DNA, 618 bp, Homo sapiens
agctaattaaatgagctaatgtatgtatgttcctgatacatagtagatgctcaataaatggtaactagaaagtctactgtagtaatagtcaggtaatgaaatagaaaaattgcaacattcttttccaaagcccttagtctccggakaacaagcacaggtttacatttcaggatgtggattccatcccactggctctttctcaatgcaactgctgtccttttgttccagtttgcttgggcttcaataacttgaacatttcaacgcctgcatgcacttaacattcttgatgtaaacacactgagttagactttggtgatccagaactcttttcctttctgagatgcctgggccatggaagtctctgcccccagtctttcctgtgtgagaagcaaaaagcctttcctttcctcagtcaataccaccacgccctgcttttcacctgacaagatgatgagaacttgaattatctcctgaatatcttgatgctcagtgctcaggccaactctgctaaaacataacctatctctgaaggatttgttcatgagctgagcaactaaatcttttctcaccagacagttgaccaaaggaaccgataatgtttgatatctttaatattct

SEQ ID NO: 754669 - DNA, 644 bp, Homo sapiens
atgcattacttttattgatgtacaaattatttctttacaggaaatcaaataattcattgaaatgttgggaaaatggtattgtggtttttatttaaattgatgatcacaaatttcacagagaaaaacacaaatatatcaaaataatctttcctagatccgacagaaatttatttaaattttaaactctatatctgattcttaaaattacttcccacaaaaggagataaaatttcaaaattcaggtttcctttaatactgcaaatcttgactcgtactgttttcaaaccattatatcaatataaacaacagatgacatttttaaattatggacagaaacccagcttctgtctataaaataaaaaaaaaagtgaatgccttactttatccatcaaccaagttctatgataatggattttctaaataaagtgagaaatagctagatatawaatgataattcctatctctgttacaaggccttctttttccaagctaagggcatttcctccattgctccccagataaactttccccttccttggggcctctcaagtacaatctgtggtgcatggggacagctcttagagccactgagttgctatttgaactattcaatagttggaattggaaggaagaaaatatagtca

SEQ ID NO: 754670 - DNA, 654 bp, Homo sapiens
ctgggagaagtgggccaccatcctccagactgcagtatgatacatccagaaacagtttagaccatccaactggaaaagccacagacactcaatgccagcccatgaaagcagccaacgggagggctgtaccctgcaaagccacaggggttgagctgcccaagaccatgggagcccacctcttacatcagtgtgacctgtatttgagacaatggagtcaaagaagatccttttggcaatgactgacccmtggattttattgccttacctggatttcagacttgcgtggggcctgtaggccctttttttggccaatttctgccatttagaaggagtgtatttaaccaaagccgtttcttcattgtatctagaaagtaactaacttgcttttgatttttaggctcatagctaaaaagacttgccttacttcagatgagactttggactatggacttttgacttaatgctgaaattagttaagtctttggggaactgatgggagtgcatgattggttttaaaatgtggggatctgatatttggaaggtgccaagggaagaatgatatgatttggctgtgtcctcccccaaatttcatcttgaattgtagctctcataattcccacatattgtgggaggaacttggtgagaggtaattga

SEQ ID NO: 754671 - DNA, 464 bp, Homo sapiens
tttttttcatgtgatggttggccacacgtaggtcttcttttgaaaagcataacaattttttaaatacttcaacttttcattgataatctcatttttctaagctattatttggaaaatcttgatttccttatatacttaactaattataaaagttaagaaaatraaatgttagcattctgtttacatcagtctttgagtagttttattacctaacatcccctgctctcattcttaatctctttagagttctaacattctataactttggagttctactcatggaataagacattttctttactgtaacaggttctgtggagatttgatggaaataaaccacatgctttaggactcaatacttgggtgtacaagtggataccacagaatgaccttcttggtatgactctggagtacaaatactgaatgtattagtaatatcccattagagtattaataattaatca

SEQ ID NO: 754672 - DNA, 464 bp, Homo sapiens
tttttttcatgtgatggttggccacacgtaggtcttcttttgaaaagcataacaattttttaaatacttcaacttttcattgataatctcatttttctaagctattatttggaaaatcttgatttccttatatacttaactaattataaaagttaagaaaatgaaatgttagcattctgtttacatcagtctttgagtagttttattacctaacatccccygctctcattcttaatctctttagagttctaacattctataactttggagttctactcatggaataagacattttctttactgtaacaggttctgtggagatttgatggaaataaaccacatgctttaggactcaatacttgggtgtacaagtggataccacagaatgaccttcttggtatgactctggagtacaaatactgaatgtattagtaatatcccattagagtattaataattaatca

SEQ ID NO: 754673 - DNA, 594 bp, Homo sapiens
ttgtctaagccaatgtctagaaaagactttctgatgttatcttctagaatttttattgtttcaggtcttagatttaattccttcatctatcttataaggtgagagatgtgaattcagtaccattctactacatgtggcttgtcaattatcccagcaccaatggttgaataggctgtcctttctccgctttatgtttttgtttgttttgtcaaagatcagatggctataagtattcaattttatttctggattctctatgttgttccattggtctacatgtctgtttttatacctttgccatcatgtttcagtagctacagctctgtagtagtttgaagttgggtaatgtgatacctccagatttgttctttttgcttagtcttgctttggctatgcagacttcaagctgagaatcaaatmaagaattcaacccttttcacagcagctgaatcaaaaagaaaaagaaaaacataaaatacttagaaatatacccaaacaagaaggtaaaaaaccgctactaagaaaactacaaaatacttcccaaaaatatcatagatgacacaaacaaatggaaacacctcccatgctcatgga

SEQ ID NO: 754674 - DNA, 598 bp, Homo sapiens
gcctcagacaaaactcaggacaccataaaacttgcctgaacttgaagctaaggtagcaacagaggcccactgaatgcctctccaattttgagcttcttctccagtggaactggtatgtcctcttgagtcctggatctcctttyggtatatagtccttgatttattctgaacattttttcttttttttctccttggaggttgtcttttagaatcctaattatacttcaggagttcattctaaagggtcctctccattgccttttttcccaaatataagctcaaaaggcttctctgcacttttgtatgagaagctgaactattattttcacagataaatgagagaccagagactgagctcctcagctctgaagagaaagggcattttactcctcccagccaagggggcccacttggaatgtctgggatgttaaaacttcatgatgtatagtggccaaacagagaacccctgccaacacaacgagtttaaaaaagctcatctagaaaatgcatgtaagagctgatcactcagtgttttgagccctcatggaggtgatagctgtctggagagagaaactaatgagagaaaagaaaataagga

SEQ ID NO: 754675 - DNA, 615 bp, Homo sapiens
aagaaactttgaaaatagggttggttaaattaaagtcttgattatgcaacacctaagaaggtattggtcattcattcaaagaatatttaccaagagattatcacaaaacacaggtaagtgcacaattttcagagaaaaaaaatagacacagtttctgtccctacataccttacattctactttgaaatatagaatataagtaagtaatgaatattatataaaaactattatctcaagaaaaaaacccaatgctaagaaagcatcagtggagataatagaaagtatcctggagtcactgatgagtacgatgagagctgaacaatatgcaggaatagggaaaagaatggtggggagagacagacaaaaagggaaagcagataaagtggtcaggacagttctcaagtcctcaggtttagtttgcagggaatgattaagaatcagatgacsctaaaaggtaaattagagccagatacgtattaggagttgaaatatttattaagaacattgaaaacatcctaaaaagagttcagaaataaggatatatgaaatgattctttttataagaaaagcctccaagatattcaatggattaaattgcagaagggccagactgta

SEQ ID NO: 754676 - DNA, 505 bp, Homo sapiens
tcagtgactcagaaatgttattaattttgcaattatggttattttattactaatactactaactacttaacatgtgcatgtcacttgagatatcattcctcatttaagagaaccagattattcagcacatcaaggttatattgtcttggaawgtcatagatgacagatacccttggacttgattaaaagtagacatatcagttgtgacagcaagataagctagttgaaattttaaaattcttccataagtaataaggatcttcaccagtattccagcttaaaacacttcctcaacaatataaatgtgtgcctcaaatatgtgcagacaaacacagggttcacatgattttaataaagcatttaaatcattctgcattgagatcccagaattttacattttagagcataaacatatcctattagagcagatgatttctgccttatgacaggccactcaataaagcttcctgggggaactcgtcttgacatcataggtgtctgacag

SEQ ID NO: 754677 - DNA, 634 bp, Homo sapiens
atgtccagaatccacaaatggctaaaaaaaaaaaaaaaagaaaaaaacccatcaaaaagtagcctaaggtaataaatagacaattcttaaaagaagatatataaatggccaacatatatgaaaaaatgctcaacttcactaattatcaggaaaatgcaaatcaaaaccacaatgcaataccactatactcctgaaagaatgaatataatttaaaaatccaaaaataataaaatgttggcatagatgtggtaaaaaggggacagttttatgctgctatgggaatgtaaactagtacaactactatggaaaaccatatgaagattcctgtaagaaataacagtagaagtaccwtttaatccagcaatcccactactgtgtatctttacagaggaaaggaagtctttatatgaaaaagacccacacacatatatgtttccaacagcactgtttgcaattaaaaaaaaaagaatggaagtagcctaaatgcccatcaaccaaccaataggtggataaagaaaatgtatacacacacacacgcgtgcgcgcacacacacacacacatatacacacacatatacatactatatatatatacaccatggaatactactaagccataaaaataaacaaacta

SEQ ID NO: 754678 - DNA, 560 bp, Homo sapiens
tacatacaccaatactatatagaatagagatccacaaaataaatttatgcatttactgctgccatagtatggatatttgagccctccacacttcatgttaaaatttgatccccaatattgggggtagaatctaacagaatgtgyctttgtcatggaagcagatccctcatgaatagattaatcccctgcctgggaggcgaatttttactctattagttcccagaagagctagttgttttacaaaacctggcactccctcacatcccctctttatggtttcctctcttgtcatgagacctttgcatataccagctcatgtttgccttctaccacaagtggaagcatcttgagaaccttaccagaggccaagcagaagtcagtgctgtgcttcttgtacagtatgcagaactatcattcaaataattctatttgatatataaatttgctagtctcatgtgttcctctataacaacacaaatggaggaatatagcagctaactgacttttgacaaaggtgccaagaacacataatagaaaaaaggcaacctcttcactaaatg

SEQ ID NO: 754679 - DNA, 513 bp, Homo sapiens
tggaagagatccttcctgtatcaagtctgcagctctttctcttttaaaggaatattttaatggagtttacaatacttaaatgatgagttttgacagcacacttcagcctgtgttatatatatccgaaaagccagtcaaacggaggtctcctggaatgcttctcaggtttcccttggtgctctgagggattcagttcacctggagttatgattgattctgagcctcaggcagtaaatgagcagmtgtctacatagacatctcctttagtttttcagttattgccatgacagtctcatgtacttgcagtggaactgttatgggtataatagtcctgtcatacacaaattttaattcatttaatttttaaggaattcagttttctatcagcaagaaggatataattgagtttccatgaaggtgtaattaaacacagtgtatcttggccttgcggagatttaactcacttcacacagatttgtattccaatgccttcaaataatttccatcaaaata

SEQ ID NO: 754680 - DNA, 587 bp, Homo sapiens
ccctcataaaacctaccctgttctctccatgctttatcacaaatcacctattgcctgagagaagataattggaaaacaatgtcaatcttattaagtcttcttgttcatttctctgttggctgtatccactccctagaataatttttatgagagcagtgatttagttttcttattccctatcatatscccaatgcctgaatcagcatctgacccatagtaggccatcagtaaatacatgttgaacaaataataaacacttacagaggaatattttcatacaagctggttgattgtcacaaagacaaagtatattcatgttaaatgaaactcagaaggttgtaaacagcatttcaaacttgtaactgccctttaactgttaagtgcatttacagttcagtttaacacagcctgtatcttcatttataagcccggtgagggcaaggatttgtggtttttgtaattattttgttaattctctttccccaggagcctcatggttttgtcagctgaaatagtacacccactatagagtagagtgaatttagtgtttatttctgctgatgatgaaggagccattccaaattact

SEQ ID NO: 754681 - DNA, 587 bp, Homo sapiens
ccctcataaaacctaccctgttctctccatgctttatcacaaatcacctattgcctgagagaagataattggaaaacaatgtcaatcttattaagtcttcttgttcatttctctgttggctgtatccactccctagaataatttttatgagagcagtgatttagttttcttattccctatcatatgcccaatgcctgaatcagcatctgacccatagtaggccatcagtaaatacatgttgaacaaataataaacacttacagaggaatattttcatacaagctggttgatwgtcacaaagacaaagtatattcatgttaaatgaaactcagaaggttgtaaacagcatttcaaacttgtaactgccctttaactgttaagtgcatttacagttcagtttaacacagcctgtatcttcatttataagcccggtgagggcaaggatttgtggtttttgtaattattttgttaattctctttccccaggagcctcatggttttgtcagctgaaatagtacacccactatagagtagagtgaatttagtgtttatttctgctgatgatgaaggagccattccaaattact

SEQ ID NO: 754682 - DNA, 589 bp, Homo sapiens
gagtgaatttagtgtttatttctgctgatgatgaaggagccattccaaattactctactggaattacattgaacatggacaaaaatcttcaatcaaacaaattcatacaaaaggaattcagggtatttaatcagaagagaaggagacagaggaggcaaagataccattttcaagtgtcgggaagtccataatgtcatttagaagagggcatggtcctgttcagtgttgcrtgtattattgctcctttccatgcctatctcaataaagaaaatagagcagattttagttcaatataatcagtaaacaacactcaggtataacacagaaacaacagttctctagaaatataaggctctccaaaattgtatcaattcaaatagaagctaagttcctatatgacttttcatgaatatagtaagaatgacttcttgcctatgtgaaaaatgggactcaactagatggcccgtaatttgcaactctaaatttctagtgtacatgactgaatgagtatctgtaatatggtttgcattccctaacctcttagggagctcttaaaaagtataaaactggtcacaaatattaattgaga

SEQ ID NO: 754683 - DNA, 612 bp, Homo sapiens
cattctggaaacgacaaattagagagcaagctaaaaagataaaagaccttctgaagattatttacatttcaaatttttgacatggaccattctgttcattgatgagataaagaatctggccagcttggaagattaatttccttcaaagagttcacttacacttattttacaaaagtaaggcattgaaacttgtgctaaagaatgattttgtccatttaaatggatctgtgcagaaaatttaatacctttcatacacttggtaaatcttatctttaatagaaatttttattgcatatactaaaaatagttgaaacatggactcataaataaagtttaacatttytggtatgaaagagaatgagaaagttcacattagaagttgagcatgcaaataattcatgagttcattcaacaaattatgattaagcaatggctatatgctagggattatattgcaccataagtatacattggagaataaaatggggattaaaaaaacttatttttgcttgagtacagttggaaatataaataataaataaacatgtatataataatgactcttgaaaagtgtatgaaaaactactgacacaataccataaaggaagagca

SEQ ID NO: 754684 - DNA, 620 bp, Homo sapiens
aaaactaaaacttatagctaacttttcttgagaatcacacagaggaaaaacaaattatggttgaagttgagtccacaattaaaaaaaactaacagagggctgggcacagtggctcacacctgtaacaccagcactttgggaggctgaggcaggtggatcacgaggtcaggagagtgagaccatcctggccaacacggtgaaaccccatctctactacaaatacaaaaagttagccagatgtggtggcacacacctgtagtcccagctactctggaggctgaggcagaagaattgcttgaacctgggaggcggaggttacactgagccaagatggcaccactacactccaacctgggtgacagagcgagattccatctcaataaataaataaataaacaaactaacagaataaataaaaactcttccawggtaaagaaccaaaaaatacaacaaacaacctttagagctccaagaagtaaaattagaatacttaaagttataaaagagccttaaaaaggtttaaaacaataaatgaaggataaatcaccacactaaaaatagcaacactaagtgataaaacgtgggaaaaggaatgaagtagaattataattgtagcatat

SEQ ID NO: 754685 - DNA, 517 bp, Homo sapiens
gcagttgcagcagcaatgcgttgtcattttaatcatactcatatttgtgtgaccaatttggtatataaccaaagtgaatatccattgagccttgtaaaagcccatttacagggagctttcacattcaatgttacttttgatattaatgatttacaaagtaaaatccttaacttgaataagcagactcaagcgtttcagccctctttaaaagcttgggcagaattccagcaaggtttagacagccttaaccctgggacctacttcaaatagcatctcaatgtcttttttgtaactatgggattaatgttattatatttytgttttttgttaacagtctgcaaaatcagctggaccaccaaacggcaattgagagctgcacaacctgcaattacctttattcaattaatgcaaaaacaaaaatggggagatgttacaggccgaaagaatgaaggtcgtgaccaactcagtataccactgaaggctatatgagcaaacagaaaactgttctcatgaaagc

SEQ ID NO: 754686 - DNA, 551 bp, Homo sapiens
gttttaaaataagtataagcatcttagaaaattttaaaactattaaaaatattcctcagcattgctaatagcttgcttatttatttaacatagggcttccgttacaagatgaggtctgtgtatgctcacttccccatcaacgttgttatccaggagaatgggtctcttgttgaaatccgaaatttcttgggtgaaaaatayatccgcagggttcggatgagaccaggtatgtgcataccctcagacagaattaagaaatttttccttcatatttttttcctccttttccactcccaacttccatactttagttggctgttgttttgtgtttgtgctgagtaaaaccagatttgttttagaattatctcttgattacacttaaactgttggtgctacttaagggtttatatcattatgtcgattacaatttcagaaagttgatacattggagtagcttgcagtggtggttgtatttaacttggcaaatgaaatcttttaaaaagactttaaatttacaaaaggtgtatataatggtgtgtatttatggagca

SEQ ID NO: 754687 - DNA, 508 bp, Homo sapiens
cgacaagagcaaaactccatctttaaaaataaaaaaaaaaaaaaaaagcaaatcaagatacatgtaccttaaggtgacgccttgttggctgcatatattgtcctaaagtcaagcagtctacatctgcctcacgaagtgctgtaggaagaaawgcacaaattacattagcaaatactttaattgtagatctaagcataattttcctaaggaatatttaaaaacggtgtgaactttatgacagtccataatcttcatgttggggaataagacaacatctattcattcaaaagtattatgtgccagggactgtggtaaggactgaaaacaataataattaagacagtcatgtagggctgatacatacaaggataaatacttctaatactatggaatcaatgctaaaatagtagtggagggtattttagagtaggagtctggtagaaaaggtatgggaaatggtatatgcaaaaacctcaatgcacctatattatagagcaaatatgttgca

SEQ ID NO: 754688 - DNA, 645 bp, Homo sapiens
attatgtttatataaacattattcaatgctgagtattataatgtactttatgtcttattttttacttttttgtttttcctatagtttaataattgctgtgtttttgttttcgtttttgttttttaattgagacagagtctcactctgtctcccaggctggagtgcagtggtgtgatctcgtctcactgtaaccttcatctcccrggttcaagtgattctcctgcctcagcttcctgagtagctaggattacaggtgtgcaccaccatgcctggctaatttttgtatttttaatagagacggggttttaccatgttggccaggctggtctcgaactcctgacctcaagtgatccacttgcctcagcctcccaaagtgctgggattataggtgtgagccactgcacccggccaattgccttgttttttgatttgcttagtcatatttgcatctgttactaaatcttctcatgcctgccagtagcttttggtacaatttctcacaaggtccacgtcctctatacatatattcgttttagttctctcctggagatctttgtttccctctatctagtaatgtcctatgcctgctctcagttgcctattagtcctcttgagacttccctttgctggtattttaggaattcc

SEQ ID NO: 754689 - DNA, 616 bp, Homo sapiens
gttctaaaattggattttaatgatgtttacacaactctgtaaatttactaaaaataattaaccatattcttgtatagttgattttataattagtaaaatttacctcaataaagtttaaagaaaaagagattggaagcaccagttaacccgtggcttaccatcaaccttggacactattttagatttgagtttcttttttgagaagtttcaatgatttgaaagaattgatagcttatgacttagtggtcttaggtgtcttccaaacaagcaagagactattactttaataaaaatagaataaaactcattttatcttccaattaccataatgatccattgaacccttttagagatctaacatatattataggatatcaggcatgttatctttcctaaactgtgaaatrttttgctattctaagaattattttatcatttctcactaattatttgtatatttaaaaatactaaaataacggtaaaattgaacaattccacatacacatctgtctaggcctcatcttcactgtctgtctcacaatctaacacaacatatccagaactttacttggtatctccctttccaccactaaccaacatggacctggttcttcct

SEQ ID NO: 754690 - DNA, 453 bp, Homo sapiens
cacaggtaggtatcgccaatgtaaagataagcaaacctggcaaacaggctcatgcctgtaatcccagcactttgggaggccaaggtgggtggtcacctgaggtcaggagttccagaccagcctgaccaacatgatgaagccccgtctctactaaaaaaatacaaaaattagctgggcgtggtggcacgcatctgtaatcccagctactcaggaggctgaggcaggagaattgcttgaacccagraggcagaggttgcagtgagccaagattgtgccactgcaccccagcctgggtgacagagtgagactctatctcaaaaaaataaaaaataataaaaaataaataaaaaagataagcaaacctaggctcagtgagtttaagacaaaatcatctggtaacatttggttcaaggtatatgggactggtggtgccatacttccttaagtctgtca

SEQ ID NO: 754691 - DNA, 548 bp, Homo sapiens
ttgtcatccaggctggagtgcagtggtatgatcatggctcactgcagccttgacctccaaggctcaagcgattctcctgactgagccttccaagcgctggaattacagatgtgaaccaccacacccggccacttttttttttttttttttttttttttgagacagagtcttgctctgtcaccctggctggagtgcagtggtgcgatctcggctcactgtaagctccacctcccgagttcatgccattcttctgcctcagcctcccgaatagctgggactacaggtgcccaccaccacgcccagctaattttttgtatttttagtagagacggtgtttcrccgtgttagccaggatggcttcgatttcctgacctcgtgatccgcccaccttggcctcccaaagtgctgggattacaggcgtgagccaccgcgcccagccgccaattcattttataattcatcactgactatacttagaaggaaataaaccataaagtaacatgtctagtttgtacttctatttgtttaattttttagaaacaggatcc

SEQ ID NO: 754692 - DNA, 548 bp, Homo sapiens
ttgtcatccaggctggagtgcagtggtatgatcatggctcactgcagccttgacctccaaggctcaagcgattctcctgactgagccttccaagcgctggaattacagatgtgaaccaccacacccggccacttttttttttttttttttttttttttgagacagagtcttgctctgtcaccctggctggagtgcagtggtgcgatctcggctcactgtaagctccacctcccgagttcatgccattcttctgcctcagcctcccgaatagctgggactacaggtgcccaccaccacgcccagctaattttttgtatttttagtagagacggtgtttcaccgtgttagccagsatggcttcgatttcctgacctcgtgatccgcccaccttggcctcccaaagtgctgggattacaggcgtgagccaccgcgcccagccgccaattcattttataattcatcactgactatacttagaaggaaataaaccataaagtaacatgtctagtttgtacttctatttgtttaattttttagaaacaggatcc

SEQ ID NO: 754693 - DNA, 534 bp, Homo sapiens
gcaatggatcctaaccaagaagaaatccctgatttacctgaaaaggaatttagaaggttagttgttaagctaatcagggaggcatcaagaaaggcaaaacccaatgcaaggaaataaaaaagaaaaaaaaaacaatacaagaagtgaagggagaaatattgaaggaaatagataacttaaagaaaaaacaatcaaaacttccggaaacactggacccacttatagaaatgcaaaatgctctggaaagtctcaggaatagaattaaacaagtwgaagaaaaaaattcagagctcaaagacaaggtcttcaaattaacccaatccaacaaagaaaaagaaaaaaagaataagaaaatatgaacaaagcctccaagaaatctgggattatgttaaatgaccaagcctaagaataatccgcgttcctgaggaagaagaaaaatctaaaagtttcgaaaacatatttggaagaataattgaggaaaacttccctggccttgctagatacctaggcatccaaatacaaaaagcacaaaga

SEQ ID NO: 754694 - DNA, 549 bp, Homo sapiens
tcaaaaacatgttaaagttgaagagcgtcttcttttccatgaggcaatgatacaattgcatggtgtaggatctgtgagtgactctatacaaatagaaaagtctatgtcacaatgtttagaacttcccaccccagtaggattagaaaactctcagattcctggtagttgacaaatcctttttgttggtgagaaaaaacaacctttgacttggagtcattaaaaggattggatacctaaaaggattggatacgtgcgaagaaagacagtctctttctgyctctatatttatataagagcaaacgctttccagcatggcacatctgaagataatatgccatctctgatactgtgctgtcaaagggacaggaaaaaaaaaagatttatataaaaagaaatgcaaatataactagctagttagccaagagggcaaaaggagggaaggcttacattaacctgatcttcacagtctctaaaaacctgacaagagaaatatgaattttaactagctgccaagcaattggttattcatgcatgacatgaaaagcaggg

SEQ ID NO: 754695 - DNA, 503 bp, Homo sapiens
ttataaaaatcaagaaattttgctctttggaagatatcattaagaaaaggaaatgaaaaagaaagtcacagactaggtgaaactatatatatacatatatacatgaaaaaggacttttgaccagaatatataacagactcctaaaacgaataataagacaacaaaataaaacatggccaaatgatttgaatagacctttcayaaaagatatctgagtaattgtagatatgtgaaaagatgctcagtagctttagtcaccagggaaatgcaaagtaaaaccacaatgagataccaccagatatccattagaatggctgaaaggaaaaaggctgacaataccaattggggatatggagcaactagaactttgttgccggtgggaatgtaaaatgttacaaactgcaaaactggcattctcttaaaaagttgaacataaacttaacataaaattcagccattctactcctacatattttcccaatataaataaaaatacgtgttca

SEQ ID NO: 754696 - DNA, 574 bp, Homo sapiens
gagaatggaacaaagttggaaaacactcttcaggatattatccaggagaacttccccaacctagcaagacaggccaacattcaaatttaggaaatacagagaacaccacaaagatactcttcaagaagagcaatcccaagatacataattgtcagattcaccaaggttgaaatgaaggaaaaaatgttaacagcagccagagagaaagcttgggttacccacaaagggaaacccatcagactaacagcagatctttctgcagaaaccctacaagccagaagggagtaggtgccaatattcaacattccttttttttttttctttttgagacggagtctcgctctgtcgcccaygctggagtgcagcggcatgatcttggcttactgcaagctccaccacccgggttcatgccactctcctgccttagcctcccgagtagctgggactacaggcgcccaccaccacgcccggctaattttttgtatttttttagtagagatcgggtttcaccacgttagccaggatggtcttgatatcctgacctcgggatccacctgccttggcctcctaaact

SEQ ID NO: 754697 - DNA, 694 bp, Homo sapiens
cgctgaaaacaatagcattatttttctaatattgaaataagtgcctccactgctaaaataaatgatttatttcaatacaagagaattgacgtatgtctaaagtagtttcatttcttatgatttattttatttgccttttatcattttatctctttctttatgaatgaagttaaagttggatttttattttttattctgcttagctcttgtaatttggccaatttctgcctcaaaccagtctttgccggcttgtgtacatctgtactgaaaacattagccctaagtgaggctaagatggaaagccgcagggctgcctacgctctctgtaataagcagattagaacatgaccatgtgttcaggccctaaaggtaatgagggagagagggactaytgaatatcaggcagagaatttacttgagtgcatctaagtcttttaaattagagaatgagcagtaagttttcttcttttaacatcatatgtgattaatgttaataatgtggaagttgggggagatgtgggagcacagtttaaggggatttatctcaatcttgacataaagacaaggcctaatttaggcatccctgtagaaggaagtgaagtttaaaatgaggtgtgaagtgaacttgagaacaggagggggaccatttagttatacttctttaaagtctccatttttctggcaaaaatgaaaa

SEQ ID NO: 754698 - DNA, 604 bp, Homo sapiens
gtgattaatgttaataatgtggaagttgggggagatgtgggagcacagtttaaggggatttatctcaatcttgacataaagacaaggcctaatttaggcatccctgtagaaggaagtgaagtttaaaatgaggtgtgaagtgaacttgagaacaggagggggaccatttagttatacttctttaaagtctccatttttctggcaaaaatgaaaagtatattttcacccttttttctatgcccatgraataagaaaatatacatgaatatgctaacttgtacaaaaagaaacaggaaggataaaacataaaataatgtgactgattacctacaggggatgtgtgggaataaggtggtaaggatggggagaagagaacagagtagaaatatggctggggttcgaagtcacttctctatcctttttgcagggttctgactttggaaacatgatagtgtttcacatagccaaaactaaataaataacataataaataaaataaacaagagtgggggagaaaacccaaaatcgaacacaaacagaaataaacaaacctgtctttattgcaaataaataacacataatcactctgaatagaaaaagaaac

SEQ ID NO: 754699 - DNA, 566 bp, Homo sapiens
aaaacaaagtaaggctaagaaactgtttcaaattaaagaaggctaaaagagacatgaaaactaaatgcaatatgtgtgattggactgaattctatacagcagggtgaaaatgctgtaagtggacatcaatgagtcaattgacaaaagtagaatatggactgtagattaaagtgttttrtcaatattaaatttcctgaatgtgataaccacactgtggttatgtaagagtttcctgttcttaggcgagaacacactaaatagttaaggggtaatggggcatagtctcaagtagttcggaaagaaagatatatatatatatttttatatatatatatatgagacagagaatgaaaataacaaacatggcaaaatattaaatattgatgaggggtgaagctgagtaaagggcagttggaagttttctatattatccttgcaactttctcaaaagtttgcaattatgtcaaaattaaaagtttgaaatcaactggtgcttatattcatcccaatttttaatgataaatagaatttctttttaaacttttctgcccatgaaaataagttat

SEQ ID NO: 754700 - DNA, 567 bp, Homo sapiens
aaacctctccttcagttgtatcattaacactatagatttatgaggatggaaattagactgaggaaagctacagtgaatagatctgtggggaagccctgtactatgtgagtgaggtagagttgaggattagttggctttgtaatgcctaatggaaactagaaattgctcatatggaattctctagaagttgccttcattttgtggcagagatttttttctgttttaaatttatttaattttttgtgttgttgttcttgtttgagacagagtcccgctctgtggccaggctggagtacagtggcacaatctcggctcactgcaacctccgcctcctggtttcaagcaattctcctgcctcagcctcctgagtagctaggaataaaggcacatggcaccacacccagctaattttyttttttttttgtatttttagtagagacggggtttcgccatgttggccaggatagtctcgatctcttgacctcatgatccaccagcctcggcctccctaagtgctgggattacgggtgtgagccactgcacccgacctatttaatgtttttgaat

SEQ ID NO: 754701 - DNA, 690 bp, Homo sapiens
aaatgataatgaaaataaagcatgtgaaaatatagtgcttaggaggaaattgatagtttaagatgcctataccaaaaaaagaaagaactaatattaataacccaaattcccacctcaggaagttaatatacagaaaagtaaaacaaaagttagtagaaggaaggaaatatgacagcagaaataaacacaacaaaaaacaggtaatacagaaaattagcaaagccaaaagctggttctatgaaaagatgaacataattgataaaacccctagctagactaaataagaaaaagagaaaatgcaaatcaatatcaagaatgagaaagaggttagcaagacaagtcctagatacattaaacatataatttaaaattttaaaaaaattatgaagagcttcatgttaacaagtttaataacttacttgaaatggacaaattcttgagatatacaactatcaaatttgacacaggataaactagaaagttytcagaacatatgggaggagaaagaacctcccaaatggttttatgaagccaaaatatacttaatataaaattctgaaaaagacattaccaaaaaaaaaagaccaatatttttcacaaatataactgcaaaaaattttaataaaatattgatgaatcaatttaaccatcttttttttaaataacacaatggctaaatttgttttatca

SEQ ID NO: 754702 - DNA, 633 bp, Homo sapiens
attaacatggaagtcttctttagaccaaaaatagagtgttcagatattacatcctcctttcttgtttatcattgccctgctaatcttactcttcattttctaagataatgttatttgcataaattgttttctttttatttggatgtgaccaaaattattactgtgagattcaaaatccttcttcattttacccatctgaaatgtaatcttgatatagctgttggcatcatgtaaatcttgaaagatgctgtttcttttttgtagccctgcttttacttttgtcatccaaatgaagaatatattggccttcagatttcygctcaaattgtttcacctcaaatatttgttgagcacctgttatgtgctgggtactgtagtaggccttagagatatgagaactctcatccgagccactgtcatctttcatctagacaaccgcaacagccttctccgtggtttctctgccttcagaatggctttcctccaaccttgtctccattctgcaatcaaagtgagctatccaaagcaaagctttaattatgccactctacttttttcaaatggcttcattttggagggtccaaaatgaagtctcaataccttaccttggtttccgtaagtcctgcacaattt

SEQ ID NO: 754703 - DNA, 445 bp, Homo sapiens
cccttagcagagcttgagcactgtgctgggagatctgcttctctcttcagagccagcaggcaggagcatttaagtctgcggaagctgcacccacagccaccccttcccccaagtgctctgtcccagggagaggggagttttatctataaacccctgactgcggctgctgcctttctttctgagatgccctgcccagagaggaggaatctagagaggctacagtggctttgtcaagctgcggtgggctcagccagtttgaacttcaaggcggctctgtttacactaygaggggaaaaccgcctatgcaagcctcagtcatggcggacgcccctcaccccaccaagctcaagcgtcccaggtcatctttagactgcaatgctggcagcaagaatttcaagccagtggatcctagcttgctggactccataggggtgggatccgctga

SEQ ID NO: 754704 - DNA, 570 bp, Homo sapiens
ctactccttaacagtgacatcatccgggcacgcctgggggcctccgcactggataggtgtgtgttgcagaagggagtggggagggtggtgggtggggctggagcctcaaattctttcagacctgagttcaagttctcggcttccaaccacggagcctgcgtcttacccataggtcaatggggagattcgcagtggtgtgaatctgcccaccggagcacggacttccatggtggggctttgggtgtctaagttcctcccagcaacggagctatgtggtctcggggagcacactgaccccaggccaaccccaggatgacgctgcccccttcccaccctagcatccaagagttccggctgtcagggtggctggcccagcaggaggatgcacaccgtatcgtactctaccagacggacgcctcrctgacgccctggaccgtgcgctgcctgcgacaggccgactgcatcctcattgtgggcctgggggaccaggagcctaccctcggccaggtcggaagcccgtgccccctgatctcacccacctcggcccccgtcctttgccctcccgtgcct

SEQ ID NO: 754705 - DNA, 663 bp, Homo sapiens
agacagggtctcatatgttgccaggatccttggtctttgacctcccaaagtgcagagattacaggcatgcaccactaatgccgggccaaatacttgtaatttaaattatcgctgggctgggcacggtggctcacgcctgtaacccagcactttgggaggccgaggggggaagttcacctgaggtcaggagytccagaccagcctggccaacatgctgaaaccctgtctcaactaaaaatacaaaaatcagccggacattgtggcagacgcctgtaatcccagctaatcgggaggctaagacaggagaatcgcttgaacccgggaggcagaggttgcagtgagccgagatcgcaccattgtgctccaacctgggcaacaagagcgaaactccatctcaaaaaataataataaaataaattatagttggaaaaaaggggtttcctaaagacccaagggaaatggcctctttgttcctgaagccacagagaggatttttctgctccccacaactagttttccttgtgaaaattcataattgctaccagcttgttctcctctctgtcactatacatctgtccttgaagccttatttgaacaaagagttctggtatcactcggatgcctagaaactgttgccgttctgtgaaaccgaccaccagagga

SEQ ID NO: 754706 - DNA, 570 bp, Homo sapiens
ctactccttaacagtgacatcatccgggcacgcctgggggcctccgcactggataggtgtgtgttgcagaagggagtggggagggtggtgggtggggctggagcctcaaattctttcagacctgagttcaagttctcggcttccaaccacggagcctgcgtcttacccataggtcaatggggagattcgcagtggtgtgaatctgcccaccggagcacggacttccrtggtggggctttgggtgtctaagttcctcccagcaacggagctatgtggtctcggggagcacactgaccccaggccaaccccaggatgacgctgcccccttcccaccctagcatccaagagttccggctgtcagggtggctggcccagcaggaggatgcacaccgtatcgtactctaccagacggacgcctcactgacgccctggaccgtgcgctgcctgcgacaggccgactgcatcctcattgtgggcctgggggaccaggagcctaccctcggccaggtcggaagcccgtgccccctgatctcacccacctcggcccccgtcctttgccctcccgtgcct

SEQ ID NO: 754707 - DNA, 570 bp, Homo sapiens
ctactccttaacagtgacatcatccgggcacgcctgggggcctccgcactggataggtgtgtgttgcagaagggagtggggagggtggtgggtggggctggagcctcaaattctttcagacctgagttcaagttctcggcttccaaccacggagcctgcgtcttacccataggtcaatggggagattcgcagtggtgtgaatctgcccaccggagcacggacttccatggtggggstttgggtgtctaagttcctcccagcaacggagctatgtggtctcggggagcacactgaccccaggccaaccccaggatgacgctgcccccttcccaccctagcatccaagagttccggctgtcagggtggctggcccagcaggaggatgcacaccgtatcgtactctaccagacggacgcctcactgacgccctggaccgtgcgctgcctgcgacaggccgactgcatcctcattgtgggcctgggggaccaggagcctaccctcggccaggtcggaagcccgtgccccctgatctcacccacctcggcccccgtcctttgccctcccgtgcct

SEQ ID NO: 754708 - DNA, 583 bp, Homo sapiens
ccactcacttaggggattctgggagccctcccggaatccagggtcccagaccttgccaggagagccgtctcaggcctgctgcattagcccttcctgcatggctggatagtgacagagagaaagaggaagaagaagcttatttaaaactaggaagcagcargtcgtgagagccaagagtgcgcttgaccttgttggaaccagggcaccagagccgcttctcattgctgggaagtttggggatgatgaccctgaccttccgcgtggttataacctcactcccttgtttgttcccccacagctgcacccacctccaccctcacctgtgactcaggaccacagaagcaaaagttctcactcaaactggtaagtgaccctgcaggtggggggcagcttggaggggagggactttcacaaacacatccttgacttctgagcccgtctgtcagctgggagagctcggccgggggccagggtccccacctgcaaggagtattaagaccgtgggcggggcaggcgcccagttctccatcatcccagggtgttggaaacccacagttggatccacccaagtctggctctgatg

SEQ ID NO: 754709 - DNA, 507 bp, Homo sapiens
cacgaacacaatgcccactgacaattccactttcctcgagggccattctttatgaaaggctgtaggagttccacgacattgttgattcctggattctccaagtctctagaacttgagaactacttttgtgtatttttttaacctttaagttcagagtttctaatgtccgttttatactactataaaatggtactatgtattctttattgatggtactatttacactttattttatacagactctggctccacaaaaakgttaaaaattagccaggtgcagtggtgcacatctgcggccgcagctactcaggaggctgaggcagaaggattgcttgagctcggatggtcagggctgcaatgagctatgatcacacatcacatcaatgcactccagcctgggcaacggagtgagaccctgtctctaaaagaatagaagaggctgggcgcggtggctcacgcctgtcatcctaccactttgggagaccaaggcgagtggatcatttgagg

SEQ ID NO: 754710 - DNA, 507 bp, Homo sapiens
cacgaacacaatgcccactgacaattccactttcctcgagggccattctttatgaaaggctgtaggagttccacgacattgttgattcctggattctccaagtctctagaacttgagaactacttttgtgtatttttttaacctttaagttcagagtttctaatgtccgttttatactactataaaatggtactatgtattctttattgatggtactatttacactttattttatacagactctggctccacaaaaaggttaaaaattagccaggtgcagtggtgcacatctgcggccscagctactcaggaggctgaggcagaaggattgcttgagctcggatggtcagggctgcaatgagctatgatcacacatcacatcaatgcactccagcctgggcaacggagtgagaccctgtctctaaaagaatagaagaggctgggcgcggtggctcacgcctgtcatcctaccactttgggagaccaaggcgagtggatcatttgagg

SEQ ID NO: 754711 - DNA, 512 bp, Homo sapiens
ctacaatctattttcaacccagtagcttgacggatccacttaaaatctaagtcagaccctgtctgtgtccctgccctggcccatatggtgggtcggacacggtggctcacgcctgtgatcccagcactttgggaggccgaggtgggcggatcacgtgaggttaggagttccagaccagcctggacaacatggtgaaaccccgtctctactaaaaaagtacaaaaaaaaaaatcagccgggcgtggtggygggcacccgtaatcccagctacttgggaggctgaggcgcaagagtcgcttgaacctgggaggcagaggttgcaatgagccaagattgcaccgctgcactccagcctgggcaacagagcaagactcagtctcataaataaacaaataaataaataagatgtaagtcagaccctgtccctcctctactcaaaaccgtatggtggatttcattttagacagaataaatgctgaaattcctaccatggcccaggagccccctgtatg

SEQ ID NO: 754712 - DNA, 590 bp, Homo sapiens
tctctactaaaaatacaaaaaattagctgggcgtggtggcaggcacctgtagtcccagctactcaggaggctgaggcaggaggatggcgtgaacctgggaggcagaacttgcagtgagccgagatcgcgccactgcactccagcctgggcaacagagcaagactccgtctcaaaaaaaaaaaaaaaaagagacttaaaaaaaaaaaaacagactttaagtcattgcgtaatgataaaagggtcaattcagcaagaagatataactttacgtaactaaatttatatgcacctcacactggagcacacataargggagagacagactccaatacaatagtagttggagacttgaacaccacattgaacactctcagcattagacagatcatctggacagaaaattagcaaagaaactttggatttaaactgcattttagacccaagggacctaagagatgtttgcagaacatcttatcccacagctgaagaacgcagtcttctctttggcacatgaaacattctccaggatacaccatatgtgaggctatgaaagaaatctaacatatttatagaaattgaaatcatattaa

SEQ ID NO: 754713 - DNA, 590 bp, Homo sapiens
tctctactaaaaatacaaaaaattagctgggcgtggtggcaggcacctgtagtcccagctactcaggaggctgaggcaggaggatggcgtgaacctgggaggcagaacttgcagtgagccgagatcgcgccactgcactccagcctgggcaacagagcaagactccgtctcaaaaaaaaaaaaaaaaagagacttaaaaaaaaaaaaacagactttaagtcattgcgtaatgataaaagggtcaattcagcaagaagatataactttacgtaactaaatttatatgcacctcacactggagcacacataaggggagagacagactccaatacaatagtagttggagacttgarcaccacattgaacactctcagcattagacagatcatctggacagaaaattagcaaagaaactttggatttaaactgcattttagacccaagggacctaagagatgtttgcagaacatcttatcccacagctgaagaacgcagtcttctctttggcacatgaaacattctccaggatacaccatatgtgaggctatgaaagaaatctaacatatttatagaaattgaaatcatattaa

SEQ ID NO: 754714 - DNA, 630 bp, Homo sapiens
cataagtatagataaatatatttacagtcattggtgagctgacgggggaagggagggagaagagcgaaaaagggttaatgatagggagaaggctgcgagagccatcctctagtgagaaataccgaaggtaggctgyggcattgccaggggtgcagaacagtgtggcgcgctgtcgggagacacagtgctaagggggagaaggggggagccccaggtgcacgcctggctgggtgagtgcggcgggcaggagccctcgcttctgggcgggtctaaggaggagaagtggctcgagttcagctccaaattgggatggaggcaggcgatgcgcaggagtggggaggcgcgcaggagtggggagccaagccggcggggttccagtctagcaggctgttctcacttggccccactccctccaccttttgtgttccagctccataatctgctccctgaggaaagggggctcgtcccttggggaagcacctccaactcccccatccccatttggtggcattctaagcaagcaacggcttcgggagagctgcctcgagagcctgagagaagtcccgcttagaagctgggctgggcaggtgcggagttgggggcgggaagccaggattgggcaagtggagc

SEQ ID NO: 754715 - DNA, 629 bp, Homo sapiens
cttagtctaacataaaaatttaaggtgtttggtggtaaaggattttctccatggcctgaattaacaccattagaaagcaccaagccatgggggtagtaaccatctgatgactgttctcatgtatcccgtgtccagggacatggggcaacgtgcctcttctgtgttagagggtggaacggatatgyttggtactgcaggggatctggtgctcttcttctggattcgcatcctcacccagggcccacttttactaagtgttctgccctagcctggttcaaggaggtcatccacctgactttgtcaaatggaattgggatatatttgatatacatttttctaacaacatggaaaagggttttcctccttctttccctgcaaggtacatcctactgctttgaacttccaagtatgcctagtcaccttttaaaatgtaaaacttttcagaaaaatgaggattgctttccttgcatgcccttattatctcgactacctgaattgcaagggatttttatatattcatatgttccaaagtcagcaactctcctgttggttcattattgactgtgctgtaaatgaagtcttttgcaattaaaatgagatttgcctatgtccaaaaaaaattaaggttt

SEQ ID NO: 754716 - DNA, 584 bp, Homo sapiens
actatgttggccaggctggtcttgaactgctggcctcaggtgatccacccacctcggcctcccaaagtgctgggattacagacgtaagccaccgtgcctgaccccttctgttttgtttgtttgtttgtttgtttgtgttgtgtgatggagttttgctcttgttgcccaggctagagtgcaatggcaggatctcggctcaccgcaacttccacctcctgggttcaggcgattctcctgcctcagcctcctgagtagctgggattacaggtacatgccaccrtgccccgcaattttgtatttttagtagatacggggtttctccatactggtcaggcaggtgttaaactcccgaactcaggtgattcgcccgccttggcttgccaaagtgctgggattacaggcgtgagccacagtgcctggccctgttaaattcttaagtaagatacttagttcattaattttttgacttcattactttccaataagggcatttattatactcgttcatttattacctgcatatactggatgccacactctatgctatgtaatattttcattatcatttaattagaagtacttga

SEQ ID NO: 754717 - DNA, 579 bp, Homo sapiens
tctcatctctctagaatataagctccaggacagcagggatttttgtctatttctgctatagcctgagtatgtacagaatgggatctcaagaatatttttgaatgaatgactctacatacaaatgaataaatttctagttttcccatgaggaaaccaaaacataaatcaactacattgccatccttaggtcccaatacctggagagtttcacatttttagagcaaaggaagataatatagcatgtttgctttatttcatttatggktctaaagaggagaatcctcatgagccaagaaaccaagtcctatgatgcctaattgaatgtagcatttcttctttcaccaattagaatgtacctctatgttactgagcctgagacaaatgcctttgcatggcatgtcagttttggtgtccaactttcctttgctaacatatcaccattacccctaagctatctaaattcactaagtttcccagataacttaatgtctagattttcttggaaggtttgacttgggatggcttagctccagttttctcagaaggttctggtgagcaggtcataatttactgcatctt

SEQ ID NO: 754718 - DNA, 579 bp, Homo sapiens
tctcatctctctagaatataagctccaggacagcagggatttttgtctatttctgctatagcctgagtatgtacagaatgggatctcaagaatatttttgaatgaatgactctacatacaaatgaataaatttctagttttcccatgaggaaaccaaaacataaatcaactacattgccatccttaggtcccaatacctggagagtttcacatttttagagcaaaggaagataatatagcatgtttgctttatttcatttatggttctaaagaggagaatcctcatgagccaagaaaccaagtcctatgatgcctaattgaatgtagcatttcttctttcaccaattagaatgtacctctatgttactgagcctgagacaaatgcctttgcatggcatgtcarttttggtgtccaactttcctttgctaacatatcaccattacccctaagctatctaaattcactaagtttcccagataacttaatgtctagattttcttggaaggtttgacttgggatggcttagctccagttttctcagaaggttctggtgagcaggtcataatttactgcatctt

SEQ ID NO: 754719 - DNA, 594 bp, Homo sapiens
caccagtgagtataaaatcctggaattagcccagccagcgtacctccaaagtagtgtggaaccatgattaacactgttcagaatgggatggctctttagaaagaggttagaaaacactggaatgttaaaactcattgactcacatttatctactaaatatttcctgaatgtgtatgtgcaaaagacatttacacatcagtgtaaattcatcatatatttttctttaaaaaacttagaatctgggctgtgcacagtggctcacgtctgtaatcctakcactttgggaggccgaggcaggtggatcacctgaggtcaggagtttgagaccagcctgaccaacatggtgaaaccccatctctactaaaaaatgcaaaaatgagctgggcgtggtggcagatgcctataatcccagctacttaggaggctgaggcaggagaactgcttgaacccaggaggtggaggttgcagtgagccgagatcatactattgcactccagcctgagcaaaaagagcgaagctccatcgaaagaaagaaagagagaaagagagaaagaaagaaagaaagaaagagaaagagatgaaagaaagaaagag

SEQ ID NO: 754720 - DNA, 346 bp, Homo sapiens
ggaggatagtatccaataggtagattttcaacctacaccctcttcctctcctccactctctagtagtctgcagtgtttattgttcccaggtttacatccatgtgtgctcaatgtttagctaccacttgtaagtgagaatgtgtagtatttagtattctgatcctgcattaatttttgaatcatggcctccagctccatccatgttgctaagaggcatataatttcattctttttcatgactgtatattattctgtagtttatatgtactacattttctttatccaatccaccattagcacatratttgattccatgtttttgctattgtgaatagtgcagcaatga

SEQ ID NO: 754721 - DNA, 578 bp, Homo sapiens
aagggaggactggagatgtttaaaggagatttgtttcttacatggttttaatttgaaatcctttcattctgaagatgtctggatattgagatagagcaaatgaaagcagtacattcctgttgcggattcagctgtgcatctcacttatttgaaaggcttaatcagcacactcaggaacaagatgcgagacatcttgaggcactgcttacttgtcagctgcaagatcaataaaatgcagaagccattctttgccatactccagagaatgaatttgcagagtgagaaggactccactttgaagctattttattcacatccctcttggccaaagcagaaaagtygctctggggaggcacttgaagtttggcccccagctagcccagctgctcctgctcaacctgccaggtgactcacttgctcagtattagtctgaacagcagggtgtcaggtcagaaggcacttccagtctactcagacaattcaggcagtgtaattattttaaatgactgtataaaaggtgcctgaaattctctggtagccaatgttgaatggactcattaatttaggattattgtcgt

SEQ ID NO: 754722 - DNA, 578 bp, Homo sapiens
aagggaggactggagatgtttaaaggagatttgtttcttacatggttttaatttgaaatcctttcattctgaagatgtctggatattgagatagagcaaatgaaagcagtacattcctgttgcggattcagctgtgcatctcacttatttgaaaggcttaatcagcacactcaggaacaagatgcgagacatcttgaggcactgcttacttgtcagctgcaagatcaataaaatgcagaagccattctttgccatactccagagaatgaatttgcagagtgagaaggactccactttgaagctattttattcacatccctcttggccaaagcagaaaagtcgctmtggggaggcacttgaagtttggcccccagctagcccagctgctcctgctcaacctgccaggtgactcacttgctcagtattagtctgaacagcagggtgtcaggtcagaaggcacttccagtctactcagacaattcaggcagtgtaattattttaaatgactgtataaaaggtgcctgaaattctctggtagccaatgttgaatggactcattaatttaggattattgtcgt

SEQ ID NO: 754723 - DNA, 601 bp, Homo sapiens
ttgtgatttcgattatgatttttttattcagtcaatatgcagaggcctctatgtagagtattttgcttaattttcacaattaacaaatactgccaaatgctgcatatacataatttaaagaggagaacactaaatgttaaagtatatgaagaaatgtgtacaaggttacataataagcaagtaacagaatcaggattcaagttcaagcttctctggaaaaacttgtgcttatcttacagcagcaaactcagcctttttattcacttataaacagttttaaatgtcatatattttttrgaattgtaaaagtcatatagagttattcaacttttttgttatgcatatattataaaattgtacattctaatatgtgtaaaactttatatattattttaaatgcctctctgatcactacagtagtttatgaatcacataaacattgtggaaaagaatagaatcggaaatgaaaatctccctgactgccttcatccattttacatacttgcattaaaaatatatattcttccttaatctagctcctcttacaggcttcctgtcaatggctcaaaccaaaatcattaaggtctatgttgatgacacc

SEQ ID NO: 754724 - DNA, 637 bp, Homo sapiens
aaccaaattgaggaaaaatttattgccagctatctttctgccatagtttatggcctgcaattctcaaatggtttagagagtatatttaaaatgaacttcctggtcattttctgtttttcagggactttaaacatgatttgggtttgtcatctaaaagtagagtcactctttgaggttcaaatttcttgcccaacttttatttttaaagctttctcaaatacaaagctcaagagtcttggtcgatttaaaagcccactgtctgttttccctaaatatttacttttaaaaatatgattgatattaagtatgttattactgaaaaaggaagaaaaggactgtgggaaggtcagaaagaaataaaacactaagcttttccttttattatgatgatgtcatataatcagttacatatggactgctgcttcagtgcctttcttgggaggcccaaagacaaggggctatggcctaarctgtcctcactggatacagatcaaggacagagaaaggtatggggaatggagtacagttctagaatatggcagggaaagaatatgtgtggatttcctgtgggccagatgtggacttctcaaaaccaagaagctctgttatcttgggagcccaagaggaaaatccagag

SEQ ID NO: 754725 - DNA, 634 bp, Homo sapiens
  misc_feature 626, 627, 628, 629, 630, 631, 632, 633, 634: n = A,T,C or G
tcaaagtagtgttcatgcaagttgttcatataccttcaaagtagtgttcatgcttggtgcccttgtgccttgagtcctaaagtgaactatggcatgtttttgttttgttttgttttgttttgttttgttttgttttgacacagatcccagttgctaagctttccatataattacagaactatgtttttcacaatctccagagaccactaccagctaaaggaaagtgggtggattctctgtgcaatgatttctagttttcttctggtgcatttttctagtttstaatattcaagctacaggaaaaggaaataaaaaggggaagcaaagccaactgttctgttgttattttaggccatccatagcataagaaatatattggcaattatgttacaagaaaataagatttacccaaatagagaaaagagtacttcttactcatttacttactcactcattcatttattcgctcaacattcagtgttatttattgaacacctactgtgtgctaggcactgtggtgtgtaccagggtgcaatgaaggataaggaaaataataatccatcccacggatggaagcatgtgtgtactttatactcaccagatgctctaggtaatacaggatggannnnnnnnn

SEQ ID NO: 754726 - DNA, 623 bp, Homo sapiens
atttatatagttcaggtggagattgtgagaaaggaattataagatggagaaatacaaagaatctttgtgttttgttggagagccagaagagcttcaagcagatgtaagatgcatgccttacacatctgtgaatgtgggtgattattatgtggaaaagtgactctcttggtagccaagcagaagaactctatttttttctacctctatattaatattattacgactgttattacaattatcagaatgagattaacataccagaccagaccagtatagatacagaaggagttgtgttttattaccagagtctaaggacatatccattcctattggcactcaaaatccaagttactagtactgtgtcagctaatgtgatataagaacagggcatattatgcgaggagccattatcaggagcaggcacaagtaagatgtcagccatgaaagcatagaagaaactagaggtggcatttgggcctggggagcrttttcctacttgtttctgcatttctaattcttgagtgatgagagaattaacaaagaagaggatgcctcttctttgaggtccacttctcattactctgcttcctttcatggagtaactgtgttaaaatggctcagag

SEQ ID NO: 754727 - DNA, 528 bp, Homo sapiens
agttttttaatcagctgcatataacatcagcatgccttttggtatatggtatacaacatagtggataagagagggggtaacagggagagaaatccagaccacacttcaacctgaaaattattacctggtgagcttgctagactatagagtcttaggccagagcttgattatttgcatttttaacaagtttctaggtgatgatgatgttgctctctcctgagagcctgattagcaaggttctatatgaaacaaatgagggaggtaacaaggtgcccagagacacctgaggacaagacmgcaaactttatgagttaccccaacatcttacggggctgaggtttgagagttaattcagtcacccactcccaaaatcaactcccatatccttacttatactttctcttttatcaagtggagaaaaatgaaaatcctgtctctaactatccatgagcaaaatatcacatggattcctaagacttgtagttaataaaaaacctgggtcacgtaatgtttggatacacttgtatt

SEQ ID NO: 754728 - DNA, 516 bp, Homo sapiens
attggtcacctcccacagtcaatcagtctggttgggaccactccttcatttacatagggtgtaaccaagtaaccaatgaggagcctctagaaagcatttaaaccccataaaattctgtaaccagcactcttgagccacttgctggagcccactcccactgkgtggagtgtactttcatttcaataaatgtgtgcttttgttgcttcattctgtcattgcatcgtttgtgtgttttgtccaattatttgttcaaaacaccaataacctggacgatcagcagtcaagaccttccatcagtaacattacaaaaggtcttgaggctgtgagttcttgctctcttacccttctgctttcttccatgggatgagacagcaaagaaggccctcatcagatgcaaacctcttgaccttggactttccatcctccaaagctgcaagaaataaagctcttttctttataaattacctattctcaggtattctgttataggagcacaaaagataatcctgctggcag

SEQ ID NO: 754729 - DNA, 516 bp, Homo sapiens
attggtcacctcccacagtcaatcagtctggttgggaccactccttcatttacatagggtgtaaccaagtaaccaatgaggagcctctagaaagcatttaaaccccataaaattctgtaaccagcactcttgagccacttgctggagcccactcccactgtgkggagtgtactttcatttcaataaatgtgtgcttttgttgcttcattctgtcattgcatcgtttgtgtgttttgtccaattatttgttcaaaacaccaataacctggacgatcagcagtcaagaccttccatcagtaacattacaaaaggtcttgaggctgtgagttcttgctctcttacccttctgctttcttccatgggatgagacagcaaagaaggccctcatcagatgcaaacctcttgaccttggactttccatcctccaaagctgcaagaaataaagctcttttctttataaattacctattctcaggtattctgttataggagcacaaaagataatcctgctggcag

SEQ ID NO: 754730 - DNA, 580 bp, Homo sapiens
gcaattccaactctaattacataactagaaaaacctcttgtacatgtgcatcagggtatatgtacaagaatggtcatagctgtcgtttattaaaaattctggaaccagctgggcgtggtggctcaagcctgtaatcccagcactttgggaggctgaggcgggcagatcacttgaggtcaggagtttgagaccagcctggccaacatggtgaaacccygtctctactaaaaacacaaaaatcagcctggcatggtggtgcgtgtctgtagttccacctacttgggaggctgaggcaggagaatcacttgaacctgggaggcagaagttgtggtgagccgagattgtgctatcgcactccagcctgggtgacagaatgagacttcatctcaaaaaaataaataaaattctgggaccattttacatacattaggatggctatgataaaaaaaaaattttaaataaaaatgccagaaaataacaggtgttggtgagcatgtggggaaattagaatgcttgtgcactactggtgggaaatgtagcatggtgcagagactgtggaaaacacactgtggatcctcaa

SEQ ID NO: 754731 - DNA, 603 bp, Homo sapiens
ctgcatggccagagcaaagggcttctactcagtggagctcccctctcctttgatttaaaatgaagattaaaactccctctctcaggtgacaagggaatcgatgtctgcaccccaaagtgtgtatacagtggtagatgctccttgcgtgccagttcacgcacacccccactcctgggaccccataagccctcctcccttctcttggaatgcaaagagagccggaccacatgccacccacctcctcacggtggggcctgtggcagagggctgagcatggactggacacttgatgaatgcttgatgaatgcacactgaagcggaggaaggygcatggggatggtcgaaccctcagtagaacccaggtcctggagccttgaagttcacagagcttaaagagtgcaggtttgctgggcacacatggctcatcctccaaggtgcaaacgtgaagcactgaatccattctcaccattccgcagtgagcccaagccctgagagtatttcctagttaagctgggccccctgacacctgggcactcagggacctgaagtatgccaagggagccccagactagccagcttctcagagctgagcatttctctctt

SEQ ID NO: 754732 - DNA, 603 bp, Homo sapiens
ctgcatggccagagcaaagggcttctactcagtggagctcccctctcctttgatttaaaatgaagattaaaactccctctctcaggtgacaagggaatcgatgtctgcaccccaaagtgtgtatacagtggtagatgctccttgcgtgccagttcacgcacacccccactcctgggaccccataagccctcctcccttctcttggaatgcaaagagagccggaccacatgccacccacctcctcacggtggggcctgtggcagagggctgagcatggactggacacttgatgaatgcttgatgaatgcacactgaagcggaggaaggtgcatggggatggtcgaaccctcagtagaacccaggtcctggagccttgaagttcacagagcttaaagagtgcaggtttgctgggcayacatggctcatcctccaaggtgcaaacgtgaagcactgaatccattctcaccattccgcagtgagcccaagccctgagagtatttcctagttaagctgggccccctgacacctgggcactcagggacctgaagtatgccaagggagccccagactagccagcttctcagagctgagcatttctctctt

SEQ ID NO: 754733 - DNA, 547 bp, Homo sapiens
aaatagcacaaattcattcaagtttcgtgtcagatgaaattacagttgaaatacttggcttattcataaaactgtggtgtatcatgtgaggcctttacataatgaatgactaagcaatgttttcagtttatgctattgaactattaacatgtatagtggagtttacaaatgccagaaatttcagtttacccaataagtgtttcctgaaggcccactgtacgcagaacgaaccagggaatacagagaaaattctagtccttaacttagaagtcctagaggactcgaggaggccacaatttaataaagcctttgatttttaaatctttccagcttactttttcrattgttataaagctcacaggttttttgtttgttttcatttgctcactttattttccttaatactgtcttctttacattccaaactttcacaaaatggagtctttgtgaattgcagtattttctttaacatggccccatttccatggatgtatttattacttagtgaaatggttattatcccctaaatctttgtccagagggtaaa

SEQ ID NO: 754734 - DNA, 586 bp, Homo sapiens
aaccttaccctcgtggccacactccttagttttcttggtggtgagacaaagaactccaggttctactttggaaaacaaaactcaaacactatgttcattggtaaggctgctgcaatatcgtgtaacctagggaggctggagggctctctttagcctagtctgagatcatctacttctgtacctttgtgctggtgttatcacctcagataacaccagcttacrtgaaacttacatgaagtgtgtaagtctgcttacatgaaacctgctgtctcccagggcagaacagaggtaacatcttcttgtataacttgtgtctctcttatggctctctcccatggactaggccaatggtgtatgtcacatcccctcaaggtggcagccttctgtgataaggcctgagtttgaatctctgtgagtgccccaagcaatgcctacttcacagtgaacagaatgatgcttagcagaagagttctgctccctcacgtcctttcttcctttgttctttctgtgagacaaccctctattctgaagagtcaggatgttgaatatcaatggagaaggatttagattatttgggttggagcat

SEQ ID NO: 754735 - DNA, 488 bp, Homo sapiens
aataattgctattcacagatgacatgatgtagaaaattctaaaacctccataaaaagttgttagaactaataatccagaatatttgcaagatacgaaatgagcacacacaattagttgcttttctataaactaagaacaaactaacttcttcaaaaattaagaatacaattccacttaccataccatcaaaatgaataaaawacttagcaaaaatctaaatggaggcaaagcacttgtacacagaaaccacaaaacattgatgaatgaaattgaagactacacatgcaaacagaaagaaatcagtgttcatagattggaagacttaatattgttaaagtgttcacattacacatagcaatttacagataaaatgtaattcttatcaaaaccccaatgacatttaaaaaatggacaatcctaaaatttatgtgaaatcaaaaaaccctaaatattcaaaacaaccttgataatgaaaaacaaaactgga

SEQ ID NO: 754736 - DNA, 614 bp, Homo sapiens
aatattatctctagggggtgtgattacatttaaacactgtgtcctagcccaaagcaattaaaaatagtttagtctaaatttctgagtgataaagtttaaggagaaaacaaaacgaacataacttctaattatctttgcatgaatttgcaaagaaatattgtttaaacatgaataattgcagtggaggggaaatgagttcaccctggaacgctgtctctgaagatagcagtttactccacccttcagtggctgtaaccttgcctaaattaaatataatgagtaagaaattattcagaaagtaagagagaagaaaartgtattcgatattttcagtcctaaattacaggtttactaatctagctgtaccatattgcagatgttgcttgattcattataagtgaaccagagcaaatttactcctactgagaatagaatcgttaccttaacccaaagaaagatgacgtgagatgcagtgaccatcaagcattggataacagctttaaaaatgtttccaactgaaatctatgctgcctttacctattaaaatgtggttaacaattcccttgtcagtcattttagtgctatttaggtcttgttaattgaatttaaaggag

SEQ ID NO: 754737 - DNA, 632 bp, Homo sapiens
caagactctcgtgactcaaaatgtgtttattttgctaaaaacagtgatctgagcaaccagagattataaagaagttccaattacgtgaagtttccagattcgaaaatcaagactacaccattcaactcatcagtagtctttgagctaagaacatctcaccaaaatcaatggaaagactgcgaaagatctccagtaagaaaggaccaggaaagcaatgtccatatcagaaaaggaatggttaacgtgagtcagactgtagtcaagaagcttaaatgatttcagccaacaacaragaatcccacaaagaaaccatacacttcctataaccaatgttccccaaccccagaacagtttcccaaggtcttctataacaagagttcctcctgactggtttgagttctttctactccaacagatgattctgttcttcgttcactgaacaacttaagagctgttcaaccccccaggttccaaaacctctcgcagctggggatccttttaaacatgcacatcactcaggagcccatggggatgagaggcattcacagagcatcagggaaaatggaaagcaacattttgcttaacaggagaaaccgccccttattcatctttctcccacatcacctaactct

SEQ ID NO: 754738 - DNA, 541 bp, Homo sapiens
cgggggaggggcggagctaaataaacaatgaggggcggggcttggaggggcagcggcagagcgaggagtgggatttgagtgaataacattgctgaagggctgcggcctggggcagttcccctgggaactggtttgggatggaagctaggaaggcagtggggccaaaaggaaatattttagaggaaggggcgtggctggaagaaaatgtccctgggattgagtttttccttgaggcgaaatattctgaggtggatgggaggggcctaaggtaattcccctgggagacctttaggttttttttttttgtattgggkgaaggggtggggcatcggtcctactttaggacctaaagaaattcccttgggagtgggtggggctcagagatttgggtaaagaaagggcaaatttagaattcggagaggctgaggcttagtgttctaaacggtggttggaagggggagggaggagcctcatggacgtgcctgggggtgtggcttggcttccccttgattttggccggtggatgacgctgtcctgacca

SEQ ID NO: 754739 - DNA, 562 bp, Homo sapiens
agctaacacgtgacaaaagctttaaaaaatgggtggtagtgagccctgtttaagtcttttttttttttttttttgagacggagtctcactctgtcgcccaggctggagtgcagtggcgcgatctcggctcacctgcaagctccgcctcccgggttgacgccattctcctgtctcagcctcccgagtagctgagactacaggcgcccgccaccacgcccagctaattttttgtattttgagtagagacggggtktcaccgtgttagccaggacggtctcgatctcctgatctcgtgatccgcccacctcggcctcccaaagtgctcagatccgtttaagtcttatttagtgttagcattctttcggtagtggtctggtgggactacgtttacctagtcctaatttcggacgaggttccacctgctttctaacctccagccattttttttccctttggagaaggggtctcactgtgctgcccaggctgatctcgacctcctggtgtcatgtgatcctcccgccttggcctcccagcgtgttgggcttataggcgtgaggcacca

SEQ ID NO: 754740 - DNA, 562 bp, Homo sapiens
ttagaattggcaggtaaaaaggtgggcacagtctacacttgagaaatacggccgtcagtaaaacttattcacctattacatagtacttgggagcttctagatcgtcacaatttaattaaccttaggtattgtcattctttttaatccttatacatctgataagccaaaaaaagtagttttttatttgtatttttwaaaaaattagtagcgatgttaaaactttattttcttttttattgtgaagttcttgcctgtatcctctgctgatttaaaaaattgggatattcagtctttttcttattgatttgtacatgctctttatatattaagtatcagaaagtttaaatgttcatgtttccaaatcttactttgtttttcatatttaaaatcttaattcttttggaaatcgttttagtttaaggtgtcaggtaggtgtttagtttttaaattttgttccaataatgttaactcttttctcttttttttcctgactgatttatatgtcaacttgtgttatatgcctgggtatacttatggactttaagttgttttcttctagttt

SEQ ID NO: 754741 - DNA, 459 bp, Homo sapiens
aaatttaagaacctcatttattaccaacttcttttaggattattaactcaaacatctcttggaggattagtacaaatattatgttctcccatcatctctataacaggctgtaattctgaggaccaagcttgtgccttattcatccttgtatctcgtccagcactgaatacagttcctggcataaactaaygatgcaataaattgtgtttgaattgaattttcaaagcattcaaggctggccacctctgcacttgtgggagtaatttgcatttgagctgcatgttttgagatatatcatgcatttaatattgttctttaggtccagcctgatgagtgaagaggctaagcgaggagcacccaacccttggctctttgaggagccagaggagaccagaggcttgggttttgatgaaatccggcaacagcagcagaaaattatccaaggtactaaatatcctg

SEQ ID NO: 754742 - DNA, 596 bp, Homo sapiens
aaaatatgtatacatagtagaatgggcaaatcaatctaattaacttatgtataagctcacatgcatatttatttatggtgagaacacttaaaatctactctcttagcaatttttaagtatattagttaccctgttgtacagtcgatcttttgagcttattctttctgtctaactgaaattttgtattctgtgacccacatctcctcatctctcccccaaaccccagggctgggtaaccactcctctgctctctgcttctctgttcatctttttcagattctgcatataartgagatcatatggtatttgcctggctttctttgcctacaaatcccagcagtgggattgctagtatcacttttaattttttgaagaacctccatactgttttccataatggttgcagtaaatttacatccccaccaacagtgtgcagggattcgcttttctccacattcttgccaacacttgttatcttttttctttttgatcatagccattctgacaggtgtgaggtgacagctcatcatgtttggtttgtttgtttgttttttgagacagagtcttgctctgtcgcccaggctggagtgcagtga

SEQ ID NO: 754743 - DNA, 526 bp, Homo sapiens
ctttagtcaaaactgccacaaactgaaaacaactcaatgtccttccactggtaaataaacaaacaaattgccgggtgcggtggctcacacctataatcccagcactttgggaggccaaggcgagcggatcacgaggtcaggagatcgagaccaccctggcttacacggcgaaaccccgtctccactaaaaatacaaaaaattagccggrcatggcggcgggcgcctgtagtcccagctactcgggcggctgaggcaggagaatggcgtgaaccccgggggacggagcctgcagtgagccgagatggagccactgcactccagcctgggcgacagagcgagactccgtctcaaaaataaataaacaaacaaacaaattgtggtacagctagacaataagctattccaccacaataaaaaggcacaaactacggatgtatgcaacaatgtgaataaatcttaaatgcattatgcttagtgaaagcagccagatacaaaaagctacaaacttcacaattctatttatat

SEQ ID NO: 754744 - DNA, 488 bp, Homo sapiens
aaaaaggtagtaaaaaataataatgctgtaatgatagacattccttcaaattctccaagacccatatatacggatgtgtgtgtgttagagatagaatctccctatcttactcagactagcctcaaacgatcctccagcctcagcctccctagtagctgcgaagcatgcagctgcgcctgacttcctctaatttttaccgatgttcatargcacatttttatctagctataatataaattgatgatttgttttattttataaaaatctaattaattctgccattctagcaaagaccagcatgataatctggcaaggtaggactcattgatcaatttcaagtcagcacttttctccccattcacacagcagtatttcttaagaaggaattttatttctcggtggtattctcagtattttgtagacatacctgctcttaaccagcaatgcaggaagtccaaatgacatcctgaaacaaggcctcttttgca

SEQ ID NO: 754745 - DNA, 581 bp, Homo sapiens
gcaaataccaagaagggcagaaagttactatttacagaatacttataactaaaggtccagtacttaaaccaatcttgctaagaaaaccaaggctcgtttgaattttactatgtattctagttatggttacctctgcatatactattatatatggaggagtaaatatgctggcttttaattttatttttttgagatggagtctcgctctgtcgtccaggctggagtgcagtggcgccatcttggctcactgcaagctccgcctcctgggctcacgccattctcctgccttaacctcccaagtagctgggactacaggcgaccactgccacgcctggctaattttttgtatttttagtagagatggggtttcaccrtgtcagccaggatggtgtcgatctcctgacttcgtgatccgcccgccttggcctcccaaagtgctgggattacaggcgtgagccaccgtgccctgccaatatgctggctcttaagcacaggagagttgagttgaaatctgttgttttctaccacattcttcaaaaacacatcaaataagtttttaaaataattcaaaagtaatcatg

SEQ ID NO: 754746 - DNA, 581 bp, Homo sapiens
gcaaataccaagaagggcagaaagttactatttacagaatacttataactaaaggtccagtacttaaaccaatcttgctaagaaaaccaaggctcgtttgaattttactatgtattctagttatggttacctctgcatatactattatatatggaggagtaaatatgctggcttttaattttatttttttgagatggagtctcgctctgtcgtccaggctggagtgcagtggcgccatcttggctcactgcaagctccgcctcctgggctcacgccattctcctgccttaacctcccaagtagctgggactacaggcgaccactgccacgcctggctaattttttgtatttttagtagagatggggtttcaccgtgtcagccaggatggtgtcgatctcctgacytcgtgatccgcccgccttggcctcccaaagtgctgggattacaggcgtgagccaccgtgccctgccaatatgctggctcttaagcacaggagagttgagttgaaatctgttgttttctaccacattcttcaaaaacacatcaaataagtttttaaaataattcaaaagtaatcatg

SEQ ID NO: 754747 - DNA, 639 bp, Homo sapiens
taaaacaagatcactcttctcactatattgtttctgttgtagaagagatagtttaaaaactaaacatttattttttatttcaacatgcaattttaaaatgaattaataagtaaatattttgaacaattaccacttttttttttttttttgagacggagtctcactctgtcgcccggctggagtgcagtggtgcgatctcggctcactgcaacctctgcctcccgggttcgagcaattcttctgcttcagcctcccgagtagctgggactacaggygcccgccaccactcctgtttgtttgttttgttttgttctgcttttttttttttttttttgtatttttaacagagacagggtttcaccatgttcaccaggatggtctcgatctcttgacctcgtgatccgcccgcctcggcctcccagagtgctgggattacaggcgtgaggcaccgcgcctggccaagataattttttttgtagaaaaataatatgtccttgtcaactggcataagtaatgacagcttatcatgcatgccgagtttgtcattataaagacctcagacaagtaaataatacaatgtaaaatgaaaattgaaataatccattaggtatgaagaaatccaccacaaacattccagtt

SEQ ID NO: 754748 - DNA, 614 bp, Homo sapiens
atacatcatttttctaataatccttttatgtattataaaaccatgctcttcatataacatgttccctgtggtgaaagaaaacaaacacattcaattcccttatgtgttaatttagtatctaagcacatcttgacctaatttcacacaagattactttccttattctttcaatctctgaatgttaatttcaaatgtrtatgttttaatattaagataagcaaaagtgtctgttttagaaataaacatattaagatggatttcataacacaaaacattttagaaaaattaaagtgttaagcataaaaatagtaagaagaactggaataaaatattggcgtggggaagccttttagaagcaaaaaaagaatataaaaagattgaatataatatgcgtattcacttataaattaaagccactaatcaaaattaaaacaaatgacaactgggaatatttgcagcatatatcagacacagggtaataattttagcatataaaaaaatcttttaatgagtaaaaaaaggaaaaatctactggaaaactggataaagaacataaaaagaaattgacaaaaatgtaaacagccaataaacaagaaaaaatccagacagttagt

SEQ ID NO: 754749 - DNA, 609 bp, Homo sapiens
ttcattctgaaaactaatacttctgtcaatcaacaacaatcaatcaaccaacttcaaagtaacttctcttcgttagagatgactagcagccttagtatcaaattggtgattattaagacggacaacatgataaaatattcaccccataactcccgctctccaaagtgaattctttaaatctcttttgatatgcaaagttcagtgagaagtgaacaccttctgtcacctagcaacgtgctgatcttaaacaaggccagttaacctcgctgaacctggatttctctttctgaacaaagaaagacaagatccacctcctataacttctgtgactcaaatgagctaatgtataggaaatactgtgcaacatatagtggtttataaaccataaaattctgaaaaaattagctgattgaaccagtgagtagagcgtaggcawagcgatataagagcagtactaatttgctgattaggtgatgaaaattagtaaacactcagattttgctactaataaatgtattgctgcaaaatgtaactgacggttaaactacaatcattcaataataatttgttgaacatctcctaggtataaagcattataagaccaaaaga

SEQ ID NO: 754750 - DNA, 621 bp, Homo sapiens
cttactctttttaatctttcttcatagcatacatatacatatatatacacacatatacatatatatacacacatatacatatatatatatatatgtatacacatatacaggcatacctctgagacactgaaggttcagttccagaccaccataataaagtgagtcacatgaaytttttggtttcctggtacatatagaagtcaggtgtacactacactgtaatctattaagtatacaatagtgtatgcctaaaaactaatgtacatgccttaatttaaaaatatgttattgcagtgttcaagctgagagccaaatcaagaatgcaaactatttacaataaccacaaaaaataaaatatctaggaatacatctaaccaaagaagtgaaagatctctacagggctaactacaaaacactgctgaaagaaaccatagataacacaaacaaatggagaaacattccatgttaatggaaaggaagaatcaatatcattaaaatggacatactgcttaaagcaatctacagattcaatgctattcctatcaaactagcaatgtcatttttcacagaattataaaaaactatcctaaaattcatatgaatctaaaaaacagtctgaag

SEQ ID NO: 754751 - DNA, 550 bp, Homo sapiens
ttctccaaattgacttgacgttttaaatttgtactgataatcatcagagtcaaatctgcttttaggcaaaaagtatccgctagttattcccctactatgaaagtgatgagatgaattgatcatgtctccagtgtatggatggatgtctttgaggaagacctactgaccttatgtttatcttctgtcagcatggtgtgactatgtggagagacagtgctatttgctaaatactttgtttttcaaataaaaagatttcacagattatgcattgtagaatttataagtattcttttatgtctttgaatgtgccaatacaatttttatgaagttggaactattttatctattttaatgaaattgtaagcmttctgtgaattcttttattaattttattctgaagaaaatctgaccaggttagggaaatcaggtcaggttacgacgtgatcccagtggaaaagctgaactgtggactgtgatttaaaatagggaagaggtactgaagtgttgtttttatttttgtttacaaatcagcctttctaactattatgta

SEQ ID NO: 754752 - DNA, 530 bp, Homo sapiens
tattctcccttagattggtctactgcctctgtggagagtgctcaaagactgcatctcatgtgaccttccccatagcctgggcaggtaggcggatctgagattgttatctctgcttcaccggtgagcaaacagaagctcaagacctttattttctccatatatttgttaagtgtcggccacatgcctggcactggctggatgtttccacatcagttatcttaaaagattagatgactttgcaaggtcatctttctagtgaatgtgacagggcagggttcctggttcagggctccttctaccaccccaactggctggggtaaagtkcctgtgatcttggcaaagtcctgccctgctttggcgccaccctctctgcagcctgcatctgacctcctcttggtagatctccctgttagagactatgccctcatgctgcctctgggtgtccaaactctgggcatttctctatcatctctcctaattagagcttccttattatggttcccattctgtcagaatccttctctgtgctg

SEQ ID NO: 754753 - DNA, 613 bp, Homo sapiens
atgattggggtagtcatttaggtgccaaggagctctctgtattccacagctgggtctgtttcaatcttctctccttgagaatgagtcaaaacccctttgacagctaatgtgacatgtttaaagtggtattatcctgctctgaggcacaatgggaggcaggaaggtgggaaaacacaggaagccgcaggccaggctctgcagasgtgcagaaacatttccagcttttgagcaaattataggctgcccggggatcccaaggcactaaacatcctgcagtgagttactgcaatctgaacactcatcaaggctaatgactcctctgagtcattagaatgcaacttcttttgctactcctagagctgagaacatgggcatctggaatagaagcagtcatggaaatcttgcttttaatagccattaactggaacaggacaaaaacaaaaataattttagctactgattacttctcccaagtttttcctgtttacttcagggaatcaattttggaacttgagggatggaaaaatatatggtggatatggcatgctacctacctatggaatccagggtttaaacaaatagatgtcttgctttacataaaatacagtttatt

SEQ ID NO: 754754 - DNA, 554 bp, Homo sapiens
gtaagtcgtatttctaggtattttattctctttgtagcaattatgaatgggagctcactcatgatttgcctgtttgtttattattggtatatagcaatgcttgtgatttttgcacattgattttgtatcctgagactttgctgaagttgcttatcagcttaaggagattttgggctgagatgatggggttttctaaatatacaccatgttatttgcaaacagagacaatctgacttcctctcwtcctatttgaataccctttatttctttctcttgcctgattgccctggccagaacttccaacactatgttgaataggagtgatgaaagagggcatccttgtcttgtgccagttttcaaagggaatgcttccagcttttgcccattcagtatgatactggctgtgggtttgtcataaatagctcttattattttgagatactttccattgatagtttcttgagagtttttagcatgaagggtgttgaattttatcgaaggccttttctgcatctattgagataatcatgtggtttttgtcattggttctgttt

SEQ ID NO: 754755 - DNA, 477 bp, Homo sapiens
acagaggaggcagggttattaactgttgcccatagcctccaacaaatgacatctaggtccatcctaaggtgtcccctgtccatttccctctcccccaccacgtccccctaattccaggaacccaagccacgtactacttccttaacaggcctgtctctacctctttgctccagttcgtccctctcagtgaaatgttctccctgaaccccattgctgwctgctgaaatcttatcagtgcttcttatgctgactcagcttctaccacttcccagaggcccttccagattccactagttggaatgcagtttcccttcccatttcccccaggacatgtcagctgtgtctcagtcataacaagccttgtctctcagggagaccatgaatcctttagaaggtagggctgagtctgggatctctttgggctctcagccttttttagctggagagtttccagaaaaccctctgtgaagcacagga

SEQ ID NO: 754756 - DNA, 554 bp, Homo sapiens
gataaagttgaccctgtgattccccattttctctttatgtctggatccccattggaggagaactcacagaggaggcagggttattaactgttgcccatagcctccaacaaatgacatctaggtccatcctaaggtgtcccctgtccatttccctctcccccaccacgtccccctaattccaggaacccaagccacgtactacttccttaacaggcctgtctctacctctttgctccagttcgtccctctcagtgaaatgttctccctgaaccccattgctgtctgctgaaatcttatcagwgcttcttatgctgactcagcttctaccacttcccagaggcccttccagattccactagttggaatgcagtttcccttcccatttcccccaggacatgtcagctgtgtctcagtcataacaagccttgtctctcagggagaccatgaatcctttagaaggtagggctgagtctgggatctctttgggctctcagccttttttagctggagagtttccagaaaaccctctgtgaagcacaggaaacagacagctc

SEQ ID NO: 754757 - DNA, 626 bp, Homo sapiens
cattgtatgaccctcttctgaaatccccaaatcccctttgtccttaattttctccaaagtccacttattatgtggcactccctattttctctgcctccctccaagtaactccatacttcttactctccgcccataaaactctctttcatttcagttctacggagtcagaatttrtatttaaaaagatctccagatgatttgtatgccattccagtttgagatgcactgaactagatggcctctctaggtgaggtactagtttcctgccattggctagcgggagttttctgctcatcggagtctgtttcaggacagccttttgcctccctgaaaggaggggttgcgcaaagcatttgccaccagatggcgccaaaggtattccatcagagatgatcccgcagacactacactctggatgggtctttttctttttgggtgtcaaccgtcttctggggttatttgcaggttgaataactgggcttcctcacagaaattcggtgctggatggggattggagatcatggcatttaacagttgtacagatgaggaaattgacagagaaaggtggcttggccctgtcagtcacccaaagcaaggaaacctgggggtttccttcccaggtttgc

SEQ ID NO: 754758 - DNA, 626 bp, Homo sapiens
cattgtatgaccctcttctgaaatccccaaatcccctttgtccttaattttctccaaagtccacttattatgtggcactccctattttctctgcctccctccaagtaactccatacttcttactctccgcccataaaactctctttcatttcagttctacggagtcagaatttgtatttaaaaagatctccagatgatttgtatgccattccagtttgagatgcactgaactagatggcstctctaggtgaggtactagtttcctgccattggctagcgggagttttctgctcatcggagtctgtttcaggacagccttttgcctccctgaaaggaggggttgcgcaaagcatttgccaccagatggcgccaaaggtattccatcagagatgatcccgcagacactacactctggatgggtctttttctttttgggtgtcaaccgtcttctggggttatttgcaggttgaataactgggcttcctcacagaaattcggtgctggatggggattggagatcatggcatttaacagttgtacagatgaggaaattgacagagaaaggtggcttggccctgtcagtcacccaaagcaaggaaacctgggggtttccttcccaggtttgc

SEQ ID NO: 754759 - DNA, 673 bp, Homo sapiens
gggaagcactgtcaaatatgaaatggtgtttggctttctttgggctgtatttgtgtaaatattattggtatgtgttctaaaattatgaaaaactcctataattctgatatgatttagtgtgtgttattaataatagaacttgttatgtaaaattgttgtatgccacagaagtaactaaaattaatagacaattgtggctttaataggggcttccctaaacaatttggtcatccacaaacaattgttttcttgttgagatcctcttcaaaaacaattattttcttgttttgatcccttgaaaaaacctcttcaaggtttaaaatcagctatagaactttgacaggtgctcttgaatgcaggtttctggtaagtttggagaytgtgacatcagaatgcaggaaaaactttcaggactctcctggagagctgaaatgttcatgaatatcaagcagaagaggagttaactgcatggattaaactaataaaagttcaaagtaatctttttgactttgcttaaaatgttgctgatcccttgttttgttttacagagtcaagaaaacttttcttttgagctacttacagcttttaacaattaagtgaagtatactcctgtgaaaaaaatttgaagcatatttgtctctctctacctgatttctccagaatttggaaacta

SEQ ID NO: 754760 - DNA, 681 bp, Homo sapiens
tcaatattgtgaaaatgaacacactgccaaaagcagtctacaaatttaatgcgattcccatcaaaatatcaccatcattcttcacagaactagaaaaaacaaatctacaattcatatggaaccaaaaaagagcccacatagccgaagcaagactaagcaaaaagaacaaatctgcaagcatcacattaccctacctcaaaccatactataaggctatagtcaccaaaacagcatggtactagtataaaaataggcacatrgacaaatggaacagaatagagaatccagaaataaacccaaatacttatagccaaatgatgtttgacaaagcaaacaaaaacataaagtggggaaaggacacaccctattcaacaaatggtgctgggataattggcaagtcacatgtagaagaatgaaactgaatccccatctctcaccttatacaaaaatcaactcaaggatgggtgcagtggctcatgcctgtaatcccagcactttgggaggctgaggcgggaggatcacttgaggtcaggagttcgagatcaacctggccaacgtggtgaaacccacctctactaaaaatacaaaaattagccaggcgtggtggcaggcacctgtaatctcagctactcgggaggtcgagacaggaaaatcacttaaacttgggaggcggaggttgcg

SEQ ID NO: 754761 - DNA, 615 bp, Homo sapiens
tgggttgataggtgcagcaaaccaccatagcacatgtttacctatgtaacaaacctgcacatcctgcacatgtaccccagaacttaaaaaaaaaaaagtcagggtctcactgtgttgcccagtctgcagtgcagtggcgtgatacgtagctcacagtaaccttgaacccctgggctcaagagatcctcctgcctcagccccctgagtacctaggactacgggtgcacaccatcatgcctggctgatattttttattttattttttgtagagacagtgtcttcctgtgttgcccaggatggtcttaaacccttggcctcaagccatcctcccacctccgcctcccaaagtgttgggattacaggtgtgaaccactgtacctggccataaaaaatgaattacrtatttctatgttcctctaatgaacatttggcaaaattatgtagcatgctttatggtagtataaattatattgtatacctaaggataaatataatgaaatatgtaggatatgtagtaatgttttgaaaataacaaaactttgctgaaatattaaagattgaaataaatttaaagataatgtgttcatgggttagaagactcaatattgtaatctc

SEQ ID NO: 754762 - DNA, 448 bp, Homo sapiens
tctaagatttttatagtttgaggttttacatttaactctttaatccatcttaagttgatttttgtatatgatgtaaggaagggtctagtttcagtcatctgcatatggctacccagttatcccagcaccatttattgaatagggagttctttccccattgcttgtttttgtcagctttgtcaaatttcagatggttgtaaatgtgcagctttatttttgggctgtctattctgttcaatttgcccatgtgtttgtttttgtaccagtatcatgctcttttggtttctatagccttrtagtatagtttgaaggtttgaagtcaggtaatgtgatgctcccagctttgttctttgcttaggattgttttggctatttagttctttttggtttcatatgaattttagaataactttttctaattctttgaaaaatgtcattggtagtttga

SEQ ID NO: 754763 - DNA, 599 bp, Homo sapiens
atatgtaccaagcaggggattgctggatcatatggtagtccttttttagttttttgaggaacccctatattgttttctataatggctgtgtcactttacatttctgccaacagtgtatgtgcttttctctacatttcttgccagtatttgttattttttgtctttctagtaatagctattgtaactagggtaagatggatatctcattgtagtttttatttacattttcctgattattagtgatattgagcattgtttaatatacctgttgccatttgtacatcttttgagaaatgtccattcaggtattttgtccattttaaaattggattttttttcttttgctattgatttgagttcttcatatattctggttattaatcttttgacagatggataatttgcagattatttcctttygttctgtaggttgtctcttcactttattgattgtttgctttgaagaactttagtttgatataatcccatttatctgtttttgcttttgttgcctgtgatttttcagggcttccccaacaatttttgctcaaaccaatgtcctgtagcatttttctaattttgttttgttttagtagttt

SEQ ID NO: 754764 - DNA, 622 bp, Homo sapiens
aaaacagtatgatcttatacacagaaaaagctggaaactacaggaaaaaaaaaaaagtcttagaacagataaatgcatttggcaaagttacaggatacaaaacgaacatacaacaatcagactgggcacagtggctcacatctgtaatcccagccatttgggaggacaagacaggcagayagcttgaggtcaggagatcgagaccagcctgaccaacatggtgaaaccccatctctactaaaaataccaaaaaaaaattagctgggtgtggtgatgtacacctataatccaagctactcgggaggctgaggcaggagaatcgcttgaactcagcaggcggaggttgcagtgtgccgagattgcgccactgcactccagcctgggtgacagagcaagactctatctcaaaaaaaaagaaaaaatcagtagcatttctatatgccactaatgaaccagctaaaacacatacagaaaaataaaacacctaggaataaatttaatcaaagagatgaaagacctctatgacaaaaatgacaaaacactgaagggagatttgaagaggacacaaagaaacggaaagaaatcccatgctcatggatccaaagaactaacagtgttaaaa

SEQ ID NO: 754765 - DNA, 541 bp, Homo sapiens
cattcagcattttggtgctctgggttgatcataaccatgtgaataaggaactacagctctctggttgaattccttgatactgagcctggtttgcaaacccctgattggctggcatttccttctcctgctgggagaccttctcttgtagttctagagattggctgggactaagagaatgatgacaaatgtctaggcctgggtggggagccctgaagcctggacattcctcataattggatgtcccagtggttttcctacatctctggctttttaagttccccccaraccttctcaagaaggagctgctcatcaggtgtattagtctgttcttgcatatatatatatatagaaatatataaagaaatacctgagactgggtaatttataagaaaagaggttgcattggctcatggttctgtaggctgtgcaggaagcatggcagcatttgcttctggagaggcctcagggagcttttactcatagtgggaggccaagcggaagcaggtgtcttacatggtaggagcagtaccgagagagtggg

SEQ ID NO: 754766 - DNA, 492 bp, Homo sapiens
cacttcttgacctcttgaccctcccttgattttattaattctctctctggaactttttccttcttctgcctctttggtggaccagacactcagatcccagttgcctcttgctccaactccaacttgctccctccagaggctcagatcctggtttcctttacttcatatgccctcccaccaaaactccctgcccagcacctgagcacccagccctgtttgagatctggacaccactccctccaggagggcagatcagccactttgacagagagaagtgggtagaaagcataggcagggtgctgggtgctaatcytgctcccttactccctggctgggggatccagcctccttgtagatctctctccttcttcctcacatttaaagggatgccacgaccctgcaggacctattccagagggcaagctggtgcagctcctagcacacaatttggatcaacatgttgtcctgaatgaatgaatcagaaagttttgc

SEQ ID NO: 754767 - DNA, 595 bp, Homo sapiens
ctatataatatatcataaacacttatatatgagtacatattaaacagactgagtatcccctatctgaaatagttgagaccagaggtgttgcagatttcagggttttttgtttttttttttttttttcagattttggaatattcacattacataatgagatatctgawggatgggacccaagtctaaagacaaaatttatttatgatttatgtgcacctcatgtacacagcctgaatgtaatttcatttttgctttggggacccagaataaaccgtgttctgcacctgcgttttcactgtgacccatcaagtgagactgtgtgtaaaatttaccgtttgtggcatcatgttggcgctcaaaaagtttcagaatttgaagcattttggattttcatattaggcattctcgccctatgtatcatgtatatatgccatacatataatatacatgatatatatacagcgtgtgtgtatgcgtctatttaatcatctttcacacaataatgtaagcgccaccaaggcaaggacttggtttttttccccactgtaaccccagagcctaagagcatgcttggtacagagaaaggtgcctagca

SEQ ID NO: 754768 - DNA, 596 bp, Homo sapiens
gagtgggtaggtgactttccaatttcacagagctaatggacatcagaattcaggtgaaaacctaacccaaggtaggctggcgatgttagggctggctagatgcagggcagaggacaatttgaagaggcccaagaagaacctcacggagaaagatgccaccatgtttgaaatcccattagatgcacactcctctgggccttgaaaacttttgatttcccagagtcccctcttaatatgttaatttttctggggtggaagcgtcctatgttattgcagtgggcacattacaacaactggcttcatgtgccttcctgcagggatggggcactgttcacatgccaggcattaggggctctggatggggccaggctctctggaaagggctgcaggtgcaccctaraagcagtccttacctgcttaaccatcttagaagaaaacgtcctggcagagaagcatggtgttttagagtcagcctagcctgggtttgagtccaggatctgccactcccagtcctgtggccttcagcaatctagtcactccattgctctgtgtcctcacttatatcctggcaaaatagatataaactaacactgtct

SEQ ID NO: 754769 - DNA, 658 bp, Homo sapiens
gtgggtgcctgaacctgactccaaaatcatgaatagattgtatagggccaaggagcaggtctcaccccaggcatacttaatcagtgtatcagagggttggatctgatactgtgtctttttaagatgcttccacagttattctgatgatagccagtgtggaagctagggtagtaggtagaaaaggttcatatacttgtagggaaatatcagccttccctggttaatgaagattgcatattggcagccttctattaagggatttttmaaatattaattattaataaatgctctttattaataaaaagaaacctagtctgtttgacgatgagttgatggcagtcgaaattggtagcttgggatgttaatgctttgttaaggttcgtgaagcacttcattggagagagtatgtcttcatgattatttatcctgagacccagggaaggctgtttggatggtaccatttgaaacagatgcttttatttaagtttactttgagaggcaccacagttttgaaagaactggtgaggaatgggtttaggggctagagacggatggcagtagtttaaggaagtgacagctgatgaaacaataatcattgtgtattgctaagttgataaatggtttgaaggcagtcaccatggctgccttctggggaccc

SEQ ID NO: 754770 - DNA, 657 bp, Homo sapiens
atcccaccactttgggaggccaggaggatcccttgaagctaggagttagagaccaccctaggcaataaagcaatgccctgtctccataaaaaattaaaacattagccagatgcagtggcttacaccagtaatcccagaaacttgagaggctgaagccggaggattgctttaacccaggagtttgaggctgcagcaagctatgattcagtacattccagcctgggtgacacagagtgagatctcatttcttaaaaaaaagaaacaaacaaaaatttccaaatgattttagaaagtagttcaaaactgttgtttaacttatgaatcaaaaagatataattaaggggggccaggcatggtagcacacgcctgtaatctcactattttgggaggctgaggcakgataatcatttgagcccaggagtttgcgatcagcctggacaacatagtgagaccccatctctacaaaaaaaatttaaaaattagccagatgcgggggtgcatgcctgtagtcccagctactcaggaggctgagatgggaggatcacttgagcctaggaggtcaaggttacggtgagctatgattgcaccactgcactccagcctgggtgacagagtgagaccctctctctcaaaaaaaaaaaaaaaaaaaaagataat

SEQ ID NO: 754771 - DNA, 625 bp, Homo sapiens
acattgtggtgtggccttgacagccatatgtttttgtggtcatgcctggggcatagggttgtgggcaacaagaaattaggaggattcagttctgcagccaactctcagggagaggaaacccaagcagaatcctcctgttacctgagtaaagagaccagagaagcaggaagaccctgggacctggggcagaggctaaagtgaactcttgatcttagcattagaacctgtaaggcttcccactggcaacaaatggaaggactgtggctcttgtcagaaacctggctgtcattctcagcatttcatctctgtcttcctattcaagttgtctccaagtcctgtcaattctagctcacaaatatttcttgattatcccttcttctcccttgcatcttagaccacgccaccatcctctctcaccagaactgccactgcagcctcctctgcttttaccttcccctaatccattctccycacaacagccagagactctttcagaaatgtcaatcaaattgtctcacttggagacctaaaggactcattacaacacacaacacttagagtgtaatctgaactcctttcttacaaggcccagcatggcctagaccctcctagtccccatttgttt

SEQ ID NO: 754772 - DNA, 634 bp, Homo sapiens
ttttttatgcggcgcagtattccatggtgtatatgtgccacattttctttacccagtctatgggcatttgggttggttccaagtctgctattgtgaatagtgctgcaataaacatacatgtgcatgtgtctttatagtagaatgatttataatcctttgggtatatacccagtaatggaattgctgggtcaactggtatttctggttctagatccttgaggaattgctacactgtctttcacagtggttgaactaatttacattcccaccaacagtgtaaaagcgttcctatttctccacgtcctctccagcatctgttgtttcctcaccttttaatgatcgccattstaactggtgtgagatggtatctcattgtggttttgatttgcatttctctgacgaccagtgatgatgatgagctttttttcatgtttgttggctgcatagatgtcttcttttgaggagtgtctgttcatatcctttgcccacttttcgatggggttgttttttttcttgtaaaattgtttaaattccttgtggattctggatattagacctttgtcagatgagtatcttgctattacaaattagtctgctatgataacttctgtacaagttttccttacagacatat

SEQ ID NO: 754773 - DNA, 634 bp, Homo sapiens
ttttttatgcggcgcagtattccatggtgtatatgtgccacattttctttacccagtctatgggcatttgggttggttccaagtctgctattgtgaatagtgctgcaataaacatacatgtgcatgtgtctttatagtagaatgatttataatcctttgggtatatacccagtaatggaattgctgggtcaactggtatttctggttctagatccttgaggaattgctacactgtctttcacagtggttgaactaatttacattcccaccaacagtgtaaaagcgttcctatttctccacgtcctctccagcatctgttgtttcctcaccttttaatgatcgccattctaactggtgtgagatggtatctcattgtggttttgatttgcatttctctgacgaccagtgatgatgatgagctttttttcatgtttgttggctgcatagatgtcttcttttgaggagtgtctrttcatatcctttgcccacttttcgatggggttgttttttttcttgtaaaattgtttaaattccttgtggattctggatattagacctttgtcagatgagtatcttgctattacaaattagtctgctatgataacttctgtacaagttttccttacagacatat

SEQ ID NO: 754774 - DNA, 591 bp, Homo sapiens
atctttcatcctctttatcttcagcaatttctagaatactatatggagaacctatgtgccattagtccatttgactagatttatatacccacttcatctcaggtctttgtcagactaaattagggttttgttaggtgactgatttgtaggttcatatttagatgatatcaatatacggaccaaataatgatataacatgtttagactaggaaaatcattaatcgtgtatcatttgctactcagtgattagacatgttctttgtacttcggtacaaaacactgttgccctcacaagatttaaaataagatgtgttttaagttaratacccttgaccaactaattcctacctgaaggagtggctatgacatggctctgaattttctaccaacaggagaactaaattgcttttaaggtagagttcagagaaggaaagtgtagttctcaaagcttactgttttccaaataacagaggcccaattcaaataagttaaagcaaaaccaacttctcttttctgacataactgaaataaacgcagggttccaggtgctcaaattatgtcactgatattcttctcccctcccttaattat

SEQ ID NO: 754775 - DNA, 639 bp, Homo sapiens
gctttcaattttatggtctagagagtatttctataatttttattttgtgctgtttaggtaaaaagcaatctttatgtctcccattttgtcctgagaagaaagtctgatttaattggccacctacaaattgccagaaccgtatgttaaacacgctttacatatataatctcaaagaatactaggcattcactgggagagcaaaacagagtcatgtaggaagtaaacatggtgggttggttgcattatatagtgattacaggtatgcagcggtcttctacmggctgactaaatgaaatttacagagaccactggctttaggttgcttgcagcagcaagttatcttcttttaagtaaatcgttatattctttcttttttaaaatagctctttttctttttctgagattgaagtccaccactctactaatctttacatgtctgtgtagatttctcacatatataaaaaagtactactttaatttgaccgaaaacattacaatgagaaggaaactaggagttctaacaaagccagaagttcatccctccagatcatggacattttctactaccctgtttcgaaagtcttgaaagccatagagaaaaagaaaaagcaatacctttttctttacatattatcaggc

SEQ ID NO: 754776 - DNA, 379 bp, Homo sapiens
agctgtgatggcttgaagaaacagtgtaaaccggcggtgtaaacaagagtagggcatttgtaagtagttgagaatggagaataggagtatgaccggacagaagatagtagggatgactagttttttttgggggggcttggctaagtggtgggggtgacttcgtaaagccctgtcgcaaaagtagggtaaggacraaaagacctaatagaatgaagggatgtattaggctcataagggttattactgttcttcagaaatacgagtgagtttaagggaagtaggggagagtacttgcaacttccaggaggaagaggagggattaggctggctgtccgatggacacagctttattctggaatggtgaacccagtggggagga

SEQ ID NO: 754777 - DNA, 379 bp, Homo sapiens
agctgtgatggcttgaagaaacagtgtaaaccggcggtgtaaacaagagtagggcatttgtaagtagttgagaatggagaataggagtatgaccggacagaagatagtagggatgactagttttttttgggggggcttggctaagtggtgggggtgacttcgtaaagccctgtcgcaaaagtagggtaaggacaaamagacctaatagaatgaagggatgtattaggctcataagggttattactgttcttcagaaatacgagtgagtttaagggaagtaggggagagtacttgcaacttccaggaggaagaggagggattaggctggctgtccgatggacacagctttattctggaatggtgaacccagtggggagga

SEQ ID NO: 754778 - DNA, 671 bp, Homo sapiens
cagtcataggctccatctttttcttgattatttgagaaaagcaaacacataaacaaacatcttaagacttttaattgttacaaggttatgagttccaacgtttcttagaaaaccaagaaattttctaagaggcataggattctgatggttgtttaatggaggatgttaaakgtgatgatgagagggaatgtcctgagcagtgacaaaggcagaataaaatatgtgttagaagaatccagaaataaggaggtgaagatatctacttttataaaggcaatctagctcaacttctcctattaagaaacagatgagaaaaattaggcataaattcactgggtgcattacagacattgtcaggcccagttctgtggtctcctgacttccctctgtcatttgtgttctgctctgcacccttacttctgaagtgggtatctcttttgtataggacttttccaccaatctttactaactaattaattctatttggaggtcatattctacaaaagaaactgaacagatataaagtgatttggggtgtgagaggtcaaactgaggaggtcattttgctggaaaatgagagattttgttataccaataaagcataataattggtgactgagagccataatgccttatgctctggttaacctaatcaacagaatctgcaaaat

SEQ ID NO: 754779 - DNA, 671 bp, Homo sapiens
cagtcataggctccatctttttcttgattatttgagaaaagcaaacacataaacaaacatcttaagacttttaattgttacaaggttatgagttccaacgtttcttagaaaaccaagaaattttctaagaggcataggattctgatggttgtttaatggaggatgttaaatgtgatgatgagagggaatgtcctgagcagtgacaaaggcagaataaaatatgtgttagaagaatccagaaataaggaggtgaagatatctacttttataaaggcaatctagctcaacttctcctattaagaaacagatgagaaaaattaggcataaattcactgggtgcattacagacattgtcaggcccagttctgtggtctcctgacttccctytgtcatttgtgttctgctctgcacccttacttctgaagtgggtatctcttttgtataggacttttccaccaatctttactaactaattaattctatttggaggtcatattctacaaaagaaactgaacagatataaagtgatttggggtgtgagaggtcaaactgaggaggtcattttgctggaaaatgagagattttgttataccaataaagcataataattggtgactgagagccataatgccttatgctctggttaacctaatcaacagaatctgcaaaat

SEQ ID NO: 754780 - DNA, 671 bp, Homo sapiens
cagtcataggctccatctttttcttgattatttgagaaaagcaaacacataaacaaacatcttaagacttttaattgttacaaggttatgagttccaacgtttcttagaaaaccaagaaattttctaagaggcataggattctgatggttgtttaatggaggatgttaaatgtgatgatgagagggaatgtcctgagcagtgacaaaggcagaataaaatatgtgttagaagaatccagaaataaggaggtgaagatatctacttttataaaggcaatctagctcaacttctcctattaagaaacagatgagaaaaattaggcataaattcactgggtgcattacagacattgtcaggcccagttctgtggtctcctgacttccctctgtcatttgtgttctgctctgcacccttacttcygaagtgggtatctcttttgtataggacttttccaccaatctttactaactaattaattctatttggaggtcatattctacaaaagaaactgaacagatataaagtgatttggggtgtgagaggtcaaactgaggaggtcattttgctggaaaatgagagattttgttataccaataaagcataataattggtgactgagagccataatgccttatgctctggttaacctaatcaacagaatctgcaaaat

SEQ ID NO: 754781 - DNA, 606 bp, Homo sapiens
tcggtcacccaggctggagtgcaatggcatgatcatagcttactgtaactttgaactcctgggctcaggtgatccttccacttcagcctcccaagtagctaggactataggcatgtgccaccactcctggataattaaaaaaaaaawtttttttttgtagtgataggagtcttactctggtgcccaggctggtctcaaacacctggcatcaagcgattctcttgtctctgccaccaaaagtgctgggataccagtcatgagccgcttcgcccaggtaaaacagtttattttaaaacaattcataggtaagtggtgaaactagaaagcaaacaagcacattattcaaaagaatttttaagaccagtaaccccaagctgatgttctcataggttccattagccgaaaccagtttacatggctttctccaatacaatcattgccaaaattgtattgaacttctatgtgttgcaagatgaccaaagccattttctcttcatagctgcaatcccattcttctatagtttgctttgtgatgctgggctgggattctgcaagcatttctgcttgtctggcttctcccctattaggtcctgagactagaggaaa

SEQ ID NO: 754782 - DNA, 591 bp, Homo sapiens
tcattactagatatcactttcttcccttccagcaatttgttccaaactgcagcttaaaatgtcacattattgatgtggcattatcaagtttcatcatgattgacctgatgtcacactgttttgtaacacaactggttgctgtctatcaaaggcacttacagaaacctattataaacatggagaacaatttgtgccagcaaagaaccatctggtatactctttgctttaaagatgagccttgtggttatttaaaaattattaaagtttaaatgtgaattttgttactattaaagcctttgyttgatccttgaaattgtcaacattttgatacttctctgaggtaggtaaaaagttttaggacttttctttatgtatgagttttaattaatgttggtgacccacaagagcgatcaaaagtggaggttcacttataacccttcctcggaaaagaaaaggcatttttttatgaggatgctttgtgtgtgtgtgtgtgtgtgtgtgtgtgtgtgtgtgtgtgtgtttgagaaagagagacagagagacagggacacagaagggtattgtagggagagaaagaaagggagaagttga

SEQ ID NO: 754783 - DNA, 602 bp, Homo sapiens
tcttcatttcaaatgcccatctaacctcttctacttgcaaaatcctactgttttgaaggtctagctcaatgatcaatttctttgtaaagtttctccccatgctgtgatacagaattaattgcactatcttcattattctctgagcactctgtccatccctctagcatagcaattaccacattatatgattgttgtttacattctctctcattcactgcactctattcttacttatcttttcactttttaaatttcaaatacccaatgcagaattaatacttgttggcttatattgaattgcagatttttctcttattattattaatggttgtctctgactgtacataagcaaagcaaggccataaactgaatggcttgtctttaaccttacctctatgaagccttctaggggagagcagtcaytccaaccaccattcctggtgttttctaaaattgtgcaggagaaggttcctgcttttgtgtttctgcggagattattatttctccttacaaggacttgctataaaaagagtaaagactccattttgaaagatctttaagaataaatgagagagaaaatgtaaataatcttcaatgaaggt

SEQ ID NO: 754784 - DNA, 634 bp, Homo sapiens
tcactagtcattagataaatgcaaatcaaaaccacagtgagataccatctcatgccggttagaatggagatcattaaaaagtcaggaaacaacagatgctggagaagatgtggaggcttttacactgttggtgggagtgtaaattagttcaaccattatggaagacagtgtggcagtttctcaaggatctggaactagaaataccatttgacccagcaatmccattaatgggtatatacccaaagaattataaatcattccactaaaaagacacatgctgacatatatttattgaagcactattcacaatagcaaattcacaatatcaaagatttggaaccaacccaaatgcctatcaatgatagactggataaagaaaatgtggcacatatacaccatggaatactatgtagccgtaaaaaagaatgagttcatgtcctttgcttggacatggatgaactgggaaaccatcattctcagcaaactagcacaggaacagaaaaccaaacactgcatgttgtcactcgtaagtgggagttgaacaatgagaacacatggacacaggtaggggaacgtcacacactggggcctgttcgggggtggtgggtaagaggaggcatagcattaggagaaa

SEQ ID NO: 754785 - DNA, 621 bp, Homo sapiens
taaatttaatggataatgaaaattataatcacacagtttatgtaacattgccgcagatacatagtaggccaagatgctgtatcttttgtttgccataaaaatcatgaaaaaatactgagtacaaagattattcatttattataaatgaaaacaatttactaacaaaaattcctcttttcctataaaattgaagtctcatagtatattacatattaagtatgtaaggtataagtaattcagccctatgctcatatgaccattaaatgyactttttcaatgcacatgttgaatatttattgtcttatctcagttttccacgaaaaaataggtggacacaaacttctttaataagattttactgacaagcgcagtcatagtactacaaggatgaagaaagaaagggcctctaaccctcatatgtgactttatccctccctcactgtcatctttgcggttgataattctgattttcctcaaaaacattcttgttttacctttaagacttcaggcatgctcctaagaaaataaaatcttccaagcctagttttctggcaataaaaagacaatagagtaattttaagaacagaatgaaaagaaagaagaaattggtagcacccatgt

SEQ ID NO: 754786 - DNA, 648 bp, Homo sapiens
ccaaaatatgtatttaaaatcagcatgagattgccaatttattttccatagtaatgtgtttctgtatcatctaaaaacaatgacagtgaaatggaaaattggtccagccatcctcatattcattctatttaagcaaaaatatttggtggcataaattatcaaataattacttcaaattttcactttattttgcatgtgtgtaagcagaaccaaagatggatcttatcagcaaagaagaaataatcttattttcatggcattggattatttccagatggaggaatatttaaatagagtacttataattcatatttttattctttcatttgctgatatctgaatctgaagcctaagttgttccaagcgcagatgttcttattgctggattcatctgtgccaataaggtaaaatacatgtatacaaatacagattttaatctttgactcatcctgttcactagtactatccatatactcwaagatttgctttacattggtaattcaaacacccaatttgtgtattataatgttttaccctaattatatgattttaaatatgtcatatcttttatgaagataatatgatatagtaatggtcctatttttcttataaaacttgaaaaatcctaccattacactatttcaaata

SEQ ID NO: 754787 - DNA, 627 bp, Homo sapiens
ttaacataatgtcctcatctgtgttgctgcaaataacaggatttcattcagttttatggccgaatagtattccattatgtgtatatgtgtatatcacattttctttatccattcatttgtagatgacttttagatcgatttctatatcttggctattgtgaatactgctgtagtaaacatgggtgtgcatatatatatatatatatatatatatawaatctttgacatactgattttatttcctttggatatacacccagtaatgagattgctagatcaaaccgtagttatatttttaattttttgaggaaccttcatactgttttctgtaatagctgaactaatttacattcctaccaacaatgtactgagtttgctttctctgcattcttcccagcatttattttttgtctttctgataatagccattctaactggggttaggtgatacctcattgtgattttgatttgcatttatctgttgattagtgatgttgattttttttggatgtctattaactattttcatatcttcttttgagaaatgtctatttgggtcttttgcccgttttaaaatcagattatttgcttatttttgctattgaattgtttgagttccttataagt

SEQ ID NO: 754788 - DNA, 636 bp, Homo sapiens
tgtatcccaataaagctattattttaagaaatagtaaaatctgcctgatatgaattatttttaatttagaatattttaagggtaaattttaaaatgcttaatgctgtgtaataacatttttgaaagctatttcaagatgctaatttcttakaaaccagaataaaaagcatgctatcattgctcacatttttcagacccagaggagcttccttatctttttatttattgaattgtccattttagaattagcactcattgaactgagaaaaagtgtgtacttttgcaaatgagtgaactgaagtgaactgaatgaaactgggacttttaaatgatgtccaaactttaaattataaaatgataatattacccatttttaaaaacaccatttcatttttctttcatgttattttactttcatagtactgataagcctaaaaagtaaatgctaacactataactttcatcagaaagaaaaaggatagaattttctgtgctgattttaaaactctaattgtaacacagttgccctttataatcacgcagacttttagttttgctcattgatgtttgacagatttctgctaattttgatttattaggttgttttagattatttgccattgctctttttttgct

SEQ ID NO: 754789 - DNA, 517 bp, Homo sapiens
tgtgtgtgtctgtgtgtgtgtgtacatatatatattatatatttgagagtatattatacatgcatttaattatgttatctctgttgttggtcactaaccctaaagagagggccaaagattcttaacctcatgcccaagtagcttgggactcctgatacaaggcagggcaactctggatggtttttttgttttgttttgttttgtttggagatcattcttgtattgactattcttaagcccagatcattatttgtctaatttgaacattctgataagcccatgtgattagaactgctggtgggagtggaagagtgctgcatagaggcatagaggtctaattcagttctttcaagttraatcttgactcaggtgttttcttccacttgtgaaatgcagaatttgcagaacagtgatcactagtgagaacatcagtaagagctgctacctagcacaaaagacaaggtggaaactgttgagaaggtcaagtaagtaacacacatatctttataagttgggg

SEQ ID NO: 754790 - DNA, 598 bp, Homo sapiens
tcagttacatatatataactgttaaatgttaaaattttaacattttccaatgtggcttttgatattcattgaaataacacatttagaaactgtaacaaaatgtcagttggtgatagttggtggtagggtagggtaaagggacttatatggttgcaagggttctgtataataattgaagtggtrcattattaactctactaaccaataataaaaataatacaaagacatgtagccagaaaaccaacagacaaattgaaatagaatattaaatatactcgagtaatccataacaaggcagacaagagaacacagaggaagaaatgcagaagggacaaacagaaaaatgaaataaaatggtagacataaattcatttatattaataattatattaaacattaatggcttaactacttcaattaaagggcagatattgacagagtgaatgaaaagcaagatcctaccagaggccaaaaacaaaagcacagttattgaaagtaaaggatagaaaaagatctaccctacaaaactaagccaaagaaagcgagggcgtttatattaacgtcagataaaataaacttcgagacgcagataatgtaa

SEQ ID NO: 754791 - DNA, 603 bp, Homo sapiens
tgcacatgaactcgatatatcttattactggtgatgttaatcttcatcatttggtacaggtggtatctgcaagttccactgttaaattactatttgtttcttctttgcaggctctagtcattggaagcaggtcactaagaccagcccatatacacagggtgaagaattaagctccttcttctggaaagaagtgtatgaaagtatctatgaaatatcttaaaaccatcacaataattaataaatattttggggaaattactttgaggctgtaaaaatatcctgcttatcctagcctaatcggttcagygttcattatggaagttgcctgcagcaattattactgtagtactctaatagtgattttctaattccccttttactttcacatttattgaatggaattcttgtgtaaggagatgtctcttctcccctatttatttacttatttattcattcaacattaatttataccagtagagggttatggatatttattgtgttatttgggttaaaatgcaaatactataaatatttcattattcatgtggttccagattaatccactgacagctcttccagttgtttcttaagtcctatggacag

SEQ ID NO: 754792 - DNA, 607 bp, Homo sapiens
aaaactacctctcagatttcattctaacactaaattgaaaattaaaatgaagttttcaatttgctgagcagatattgaatggctagatggatggatggatggaagggtggatggatgatgaatggaaactgaatgactgatttcattggtgtgtagtgccatatgtttgtgaaagaytcaataaaaagtctgaaaaataagtggattcacgaagcagtgccatttaatttaaaatttaattttatttcatgtttctgtttgggatcctggacacaactcatttaagtgaaaaaagggaacacggcaactgatttctttctaactccggttttcttttctgagcgccttaaaaacttctactggtaccagttcttacctttgtttcctttcatgtatcttccaggttgcattttgccaatttgttttcagctgatctttatgtactaacaaattggcagaatgacaaagacaagcagggaaataagagaaaatgccaaatgttattttctccacccgcaagcagtaaaaagggagaacattccactttcatctttttaatatgagtacttcttttgctcctggaatgagaaagtacatcctgctttat

SEQ ID NO: 754793 - DNA, 587 bp, Homo sapiens
tgttagaaaaaatatattgaggaaaaactatggtccctttagctctgtgcacccatgacaatctactgcttttcccaaaaattatttacaaactttatgaagagtaatgttgtaattatttacataatttatataaattttaacttgcatattagtgtagagaaataaattctgaaatacaactgtcatattttatatttttcataccctttgagaactttgggactcactgaatcaacatgtaaagtatgtgcacgtattcagagtaagactgcttagctttgctattctaagtgattatggatgcttctggttgttataaatttgcatatgtaccagtctgttttcacactgctaataaagacatacgtgagactgggtaatttataaaggaaagaggtytaatggactcagaggcctcattatcatggcagaagagaaatgaggcccaaagtcacatcttacatggcagcaggcaagagagcttgggtaggggaactcccctttttaaaactgtcagatctcctgagacttatccactatcatgagaacagcatggggaagacctgcccctatgattcaattac

SEQ ID NO: 754794 - DNA, 602 bp, Homo sapiens
gtctctctctcacactcgctccccttctctctgcctccgtccctctgcctctctctcaggcttttctgtcactcctcccctccccccagcagtggaagggcctctaggactttcttctggaagtttccctgcacgtggggaactaccctgctcctaagcagggccccttcatgctcatctcccatgttccctctgggggcctgtgcttgctcacccctgcctccactcctgtcctcattcccctctctcccttagctatgaggaacaggggatccgaggcttgctgttagataaacccgtctcgtgactaaacttcccgtgtctagctggtgaacagtcttcattcctcattgaaaaggaggtaaaacaatggattagcatgtcagctgagttgtttacaattgcgtgtggactttgttggccttcctgtctttaagtggcctgcatggagatggagtccmcaggcacctttacagagagcgcctggtgtcggaagccaaacaggagagtcgggacctgcccactgcttcgttcggccttgaagccctgcagatgccagaagaaaacacacactggtgtgtttcactcactcatcttggagg

SEQ ID NO: 754795 - DNA, 630 bp, Homo sapiens
cctccagctccagccatgtccctgccaaggacatgatctcattgtttttcatggctgcatagtattccatggtgtgtatttaccacattttctttatccaacctgtcactgatgagcattcaggttaattccatgtctttgctattgtgaatagtgctgcaatgaacattcatatgagagtatctttatggtagaatgttttatattcttctcggtatctacccagtaatgagactgccagrtccaatggtagttgtgcttttaactctttgagaaattgccatactgctttccacaatggttgaactaatttacactcccaccaacagtgtgtaagtgttcccttttctctgcagcctctccggcatctgctttttgtttgtttgcctttttaataatagccattcttactggtgtgagatggtatctcattgtgattttgatgtgcatttctctaatgagcagtgacactgagcttttttcttatgtttgttggcagcatgtatgtcttctttggagaagtgtgtgttcatgtcctctgcccacattttaatggggttgtttgtttttctcttgcaaatttatttacattttgtatagatgctggatattcgatctttagcagacaca

SEQ ID NO: 754796 - DNA, 539 bp, Homo sapiens
gttttgtaaataaagctttattgggactcagccacgccatctgtggcacagcatctgtggctactttcacgccacaatggcagggctgagtagctgcccaagagaccacaggacctacaacacccagctgtttatggaaaaaatctgccacccctgttttaaaggagcttagatacataggcattggcagacacacaaacccacacttgccttggtaaggcttgggctgaacttgggaacaagagcagaccgaggcatggggctcattgctgggccagagacacaacttgattagaacgcgccatctggaagaagtgtctcaaagccccarctgggtcgtggttccaagggaggtgaaaggctagaccttctcttccactgctgccgtgtccccaaatgtggaagtggagataggggtcagtccctgtgtttctcagcaggacgaggccaggaatccagggacagcaaaggtgactctaggggccagcgatgcagaagccagagaagtccctccctcggagcgctgggctctccccggc

SEQ ID NO: 754797 - DNA, 557 bp, Homo sapiens
tacaatgccctggcgtgatttcctgcctcactgtcgctgacctggccccatccccgaggcggctgagccctgtggtcagcaaccccctgcctgctcagctggacctgggcttcggtcctggctctcaccaattctgtaaagtagaaattgtaaaagccccttcctcccacagatttcatgggacccagatggaataagccgtggttccaggcacacctgagtgcttcccaacactgccttcttattttcctccccaatttcttccaggccacgcttgctcatgctcactcactctgagttcttttctgtctcaaggtgattgcatgggttacagtattttcctggactccggttcttgcctctgcccacagtgactgtcrggagctctgctcatcttctgggatttttaaccccacttgctgttgatgaatgcttccaaaatgtgctcctgtgtttcttccacatccaggtgacacacaactcccagctgatggaagacatccccaggcagaggagggagggcaggtaagactcatttcaggaacacattgtattcc

SEQ ID NO: 754798 - DNA, 612 bp, Homo sapiens
tttataaatttccctgtctcagatctttctttacagctattcaagaatgacctaacatcgatctgtaagtgctcctcccaatccccctcctcacttcaagatacccctcctctttaggctgaacaaatgtataccttccatatgctgatttgtgattttatctatgattcctgtctccctaaaatatataaactcaaactgtaactgaattgccttggacacagtttctcataagaccgttccctgggccatggtcactaatactggctcagaataaacttctttaaatattttacagaattctttttgtcaaaaatcttatgcataatgtcttttagtaagtctgttttcctaggctgcaaacttcacrggtatttcttagctttttttctccttctaatgagtaaagaggactagagggagctggcgtaggataacatccttccatcaggtgggataaggctctggtaaagtatttcttgtggagaggaggcctttgttttggagaatgctctgtgcatgtttcaaaggctatgctttccctcatcctgccagggccaggaggggctgtttctcacatcttcatcatgagaacctgatggattttctaga

SEQ ID NO: 754799 - DNA, 612 bp, Homo sapiens
tttataaatttccctgtctcagatctttctttacagctattcaagaatgacctaacatcgatctgtaagtgctcctcccaatccccctcctcacttcaagatacccctcctctttaggctgaacaaatgtataccttccatatgctgatttgtgattttatctatgattcctgtctccctaaaatatataaactcaaactgtaactgaattgccttggacacagtttctcataagaccgttccctgggccatggtcactaatactggctcagaataaacttctttaaatattttacagaattctttttgtcaaaaatcttatgcataatgtcttttagtaagtctgttttcctaggctgcaaacttcacgggtatttcttagctttttttctccttctaatgagtaaagaggactagagggagctggmgtaggataacatccttccatcaggtgggataaggctctggtaaagtatttcttgtggagaggaggcctttgttttggagaatgctctgtgcatgtttcaaaggctatgctttccctcatcctgccagggccaggaggggctgtttctcacatcttcatcatgagaacctgatggattttctaga

SEQ ID NO: 754800 - DNA, 614 bp, Homo sapiens
aaacgataagaagaagactagtgattttaatacaagatagagcatcataaatatatgcagatataaggatggttcggagtaggcaggcatgatacctaactggggtccaaggaacaatatgtgccacttttccagagtttgaaagatgatgaaggttttacctattacagcttcatgatcagaagaagcaccagctttgcagygagaaagtcctgcatcctggttgtggctctgctacttcactatgtgattttgggcaaatcatcaaacatctctttgttagtttatttgtccataaaaggaggtggttggcaagatgacttgagaccctttctactcagaaactgttactctcgtgttatctgccccagtggtctaggggtaggtattatggttttttagactgactggataaagactgtgaggtgtggagcatctctggcaatggaagctttgtgccaggtgaagaggtgtgttggagttagaatcccttcaggctgtgttcccagacaggtttggcaagaagcgctgctggtatagtagctgtcactgcttaaaagttgtttacttctcattaaatacagtaaggaaaaaatgcagagtttgttgctgtt

SEQ ID NO: 754801 - DNA, 614 bp, Homo sapiens
aaacgataagaagaagactagtgattttaatacaagatagagcatcataaatatatgcagatataaggatggttcggagtaggcaggcatgatacctaactggggtccaaggaacaatatgtgccacttttccagagtttgaaagatgatgaaggttttacctattacagcttcatgatcagaagaagcaccagctttgcagtgagaaagtcctgcatcctggttgtggctctgctwcttcactatgtgattttgggcaaatcatcaaacatctctttgttagtttatttgtccataaaaggaggtggttggcaagatgacttgagaccctttctactcagaaactgttactctcgtgttatctgccccagtggtctaggggtaggtattatggttttttagactgactggataaagactgtgaggtgtggagcatctctggcaatggaagctttgtgccaggtgaagaggtgtgttggagttagaatcccttcaggctgtgttcccagacaggtttggcaagaagcgctgctggtatagtagctgtcactgcttaaaagttgtttacttctcattaaatacagtaaggaaaaaatgcagagtttgttgctgtt

SEQ ID NO: 754802 - DNA, 550 bp, Homo sapiens
gtctatatggaatcatgatctccaacgttgttattatgactgttactcctcctacttactgtttacatcatataaccataactaaattttcttgatatatgggaggaaataaaggcatttccagtgcaaggcctaaagagcgatcctttattcctgtgaaagaggtaactctaagtacttacattcatccaaaaggcctgatattcattttagtccctgagaaatgcagtaactggaaatgtcatcctcttccctcattttgctttctgttccaggcctgtggctctctattatcagtgtgatggggatgtggcaaacaatctsgttaaatatttggctggagccgtttggtgattgtcaatctgaataaatgttaaaataaatgcacatcatgcttagtacctatggaagcaaggaaaaagcatataaaataaagacccttccagtgttcccacttaaagcaatagaaaccacaatattgcgtttttgcatttgtctcactttttctctgtattttggtttctgttttaatgggaaatggtagatgaca

SEQ ID NO: 754803 - DNA, 536 bp, Homo sapiens
taggagatcacagagccaggagtcttgtgactccaaaataaatttcttgagagaatgccacattccctctatagagaggctgcaaagaaattgaatgtaatacatatattccatgctgtctttgtcttcggcatttcaacttatattttagaaggatgagattgaacattgggaatgagacatcccgacactgtctgggttactgtgagtaagtgacttcacctcctgaagccttttttttttttttttttttttttgagacagrgtctcgctctgtcgcccaggctggagtgcagtggcgcaatcttggctcactgcaaactccgcctcctgggttcacgccattctcctgcctcagcctccggagtagctcggactacaggcgctcgccaccaggctggctaattttgttttgtatttttagtagagacggagtttcatcgtgttagccaggatctgaagccttctttttttatttataaaatgaagagattggatcaacttagctacaaattccctttcagattttacgaaga

SEQ ID NO: 754804 - DNA, 535 bp, Homo sapiens
gagtctttgaggatggagtgtctggaaaggtggagaatctgagtaagtggaaaggcggggaaagtggagaggccaggagggtgaagaagctggatgaatggagagtctaggaggctggcctttgatggggaagagcatcggtcctcccctacctcccaccttctctgggcttggagaggattgtcacagattagtaagcagaactcctccatgactacccccctttctcctgtctctcaaaactcttcctyccacatgagaactggctccattcctacttcaccatccaggcagggatggtggttattgttctgtacccagggcagaaatgcctggggctagagcagccctgtggtgtgctgaaggtccacacctgcctgccaggtccagagcccatggctccagctcacattttgcttggatgttttaagctgtcaggaaaggatgtgattccttatgctttttggaggagaataaaaaaatcttcttattgagccatcatgaaaaaatgagcaaatgttttgggtagtttttt

SEQ ID NO: 754805 - DNA, 670 bp, Homo sapiens
gtggatttgattacaaattacaggtaaaataataaagcaataaaaaggataattttgctttcatcatcgaaagctcagtgatagagtaagctttagactttatttgcctcagcaatgcagcagtggtagagggcagaggagaagtctcatcctaagccttgctcccaaggctggttataggatgctgtattagtttgctgggactgccgtaacaaataccaaagattgggcagcttaaacaacagaaatttactttctcacagttctagaagctagaagtcctctatcaaagtgttggctaattttattttgaggcctttctcattggattgtagatggctgtcttctccgtttttttcacatggctttttttctgtccatgtctgtatcctaatcttctcttcttatgaggacaccaccagttatactggattagggcccacccagaattacctcatctttttttcttcattatctctttaaagtccctatctctaagcatgtcacattgtgaaggactggaggttagsactttaacatatgaatttaggggagatgcaattcagcccataacaaatgcctgctagtaactcatgggaactctcttccacatgcaaagagataaaatgtgatttctgcaagttttattagaaatataggaaggaaccct

SEQ ID NO: 754806 - DNA, 588 bp, Homo sapiens
tagcagagcagtgactgtaggactcctgtaatctgcccctgacactctggtcttggtgcaaagcaggcaatggcaagttagagacttgggatacccagaggctgagaaaggaattaggacccttaagctgtgatgctcccattccaaagtggcaggaattgcacagcaggtgcacaaaggggagaagtggcctgtgttggacatttacagaggaggagagataaaggattgtgaggggatacctggccagcggtttaaaaaaacctggtgatatcataatattcaatgaattcatcattcattgaggactcacrtatcagacatggtcctaagaacttttcttcatgatccactgtaattttcatactaacctcatgaaaaaggaattgcttttatctctatttgacagatgaaataattgaagcagaaagaagtcaagcaattaacttgcaagatctcccaatagaaagcaggagaacgaggatttgaaccagaaactctgtgtcttcatcctgctcccaatatgtacactcttctgctcttcttaagtcaaagttgaagtcagaaggcagtgatttcccaataatg

SEQ ID NO: 754807 - DNA, 585 bp, Homo sapiens
atgcaaaaaagaatcaaatcaaatcaaagtcttggctctacattaaacaaacgacaaaggcatgtttgtttttatcaaaatgttttagggtagatttgtatgtatgcgttatttctttaaccaatgttttaatcagttaaacagctgctattattaatgtgctggttgaaagtgtttttcttaaagtacaaatttaaaatagaatgagaaaagatcagacttgagaagaaggaaagtcacagtaggacatttggaatttattctctagaccagaggtctgcaaactccagcctacaggccaaatccatcctgcagcttatttttataaataaagttttattggawtacagccaggcccatccagttacagaattgtctatggttgcttccactctacaatggcagatttgagtagctgttacagagactatacgcaagtgtgcaggagagtttagaccacacctacaggaaaggtgtgaaatactaccctccttcctagacacttccccaaacaaaaaacttaagtcagtgtgggaacaaacactgttgccccacagagcactaataaaggcagataaatgactg

SEQ ID NO: 754808 - DNA, 420 bp, Homo sapiens
tgctttctgacttaaagcctcaccttgccatctactgtgtcatgtgctcttatttccgtaagtgtaggcaaatagtacatttgtatttcatacccttagttctatctaggtgttcacagggcagttctcagagaaacatgaggtctgtgtttgtcaataagcyacaacaccttgtgatatgactgggaggggcctggtgaagattcttactgctttcagtatattcacctcagcttctacctaggaccaatactcagggcgagggtagaaaggaggtaatgcagcatcctgggcaccacagacagggctaggcgagaatactaacaactattcctgtttcacaaaaaacctgcaaagcacatttacacgttctttcattcagtttcccaaacaaccttgtgagataggcaaggaaggtat

SEQ ID NO: 754809 - DNA, 634 bp, Homo sapiens
taatttttgtttacacattttaatgaaatatttttatttggcttgtgattttatgtctatttcatcttcaattacataacttacagtaagtcctcacttatcatcatcaataggttcttggaaactgtgactttaagtgaaacgaactagcaggcccagaataacatcatwtccttcaacattatgccattgataagaaaaagaaaaatcactggttttattatatgtagtttcgcttaaagtcacagtttccgagaacttatcaaaacactcggatgataagtgagggcttactgttcttttctttcataactctttttgccttgaactatttcctaatattaattttgccatacttgattgaatcatatttctattttaatggtatacctttgtttatctatatatttctaactatgttgtttcatttgctaccaagtatttctcctgtaagtagaatataatttttgtttttgacttaaactgacagtctatttttaataatgacactgattcattgtaatttattgtgtaactgatatgtaagatcttacaaggtttttaaagtttgtttttgtactttaaaaatattttctttgtcatttgtgtttttattttaatttgttcactagta

SEQ ID NO: 754810 - DNA, 634 bp, Homo sapiens
taatttttgtttacacattttaatgaaatatttttatttggcttgtgattttatgtctatttcatcttcaattacataacttacagtaagtcctcacttatcatcatcaataggttcttggaaactgtgactttaagtgaaacgaactagcaggcccagaataacatcatatccttcaacattatgccattgataagaaaaagaaaaatcactggttttattatatgtagtttcgcttaaagtcacagtttccgagaacttatcaaaacactcggatgataagtgagggcttactgttcttttctttcataactctttttgccttgaactatttcctaatattaattttgccatacttgattgaatcatatttctattttaatggtatayctttgtttatctatatatttctaactatgttgtttcatttgctaccaagtatttctcctgtaagtagaatataatttttgtttttgacttaaactgacagtctatttttaataatgacactgattcattgtaatttattgtgtaactgatatgtaagatcttacaaggtttttaaagtttgtttttgtactttaaaaatattttctttgtcatttgtgtttttattttaatttgttcactagta

SEQ ID NO: 754811 - DNA, 613 bp, Homo sapiens
aaaggtattataaaacatatgtcttaaaccacccccccacctcattattttcactttgttacttaggcaccttaattttaaagagcaacttccgaggcttctcctatcttatttttaccacccctggccccactatttcccattaacatgtcttttctcatgcaaaaactaaaatcaatttccatatctggctttgggataatttgcacaagggttataatgtactatactttggttctggagtccgttatttgtttagcaacaatattctaagtctatacttgatatcagaagtcaaatttatttcagagcttatcttaaaatgatggtttaaaatttgaaagggattttaaatttagaaatayagacaaatctctttgcaagaaaaggacatagatcaaaagattcatttacaatttttaaagtgtactcatgtgtacttggtcaaaacaaagttcatctgccatttttatgtgtaaaaatggacttgtcataatttccttcagtgtatctctatcagctaagatattgtgtgacctgaaaatgtttattataatctgaaaactttaaaatatttattagaaattcaatcttgaactacgtttatttagaa

SEQ ID NO: 754812 - DNA, 553 bp, Homo sapiens
tagagagcttcaggatgaggactggctgccagaggaactaactgcgtgattagagggtgggaacttacagcctctagagaggggaaaggggctggagatagaattcaatcaccaatgaccaatgctttaattaatcgtgcccacctaatggaacctccataaaaagcgtaaacaatgggctttggagagcttcyaggttggtgaatacatggaggtgctgcgagggtggtgtgcccagaaggggcactgaagttctgtgccctcccccatactgtgtcctaagcatctctttcatttggctgttcttgagttgtatcctttaaaataaactggtaagtatggctagggtgcttttctaagttctgtgaactgttctagcaaattatcaaacctgaagttggggccatggaacccctgatttatagccactttgtcagaagtacaagtcacaacctgggacttacatctgaaattggggacagtcttgtggcatttgacttgcggggactatgctaatgccaggcagttagtgccaaaactgagttaaattgtc

SEQ ID NO: 754813 - DNA, 490 bp, Homo sapiens
gaaaacgaaaagagaggaagatcagtgcacctgctagaagacaggtgttaggtaagcaaggaccaagtttcagatgccaggtgagttatttagagcccaatgaacaaaactggtctatagcccctgaagcacacatcctcagattttgataaagcacattaaacacaggttctacatatgcaagttatatgtataatccaggaatttgtaaagaaggagttcaaggatagaagtmtgatgaaatgggataaggatgggatctgatcctgctcataggaccatgaaagtggtgtaggggaggtgggagctggtagagatgaggagaaacagcaaaaggagatgcagaacccgagtcttagtggaaaccaaacactgaaatccgaactcaggcttgcagacactgaaaactcaggcaaacagaagtagagcagcaacagatcctagacagatctgactggaggccaggtaaaagaatgcagacaataaaagg

SEQ ID NO: 754814 - DNA, 592 bp, Homo sapiens
acatttgaaagctccaataatagacttgaccaagtaggagaaagaatctcagaacttgaagacaggtcttttgaaataatccagtcagacaaaaagaaaaaaaaaggaaaaaaagatgaacaaagccttcaagacatatggaactacaaaaagtgactgaacttacaaattattggcattcctgagggggaagagggataaaaaaaagtttagaaaatctaaggaaataattgatgaaaacttcccaaatctagcaagaaagttagacatccagatataggagtcccagcaatctccaggaasatacgttgcaaaaaagactgcaccatggcatattatattcagaatgtctaaagtaaaagtgaaagaaagaattttcaaattagccagagaaaaaagtctagttatcaatataagaaaccccttcagtctaatatcggacatttcagcaggaaccttacaggccacaagagaataggatggcactttcaaagtgctgaaagaaaaaaaaaactatcagccaagaattttatatccttccagaatatacttcatagatgaaggagaactaaagtttttatcagacaagcaa

SEQ ID NO: 754815 - DNA, 606 bp, Homo sapiens
gatttaagttggactttaaacggacttagcagacattcgcagaacattctacccaacaactatggaatatacattcttctcttcagcacatggaacattctctgagatagaccacatggttgggccacaaaacaagtctttataaatttttaaaaatcaaaatgatatcaagtattttctcagaccacagtggaataaaaactagaawttaataccaaaaggaacttcagaaactatacagacacatggaaattaaacaacatgctcctgaatgatcactgggtcaatgaagaaattaagacagaaattttaaattttttgaatcagatgaaaatgaaaacacaccatacacaggatacagcaaaaatagtgttaagagggaagtttgtggcattaaatgcctacattaaaaaattaacaacctaacttcacacctcaaggaactagaaaaacaagacaaagcaaatcccaagtttgcaaaagaaaggaaataacaaagatcagaatagaactaaataagaaatcccccaaaaatacaaaggaccaatgaaatgaaaagttggttattcaaaaagacagacaaaattgatagaccactcactagac

SEQ ID NO: 754816 - DNA, 633 bp, Homo sapiens
tttttctaagagttttatagttttagttcatacatttagttctatgatacattttgggttaacatttgccaatggtatgaggaaggtgtattaggattctctggagaaacagaacctataggatgctataggatgtaaatatatatatatatatatagagagagagagagagagaggtttattttaagaaattggctcatgcgatccctgagggctaacaagtctgaatacrgaagggcaaggcagctagctcaggacccagggaagaattggtgctgcagatggctaaaggcggtctgcaggcagaattccttctttctctagggacctcaatttcattctcttaagaccttcaactgattgaatttaacccacccacattatggaaggtaatttgctttacataaagtttaattatttaaatgttaatctcatctaaaaaatacttccacaatggcattaagactgatgtttgaccaaatatctgggtgtcatggcctacccaagttggctacaaagttaactgtcacagaatgggacaaacttcttttcttttttctttttgcatatgtatttccagttgtttcagcaccatttgttgagaaacctattctttctcttttggattggctt

SEQ ID NO: 754817 - DNA, 539 bp, Homo sapiens
ttgcaaacattttctcccatcctgtaggttgtctgtttactctgttggtagtatcttttgctgtgcagaagctctttagtttaattaggtcctattagtcaagttttgcttttgttgcaactgtttttggcatcttcgtcataaaatctttgctcatttctatgaccgggatggtattgcctaggttgycttccagagattttacagttttggaatttacatttaagtctttaatctattgtgagtttatttttgtatgtggtgtaaggaagaggtacagtttcaatcttctgcatatggctagccagttatcccaacaccatttattggatagggaatccttttccctattggttgttttttgtcagctttgttgaagatcagatggttgtaggtgtgtggccttagttgtgggttctctattctgtttcattggtatggtctacgtgtctggttttgtaccagtaccatcctgctttggttactgtggccctgtattatagtttgaagtcaggtaacatgatgcttacagctttgct

SEQ ID NO: 754818 - DNA, 624 bp, Homo sapiens
attatcaattgctgctgccaagacctcccttgtgcttctaatactcttgtggctcattaacggcaaattttcgtgatctcttggaacccttttcaatagaggtcccacttggtcaatatttcttggtctttgatggaccctggggcaatagattctaggttattgattttagattggctgcctaagtttggacgagtgtatgacttgacatgtgctgcttttaaaaacaaagatttttagattctaactctagagatttttccattttatggagaggttccaatggtgacatttgtaaagtttctcaggtgattctgatatactagtatcagatctgaggaagtcagttgctcacaacaagatggtgtttgcccaaagaagcacttctatgaagaaaagtcggtgtgaggaagggagggctgaagccaggaatagaatggcccaaagttataatttaccacaaagatgaaaatgcttaataataatgttcatcaaaatgcagygcacatattatttgtattactagaggtaattagggttaaattatagtaatttaggagtatagtagaaaatatacctctttaacattaattcaagtcttaagaagtttcctttctttgaatt

SEQ ID NO: 754819 - DNA, 615 bp, Homo sapiens
tttattcatctccatacaaaatgagagaatattattggaacatgtttatttaataagtagaatgtgtgcttcgacacaacctgggcctaagttaaaaatatagctttactggctgggcgcggtggctcacgcctgtaatcccagcactatgggaggccaagaygggcagatcatgaggtcaggagattgagactatcctggctaacatggtgtaaccccatctttactaaaaatacaaaaaaattagccgggcgtggtggctggcgcctatagtcccagctactcggtaggccgaggcaggagaatggcgtgaacccgggaggcagagcttgcagtgagccgagatcgcgccactgcactccagcctgggtgacagagcaagaccccacctcaaaaaaaaaataattatacacacacacacacacacacacacacacacacacacacacacacacacacatataacaaatatgtatagctttactgcttaatagtcatgtatcatttttgagcctcagtttttgtcatctgttacaatgggaatggtactcttcaaatggttattttgagaaatattttcagtatattgaagcccctcggtcacattttgtttgt

SEQ ID NO: 754820 - DNA, 615 bp, Homo sapiens
tttattcatctccatacaaaatgagagaatattattggaacatgtttatttaataagtagaatgtgtgcttcgacacaacctgggcctaagttaaaaatatagctttactggctgggcgcggtggctcacgcctgtaatcccagcactatgggaggccaagacgggcagatcatgaggtcaggagattgagactatcctggctaacatggtgtaaccccatctttactaaaaatacaaaaaaattagccgggcgtggtggctggcgcctrtagtcccagctactcggtaggccgaggcaggagaatggcgtgaacccgggaggcagagcttgcagtgagccgagatcgcgccactgcactccagcctgggtgacagagcaagaccccacctcaaaaaaaaaataattatacacacacacacacacacacacacacacacacacacacacacacacacacatataacaaatatgtatagctttactgcttaatagtcatgtatcatttttgagcctcagtttttgtcatctgttacaatgggaatggtactcttcaaatggttattttgagaaatattttcagtatattgaagcccctcggtcacattttgtttgt

SEQ ID NO: 754821 - DNA, 615 bp, Homo sapiens
tttattcatctccatacaaaatgagagaatattattggaacatgtttatttaataagtagaatgtgtgcttcgacacaacctgggcctaagttaaaaatatagctttactggctgggcgcggtggctcacgcctgtaatcccagcactatgggaggccaagacgggcagatcatgaggtcaggagattgagactatcctggctaacatggtgtaaccccatctttactaaaaatacaaaaaaattagccgggcgtggtggctggcgcctatagtcccagctactcggtaggccgaggcaggagaatggcrtgaacccgggaggcagagcttgcagtgagccgagatcgcgccactgcactccagcctgggtgacagagcaagaccccacctcaaaaaaaaaataattatacacacacacacacacacacacacacacacacacacacacacacacacacatataacaaatatgtatagctttactgcttaatagtcatgtatcatttttgagcctcagtttttgtcatctgttacaatgggaatggtactcttcaaatggttattttgagaaatattttcagtatattgaagcccctcggtcacattttgtttgt

SEQ ID NO: 754822 - DNA, 645 bp, Homo sapiens
tcattaatcaacctctctttatcccataccccaacccttcctaacttctggtaaccaacaatctgctctctgtcttcaacagatgctgaaaaagcatttaataaaattaatcatccattcatgataaaaaataattcctccacaaactgggatagaaggaacatacttcaaaaaaaagaggccatatatgacaaccccacaactaacaccatgctgaacaagaaaataaaatgaaagcctttcctctaagatctggaacaagacaaggatgcctagttttacttttgtttgacataatactggaagtcttagtcagagcaattaggcaagagaataaaaaataaggagcatccaaaytgaaaagaaagaagttacattatccctgttttcagatgatatgatcttatatttagaaaaacttaaagactttaccaaaaactattagaactgattaaaaaaatcagtaaagttgcaggatacaagatcaatacacaaaaaacagttgcatttggacatgccaacagtgaacaatctgaagaagaaatcaaaaaagcaaccccatttataatagagtcaaaaagatgaaatatctaggaattagtttaaccagaaaggtgaaagatctgtacaagaaaagctataaaa

SEQ ID NO: 754823 - DNA, 621 bp, Homo sapiens
tcccagtgaattacaggaagaggtacccatgtcactgcaattttaatatgtaatttatttttccttccctaatgtggataactaatggagcaagagtaggttagtgagtctgatgaccattttcttggtacattcatttttttttttctggacaaaagaaaaccatattggaaaaggaaagaatatcaattctaaaatctgatatgcagagctgggggttgcattcaccaaaattgggttttacttccttatgttttttcatgtgaagaagaggatgctaaatgataatcagaggtaaccatgtcgaagggcccttgaacttttctttcagatctaatgcttgttctcaactacattttcaaagctggcaacaattagtgcattgttttttttctccatactgacagcacacctctcatgggtccaccaagaaagttagctccttaggcaatcacagatwgctatacaagatgaagctgttctgatgggccttcaggatacctggatcaactctttgacacttattgacaggaatacatatgtagacctgtacttttgagagatttcgggacaaaaaatatatttatatttttcttgaaatattattcaatttcttagcaa

SEQ ID NO: 754824 - DNA, 635 bp, Homo sapiens
acataatcccatgtttctcagaggttttgcttattcctttttgttcttttttctttattcttgtctgcctgtcttgtttctgaaagctagtcttcaagctctgagattctttccatgctcttgcttctgtggggtgggggaagggtgcgccagtggttcragactattttttctacctctttagtgtctcttacagcaataggaagttacaatcaggtactatgagtgctcacctggtttttggttcttacgaaggtttttggtttattttctgtgtgtagatagttgttaaatttgtgtttttgcagggggggatgatcagtggagccttctattccatcctgtctgttacagctgttatccatcatctcaggaaccagggatgttcaacaattgcctctgatttttttcaataatgcattatggaaaaatcagttcactctgggaaagctatgacttagagaaaataaagacaacattgcacagtgagtctcccaggaaaccatagacaattgtaataatgatatttctttctttcttttgttttggaaataagtcttttaacccaaatctgccctctccaagttctaccagtttcctaacttttactgtgattctcatctgctggtacaagt

SEQ ID NO: 754825 - DNA, 639 bp, Homo sapiens
cagtgaacgcatcaggacctgggcttttctttgatgagagacttgttattactgattcaatgttgttacttgccactggtctgtttgggtttctatttaattatgattcactctttgtaggttttatgtgttcagtaacttattcatttattataggttttaaaattttttggcatatctgtcaatgatcataatattctcttctaatctttttatatctggtatcagttgtaatattttctttctcatctttgattttatttgagtcatttttttctctgttagtaaagtaaaagtttgtcaatgttgattttcttttcaaaaaaaaaatcttcatttcattgatcttttttgatgttgttattgttttttatttccattttattttttgctgctctgatctttattatatctttccatctactactttttggttttctrtgttctttttatcaagtttattgaggtgcaatgttgtatttttcatctgagatctttctactttatagatataggcatttattgctgtaaattgcccttgtagaattgcttttgcacaatcccctctttgccaagaggaccccagaaaaaccttaaaattgagttcctggctatgatgggacaggaagttagatatat

SEQ ID NO: 754826 - DNA, 634 bp, Homo sapiens
tatataaaaccacaagaaactgtgagatacacagaaagagctcataacctttaaggccagagttaatttcattatgccaggatgtgataaaacatgggatatccagactcaattgggattgctagttaacactgtgctttgttttatttttaaaaatctagacttcggaagacaaaataatagcaattccaagatactgcttcctgtgtcattttgcaaaaacttgaatacactgtggatgctaagtaaccgaatagcatcctgacttcatgttaccctgatctgttgttgttgtaatgcacttttatcccacctttccacagacatcaggcagggactggaaacaagcattttgtatgaagagtttgtatygtcggatttccatctccattgacacacaacccccatccctaactttttaccttttaatgatcctttcaaattcaggggtcagcaaactttggctggaagttcaactttgccccaaggcctgtttgcatatcgctggcgggctatgaatgggttttacagttttagagggttgtagaagaaagaggaggagagagaggagaggaaaaggaggaagagggaagagtgacagtgaccagatatggcttacaaaggctccagcatt

SEQ ID NO: 754827 - DNA, 614 bp, Homo sapiens
aaattgcttattttaatcttttcatatattgttttaatctatgactaagtaaaagaaaaacaagttccagaccatttcaatgttttaaaattataactaccttttccttttctcaaggtgaagtcactagaattccaagctcagaatataacaaaaaagtagatgaaaatggcttaaaaataattagcactttatgattttacaaagctcttcctcgtacattctcacatgtgatttcagtaatcctttaagatagcaaaatggaggcttaaagggagtaartgatttgctcagggccacagaaatagcagagtggcccagacaaaaatctagctcttcagatgctttttcaaatgtaccaagaggaagacagttgtccctggtttcaagctatcattcaaaactttgggattcaggactcctctgaatcaaaaatcatggaattctagatacagaggaatacagataggttatctaattcaaatcactcaatttacagatgaaaaacctgaatacctgaatgtattcactcaactaaatatgtttgacttgttagaaaaacccaaaaaaagttctttaattacagtccatatgttagtttttcttctccaatg

SEQ ID NO: 754828 - DNA, 618 bp, Homo sapiens
caataatgagtaataagatagaatcagtaataaaaatctcccaacaacaataacaaaagaaacccaggaccagatggattcacaactgagttctaccagatgtacaaagaagaactggtaccagtcctactgaaactgttccaaaaaatcaaggaggagggaatcctccctaactaattttatgaagcagtatcaccctgataccaaagctagacaaggactcarcaaagtccctcccgttctttaaaatgaagcaatacctttgctttactctgcatgttcccaccacaacattcccaatccattgccacactctctcctctttccttgtcaaatttgcaattataacctgctctattttcctcttattccttcccaactcttcttcaactcactacaatcagtaccttttgaaaatacctttgccaaatccaccagtgaccatctcttgcaaaatctaacagacacttttagggcttctcttttctcttctctttggccctcaaaatactgtctcaactagttctctcctacctcattgacatttaagtatgcatcagtagatgtttttctctttttgtcttataaataccaactcctcaaggatctcatcctcag

SEQ ID NO: 754829 - DNA, 624 bp, Homo sapiens
gttctactcccctgtttctctacctatattgtgagcttgcaaagatggacttctgagatttaattgacagtttcttatagtgggcagcccatgtgttcttagtctctctaaactccatttgaagagagggtgggtatgacatttggaggtgttggtatggaggctggattgcagaatgggcatgttaacaggccagaattctgacacaggatggtattattcctttataaatataaacctacatgtaagaatattttgaacgatgatactgaagagaattctctattttcattttccttttatttttttctgaaaattacaggaggaaatagtggttttaaagttctaatggtcagaaactacatatttaaatgactgatatatgtgaatcaaggttgagaattcagctttcaagagatagtattgaggtcttttattatgaaacttaagtatgtttaccttacwggtccaaatcgcttgatatgaacattgtgattagttagtacattaattttaaagcatttgcatttgtcaaatgatagaccccgttatgtatatatcttcactttgaacattccagatgttcaaatgttggtagatatataataacaagcatcagtttct

SEQ ID NO: 754830 - DNA, 618 bp, Homo sapiens
caataatgagtaataagatagaatcagtaataaaaatctcccaacaacaataacaaaagaaacccaggaccagatggattcacaactgagttctaccagatgtacaaagaagaactggtaccagtcctactgaaactgttccaaaaaatcaaggaggagggaatcctccctaactaattttatgaagcagtatcaccctgataccaaagctagacaaggactcaacaaagtccctcccgttctttaaaatgaagcaatacctttgctttactctgcatgttcccaccacaacattcccaatccattgccacactctctcctctttccttgtcaaatttgcaattataacctgctctattttcctcttattccttcccaactcttcttcaactcactacaatcagtaccttttgaaaatamctttgccaaatccaccagtgaccatctcttgcaaaatctaacagacacttttagggcttctcttttctcttctctttggccctcaaaatactgtctcaactagttctctcctacctcattgacatttaagtatgcatcagtagatgtttttctctttttgtcttataaataccaactcctcaaggatctcatcctcag

SEQ ID NO: 754831 - DNA, 608 bp, Homo sapiens
gattcccttcttctcagaacagcagatgttacagaatcaaggttatcaaacagttactgaagatcttctctcaggccccggtacaagggaattaaaccacagtgtcatataatttggctgagtccttttcaacaataatgttttccttgttttatattttaatgccccctctttctcacatgtatttttatctccataaattattatctttccaataaatcaagttttaaatagcctgccatacttaacacattgaatcgtctttgcaatgcagtaacctggttcaatattattaactcttcattattatttttattgtaattcaaaagatccaaccagtattttcatctcctaggaaataaaggagtgaagctgcactctaactctcatcgttagttctttgactaactgatcgaaattttgaaatagtgtggagcattctttccactgagattttatgtrtagccacatatgttataaatagctggagctggtttaaatatggttcttatgagtgactatcgctgttcaccattccttcctattcttggtatgtggctacattttccagaatgacttgagtttacccagataaacttggtaaacca

SEQ ID NO: 754832 - DNA, 577 bp, Homo sapiens
ttttcccctgacagtgccaaggagactgagaggtttagactaggtggaattcaccacagtgcagctaagtggccatggccagactgcttctctagatgcctcctcacagggcagggcatctctgcaggaaatccagcagctccagttaggggcttacagacagaactctcatctccctaggaaagagtacgttgagggaaaggtggctgcagtctcaggtttagcagatttaaacttgtttacctgccggcactgaagagagcagctgatcctgacaaggsggattctcccagcacagcgcactagctctgctcagggaaagactgcctcctcaagtgagtccctgaccccatgcctcataactcagagagacctcccaacaggggtcgacagacgcctcatacaggaaagctccagatggcatcagaccagtgcccctctgggatgaaccttccggaggaaggagcaggcagcaatctttgttgttctgcagcctccactggtgatacttaggtgaacagggtctaatgtgaacccccagcaaactgcagcagacctgcagaagaggagcctgact

SEQ ID NO: 754833 - DNA, 495 bp, Homo sapiens
tttcattcaatcaagttgacacttaacattaaccatcacatggaatcaagctaagtgtccatcaatggatgaatggttaaagaaaatttggtatatatacacaatagaatactattcagtcataaaaaagaattaaatcatgtattttgcagtaagatggatggaactggagattttatgttaaatgaaacaagccaggcacagaaagacaaatatcacatattctcactcatacataggtgataaaaaatgtgttcacatggaggtagaggkggaattatagataatggagacacagaaagatagggtatggagatcaggataatgagaaattggttaatggtacaatgtatgttatttgggtgatggataccctaaaaactctgattagactacacaatccatgcatataacaaaattacatatgtaccccataaatatgtacaaacaaaaaagaaataaaagaattacagcaattatgtataaaataccact

SEQ ID NO: 754834 - DNA, 624 bp, Homo sapiens
ttcctacctctgcccaaccctggagtcccaggtggcagcccagtcctgctcctttcccacaccactccccagaaccaccgcctagtcccacttggaagaaaaagtgcttagaagactgagtctaagttttcctctgagttataaaygaatcttcagttttttgcatatatctgaaaactcattgttagctcccatctctgccaccttttcttaccagaaatgagttgcaaaagaactgataagagtcgtggtcataagtagggaagaggtcgctaggattaaaaatccttataaaattgaaatcactctggtagatgctatgagtaggcattcaacatccattccacccgcctctttgtgtgtcttcctttactgcaaagccagaaaagctaaaaagcacagtttttacaaacacttggacttctagatgtggttttggtttgacccattcaatgaactggtgcaatatctggaaggtggaagtgagtggaagtcatgttactgctttcttctgccatttctaccctttctgaggataaacccattatggagattcaacaaaattgcctcctgatgtgataacttggtccaaaatttctcatcaccaaaaatgcaggctggtgt

SEQ ID NO: 754835 - DNA, 624 bp, Homo sapiens
ttcctacctctgcccaaccctggagtcccaggtggcagcccagtcctgctcctttcccacaccactccccagaaccaccgcctagtcccacttggaagaaaaagtgcttagaagactgagtctaagttttcctctgagttataaacgaatcttcagttttttgcatatatctgaaaactcattgttagctcccatctctgccaccttttcttaccagaaatgagttgcaaaagaactgataagagtcgtggtcataagtagggaagaggtcgctaggattaaaaatccttataaamttgaaatcactctggtagatgctatgagtaggcattcaacatccattccacccgcctctttgtgtgtcttcctttactgcaaagccagaaaagctaaaaagcacagtttttacaaacacttggacttctagatgtggttttggtttgacccattcaatgaactggtgcaatatctggaaggtggaagtgagtggaagtcatgttactgctttcttctgccatttctaccctttctgaggataaacccattatggagattcaacaaaattgcctcctgatgtgataacttggtccaaaatttctcatcaccaaaaatgcaggctggtgt

SEQ ID NO: 754836 - DNA, 756 bp, Homo sapiens
cagcaaggataacatatatgtcacaaagggccacgcaggccttagggagagacacagagggttcatacgcaagtgaggcagcgtcattcgtctggagtaatatccaaggttcattgcctcatgccaaggaaattaaggacacagacacatgtggagtgaggctaagagtggaggtttaatgggcaaaagaaagagaaaagagaatagctcgctctcctgcagagacgggcacctgagtgggtcctctggtccggtggtaaagagcacggggatttatagactggcttgaggaggcagtgtctgttttacatagggcccaaagattggttggaccaggtgtgacatttacatagcactggaagaagctggccacccccatcccccgctaatcttttattatgcaaatcgatttttttacatggccgcgccatgttgtcagctccttagggtatatgggattgataaaagggaagatggagcctccatattgaacatgcctggyccccaggtagccttttcctattagcacagctgctggcattcacccgtgcaagcttccagcttgcttatctacgtttgcaacccaattttacaagttgctttttgttagaaaagaaattatttgggggctgcttttcattaaaagggaaacgttactgaggacttccttaccctcactatctgcctaaataatttctttttaactcctatatcacaaggaacattgaggggatccaaaataaagctcacttgcac

SEQ ID NO: 754837 - DNA, 618 bp, Homo sapiens
aatgttggagggaaatttacaaaccaataaacattttaaatttgcttcccaaacttttacaaatgacacatgccagattcaaatatgtgcacatttctgccacataatactatatgaggcagttactataagcctgacacttgggtgggcacgagttactatgggcccagacttctagaaacttacagcacctgaaccagaataaggaaacaatgaatccatttttaatgactaaacaaatgcatgaataaatgaataaatctatcaagattgaaagaccaagctgtgctcaaggtgaygaggggtcctaagagaaggcacttaactcaacacaggagaaatgatgtcaaaaagataaaaagaactcatagagacaggaggtagaataatggttgccaggggctagggaaatggggcaatggagagttattgtttaatagatacagagtttcaattttacaagatgaaagggttctgtggatgcatggtggcatcggtaacacagcaatgccatagaactacacacataaaaatagttaagatggtagattttatgctatgtatattttaccacaattaaaatttctacataaatagataaataaaaagtttccctga

SEQ ID NO: 754838 - DNA, 645 bp, Homo sapiens
tcctagaacctgctgtctataaatatgactgcaggacaaataattgaaataaaaatagggcaacctcgaggctcaattaatgaatgtatgcaagagttcgatgaaaggtcttacttatctgatgagatttttctaccaaatcctgccttcccttcatattgccttacaattagggaagactcaggaatactaaactctggacacaatatctctaaagtgggtatggaataatattagkgaaagcaaacataaaaggagctctaaggagcatacactaaatctgagcaatatcagctttccaaaaacatggtttcaacaacatggcaattcctcaagcaacctgaaacctagttgtgtaaatcagtcttgtagaagacaaaagttcagattgagacactattaggttatctagtgaatacatgatagcactgttatttttacagtgcttttggaaagatacacttgtctgagaattgggctaatgaaatagatttgttaattcaagccataattaacatagaatttacaaaaaaaaaaaggcactcctttctctgaggaaaaaaattaagacaaaatgtcacccaacatacatatttggatttgctaattttcagtcaagaccactcctaatagagtttgtggggc

SEQ ID NO: 754839 - DNA, 645 bp, Homo sapiens
tcctagaacctgctgtctataaatatgactgcaggacaaataattgaaataaaaatagggcaacctcgaggctcaattaatgaatgtatgcaagagttcgatgaaaggtcttacttatctgatgagatttttctaccaaatcctgccttcccttcatattgccttacaattagggaagactcaggaatactaaactctggacacaatatctctaaagtgggtatggaataatattagtgaaagcaaacataaaaggagctctaaggagcatacactaaatctgagcaatatcagctttccaaaaacatggtttcaacaacatggcaattcctcaagcaacctgaaacctagttgtgtaaatcagtcttgtagaagacaaaagttcagattgagacactattaggttatctagtgaatacatgatagcactgttatttttacagtgcttttggaaagatacacttgtctgagaaytgggctaatgaaatagatttgttaattcaagccataattaacatagaatttacaaaaaaaaaaaggcactcctttctctgaggaaaaaaattaagacaaaatgtcacccaacatacatatttggatttgctaattttcagtcaagaccactcctaatagagtttgtggggc

SEQ ID NO: 754840 - DNA, 529 bp, Homo sapiens
ggttactgttcctgacccttaaccttaggcaaccactgtagcttccccagacacacagggtccttctgatactgcaggggtggtccccttcagtctgcttattgaatacctcacgcattcagcaacacgtgtgtgctcttctgggaacaggaagacataaataggcctctggtttgatttgagagagtaatgagataatctaaagtttctgctttctccatttgacaaagtaagatgatttaaagaatcttattagtaaaatgtgattaaactattgatttttcttctctwttaactaaatcctatttattttgaaagattttgtcttaactttcctttttgaataattctatttacatttctagaaattactactttccttttgaagtcattggaatgtatattaaaagcacttttcaaaaagaaggcaatgtctatatggaggttagaggtactgtcagtcaccttgtttgctaacttctgagttatcttgaaccatgcaaaaggacaacagttagatttgcattaa

SEQ ID NO: 754841 - DNA, 643 bp, Homo sapiens
agtcaccatgacctggatgtgagacaaggagtcaaaggagattattttggagctctaagatttgcctgccccactggattttgggttagcttggggcctgtggcccctttattttggccagtttatcccatttggaatgggtgtatttacccaatgcctgtacaaccatgatatctaggaagtaactaacttgattttgattttacaagctcataggcagaagggactcataggcaggtgtccccacctaaatcctacctggaattgtaataatccccatatgtcaagggccagaccaggtggagacaattgaatcacragggccatttcccccatgctgttctcgtgagagtaaataagtctcacggtatctgacggttttataaatgggagttcccctgtatatatgagagtgccaaaatgcattttcaagttgaagactaatgattaattgtattatttaatattatgaaattttgtcctatagaatccttgctcacctctaaaaactctttcacttagtgtgcacctgcatccaaccaaagagatgctatccatgtggtatggttatttaaaaagagaaatatagatgatagaatgcataaatgtagcataagtgaaatttttaaataatacaatgttt

SEQ ID NO: 754842 - DNA, 643 bp, Homo sapiens
agtcaccatgacctggatgtgagacaaggagtcaaaggagattattttggagctctaagatttgcctgccccactggattttgggttagcttggggcctgtggcccctttattttggccagtttatcccatttggaatgggtgtatttacccaatgcctgtacaaccatgatatctaggaagtaactaacttgattttgattttacaagctcataggcagaagggactcataggcaggtgtccccacctaaatcctacctggaattgtaataatccccatatgtcaagggccagaccaggtggagacaattgaatcacaagggccatttcccccatgctgttctcgtgagagtaaataagtctcacggtatctgacggttttataaatgggagttcccctgtatatatgagagtgccaaaatgcattttcaagttgaagactaatgattaattgtattatttaatattatgaaattttgtcctatagartccttgctcacctctaaaaactctttcacttagtgtgcacctgcatccaaccaaagagatgctatccatgtggtatggttatttaaaaagagaaatatagatgatagaatgcataaatgtagcataagtgaaatttttaaataatacaatgttt

SEQ ID NO: 754843 - DNA, 645 bp, Homo sapiens
acgggtgtaagtccaagagtccaaaagctgaagaacttggagtccaatgttcaagggcaggaagcatgcagcacaggagaaagatggaggccagatgacttagccagtccagtctttccatgttcttctgcctgcttttatcctagcaacactggcagctgattagattgtgcccacctggactgaggatgggtccgcctttcccagtccactcactcaatatcttctttggcaatatcctcacagacacacccagggacaataatttgcatccttcaatccaatcaaattgacactcaatattaacaattacatggaggaaacccttatactctcagaggagagagagagagatagcgcttgtgcacacaaaagagagcaagcgagagagagagagagagaaagaacacacttaacacagagaaggacgagagagttgaacatttgaaggtaagagagaaggaggagagagggaaggagtggagaaascaaaaaaggagaaagaaagagaaaaaaatatcaggattcaggttcttaatagatatgagtctacctttactctgacaatctagttagtatgagccaatcgatttcctttttatgttcaaagtaagttgagttgggtttcttttatttgctctcagt

SEQ ID NO: 754844 - DNA, 629 bp, Homo sapiens
acttaatattaaagaaggaaattaccttctatcaatagctagcataatcctttgcatatagtaactgctcaatcaacatctaatgaaatatttaaagaatactgatgagcatccttagtcacgtatgtgaattaaacaacatttttcttgttggaaacttcttcaggttttttttttcttcttcttagagcacattttcctcggattccttgttctcatgtctcagtcccttcatgatctatctgtgaattaaaggatccattcagaacctcttgttaaaacttcccatcaactcctctgtgcactaatttccatgttttacaaaaatctatttttatccaaaattcatgaaaagattcatttccttagaatagctaatctttgaaatttgaaagaagtaattagacgctataataggtaactactgagttaatcaatgaatggttgtaggggcatctgagataygaaagtgatcctattgtgaaccaaagcaagaggttatttttttttctacatttcatccaggtaccttcgggaaaaataattttgcaataaaaaatcagatgatataaaaagggaaactgttactaaagtaaatgattttgagatggactcattggaaaagagtg

SEQ ID NO: 754845 - DNA, 605 bp, Homo sapiens
agaaaaatttgaatagttttatatgtactatagaataagacctaaacctatggttactggccatttcaggatgaattaatccagtgtaaggacccctgtaaaaaaaagaaaaagaaatcagtgatgctgtccttgcagctatgcaggcagctgaaaaaaatcttgtactctttggaggatacctttttatctcatattgaaaaggtagcttgtctatcagtacagatttgctataagaaaggcacacctatagactctattatgactcaagaaaaagcaaagtcattatatgactacttaaaaggaaggtgaaggatctagacctgaagaagttaatgccagcaaaggatggtttgatattttcagaaagtgattcrgcttaaaacatatcaagaaaacaagagaagcagctttttctgaccaagaggcagcagataacttctcagatgccattaagaaaatcactggagagaaatacctaatgtagacgacgggttgatgagtgcagcaaaccaccatggcacgtgtatacctatgtaacaaacctgcacgttctgcacatgtatcccagaatttaaagtataataataataataataaaaaga

SEQ ID NO: 754846 - DNA, 605 bp, Homo sapiens
agaaaaatttgaatagttttatatgtactatagaataagacctaaacctatggttactggccatttcaggatgaattaatccagtgtaaggacccctgtaaaaaaaagaaaaagaaatcagtgatgctgtccttgcagctatgcaggcagctgaaaaaaatcttgtactctttggaggatacctttttatctcatattgaaaaggtagcttgtctatcagtacagatttgctataagaaaggcacacctatagactctattatgactcaagaaaaagcaaagtcattatatgactacttaaaaggaaggtgaaggatctagacctgaagaagttaatgccagcaaaggatggtttgatattttcagaaagtgattcagcttaaaacatatcaagaaaacaagagaagcagctttttctgaccaagaggcagcagataacttctcagatgccattaagaaaatcactggagagaaatacctaatgtagacgacgggttgatgagtgcagcaaaccaccatggcacrtgtatacctatgtaacaaacctgcacgttctgcacatgtatcccagaatttaaagtataataataataataataaaaaga

SEQ ID NO: 754847 - DNA, 536 bp, Homo sapiens
aaattttttcacttcaacatgaaataagtttacaaattataaggttacaattataagactttttaaatatctctaaattcaaaacagtgatatatcgttccaattcagtacaaataaatattgaattatcaaaactattctcccaaattcctcaccaaatagaacagtagtagaattacaagactyacccaatgcccactatcatataacatattttacagaagggataaagtcgcctaaatatttaaataaatacggtagtacttgttaatcataaagttttcatatggcgaggtgtatataccgttcctcatgaagaatcatattgtaaattagcatgttaaagtctaagatggccacagtaggaagctgtttaattttgtttaatccaaaatttttcaaattaatttattgcagatatctttcctcaaggaatatattttaacatttcatagaccttgtgttgtgaagaacgtatttctaaaagtgctgacctaaatttcactaaaagctatgcaaccataaatatagaatgt

SEQ ID NO: 754848 - DNA, 595 bp, Homo sapiens
tattattcaccatgttaagaggataaggaagatcctatcaatcaatgtagagaaggcatttgacaaaattcaacacccattcatgatgaaaactctcagaaaactagtaataaacaacaataagcacatagggaaaacctacaagtaacattgtactaacgaggcaagattgaatgttttcctcctacaattgggaataggacaaaaacatttcactctcagcactctcatccaacatagtgctggaacttctagccagtacaagaaaacaaaataagtggcctgagtgtggtggctcamacctgtaatcccagcactttgggaggctgaggtgggtggatcacgaggtcaggagtttgagaccagcctaaccaacatggtgaaacctgtctctactaaaactacaaaaattagccgggcatggtggcggctacctgtagtcccagctactcaggaggctgaggcaggagaattacttgaacctggaaggcggaggttgcagtaacctgagatggcaccactgcactcctgcctgggcaacaaagtgggactccctctcaaaaaataaataaataaataaataagtaaataaata

SEQ ID NO: 754849 - DNA, 595 bp, Homo sapiens
tattattcaccatgttaagaggataaggaagatcctatcaatcaatgtagagaaggcatttgacaaaattcaacacccattcatgatgaaaactctcagaaaactagtaataaacaacaataagcacatagggaaaacctacaagtaacattgtactaacgaggcaagattgaatgttttcctcctacaattgggaataggacaaaaacatttcactctcagcactctcatccaacatagtgctggaacttctagccagtacaagaaaacaaaataagtggcctgagtgtggtggctcacacctgtaatcccagcactttgggaggctgaggtgggtggatcacgaggtcaggagtttgagaccagcctaaccaacatggtgaaacctgtctctactaaaactacaaaaattagccgggcatggtggcggstacctgtagtcccagctactcaggaggctgaggcaggagaattacttgaacctggaaggcggaggttgcagtaacctgagatggcaccactgcactcctgcctgggcaacaaagtgggactccctctcaaaaaataaataaataaataaataagtaaataaata

SEQ ID NO: 754850 - DNA, 594 bp, Homo sapiens
tatatataaaattacatgcgatgtctacacatatattgactgaagtaaataatgaaaattacatattatcaaaagcatccaaacagtttacgcttgactgtttatataatatttattgtctgaataaaaatataaatcaaatctctctcactgagaatatatagatagatattttaccaggtggttaaatgttagggcattgaaaaaaaactgtattactggatttgagtcctagttttgctattactgactctgtgacatttccaagtcaattaatttatcaaagtttttgtttcctcattcaaaaaatgggaattataacagtacctacattaggaggctgttgtaaagtttcaatgcaataacacttarcaacattactggcataaagtaaatttttgctaaattttaccagctatattacataaacgatattcacataaaatttctatatgacaacggtaggcaaatggtattggctagaaaactttaaaaagttactaacttctacataatggaaagggcaattaaaaaataaatacagctaacttcatgtttcatgaagtgacaaaataaaaatttaagtgtcatagt

SEQ ID NO: 754851 - DNA, 446 bp, Homo sapiens
cactcctgtgccttaggtcctcgagggcttcccattgccatctggataaagaccaaattgccaatcctgtcctaaaagactacagggccagcttctctagactcattcttatcccttgaatttccagcctctaaagggagttgcttttaattccttgaatgcttcagcctcaggacctttgcacaggttgttctggccactgttatctctacacagcyttctctgaagactttagttgtcaccccatagctgctgttaagtgctttcagtgttaactcatttgatactatgaggcaaaccttattaccctaattttataggtgaggaaactggacacagacaggttgagctgctttcattaagttaagggcacagcaccagggaactaaagagctataacttgaccttgagtagtctggttccagagcctgaggtcttggcacaac

SEQ ID NO: 754852 - DNA, 669 bp, Homo sapiens
aatggaactggaacatatattctcatttgtgtctggcttctttgatcatcattctatttctgggatccgcacttgctatgttgcagttgtaatccattcattgttgtgaccatctagaattccattgtgtgaatatgttgcaatatacttacccattttaccaatgagcatttgggtagttggcagggtttgggctatttcaaatactgctcctgtgagcatttctttggcatccacatgcatgtgtccctgtagagtgtatgtgtaggtatggaattgcagggccacagggtatgcatattttagctttagtagatatttatttccaggcaggtttccaaagtggttgtatcagtttgcgcttccttccacggtcagtttatggtgttctggtgcscctcatcctcgtccacacttggtgttgtctgtcttttccttagccattctggtaggtggataatggctacagtggtattactgtattatggttctaatctgtgcttccctgatagttcaggaagtcaaatattttctcctatgtttatgagccatttggatatctattgtctcttgtgggatgtctgttcaagtcttttgcccactttttaaaaactggcttgtatgatttttaaatttatttttcttttcaattttctaattactttttat

SEQ ID NO: 754853 - DNA, 602 bp, Homo sapiens
ttgagggatcctcccacctcagcctcccgaatagctaggactacaggtgagcaccaccgtgcctggctgatttttaaattttattttatttttagagaccaggtcttgctatgttgcccaggctggtatcaaactcctggcttcaagcaatactcctgccttggcctctcaaagtgctgggattacaagcataaactactgcacttggtccacttgtgtattgtctatgacaaagccagctaaaaacccactacttgagcctgggtgtggtggctcacacctgtaatcccaacacactttgggaggccgaggcggktggatcacctgaggtcaggagttaagaccagcctggccaacatggtgaaaccccatctctactaaaaatacaaaaattagctgggcatggtggtgggtgcctgtaatccccgctacttgagaggctgaggcaggagaattgcttgaacccaggaggcagaggttgcagtgagctgagatcgcaccattacactccagcctgggtgacaaaaacgaatttccatctccaaaacaaaacaaaaaacaaaaaaaacctcactacttgaacagataacgcttacagaagc

SEQ ID NO: 754854 - DNA, 596 bp, Homo sapiens
gaaacaggactcaaatactaactagaacagcaccatcatggagactgggaggagtttctgcccaattctgcaggtgcagtgagacaaagctgcggctggtcacatggaggctacacactgcaggggacagagatgtggagtataagcttcagggcacagggaccaggtcctgcaggggccacagagttgccactccccagctgtgtgtgctggagtcatgtcacatctctgggcaccasatgcctcatcagggggttgggcaacactgagctgaatgagctccaggcccttccggctacagctccagagcttgtcccctaaacacctcctggggtcctgatttccacctgcctggcacctctccctgactcaggggcaggcttctgctcttcacatgtgggcacccccattgaccatcagagcaggccagccgaaagtcaacgacatccctgggcagcatggcccaaggaggcccccatggctggggcaccagggcaggtccctagacgaggacctcttccctggagaagacgataacatttacaaagaacagaacacaatgcaaaatttcatgtatgggcacatcaggatttaaa

SEQ ID NO: 754855 - DNA, 596 bp, Homo sapiens
gaaacaggactcaaatactaactagaacagcaccatcatggagactgggaggagtttctgcccaattctgcaggtgcagtgagacaaagctgcggctggtcacatggaggctacacactgcaggggacagagatgtggagtataagcttcagggcacagggaccaggtcctgcaggggccacagagttgccactccccagctgtgtgtgctggagtcatgtcacatctctgggcaccagatgcctcatcagggggttgggcaacactgagctgaatgagctccaggcccttccggctacrgctccagagcttgtcccctaaacacctcctggggtcctgatttccacctgcctggcacctctccctgactcaggggcaggcttctgctcttcacatgtgggcacccccattgaccatcagagcaggccagccgaaagtcaacgacatccctgggcagcatggcccaaggaggcccccatggctggggcaccagggcaggtccctagacgaggacctcttccctggagaagacgataacatttacaaagaacagaacacaatgcaaaatttcatgtatgggcacatcaggatttaaa

SEQ ID NO: 754856 - DNA, 634 bp, Homo sapiens
tcaccctttaatagacatctgcattgctcccactttttggctattgtgaataatgctgctatgaatattcatgtccagggatttatttgaacacctgtttccactcttctggggatatacctaggagtggaattgctgggccatatttatggcaattctgtgtttaacttttttttttttttgagacaaggtctcactctattgcccaggctgaagtgcagtggctcaatcacagctcaccatggcctcaacctcctgggttcagctgatcctactccctcagcctcccaagtagctgggaatacaggtgcatcacctcgccwggctaatttttttatgcttttcatagagacagggtttcaccatgttgcccatgctggtctcgaactcctaagctcaagcaatcctcctgcctcaacctcctgaagtgctaggattacaggtgtgagccactgcacccagcctgtgtttaactttttgaggacctaccaggcttcaacgacagcatcatttgacattcccaccagcaatggctcagtagttttgaacccttatggctttcaactaactaggacccaagttcaaatcttggcttaaccactgtgaccactggatccttttctttcccatcatg

SEQ ID NO: 754857 - DNA, 623 bp, Homo sapiens
aactaggacccaagttcaaatcttggcttaaccactgtgaccactggatccttttctttcccatcatgcatcttgcttttcctggtagcaacacccaattctgcctctaggaacccacctgtctcagcatggccagcggggctatcaatcctagaggttcacactcaatgggctgggggcaaatttggggaaccaagaggtgactcccctacctaggaaaattcacaagaacaaggcaggtctaattgagattcacayagggggaggagagagaaggcggccttggcagctgctagggcctcctgagccagcaagattttaaatatgtttttgcacaaaaatagacggatagaccttcaaacaagaagaaaaaagaacctgtgtttagagctgcgagctgagtgtttaggcagctgacagcatttagcctggaacgaactatccaatgcaagtgtgtggttagggtcgtgttcaaaaatacggcttcgaagcagcaaacccggggctgggcactcgccctgtaattctttttccaaataaaaggcagaactattcctggctcggcttggggacttctgcggctgccggggctccaaggaggccagcctggaatgtcaagcatg

SEQ ID NO: 754858 - DNA, 631 bp, Homo sapiens
ggtggtggccaaaggggtctgtgcccctcagaaagctcggagtcccaagtcctcagactccatctctgcagagccaggcagctcatggagcgtggggtggggctggccctggcgcctgcctgggcttcacctcctggaggtgaaggggaggaggagtctgcygacagcccagccccagggtggcgcactcacgtgggtgttgagacggtaggacatgagctcgaactcgccgtcgggtgggatgaaggagatggtgcggtcattctcgaagcgtgatagccgcacacactggtggaacttcacatcctccagctccacggatttgcttttgccgcctggggtcaggggtgagggtaggacagatctgggccctccgggtcactatctcagcagtactcctaccacctgcaacccaccccggcagagcagggcccccagtccacgcactgagagcagcctgggccacaaacaccaagggggctgggtcccaagacaactgccccatcactcctcacacccctggtgtccccaggggcagggctggtgggtctggttcatgctgagtcccagcggccatcgcagggtccagcatgggacctgctcaggacacgttcactgaatgattgatcag

SEQ ID NO: 754859 - DNA, 608 bp, Homo sapiens
atggtgcttcctgagtcctgaccccttcttgcttctcagggccaccctgaagtgtgataacacttgatccaaaataatcaacttaaatccagtcacagtggctaacactgacagcatttccactgcgccaggcattgctccacacacgcctcgacaacctctggggcagggactgtggggagatgacctgaggggctgtaacccactgcgcatgccgagatgcatctgaaagtgcaactgaaaatccacaccggggcgacggtcctgcaccccctagcctgtcctgcgtgagccaagatgctggagcatctcttcttgcatccattttagaggtgaggaaacaggcacagatcagaggccccgtgctgagggcacagagtgactggcagaagaatcgctggggctgcagccctggccaccactgcacactgcyatgctgcacgaggccatgctcacaccagcaagtggcaaaggccaccgacttggatacctgggcccagatgctggctccagccaggctaacatgtgcagggcctgcatttcctgtctgcagagtggcaggagagtctgtgcagtcttatgcatgatgtccaaaaagcactgggtag

SEQ ID NO: 754860 - DNA, 632 bp, Homo sapiens
gtggggcaaccgttgtccttttctctctctgtcctctctccatgtgggctgggaagtgggcccaatggcagacgtgtacaacagtaaaccgcaaggaatcagaaaagtaccaggtagacagcacagagccagaagctcaggaaagtcaccccatgaagtggtttatgtctccagaactctctagaatcgagcatctgtgaatcctgtgcatataccatagtttgacttacgaaagagtttgagaactgaactaaccactcgggtcccagaatgaccactgggcagtgcacgcccaggagatctgaccaggaaatggcacgggggctttaaaaactgacgtgatgytcatggcctacaggttggggattggaacttgtggcctgaaagtaagattggctgttggctaaaacaaaaatatcaatatttcccatatagcttaaataagacctagagtatcaccacataatgctcaaaaagtccaggatgcaatccaaaattactcagcatacaaacaaccacgaaaatgtcaacttccctggaaaacccaatcaaccactgtcaacacttcacagatgttgggattatctgatgaagactttaaacagctatttttaaaattgcaaatgcttgca

SEQ ID NO: 754861 - DNA, 607 bp, Homo sapiens
agatttaatcatcttaaaagtaggttcagagtctacaagattgtgtttctttatgaagttttaattactttgatgtgattcatatgtaatattttcctttaagttttaaataatctgaaaaggtgggattgagaggattaagtttacttccagagtagyatatgcacttttttggtttgaaaaactctgaattaatataacttgcttagtctaagaggaacaccatggtagaaccaagatgagagtgcagtgccttacattctcagtgttattctcattctatagcactgaactagcaggagcaaatttcttcatttattagtctacattaccatacacataaatataaacatataaaacattgtgtaagtaatttttaaaaatctctttctccatccctacttttcactctctctctctctctctctcacacacacacacacacacacacactctgtcatgtcagaataatggaagtaaaattattagggaaaaccttaatatgtgactattaacccatcatgctggtcaaggggtcaaggctccacacagtatgcactttcaaatgagagttattcttttcactattacaggtatgtcctatatt

SEQ ID NO: 754862 - DNA, 607 bp, Homo sapiens
agatttaatcatcttaaaagtaggttcagagtctacaagattgtgtttctttatgaagttttaattactttgatgtgattcatatgtaatattttcctttaagttttaaataatctgaaaaggtgggattgagaggattaagtttacttccagagtagtatatgcacttttttggtttgaaaaactctgaattaatataacttgcttagtctaagaggaacaccatggtagaaccaagatgagagtgcagtgccttacattctcagtgttattctcattctatagcactgaactagcaggagcaaatttcttcatttattagtctacattaccatacacataaatataaacatataaaacattgtgtaagtaatttttaaaaatctctttctccatccctacttttcactctctctctctctctctctcwcacacacacacacacacacacactctgtcatgtcagaataatggaagtaaaattattagggaaaaccttaatatgtgactattaacccatcatgctggtcaaggggtcaaggctccacacagtatgcactttcaaatgagagttattcttttcactattacaggtatgtcctatatt

SEQ ID NO: 754863 - DNA, 624 bp, Homo sapiens
ttattctgggaaagattgcaatggttttatctcagtgtataagctatatttccatcaggcataaaatcctttgcagggaaaatttgaagtgtgtgtatggggttatatagaggaagggccttgggtagggttgaaatttcccacaaaaataaagtcaacacaatggtttgattttttttttcagatatggaaccccaggtttcctaaccagggattcatctctcaaatctctctatatgtgggtttcctgctatatttttaggcttctgttacagccaagtaaaaccctatctccattatagcagtctgtgagttttctagattaatcttcctactttcaaatggggccacagatagaccaaatattctacatagatggggtgttttaaaataactgctctgttctcagtttccttagctggaaagtgggaataacaatagaacctatgccaaaraaaaattatttgatgcagagaaagcactcaagcactcgggatatgcctaatacaaagcccacccttaattcattatagctgttattgttacttaatgtacttcctggttatattctggcaacaagtgggttccaccttccctcagaagcctttttaaaaaactgtcttg

SEQ ID NO: 754864 - DNA, 642 bp, Homo sapiens
ccctttgtactttaccctccaccttcaaaggctgttctcaggtcttattttccttcctagaagtgtgagattggtttttctgctgtgctattggagtgatcctccacttagactctaatctgccatggctttgtgcctgtttgtcaggaacttygaggatgtattaagatattatacagggtagaagctctattttgacaatgattatgcctattatctattttaataaatgtaaattgctgtggagaaacaaaccattttatgccacttgaatccttttcaaggaagcctgaatcctttttgcatggcttagatgtattactgtcattttcccttcactgggttgaataaaagcacttaaatcagacctttgttagtgcaccctcttgtactgtttgccctaataaattgttgtgattttagtctttgaaatccgtattttgtaacatttgcaaatttatctgtagtcccttccagaattgagattatggagtaaattcaacagtaagtcaacatgtacattatatgtgccaagcactatacttgggatacagcagtgattaaagcactaattctgcctttaagaagcttacagtcatttctcactagtggagtgagaatttacagataagcaagaggagg

SEQ ID NO: 754865 - DNA, 653 bp, Homo sapiens
aaaaaattttttaaaaaaacctgcttaatgtgatttagagtgattatggctttagttcatctttattctaataagagtaagaaaattatactgcaagacaagggtgacatgaccaccatatttaatgtcattacattaatgaatgattcttatgggccaaagaacaccaactcttgttttttaaaaaattataatatcctgctaagtaaataagaaaaaaacctattttttaatctgtgactcattggtaaattgaatggctaaattatattttggtgggagtacaattgtaggttgccaaagaaatgtgggttatatgcttaagcatagaaatattaatgggcatgcttgtgtgcaatgaaaaatgatattaaaaaatgggtaagtgttcagcatattttgtttcatttgcaacatgagtaaaatcacattgttcttctgaagccaagcacagctaaaggcaagaggcacagataaggtggggctgtgatggggarcactctgctgtcatgctttaaggaagtttctggcaaacagagaatgtatgttaagtacctgcagtggcctatttcatagagacaccatataaagagtcctgcaaagcaaaactgacttatgtaaaagaggcgcaggttaaggtttcatacaggtgg

SEQ ID NO: 754866 - DNA, 503 bp, Homo sapiens
gaaatctcagatcagacaaacaaaatcttgtagtactttggcatgaaataatcacccagataccctaaaagctacagattttttttttaactagcgatggccaagcaacactgacagatactacacaatacaaaataaaacaagttggacttgtcaggtttcatatagccaagtagtttagaaaggaaaatgttaacaacttatctcatactcatcagctggtagacaataccatatatattatcataaaatctatttatcaagtggtatcttttgggcactatatgtcattatatatcatttcatttaatgctcacaaccatattaaagggtcattaaacctattttacagatgaraagacaggttcaacaatttttccatcatcacccagccacgccagtaactggcaggatcagtatttgtatacagatcgctgatttcagaccatattctcagctaccatgtgtatattgtcctcattccccagcccaagctgtgcctt

SEQ ID NO: 754867 - DNA, 558 bp, Homo sapiens
acttctttgggaaagagacgacactccccagaactcctttgtatatcacagccacacctggagccctcagagcctccttgttcatacctgctgctgcatgtgaatgccattcaaatgtggtcccagtcccctcctcaaggagggcaaagccagcctcagaragacttagtctgagattcctggccagcctttgaagagagtaatcaagttagacatagcaggagggcatttgccctttcaagccaagtggggaaacagagccagtcttctttgcttgatcttatcagtgttcaatgagatctaccattttgaaatcacagaacaaactgtagaaaatgaccagaaattcttgtgcattcaattttccccatgggaaggaaaaatcagttatttccccaatgtctaaggaaatgaattcagagagaacgtctccatacgcagccagaagtaggtacgtagggcttggcgttaaccactggggttgcagtacactatttacaaaaacaggcagtcttgaaattgccctattggagagaaatttgattgtcccagaaataa

SEQ ID NO: 754868 - DNA, 586 bp, Homo sapiens
gtctctactaaaaatacaaaattagccaggcgtggtggtgctactcaggaggctggggcaggagaatcacttgaacccgggaggcggaggttgcggtgagccaagatcatgccattgcactctagcctgggtgacagagtgagactgtctcaaaaaaaaaaaatagtggggagtgcttctctgagatttcaagaaaggccttctaaacataaaaatgttaatcctttgcctttcatccttgtagaataaagttatcataaaaagcccatttccttgtaggtcaaaatagacttatagcagtaacctcctgaatggcagttgtaaggatagatgtgataaagccrtaacactttagtgtgtagcaggataatctgtggaacccgtgtaacaatcagaagcctgggcttcagaccatagatagggagtgaggcttctaggtgggaccctggcaagggtgtgtttgtggaactcatcaggtgctcctgctgcaggctcaagtctgagcgcccagttcaatccagggagctgttgatttcttggctggttgactttgctgaacatcatggctccctccccacaacaggga

SEQ ID NO: 754869 - DNA, 606 bp, Homo sapiens
caagtcccctctcctactctctttctagggtttcacccattgagaatttctcctgaaaaaactcatcattcagctcagcctgcctaccacttattgagcacctagcaagtaccaagctctgctaagaattcaccggcttgatcttggcatcactgaaattatttttctttggaggaagacactgtaatagaatggcatgtttctaaaagtgccagatgttagtaggcatgctttaaaataataaattaactcactccaaagggaaaaaaaaaacaatacaagtaagcagaagaaacagccttccatctctgggcatctttgtccawgtgtgttcgcttgctgcagcctccatgctctgcaaggctgttttattcttctttgtaggcaggattttaaatatctacagagcctgctcagtaaagcaattagagagctccttgtatatttcaatctggttaatggcttcccaagccattccctcactaaagaagtgcataacagcaaaggcagccaacgagcacccctcggaatccacactctcttaatggaaagcaagcagcctaatttgtttgccaagactgtcggagccccccccgacgccaagtc

SEQ ID NO: 754870 - DNA, 606 bp, Homo sapiens
tattaatataaagtcagcactttttttttcccccttggacatgggacttctccagaaccctatcccataggggacatacatcatggatcaagggagcatttgtcagtgtgatatgtcttttctaaaaaaccttatatttctgaaactttctttccgttcgtgcctagggcaggattatttctacaaaacagtaaattatagtattatctcaatatttaaaagtagcatttcagaagactatttcaaatgtcaaatttttaaaaactgatattgcaacttttcttagccaagccctatagtttctgaaaattattaatattttctaatgaatcatccttttattttaaaaagtcctggcgttcagttattttactcwgggttgcctttcacatatacaaatatacaaatacaactctagacaatggtaacagaaaacatgtttctttataaatgagcttatatttcaaggtatgctgagaaattatgcagttgttatttgagatttattgtgtggtagaaaaatacaatgaataatgtctggtagtaaaataagagcaaaaaagacaaaacactccagattctaaagtgcattaaggaaattattta

SEQ ID NO: 754871 - DNA, 630 bp, Homo sapiens
ttctatataagtttatcattcgattgatatatatacacataattataatgtaaaaatgatttttccttttgaagtgaataaattaatttttcccctttgaggtcagtaagtatcttcagtgctaccctgtgaagttgctttttgaacaatttatcttttttttttttttkttttgttttgttttgtttttttgagacggagtctcgctgtgtctcccaggttggagtgcagtggcgcgatctcggctcactgcaagctccgcctcccaggttcatgccattctcctgcctcagcctcccaagtagctgggactacaggcgcccgccaacacgcccggctaattttttgtatttttagtagaaacggggtttcaccgtgttagccaagatggtctcgatctcctgacctcgtgatccgcccgtctcggcctcccaaagtgctaggattacaggcgtgagccaccgcgcccggccgaacatttatcttaaataatgtggtagctattaaattccattacttggagtattatttccaggtctttttgaaagccagctatccttttttttttttttttgataaatagttgaattgaaattaaaaggcaaagtccctccctcctgaaagagactg

SEQ ID NO: 754872 - DNA, 542 bp, Homo sapiens
aaggcaagagaaacatggaatttttcaaaagttaaaaaatagtaaagtacaagttgggcacggtggctcacacttgtaatcccaacactttgggaggctgagacgggcggagagcttgcatccaggagtccgagactagcctgggcaacactgtgtgtcttcatctctaaaaaaatttcaaaaattagccaggcttcgtggcatgtgcctatagtcctagctacacgcaatgactgtttgagcccaggaagtcaagaccgcagtgagccatcatcatgctgctgcactcagtcactaaacttgggtgacaggtgagaccctgtctccaaaaaagtaaagtacaaagactgattytgtaataaacatagcacaacttaatgtacccaaataataagtaaacatctgttgcaatgtttgcaatgcatactagcccctaataagccaaggagacaaacataggatattcactaaaggccaagttaaaatgtttaactaaaaagacaatgggaagaggatgaaataataaaaatacttgcctattc

SEQ ID NO: 754873 - DNA, 462 bp, Homo sapiens
tgtaggtaaccgtaacacaatggtatttgtatacctaaacatagaaaaagaaaaggtacagtaaaaatacagtataaaagatttacaaagatcgtgccactgcactccagcctgggtgacaaagtgagattccgtctcaaaaaaaaaaaaaaattttttttttactttttctagatacagccatgcattgcttaatgacagggatacattctgagagatgtgtctttatgtgatyttatcattgtgcaaacatcaaagagtctacttatgaaaatctagatggtatggcctactatacagcaaggctacaaacctgtaaggcatgttactatactcagtaccataggtaactataacacaatggtaagtatttgtgtatctaaacatagaaaaagaaaaggtacagtaaaaatatagtataaaagattaaaaaatgttatacctgtgtgggcacttaccatg

SEQ ID NO: 754874 - DNA, 489 bp, Homo sapiens
agaaaataatgtgaagaggtaagaagtctgggaatgaggatgagtaaacattgaaataactagctcaattatatttacagatatgcttcttgccatattgctcaataggataaagattattttgagtttccagtgtgagagatttttccatagttgaatttgcatgctatgccttcaattagattataaaaccctcagaggccgtttgaaaaactgctgcaccactaaatcgacttcttycaaagtgaaggctcctccatccaagctttcttatcattgggctcaaggttgaaagccagtaaaaagttttcttattgaagactgaaaccacccaccaccgtccctggttaatcataaaagaagcgttattctaaaaaactccagttctcgctgagacagctgttgacccaatttgtatacaaatgtgacactctgaacctctctggtttagtatttgatagcccaacagggtgactatattcaataaag

SEQ ID NO: 754875 - DNA, 627 bp, Homo sapiens
caacagtactattaactacctcataaaatattaggcaagttctcctcagactatttcatctgtttaaaaagaaaagggtaactgtgtgtgtgtgtatacatacatgcaatatatacaaagcttctgtatacagccggtactcaacatattgtctcctgtcccttctgctttttattgttcattaaactgttactataagctctgaaaacattctcctgttataaaggaaaaaatatgccaaaactcaagtctaaaatctacaatagtagcaaaagagaacatattaaaatcaagctgatgactagaaaatggtttgtaattctcacatataatgtaaacacatcccccaaactattactaaggtgacattaaagtataaaaagatgctttttgtaaatgatttttgagaagacttgtatatgcaaaccaagtcgatatcctattagataatagaatatccaggaggatggatgatataccttaactaccttgataggtagattcaaacaattaccctgtggtgagggattattttaaaatctgatagtaatgacsgtttgttttactaaatcgaataatcaacaagttaaaatatacaatcaggttctttgcttgcatagtcttaat

SEQ ID NO: 754876 - DNA, 623 bp, Homo sapiens
tcacgtttaaaaatttgtactttagggaattattcctatgtgaacattcttataactgttgctcaggtcataaaacagaactttgccagccacctcagaagcgttctatgccctgtctctatcacagactgtcttccccaatgaaagtgtagacttatttcagtcacttctttatttttcttaatagtttttrtcatagaaataggtattctaaaatagtctactttagtttggcctttgaaaatatatgaatttttagctgttttcatgtcatgtcttccttccatccttttttctcccttgcaattacttgctaaagaaattggattgtttgatctatagagtttctcagcctgggttttcttgattgctctaggtgtgtaggacttaagtgtttagaacaggcatggctgtttcatgcctcagtcctggaatgacattctacccagaatatcattctcttttgtctctcccttgccaataccttgctcatgtggttatcttctatctatactccaaaacttagctcaaaactcacccctcctagaaatattcccagccttttcatttaataatggatatgtcctattctgtagtctcctagcacctgtaaaaaactccag

SEQ ID NO: 754877 - DNA, 598 bp, Homo sapiens
ttctgacttcatttgtttactgcacccaatatttattacagtaaatatcacgttcattaagtaaaattattgctatccacttgccagatattaccaaagagaggtggggggagagaatctagtacgtgtattattaaatcaatggttctatttaccccaaaggcagtagtgaagagatggaaaggtggctttatccaaaaccccaggaaatcaacctgaggcacccgtaaactagtaagaactcttcaaaggggctagcagctcactaccctgaaatggaggaagcctaaccaaagtggggtccagcagggcacactctatggtggaatgaagagcgcactgaggctgagggatggcaggaagagaaggcaagggaccaggtggtaagaagctcaytcaggataaaaaaagaggaaacccacaagtgaacttgagtaattggtgacttttctgagcttcagtatcctcttctgtaaaaagagatgggtaaaccagaaggtctgaagcctccctttgatttcacaagtccatgtttttatgcttggggttgcatggaacacatgcagtagcaaagagcccaggggtcaggcccacctac

SEQ ID NO: 754878 - DNA, 587 bp, Homo sapiens
caggttcaagaggcaaaagagacctggagctagcaaacaagacatagggttttattagggagaactaacatacagggacagtccagtggtggtggactagacaggagaacctcaactgcttgcaaaaagcatgcagcttatatagcacttttatttggcaccctccgtgcagcagccttcacgtggcaaccctcctttcttaagttattgctctcaggtgcatttgccatacacccactcccaccgtaatggcattaatccattcctgaggattaatgttgttacggtctcatggcctaatcgcctcccagtggtcctacctcttaatacmataaaaatatcaattaaatttcaacatgagttgtggaagggacattcaaaccattgcagttattttagagctttagttcagaaatacaaatgcaataacttttacctccaaatcattgactcatagttgtctaatttagtaggctttgaagaccctgcctttagtctttttgaccttttatctggactgatatatgtagggaaagaggctcaagaaggaaaaacagttaggaaaagaaaacttggaagagatattt

SEQ ID NO: 754879 - DNA, 503 bp, Homo sapiens
cacacagctgactcacatctaagtcaaaagtttcaggaagcaatacttcctttcactacctgcaaagccttctgttactttctgttctactcttcccaggccgcaccaccccccacatttcaacaatgctcgttgaaatccacgaaactgatttcccaatcccctaacggtttatggtcagcaatttggaaaacactggctgaaatactaatgaaagggcatcgcgggycttccctgatgcgaggggaggaaggaaggctttgctcagctctacgttcccacagacccacttttcctgccctttgccccacatcccacctgccacttgtgattaaataacagtttaacatcaccaaagctccctttcactcaagaactaactcaattaggcttgagctggtgggagcttaaagcagattaagggaagacaaaggaggctttggggtttatcttcagctttcatgttcctaggagctctctcttcctgtgctgagtcttaagca

SEQ ID NO: 754880 - DNA, 548 bp, Homo sapiens
aggtctcagacagtaaaataaagcatataaagaaatgcagaaacaaaatgtataagagttagcatggaaataataaaactgtcattattcccaaatgacatattatatgtagaaatccaaatgaatctacacataaactattaaaattaattaattgatgtaccaagttctctggatgcaaagttaatatgcaaaagtcaattatatttctacatagtatcagtagacaattgttaaagttwaaaaaaattcatttagatcaaatagctaggaataaattcaacacaagatttgcaaacctacacagaaaactataaaacattcctaaaagaaatttaaaaattaaataaataatataccatattcatggattcaaaaaaactaaatatttggaggtattgattgtttcctaaagggtctatattgatttaatgaaattctgatcaatatcccagcagaatttgtggtggaaaccaacaagctgatgctataatttatatatagccacatgtaaaaggctaaaaatcgctaagacaaacttaaagaag

SEQ ID NO: 754881 - DNA, 570 bp, Homo sapiens
gggtttgtatagagagaactctttctaactatgcttcccctctactctcataccacaacaatcatcaaacacagacaacttctgtggccatatgtgagttttttttaccacatgctccaagcagaggataccagctgggtgtcctctatttgagttccgacactatctacatggagatagtgtcagatcccacaggttgagggctcagtycccaagactgcccccccaccaaacacaccagtcgtaagtccagacctccagaacttctgaccaatcagcttcaagaggggatcatgggtgcccttctttgggtttgattaatttgctgaattggctcatagatctcagggaaacatttatgtttaccagtttataataaaggatattgcaaaggatacagacgaagagacgagtagggcgaggtatgtgggaaggggtgcggagcttccatgccctccctaagcgccacctccaagaacctccatgtgtccagctatggggaagttccccacaccctgtcctcttgggtttttatggaagcttcgtgacatcagcattcctttccccgct

SEQ ID NO: 754882 - DNA, 631 bp, Homo sapiens
cgctgcttcactgctgttatctgctgcttgtctgactcccccactactccgaggggtcactcaggaccagaatggtgtcttatttattttgaaacctcggctcataacagaaggccctggcacatagaaaatgttgtataaacttttgctgaactgaattcttattccaaccttctctcagatttattaaagacacaaaaggcacgtctgtagactgaagacgtttttggcttcgcacccagctcttggtctaactcagtgtgygcggccaggatccgtaatgatgtgttatggagacgagtaacgttgttggatactgagcagtgcgttcaggccgcattcctgtgggcacgcgctcaagtccatcatccctcagcagaggccgcgtatcacactggaacacacacagcctctgcaaccagaccccgggccaacgtgtggcacccaagtgtgaacagtggggtccttcagtgaggtacttaaactctctgtgcctcagtttctcttctgtgaaatagaatggtaataatgcctggcatctggggtcattggggggattaaatgagctaatacatgcaaagaactgagaaagcattgacacatgacaaatgccgtgtggatgtcagctatt

SEQ ID NO: 754883 - DNA, 644 bp, Homo sapiens
aaaaggaaggacttgtggatttaaaggaatgacttatggatttagtggaaagctaaaattctcagaagaaaaatagaagcaagtttgcatacactaaaatatcaacatttggggattaggatgttggggcaagagaataaccccaatatatggcactgtggcatactggccacttcagattaaatatataaaccaaaactaaaattctaagcccccacaaccaattgtacagaccccctctgggccatgagaaacctgaaaaactgaattcctggccatgatgggaaggaagtttgaacaggcctcctgttactccctgcctttttgaatttaggtacaagtgaccagcactaacattaaaatagagatcctaagactarcagaacggactcttcagcaataagataccaaattccaacctgactctggtatagcatcacatgacagatagcagatcctgaaagaaataaaaatattttaccctaaagtagatttctttgacatattttgaaatggttctgcaaagttttttttttttttaattttattattattatactttaagttttagggtacatgtgcataatgtgcaggttagttacatatgtatacatgtgccatgatggtatgctgcacccattaac

SEQ ID NO: 754884 - DNA, 572 bp, Homo sapiens
tcaggtgtgagctaagttgcaagcccggtgtttaaaggtggatgtggtgaccttcccagctaggcttaggaattcttagtcggcctaggaaatccagctagtcctgtctctcattatcaggaagctgctatcactaatttgaggttttttctatctattsagagactgcctttccctggagctggctgtgaccaagtattttagacagacagttaacaaccgcctgaccatcacctgttgatcacctgacattcctggttgcggggggccttctcctgccctgctcatgtatgactagctacctactgtaacaaagagacaaaccacagaatgggagaaaatatttgcaaactagccatgtgaccagggagtaataacaagaatatataaggaactcaaacaactcaatagcaaaatcagtaaacaatccaatttcaaaccaggtgaaagatctgaatagacttttctcaaaagaggccatgcaaatgcataataggtatgtgtaaaatgctcaacatcattaatttaaccaccagagaaatgaaagccaaaaccacagtgagatatcatct

SEQ ID NO: 754885 - DNA, 633 bp, Homo sapiens
aaggtctcattgaccatgttttggcatttccccagcacccacaggtacagagagaaaagagatgagggatagaattgttactggggggtccttgctaccagagctcccaacatggtggcaggccacttccaagatggtggcaagcctcgcgttctctgacctggggttcttggcctctcggattccaaggaatggaaccttgggccatgcagtgagtgttatagctctattagaagccatgggtcatggaagagaattgtggaacccagtgactagtgttcagctcgattaggatgaacccaggcacttagccatgcaggaacaatgcaagcctcttgcctgatcrggagcagcaatgggtgcctcactggatcaggagcacagcagacaccctgcctgatctggaggcatggaagtcagcggcaggtctgccactgcggcaaacagcagtggtggacggtgagcgaaagctcagctcgagccatagcaaacacggaccagaagagtgcagttgcaagatttaatatagtgaaatagagtgaaaacagagcttccatacaaagggagggactcaaagagggtagcattgctggctcgaatgcatgggtttatatcccgatccttgttctccct

SEQ ID NO: 754886 - DNA, 558 bp, Homo sapiens
catttacctcatcagtaaaatagggatcctccttctgcactgctatcataattgagattattgccacgtgtttccaggtaggggtttgagagggagaatgagcaagaggtggtgaggtgcggggacaaaacatgggctccagggacagacagagaggagagataaatccctgttcctcttcttgccagcacttggataagatttttagaaatttacattttcccgttgctcaaaattgttgttatyttcttttacattttctagacaaacaagtaaaagtttcttccataatccagcttctctcccccatcaatgttgtaaagaaaaccagtagtacttaagagagtggatggcaggcatggtgtgattatgtgtgagagctcttgggaagcactcagtgtattggaactttctttcaaagaaaggaagtgagagaaacaaacaagttaaggggactgctatggtctgaatgtttgtccccccctcaccccaacattcatattttgaaattttaacctccaatgtgatgatatttggagttggggcctttgggaggtg

SEQ ID NO: 754887 - DNA, 507 bp, Homo sapiens
taaagagctccaaatatccacctgcagattaaacaaaaagcttgtctcgaaacagctctatcaaaagaaaggttcaactctgtaaggtgaatgcacacatcacaaagaagtttctcagaattcttctgtctagtttttatgtgtagatatttccatttccaccataggcctcgaagtgctccaaatatccattttcagcttctayaaaaggagcgtttcaaaacttctcaatgaatacaaagattcaactctttgagatgaatgcacgcatcagaaaaaagtttgtcagaatgcttctgtccagtttttatgtgaagatatttcctttctcccccataggcctcaaagcactccaaatatccagttgcagattttacaaaaagtgtgtttcaaaactgttcaatgaaaacaaatgttcatccctgtgggatgaaggcaacacatcagaaagaagtttgtcagaatgcttctgtctagtttttatgtgaagatatttccttttccgta

SEQ ID NO: 754888 - DNA, 604 bp, Homo sapiens
tctactgtttaggtgaagatatttccttttccaccataggcctcaaagcgcccccaatatccattgcagattctacaaaaagagtgtttcaaaattgctcaatcaaaaggaagtttcaactcagtgtgatgaatgcacacatcacaatgaagtttctcaaaatgtttctgtctagtgtttacgtgaacatatttccttttcagctataggactcaaagcgctccaaatatccatctgcagatactacaaaaagaatgtttccaaactcctcaatgaatagaaaggttcaactttgtgagttgaatgcacacatctcaaagaagtttctgagaatgcttctgtctcgttttcatatgaagatatttcctgtccaccataggcctcaaaagaatgtttgaaccctgtgagttgaatgcagacatcacaaagaagcttctgagaatgcttytttctattttttatgtgaagatatttccttttccaccataggccacaaagcgctgcaaatatccacttgcagactctacaaaaagagtgtttcaatactgctcaagcaaaagaaaggttcaactctgtgagatgaatgcccacgtcactaagtagt

SEQ ID NO: 754889 - DNA, 550 bp, Homo sapiens
aaagagtgtttcaatactgttctatcaaacgaagggttcaactctgtgagttgaatgcacgcttcacataaatgtttccgagaatgcttctttctagtttttatgtgaagatatttccttctccaccatagccctcaaagcgctccaagtgtccgctggcagattccacagaaacagtgtttcaaaactgctctaacaaaagaaagattcaactccgtgatttsaatgcacacatcaaaaagcattttctgtgaatgcttccgtctagtttttatatgaggatatttcattttctaccatgggcatcaaagcgttccaattatccaattgtagattgcacaaatagagtgtttcaaaactgcttcatgaaaaggaagattcaaatttgggagtagaatgcacacatcacgaagaagtttctgagaatgcttctgtctagtttatatgtgaagatattctcatttccagcaaaggtctcaaagcggtccaaatatccacttgcggatcccacaaacagagtgtttcaaaactgctctacggaaaggtatgt

SEQ ID NO: 754890 - DNA, 516 bp, Homo sapiens
tttttattagaagatattcccgtttccaccaaaggacacaaagcgaagcccattatccgcttgcagatcttacaaaaacacgtttcaaaactgctctatcaaaggaaaggttcatctctctgggttcaacgcacacatcacaaagaagtttctgagaatgcttctggctagtttgtgtgtgaagatattcccatttccaacaaaggcttcaaagcgctacaatgattcacctgcaattgttcaaaagagtgtttcaaaactgytctatcaaaagaaaggttcaactctgtgagttgaatgcacgcttcacataaatgtttccgagaatgcttctttctagtttttatgtgaagatatttccttctccaccatagccctcaaagcgctccaagtgtccgctggcagattccacagaaacagtgtttcaaaactgctctaacaaaagaaagattcaactccgtgatttgaatgcacacatcacaaagcattttctgtgaatccttctgtctagttttt

SEQ ID NO: 754891 - DNA, 492 bp, Homo sapiens
catagagtagttttgaaacactatttttgtagaatctgcaagtggatatttggactgctctgaggccttcatcggaaacgggaatatcttcacataaacattagacagaagcattctcagaaactactttgtgatctgtccattcaactcacagagttgaaccttcctttttatggagcagttttgaaacactgtttttggagaatctgcaagtagatatttggagcgctttgwggcctatggtagaaaaagaaatatctgcctctaaaaactagacagaagcattctgagaaacttctttgtgatgtttgcattcaactaccagagttgaaccttccttttgatagggcagtttggaaacactctttttgtagaatctgcatgtggatatctggagcgatttgaggcctatggtcaaaaaggaaatatcttcctgggaaaaatagacgaaagcattctcagaaactgctttgtgatatgtgcattcgactc

SEQ ID NO: 754892 - DNA, 636 bp, Homo sapiens
tatgtagaaagctgaaactggataacttctttataccttatacaaaaattaattcaagctggatcaaatacttaaacattagacctaaaagcataaaaaccctagaagaaaacttaggcattaccattcaagacagaggcatgggcaaggacttcatgtgtaaaacaccaaaagcaatggcaacaaaagacaaaattgacaaatggaaactagttaaactaaagatcttctgcacatcaaaagaaactatcatcagagtgaacaggcaacctasaaaatgggagaacatttttgcaacctactcatctgacaaagggctaatatccagaatctacaatgaattcaaacaaatttacaagaaaaaaacaaacaaccccatcaaaaagtgggtgagggacatgaacagacacttctcaaaagaagacatttatgcagccaaaaaacacatggaaaaatgctcatcatcactggccatcagagaaatgcaaatcaaaaccacaatgagataccatctcacaccaattagaatggcaatcattaaaaagtcaggaaacaacaggtgctggagaggatgtggaggaataggaacacttttacactgttggtgggactgtaaactagttcaaccattgtgga

SEQ ID NO: 754893 - DNA, 615 bp, Homo sapiens
gtgggcacttttttggttccatatgaactttaaagtagttttttccattctgtgaagaaagtcattggtagcttgatggggatgacattgaatctgtaaattaccttgagcagtatggccattttcacaatattgattctccctacccatgagcatggaatgttcttccatttgtttgtatcctcttttatttccttgagctgtggtttgtagttctccttgaagaggtccttcacatcccttgaaagttggattcctaggcattttattctctttgaagcaattgtgaatgggaggtaactcatgtatttgatctctgtttgtctgttgttggtgtataagaatgcttgaatttttgtacattgattttgtatcctgagactttgctgaagttgcttatcagcttaaggagattaygggctgagacaatgggttttctagatatacaagcatgtcgtctgcaaacacggacaatttgacttcctattttcctaattgaataccctttatttctttctcctgcctaattgccctggccagaacttccaacactatgttgaataagagtggtgagagagggcatccctgtcttgtgccaggtttcaaagggaatgt

SEQ ID NO: 754894 - DNA, 616 bp, Homo sapiens
gatgtgtgcattcaactcacggagttgaacctttcttttgattgagcagttttgaaacactctttttgttgaatctgcaagtggatatttggagcgctttgctgcttctagtggaaaaggaaatatcttcacataaaaagtagacagaagcattctgagaaacttctttgtgatgtgagcattcatctcaaagacttgaatctttcttttcattgagcagttttgaaacactctttttgwagaatttccaagtggatatttgcagtgctttgaggaatatggtggaaaaggaaatatcttcacataaaaactagacagaagcattctgtgaaacttctttttgatgtgtgcattcacctcacagttgaaactttgttttgattcagcagttttgaaacactcttttttataatctgcaagtggatatttggagggatttgaggcctatcgtggaaatggacatatcttcaaataaaaactacacagaagcatcatgagaaacttcattattatgggtgcatttatatcacagtgttgaaactttctcttttattattattattatagttcaagttttatggtacatatgcataatgtgcaggttagttacatgtgt

SEQ ID NO: 754895 - DNA, 594 bp, Homo sapiens
tgcttcaaaactgctcaatgaaaacaaagattgaagtctttgagatgaatgcacaaatcagaaagaagtttctcagaatgcttctgtctcgttttcatgtgaacacatttacttttccacagtatgcctcaaagggctctaaatatctacttgcagatcctacaaaaagagartttcaaaactgctctatcaaaaatagactttcaaaacttctcaatcaaaagaaaggttcaactctgtgagtgaatgcacatatcacaaagaagtttctcagaatgcttctgtgtagtttttatgtgacgatatttccttttccaccataggccttaaagagctccaaatatccacctgcagattaaacaaaaagcttgtctcgaaacagctctatcaaaagaaaggttcaactctgtaaggtgaatgcacacatcacaaagaagtttctcagaattcttctgtctagtttttatgtgtagatatttccatttccaccataggcctcgaagtgctccaaatatccattttcagcttctataaaaggagcgtttcaaaacttctcaatgaatacaaagattcaactctttgagatgaatgcac

SEQ ID NO: 754896 - DNA, 598 bp, Homo sapiens
attaatttctttttcaaattattcattgctggcttatagaaacacaactaattttgtgtgttgatcttgtaacatagaacattgctgaatttgtttactagctctagtagctttcttgtgaatttgtttggattttccacatatagaatcatatcatctacaagtaaagaaaatcaactttctaatttgggagacttttacttactttttcttgattacctgctctggctaatatgtgggcatttctgtattatgtctgatcttagatctcagtctttcattattgaatatgatgttagctatggggtcaactgcatttttgcatagatgcttgggtaattcaatggggaaaggatggcaatttcaacaaatgttaatggaacatttggatacctakgtgtcaaaaaataaaaatgaaataaagaacttagatgcttaactcataccatgtacaaaactaattcaaattatttcatggatctaaatgtaaatgtttaagtataaaactgtaagataaaaatggagaatttttttttttcacattgagtcaatccaaaatttcttagataggacacaaaaacatgacccataaaggaaa

SEQ ID NO: 754897 - DNA, 582 bp, Homo sapiens
gactgagaaaacattcatttctaaccttgctttttcaactagtgacccccactcttctaactctctcagttcccacacttagccatcaagataatcagattgtattgttagagctaagagggagatagctactatctagtaaatttcctctgttttggctgaagaaactgaggcaaacataactttctatatacagctggtgtcagtggccttgctgcaaccctgcactatatgaagttgtcctctgctagcccaggaactctcatggtggcattccacttgaaaatmctctctggggacacatggcacttcagatcatctttccctctccctataatgaaagcctgctctcagctgcttataatccagaaagagcagaatggctaatccatgttaaaatgttaaagactgataaaagcttaatgtgttttctttcccagtgggataagaattcatttttaataggaaaaacatatcttcatcctcaaattcccaaaatgttgatgcgtatagccctgctgagtgcaatgttaaaataagtgcaatggtggggttgggaagggagaacaagagttccaaggt

SEQ ID NO: 754898 - DNA, 627 bp, Homo sapiens
  misc_feature 602, 627: n = A,T,C or G
tgaaaattaccgtactgccaaaagcaatctacagattcactgcaattcccatcaaagtaccatgatcattcttcacagaactaaaaaaagtcctaaaattcatatggaactaaaaaagagcctgcatagccaaagcaagactaagcaaaaagaacaaatctggagcatcacattacctgtcttcaaactatactgcaaggcagtagttatcaaaacagcatggtactgttataaaaataggcatgtagaccaatgggacagaatagagaacccagaattaaagccaaatacagccaactgatcttcgacaaaacaaacaaaagcatgaagtagagaaaggacatcctattcaacaaatggtgtggggataattggcaaatcacatgtagaacacgaaactgtatctcatcactcaccttatacaaaaagcaactcaagatggatcaaagacttaaatcagagatttaaaaccataaaaattataraatataacattagaaaaactcttctagacataggcttaggcaaagagctcataaccaagaacccaaaagcaaatgcaaccaaaacaaaaataaatagatgggacttaattaaactanaaagtttcagcaaagcaaaagaaan

SEQ ID NO: 754899 - DNA, 563 bp, Homo sapiens
agagcaagacttcatctcaaaaaaaagagaaaaaatccttaaagtgaagagactatatatgtatatatagcagaccattgaacaatgtgagagttagagggaccaacctctccatacagttgaaaagctatgtgtaactcttgacttcctcaaaacttaattactaatagcctactgttaactggaagcagccttatggataacataaataggcaattaatacatatttttgtaggttacatgtattatactgtattcttacaataaagtaagccagagaaaataacatgttgttaagaaaatcatcagaaagagaaaatatatttgctattcattaggtggatgtaagtcatatttagccttgtcatcttcacgcttcactttgaataggctggtgtgtrcacgtgtgtgtatgtgtgcgtgtgtcctattatgttctgtttttctggagaaccctggctgttacaatcactaatatcacttatagttccagcattccaatattctatcaaaatgaattaagaaggccatggctgcttgcttatgggagacaaataattaaa

SEQ ID NO: 754900 - DNA, 605 bp, Homo sapiens
gtgcctggatgactcctctctttttaattacttacatttggattttatacaataaatcaaaatttgttcattcggttatccatggaggaaagataccaccagttaggtacccagttcgcttcaccagtcaggtaccctgtttactttaaggaagcatcagtaatcagctctgcagttttagtaattcaattcaccacagattgctcaagtgccaactatgtacttaatacttatattgactagaagtcttagagtaacctgtttaagttaatattagctattcaataactgggatacatttattytagtagattcttaaaacaagttttaaataggacacctatgactatctttttttactggtaaaaggaaaaacacttattctttaataacatgtttggatttatgttattgcatttttgagcaattggaatattaagttccattttatttattctattaattttttttttttttttttttttttttctgagatggagtctcactctcttgctcaggctggagtgcagtggcgccatctcaacaaactgcaacctctgcttcccaggttcaagcaactctcccacctctgcctccggagtagt

SEQ ID NO: 754901 - DNA, 613 bp, Homo sapiens
tgttccacagatggaaaggaaggtaaaatagattatgaaaaatgttttatctgctgtcacctgtaagacaataaccataaatggaagtcatgtgttgcattgaccacaatgtcaatttcagcattaagacccaagagaaagccagccaacagatcattcattcacttactgtgaatataattcattaactgtgacatgattcattaaaatttaccaattaactgaaagagacacctataaaggtaatttggggggcttttattgatggtattttacaattaaattttaaataatgttcatgtcacaagcaatgtgaatatttaactgtatatttttatgattccgtagctttcctggattaaaagaaaatgtataatttattttacaatagrcccttgatcattcacaaatttaacatgttcatagcccacattcacttaaaatattgccaatgcccatatgaaatgcacataatcctgggctggtttgggtgttagaatcagtcatttacctagtgaatgagcctactcaacagccctgcatctgtacctcaatgaggttttattgttgatcacttcaatactgacagacttaacagaagaattgaataatg

SEQ ID NO: 754902 - DNA, 517 bp, Homo sapiens
ggctgctgtaacaacaatagcaaaaaactgtgttgcttataaacaaaaatttctcacagttctaaaggctggaaattccagcatccaggcactggcatattcagtgtctggcaagggccacttcctacatggctgtctttttgctgcagactcccatgttgggtgggaaggggatgagcactccaggttgtgtttcatatggacactaattccattaataaagtaccaccctcattacctaattacctctccaatgtcctatgtcctaataccatcactttggggcttaggatttcagcatrtaaattttggagggacccaaacattcagaccatagcagaactttatagcaaaaaacatctatgttgaaaaagaagaaatatattaaacagtctaatgttatacctgaaggaactacagaaaggaaaaaagttaagcccaacgttatcagaaggagggaaataaagataacagcagagataaatgaaatagaaaatataaaacaatagaaaataat

SEQ ID NO: 754903 - DNA, 640 bp, Homo sapiens
aactctaaaaagaaaacttagggataaagcttcatgagactgatcttagtaaagatttttttggatatgactcaaaaagaacaggtaatgaaaacaaaaataaacaagtggcacttcatcaaactaaaaagtttctgtagagcagaggaaacaagagtgaaaaggcaacctacagaaggggagaagatatttgcaaagcatatatcaaataagagtttaatttccaaactatgtaaggagctcataaaactcaaatagcaaaacaataaataccccagttataaaagtgagctagagatttgagtagaaatttctccaaagaagacctagaaatgyccaacatgtatatgaaaagatgttcaatgtcactattcatcaaaaaaatacaaatagaaaccacaatgggttaagacaccacctcacatctgttaggacctaaggtattatttttaaaaagacaacaagtgttaccaaaaatgtgttaccaagaatgtgaagaaattggaacccttgtagactgttggtgagaatgcagaatggcatagccactatggaaaacatatagcaattccacaaaaatcaaaaatagaacgactatatgatccagaaattctacttctgggtatttatccaaaagaat

SEQ ID NO: 754904 - DNA, 596 bp, Homo sapiens
cagaagagcattactgacagtatttggggggcaatctttattattttattatacataacaacttgtttgattatgatatggggcaatcaagaaaaagaaattgagcacagttcagatttttggtcaccttaagaactaaattgaattattagattgatcacttagtaacaactccacaggtaattagtttgtaagatagacaggagttaaatatataaggtagtgtaatcatcaccttccttcaaggtttagtaaaacattatgttgaraaaagctccaagtaatggctgctttactcttcaccttatccagaaatcttttcctgtgttaaattttccaaatttcaattcaaagtgggaaggagaagtagaatagataaaagaaaagaaagaacaaaaatgaaactgggtaaaatgatttgtaggctgtaaagttagaacagttgatcataatatccataagtatttttacatcacatattcacacaggcaatcttagacaatctaccttaactgattcttacatgttcaatattaatatgttgctcttttttactttaacctaagttgtatatgaagtaacaagtaaaatatctc

SEQ ID NO: 754905 - DNA, 596 bp, Homo sapiens
cagaagagcattactgacagtatttggggggcaatctttattattttattatacataacaacttgtttgattatgatatggggcaatcaagaaaaagaaattgagcacagttcagatttttggtcaccttaagaactaaattgaattattagattgatcacttagtaacaactccacaggtaattagtttgtaagatagacaggagttaaatatataaggtagtgtaatcatcaccttccttcaaggtttagtaaaacattatgttgagaaaagctccaagtaatggctgctttactcttcaccttatccaraaatcttttcctgtgttaaattttccaaatttcaattcaaagtgggaaggagaagtagaatagataaaagaaaagaaagaacaaaaatgaaactgggtaaaatgatttgtaggctgtaaagttagaacagttgatcataatatccataagtatttttacatcacatattcacacaggcaatcttagacaatctaccttaactgattcttacatgttcaatattaatatgttgctcttttttactttaacctaagttgtatatgaagtaacaagtaaaatatctc

SEQ ID NO: 754906 - DNA, 540 bp, Homo sapiens
ggattgtttctactttggggctactatgaataatgtggctatgattttcctgtaaaagtattttttggacataagttttctattaacttgagaatatacttaggagtagaattactggatttaatggtagctttatgtggaaaactattttctaaaatggcttcatcattttatagtcctatctgcaatttatgaagtttgcaatttctccatatccttgacaacgttygtaattgcctgtctttttttaatataaccatccaagtgagtattaagtggtacctaattgtgattttgatttgcattttcataataactcttgggattgagcatgttttcatgttcttattggtcatttctattttgttaaagaaatgtcaattgaaattctttgccaacttttaattaaaaggttggttgtctgctcctgaatgactactgggtaaataatgaaattaaggcagaaataaataagttctttgaaacaaatgagaacgaagacagaacatatcagaatctgtgggacacagctaaagcagt

SEQ ID NO: 754907 - DNA, 606 bp, Homo sapiens
actcctttctatttttttaatttacttttgatgaggaggaatttttgaagatgcatctatggtttttggctggattggctactttggctttgctcctgggggcatacagtagtgtagtctctttatgatcaatttggccgtaaacagcattagtggtatctgtgatttcctcagtgggttagggcacgtttgtttatggaggctgtgatggtattgtgctggggacttgaatgccagttgggccagtcttccggccccagtgtagacagtggtggscttagcatgcctatcttgtgccccagggtggtgcacactggcacctgtgctggcagttactaatgggttgatttttggagctccagatggcttgctaggattcctgtcgtggcagtggtggacgagattgttgggtgagttctccgtcctatgggcaactggtgttgcatggggaatgggagtagcaatggcaggaagattctctgggtctcacgtggtgtgcattgatgttggcactggctgcaatgttctgggtgggcaagtctccaggcccgcgggtggttcttacagatagtttccaggtgaggtggtagcagcgtgaagtttacg

SEQ ID NO: 754908 - DNA, 635 bp, Homo sapiens
ttatattctattatttgtaccattgtggaaaaagttgctgggtttagttgttcttcatttagaaagcaaaacatatttatttatttatttatttatttatttacttatttattttgagacagagtctcgctctgttgcccaagctggagtgcatggagtgcagtggtgcgatcttggctmactgcaacctccgcctcctcggttcaagcgattcttctgcctcagtctcccgagtagctaggattacaggcccgtgcaaccatgcctggctaatttttggtatttttagtagagacggggtttcaccatgttagccaggatggtctccatctcctgaccttgtgatccacccttcttggcctcccaaagtgctgggattacaggctgagccaccacgcccagccatctcatttattatttaaggatgattgactaatgaaaagccatgcccccaatcagtatcaatttattcacattttaaagcaatgtttgaaagtattaactcaattctacctgttttgaaatgagaaatttgctgaaatcgatttgataatccctacttactaaaacacaggttgagaaatgatttcccacatatctgtgtattacatagcttctaatttaatgttgatgac

SEQ ID NO: 754909 - DNA, 632 bp, Homo sapiens
gatgatatacaaatatattagactttttgctcttgtcccaaaatagatcagattttgattttacttttttcatttgcttattttatctcatatttatgcttaatattttgtaaattatgaatttattagcagtctttaattacctttgctttgtttttattgtcttgcactttccagaatcctggtcaattaatatgttaaagtagttgtaactttaaatgtcacttacttgtttgtgaayagccaaagaacaatgtgtatagtattttcccagtatatttaatcagcctcagtctgtagagattgagtggagtagaattttttattttaatacccatatatttcattcataaggatgtaagaaaatattttcttatcaattaatacattagtttcagtaaacaaatagaatttacattctattgggcaaataaacctaaattaacttgtcaacagcaagaatggttgttaacaaatatagcagtaattcaattgctgaatgagcagtgactctaaatattttttaatttactattattgttattatttttttaaagattggttcttgctatatttctcaggctggactccaattccggggcttaaataatcctcctgcctcagcttcccga

SEQ ID NO: 754910 - DNA, 579 bp, Homo sapiens
caaagtctctcagcatttgcttgtctgcaaagggttttatttctcctttgcttaatgaagcttagtttggctggatatgaaattctaggttgaaaattcttcactttaagaaggttgaatatggacccccactctcttctggcttgtagggtttctgcagagatatctgctgttagtctgatgggcttccctttgtgggtaacccgacctttctcttgggctgtccttaactttttttccttcatttcaaccttagtgaatctgacaattatgtgtcatggggttgctcttcttgaggagtatctttgtgctgttctctgtatttcctgaatttgaacgttggcctgtcttgctaggttggggaagttctcctgggtaatatcctgaagagtactttagaacttggttccattctcctcatcartttcaggtacaccaatcaaatgtagatttggtcttttcacatcgtcccatatttcttggagagtttgttcattcctttttattctttttttttaataatcttgtcttctctctttatttcatttagttgttctaaggtcactgatatcctttctt

SEQ ID NO: 754911 - DNA, 597 bp, Homo sapiens
caaaaatggtaattaaacaacttagtccttaatgattttcgggtaaatgatacaattaagaaataaaaaacaatttaaattaaagaaaataaagactcgccatatgaaaacctttaggatacagcaaaagcgattctaaagagggaaggttataatgttaaatgcctacatcaaaaacatagaaaggtcccacattaacagcctaacattatacctcaaggaactagaaaaccacagtgaaccaaatataaagttagcagaagaggaaataatataatrttagcatagaactaaatgaaagtgagaacaaaaaacaaacaaaatgaaaagtttgttttttgaaaaaatcaacaaaactgatacatcactagctagattaaccaagaaaaagagagaggtgaatcaaataaccatcatcaaaaatgataaaggtgacattaaaacggataccacagatacaaaaaaatactgtcagagactaccatgagcatctctataaacacaagctgtaacacatagaggaaattgacaaattcctggatgcgtacaacctcccaatattgaactggaaaaaatataaattctgaacagaccaat

SEQ ID NO: 754912 - DNA, 597 bp, Homo sapiens
caaaaatggtaattaaacaacttagtccttaatgattttcgggtaaatgatacaattaagaaataaaaaacaatttaaattaaagaaaataaagactcgccatatgaaaacctttaggatacagcaaaagcgattctaaagagggaaggttataatgttaaatgcctacatcaaaaacatagaaaggtcccacattaacagcctaacattatacctcaaggaactagaaaaccacagtgaaccaaatataaagttagcagaagaggaaataatataatgttagcatagaactaaatgaaagtgagaacaaaaaacaaacaaaatgaaaagtttgttttttraaaaaatcaacaaaactgatacatcactagctagattaaccaagaaaaagagagaggtgaatcaaataaccatcatcaaaaatgataaaggtgacattaaaacggataccacagatacaaaaaaatactgtcagagactaccatgagcatctctataaacacaagctgtaacacatagaggaaattgacaaattcctggatgcgtacaacctcccaatattgaactggaaaaaatataaattctgaacagaccaat

SEQ ID NO: 754913 - DNA, 580 bp, Homo sapiens
atggctgagagtcagcaggatcccagtggaaagcgacaagccccctttataatttacgtggaaacgcaaagcttcaggaaaagacaaaacaactgtggaaagaagaaacaaggctggaggctgacgctgaacttcgaaaatgatggtaaagtggaagggatagaaacagcacggccctggtgcaaagtgaagcaaacacgtcgggcacagragagtccaaagtaaacccacagtttcttacaaagctgcaacggcaatgcagcggagaggggagccctcccagcaattggggtgggcacgctgggcgtcaaggtgcctgtgccgacgctataccatgtaagaaacctcactcaagacgcgtcccaggtctaaatacacaacccaaaactataaatcttctaggacaaaacagaaaatctcagtgaccacggattaggcaagctgtcttagacacaccagaaaaatctgtgcctcagagaacaaggggagatgctgggacgtgaggaaagtgtgaggcccccgctcggtgcgtgaaaggacaggcagggagaaaacaccctcaagtcacatgtgtgacaag

SEQ ID NO: 754914 - DNA, 601 bp, Homo sapiens
gctgggaaaactggctagccacatgcagaaaacagaaactagaccccttccttacagcttatgaaaaattaactcaagatggattaaagacttaaacctaaaaccataaataccctacatgaaaacctaggcaataccattcaggacataggcatgggcaaggacttcatgactaaaacaccaaaagcaattgcaacagaagccaaaattgacaaatgggatctaattaaactaaggagcttctgctcagcaaaagaaactatcatcagagtgaacaggcagcctctggaatgggagaaaatttctgcaatytgtccatctgacaaaggtctaatatacaggatctacaagggacttaaatttacaagaaaaaacctcatcaaaaagtgggcgaaggacatgaacagacacttctcaaaagaagacatgtggccaagaaacatgaaaaaaagctcatcactggtcattagagaaatgcaaatcaaaaccacaatgagatatcactggtcgttagagaaatgcaaatcaaaaccatgatgagataccatctcacaccagtcagaatggcgatttctaaaaaatcaagaaacaacagatactg

SEQ ID NO: 754915 - DNA, 600 bp, Homo sapiens
acatgatcatgaggttttgtaaaattttccctcaagtgattaagactcttttctctttctactcccatgttcccttcatcacacttctgtcaaatcaaatgatattgggataccaatgggtattttgaggaaattgagatggggagagacttagtttgggtttagtgggatgtatttatgcaattcacagtctacttctgtatatagttaaaatattgctggccctcctcatctaggaacagcttccagaaatatttctacctcccatgcctaactttgaatgcctactcattcaacatgcaacccgaaggtgcaggatcagggctcatatttccatatgaatgtgtccattgaagctggcactagaaatgtatgtggtagarggaaagtaaggcttgaaatgtatggaatcagatgttattatggtggtgcatcaggcagttaggaaaaatattaagttgcttttctggattttgtgatatttgtactatttatcacctttttaaaatctgaaatttgttacaatttattgtcgtatgaaaacaaatattaagaccgtactttcagggatcatttctatagttcatcaaaacaaatatt

SEQ ID NO: 754916 - DNA, 624 bp, Homo sapiens
gtacaagcatgtaaaacatccgtgaaccgttatacagtctgcagtgggagccataacaggactctggattggctcaaaagccccacttggctgggcacagtggctcacatctgtaatcccagcactttgggaggccaaggtgggcggatcacttgaggtcaggagttcgagaccagcctggccaacatagtgaaaccccatctctgccagctgatctgttcccaagcaaagaagagagactaccaaatatatgatgctggtaacaatagcatgcctatcttatagatgagcaaataaaaacaaatgtagataacttggccatgttcacacagctaataagtaatggtacttggctatagcctgggattctggaaacatctggagtctgggtctgagaggctgttctgttcaattccttgcccccaggcagcctggttcttcaaattcctctggtctcctaaaatctgactaattctggcckggtgtggtggctcatgcctgtaatcccagcactttggaaggctgatgtgggtcgatcacctgagatcaggagttcgagaccagcctggccaacatggtgaaaccctatctctactaaaaatacaaaaattagccaggcgaggt

SEQ ID NO: 754917 - DNA, 626 bp, Homo sapiens
aaagtataaaatttctagaaggaaacataggggaaaacttcatgcattgatttggcatgattttttgcatatggcattaaaagcacaggtgacaaaagcaaaaatagagaattgggactacatcatacttaaaaacttctgtgtatcaaagtacacagtcaacacagtaaaaaggcaacctgccagaatgagagaaaatatttgcaaattatgtatctggtgaggggttaatatccagaatatataaagaacatttaaatctcagctacaacaacaaaataagtaactcaatttaaaagtgggcaaaggccttgaatagacatttcttcaaagaggatatacaaatggccaaataagcacatgaaaagatgctcaatatcactaacattagataaatgaaaatcaaaaccacaatgaaatatcgcctgacatccattaggatggctacaatargaaaaacaaagtgtcgacaagggtgtagagaaatcgaaaacttaatgtaaagttggtgagaatgtaaaatggtgtggccactatgtaaaccagtatggtcattcctcaaaaaattaaagatagaactatcataggatccagcagtgccacttctggttacatacccaaaggaa

SEQ ID NO: 754918 - DNA, 626 bp, Homo sapiens
aaagtataaaatttctagaaggaaacataggggaaaacttcatgcattgatttggcatgattttttgcatatggcattaaaagcacaggtgacaaaagcaaaaatagagaattgggactacatcatacttaaaaacttctgtgtatcaaagtacacagtcaacacagtaaaaaggcaacctgccagaatgagagaaaatatttgcaaattatgtatctggtgaggggttaatatccagaatatataaagaacatttaaatctcagctacaacaacaaaataagtaactcaatttaaaagtgggcaaaggccttgaatagacatttcttcaaagaggatatacaaatggccaaataagcacatgaaaagatgctcartatcactaacattagataaatgaaaatcaaaaccacaatgaaatatcgcctgacatccattaggatggctacaataagaaaaacaaagtgtcgacaagggtgtagagaaatcgaaaacttaatgtaaagttggtgagaatgtaaaatggtgtggccactatgtaaaccagtatggtcattcctcaaaaaattaaagatagaactatcataggatccagcagtgccacttctggttacatacccaaaggaa

SEQ ID NO: 754919 - DNA, 571 bp, Homo sapiens
actggcacacacatgtacaatacacatacaggtgtgtatatacatgcacacacatacatacacatgcacatacatacatacatacacaccacacacacatacatatttaagagcttcctttgtgccaggcactgtgytaagtatttatatacaatatcctgattaattttgacaccttcccatggggtaggtacctttattctccacatattacatgtcaatattacatatgaatgaactcatccaagttcacacagctagtacaacagctgagccacagttaactcatgctttatctaacagcaaagttgtataactcacccctctatttgctagctgtgtgatttctgatgagtcacttaactgttctgaagttcagtgtcctcatctataaaacggcagtaacaaagcctacaaaatctgcttccatattgtgttgagaattaaatgaatttatgtgtatatttaccacacacaaagatatatttctcttctttacctcagttttggttggcttttggtaaaatgcttattatgactgggttattgtaaaaattaaaagaggaaacat

SEQ ID NO: 754920 - DNA, 571 bp, Homo sapiens
actggcacacacatgtacaatacacatacaggtgtgtatatacatgcacacacatacatacacatgcacatacatacatacatacacaccacacacacatacatatttaagagcttcctttgtgccaggcactgtgctaagtatttatatacamtatcctgattaattttgacaccttcccatggggtaggtacctttattctccacatattacatgtcaatattacatatgaatgaactcatccaagttcacacagctagtacaacagctgagccacagttaactcatgctttatctaacagcaaagttgtataactcacccctctatttgctagctgtgtgatttctgatgagtcacttaactgttctgaagttcagtgtcctcatctataaaacggcagtaacaaagcctacaaaatctgcttccatattgtgttgagaattaaatgaatttatgtgtatatttaccacacacaaagatatatttctcttctttacctcagttttggttggcttttggtaaaatgcttattatgactgggttattgtaaaaattaaaagaggaaacat

SEQ ID NO: 754921 - DNA, 571 bp, Homo sapiens
actggcacacacatgtacaatacacatacaggtgtgtatatacatgcacacacatacatacacatgcacatacatacatacatacacaccacacacacatacatatttaagagcttcctttgtgccaggcactgtgctaagtatttatatacaatatcytgattaattttgacaccttcccatggggtaggtacctttattctccacatattacatgtcaatattacatatgaatgaactcatccaagttcacacagctagtacaacagctgagccacagttaactcatgctttatctaacagcaaagttgtataactcacccctctatttgctagctgtgtgatttctgatgagtcacttaactgttctgaagttcagtgtcctcatctataaaacggcagtaacaaagcctacaaaatctgcttccatattgtgttgagaattaaatgaatttatgtgtatatttaccacacacaaagatatatttctcttctttacctcagttttggttggcttttggtaaaatgcttattatgactgggttattgtaaaaattaaaagaggaaacat

SEQ ID NO: 754922 - DNA, 571 bp, Homo sapiens
actggcacacacatgtacaatacacatacaggtgtgtatatacatgcacacacatacatacacatgcacatacatacatacatacacaccacacacacatacatatttaagagcttcctttgtgccaggcactgtgctaagtatttatatacaatatcctgattaattttgacaccttcccatggggtaggtacctttattctccacatattacatgtcaatattacatatgaatgaactcatccaagttcacacagctagtacaacagctgagccacagttaactcatgctttatctaacagcaaagttgtataactcacycctctatttgctagctgtgtgatttctgatgagtcacttaactgttctgaagttcagtgtcctcatctataaaacggcagtaacaaagcctacaaaatctgcttccatattgtgttgagaattaaatgaatttatgtgtatatttaccacacacaaagatatatttctcttctttacctcagttttggttggcttttggtaaaatgcttattatgactgggttattgtaaaaattaaaagaggaaacat

SEQ ID NO: 754923 - DNA, 626 bp, Homo sapiens
aaggccatctcgggagggggattggaagtggaaggaagaccttgtctaaggctgttgcatcccacttccacataaccttagccctgaggttaacataatggggaatgctcctggaagagggcctgggtaggtgtgcttcctcccatctgtagcccacgctgctgccacagcattgcctttaagaattccaagccctgcagctgcaatagctggaatgccacagtttgctaatttccagaataaagagaygagttttacaaagacatctgcatttaaattatccccgtgtatgcttttattaatgtgaattaaatggcttaggagagattcagaaaggaagagttctgtgcttgcatgagaacatgcttatggctctctggcaaggatacagaaagccatgggtctgtgtccggaattagactggacactgcatctcagaagcccctcccacgtctgattttcagcattttatttgcataatgggatgtctgggcttatttaaaacacatgcactgcagtcctttcctgatttgcagaggggttctaaaggcagctttcttttttctctctcccagcacctgtgcataaggaaagagttggtgtggttttctacaatatgatattaa

SEQ ID NO: 754924 - DNA, 633 bp, Homo sapiens
gggtattctttatactgcagtctaaaatagatgtatgtcattcggtttaatgcttagtattcaacaagtatgaagcaatggcaataacctacccaaggtcctttgtggacccccagcactcttccaggagggtaacatcacctccacttgtcacagtctctaccaaaaacacacaggtcctaagaaggctccatgcctttcgtgtgtgatcactatgttaaacccaagggtcttctatctttcgtcctggggtaagggttgaaaggcaaaatttaaaggcctcttcttcttgacaaagaagtctacttctccagttatcaaaaatcaatagcatgacttcttgctagcaagtggggaaagatgcattccagaatatcaaggcagggcccgaagtccattatttatgtagatcatgcgctcagtaatattacccacyaaatattaaattgctattaaatattactgcctaagtaattatagtaataaatttcttataaagcaaagtttttggaaagggataataagtgttcaagaatcataccaagcataataaatatagtcccaaattttttcaactctattccttaaatgtatgccctcaacttcatttattcattcatatttattgagcgt

SEQ ID NO: 754925 - DNA, 558 bp, Homo sapiens
tgcttgtgatttttgcacattgattttgtatcctgagactttgctgaagttgattctcagcttaaggagatgttgggctgagacaatgggattttctaaatatacaatcatgtcatctgcaaacagagacaatttgacatcctcttttcctcattgaataccctttatttctttctcttacctgattgccctagccagaatttccaacactatgttgaataggaggggtgagaaagggcatccttgtcttgtgccggttttctaagggaacacttccagtttttgcccattcagtgtgatattgctgtggatttctcctaaatagctcttattrttttaggatacgttgctggatttggtttgccagcactttattgaggatttttgcatcaatgttcatcagagatattggcctaaaattctctttttttgttgtgtctctaccatgctttggtatcaggatgaggctagcctcataaaatgagttagggaggattccctttttttctattgattgagatagtttcagaaggaatggtaccagctcctctttgtacc

SEQ ID NO: 754926 - DNA, 558 bp, Homo sapiens
tgcttgtgatttttgcacattgattttgtatcctgagactttgctgaagttgattctcagcttaaggagatgttgggctgagacaatgggattttctaaatatacaatcatgtcatctgcaaacagagacaatttgacatcctcttttcctcattgaataccctttatttctttctcttacctgattgccctagccagaatttccaacactatgttgaataggaggggtgagaaagggcatccttgtcttgtgccggttttctaagggaacacttccagtttttgcccattcagtgtgatattgctgtggatttctcctaaatagctcttattattttrggatacgttgctggatttggtttgccagcactttattgaggatttttgcatcaatgttcatcagagatattggcctaaaattctctttttttgttgtgtctctaccatgctttggtatcaggatgaggctagcctcataaaatgagttagggaggattccctttttttctattgattgagatagtttcagaaggaatggtaccagctcctctttgtacc

SEQ ID NO: 754927 - DNA, 458 bp, Homo sapiens
accttcatttatgagagccccactttttttttggttgctgttgttgtttgttttcttttctaatgtcagtctttgtgtgcataaacttgtatttcattcagagaaaaaaatctcttctaatttcaaggggatagaggtgaaaacaaaatgaaacggaaagctgttcagataacccaggaggattttaagaccccyttgttataacaatccttttatgtttgaaatatttattgggcttcttcctggtcacgattggaagggaaacctgaattggtgccctctaagctgcttgggcggacagaagagtacatgtttacaagtcaagatggtgcttgatcttggaacgacaggaaatgattttgcaaatccagataaactattttatcctagaaagcatatgtgccaaacacagtttaaagtaaacacacaaggatccttgtgttgtaccccatgggtag

SEQ ID NO: 754928 - DNA, 492 bp, Homo sapiens
gaatcctacaaagtactttaaattctccttcttaactggtttgccattcaagtcaataaatatttaccaaaaaatgaccacgtttctggtccactgggggcagttggggtacgaagatgaacaagtcctgatccctgtctttaaggagctaataatgcagagggaaaacagaagtgtatacaaataactgctataaaatgtgcctaaatgaggctttatgaaraattgccatttgaactgaaccttgaaggattatttagtggctgcaagaagcagatatgaactctggctaattgaagagaaaacaaaattccaacaacacacccaccaccaagggggacatctgttgggattgtggagatagctcctgaattgaagtaaaagctgtacctttaagaaacatgttatagattgatgtactagcgattgatgccaatgtgtttttcagagtatggtctataaggatgagtcaactccagtgcttttgggttg

SEQ ID NO: 754929 - DNA, 516 bp, Homo sapiens
aattaaattattataatatttacatagtgctatatatcccccagagaaacatatatccaagtttagagaacatagattataaggtggccaaatgcaatgtatatgcaatgatagaaggggtccaaggtcaagtggtaagagtgaccaactcttcaggagctggtgggcaaggtcagagcaggcttcaccaaagttataaaggatgattgggagtttagtagatgaacaataggtgtttagatctgtttggctcgggaatagctagtgttttaacagctaattastaccatgttgggtatttaaatcaaacattcagtttccagggccaaaaagctaagcctaccccaatccatttgcctccacttcctcctcccacctcatgggcctgatgcattgggtaaacaagagcaagatagggcagatgggtctttcagtgtctcaaactgtattgagttaaatctatccccttcctttcaacagagccctctttcttccattcacttacctgtctagtca

SEQ ID NO: 754930 - DNA, 434 bp, Homo sapiens
ttgagccaggagtttaagaccaccctgggcaacatagtgacaccctgtctctgcaaaaaaaaaaaaaaaaaaaaaaaattgaaaaattgaaaaattagctgagtgtggtggagcacacctgtagtcccagctatcagggggtgggagtsggggtgaggcaggaggattgctcttgccgtggaggtctaggctgcagtgcactatgatcacgccactgctttccagcctgggcaacagagcaagaccctgtctctaaaaataaaaaataaaataataaaatgtcatcatttcttcttgaataaaagatgcatattagaaagataattcaaaaggaagtgtagaaaatggcctggatagaggagctatggatggaggatgactactgggagacggataacaatagtccacgcaagatataggaagaaggttgatgt

SEQ ID NO: 754931 - DNA, 434 bp, Homo sapiens
ttgagccaggagtttaagaccaccctgggcaacatagtgacaccctgtctctgcaaaaaaaaaaaaaaaaaaaaaaaattgaaaaattgaaaaattagctgagtgtggtggagcacacctgtagtcccagctatcagggggtgggagtgggggtgaggcrggaggattgctcttgccgtggaggtctaggctgcagtgcactatgatcacgccactgctttccagcctgggcaacagagcaagaccctgtctctaaaaataaaaaataaaataataaaatgtcatcatttcttcttgaataaaagatgcatattagaaagataattcaaaaggaagtgtagaaaatggcctggatagaggagctatggatggaggatgactactgggagacggataacaatagtccacgcaagatataggaagaaggttgatgt

SEQ ID NO: 754932 - DNA, 371 bp, Homo sapiens
ctgctgtgtagggtgtaaatatttaatttaatccacatccacttaggcctgcctggtgtttgtttttcatttatatttcactgtactacagaatgtcaaattcatctgccaattctctccattcagttaagggagaaaaaaagcaaaattgtttgttggtctaktatagatatcaaatgttgagatgatcaactacatttttcttttttatctacttggtttagaattgtatacatgtcgtccttccaccttaataatagattagggtattttttttctctccaccctttcacttttcagccacctccttcttttactttgggttcaagctcaagagttggttaaagtgaaagttgcagtactccaccagt

SEQ ID NO: 754933 - DNA, 625 bp, Homo sapiens
gcaagattctttgactggtctggcacactaaaaacaagccgattaaacagagaaacatgattccaaaatgtactacagtggagcccccaacagacttaatccaagtcgtggggtttagtccagaaagactttctgccacctgatctaacgcatcagctccaggcacaatgggtaaatgagcttgagaggcttcaaaaatttgtttctttaatttagttatgtccaaggataaattatcttccctacccagaaggtgtcctttgaccatttcccatgaatgatcagtcttgttgtaggaatatggtgtgacacagaaatcagaagtattccagtcacactgcatttgcatgtgatattcaagactcattmgccgatctccaagccaaataacagaatgtcttaaatcattaatttgattagctaatttttgatcactgccctgttgagaattccacatttgggtggaattggcttgccaatcattaacaaaatgagtcatttgaatagattggtgtaatgccactccagcagtggtggccagtgcagtgactgtaattaggcccatggtcacagtcattaaagtgaaaacaaatctcttagatcttctgagaattcattgtaatat

SEQ ID NO: 754934 - DNA, 400 bp, Homo sapiens
tgagactatcctgagcaacatggcaaaacctcatctctacaaaaaaatacaacaattagctgggtgtggtggcatgcacctgtagtcccagctacttgggaggctgaggtaagaggatggcttgagtctggggagccagtgagccaagaaggtaccactgcactccagcctgggcaatagagccagaccttgtctcaaaaataaagaaatgtaaggtagtatttggttttcaataatttaacatcacaagagaawgtttaaaatataatatgtgtacacaaatatgtaaattaaaatcttccaggatgatctgaaaacactatggaaaagagaagagagaaattaactgacaattgggtattcactaaacaattgaaagaacgaatgaaaggaatctatt

SEQ ID NO: 754935 - DNA, 577 bp, Homo sapiens
attcctatgacttcagttaccatttatataaacgactactccaacttcctatatttaggcagacttctcctattcttggtgcatacagccaacctacttaacatcaccatttcagtgtttcagaagcattgcaaatttaacatgtccaaaatagaactcatcaccttttttacccccacgcccctatcaccacccaagaaaagtttgcccttcccacagagttccttagctcagtgaatgacattaccaatccacccagttgcttgtgccaaaattatccttgatatttccctcactctgactccccacatctagttcatcaccaaaaacctcctaaaatagttttrgagtctacctcctttcttcttactgccatcatcttagttcaagcagctacccttttttcatctggattggagcaatagctgccttaccagtctctcattattaactctcagtctctgcaatccattttccacatggcagcctgagtgatctcaaaatatgtcgaatcatgctacggtgcattataaggagtttcagaactccttataatggcttctattatttaggatga

SEQ ID NO: 754936 - DNA, 616 bp, Homo sapiens
attcttatgtagggcaaacttacctgttcttctttaggatttaagactttcgttttatgcttcaaaatgcccttcacctctatctatattcactgtattttcttttaatgtcagtttcaactttttacatttaaatgcaaaaataatctggaatttatctatttgatttaggaattgaggtgggggttcaactaatctcccccaacaatgcccagatggctaaccagttatcccaatagttaagtttgagatgtctgttagaaatccaaatggaactaggtaggtattacgagtctggattctaggaaagagttccagctggagatatgacgatgggagttgaaagtaaatagatagtatttaaaccaaggagcctggatgacatcatcaaaagagagagtataggtaaggagaggagagggcccccactggccttcttsctgttcctcaaacatgtggaaaccattcttgcttcaggtgctttgccaacaatgctctttctctagacattttcaagtctcgctcacttcattgaagcctctcaaatgtcacttcttcagaacaaaggaacaccctgaccacactattcaaatagcatcccttcccctaagcttac

SEQ ID NO: 754937 - DNA, 620 bp, Homo sapiens
catactgttctcgtggtatggaataagtctcacaagatctgatggttttatcagggatctctgcttttgtatcttccacattttctcttgctgccaccatgtaggaagtgcctttcacctcccgccatgattctgaggcctctctagccatttggaactgtaggtccaattaaactgctttttcttcccaatctcaggtatgtctttatcagcagcatgaaaacaaactaatacagtaaattcataccagtagagtggggtgttgctaaaaagataccygaaaatggagaagtgcctttggaactgggtaacaggcagatattggaacagtttgaagggctcagaagaagacagcaaaatgtgaaaaagtttggaacttcctagaaacttgatgaagggctttgcctaaaatgctgatagcaatatggacaataaaattcaggttgagatggtctcagatggagacgaggaacctgttgggaactggagcaaaggtgactcttgttatgtttaaacaaagagactggcagcatttagcccctgccctagaggcttgtgaaactttgaacttgaaaaagatgatttaggctatctgttggaagaaatttctagggagcaaa

SEQ ID NO: 754938 - DNA, 620 bp, Homo sapiens
catactgttctcgtggtatggaataagtctcacaagatctgatggttttatcagggatctctgcttttgtatcttccacattttctcttgctgccaccatgtaggaagtgcctttcacctcccgccatgattctgaggcctctctagccatttggaactgtaggtccaattaaactgctttttcttcccaatctcaggtatgtctttatcagcagcatgaaaacaaactaatacagtaaattcataccagtagagtggggtgttgctaaaaagatacccgaaaatggagaagtgcctttggaactgggtaacaggcagatattggaacagtttgaagggctcagaagaagacagcaaaatgtgaaaaagtttggaacttcctagaaasttgatgaagggctttgcctaaaatgctgatagcaatatggacaataaaattcaggttgagatggtctcagatggagacgaggaacctgttgggaactggagcaaaggtgactcttgttatgtttaaacaaagagactggcagcatttagcccctgccctagaggcttgtgaaactttgaacttgaaaaagatgatttaggctatctgttggaagaaatttctagggagcaaa

SEQ ID NO: 754939 - DNA, 574 bp, Homo sapiens
atttctttttttgttgttgtttctctgttttgagatggagtctagctctgttgcccaggctggagtgtagtggcgtgatctcggctcattaaaacctctgtctcctgagttcaagggattatcctgcctcagcctcctgagtagctgggattacagtcgcctaccaccacgcccagctaatttttgcatttttagtacagacagggtttcaccatgttggccaggctggtctcaaactcctgacctcaggcaatccacccayatcggcctcccaaagtgctgggaatacaagcattagccaccacaccaggctgtgaatttctttatatgctttttggccacatatatttgtattttgaaaagtgtctgtttatgtgtttatgtcctttgcccactttttaatggagttgtttgttttttgcttattaatttgtttcttatagattctggatgttagacctctgtcagatgcatagtttgcaaatatattctcttattctttgggttgtctatttactctgtcaatagtttgtttgttttttttttcctgtgcagaagctctttagtttaatta

SEQ ID NO: 754940 - DNA, 570 bp, Homo sapiens
tagacatggggtacacaaacagcctgatagttaaaattttgtctgcatgtgaatctcctctggcttccttctctgccaggaaaatttttcctgttgtcagtcaactgatcctaatatcttcttggaacagagcaaacattttmaagtgcagagtaaaagtcctcccccagccctagggagaaaactttttttttccttgagctgttgatgtctttaagagaaatgactttagttggttcagtcagatgatagaggacacagttaactccatataaggaaaatgtttgaatgccagtaccattgatttcaagtaaggtttatgtgggtaacattgtttaagaagataatctgagtcataaattgcataaggggtaactccctcttaagcaacagcaaaagagtagttttgtagttttgaactttgttttgaaaaaatcctatattaataaacattttgaaatatgctgtctacttaggtaggaatgtggacctcctgaccatggactatatggcttttaattaactgctgtttccaattctttttagagtttcagtcagaattagttattc

SEQ ID NO: 754941 - DNA, 539 bp, Homo sapiens
ttcttttaagtgctttacaaatgttaactcattttatccacataacaaacccctgagaaggtatttcctgcccattttaaagtggcagtaattaagaatagaccatttaagtgtcttgctcaaggttatactgacatagctgttctgtggcagagttagagtctgttcgcaggcagtctggttttagatcctgcacttaaagcatctggcacttcaccgagcctatgacatccctgctgtagtagggcctacattgcaacaattacatgtggcaagatctgcacagacttgcgttcaagaccaatgcagagctatagacttcttgaatagctgcaggaagctaaaatacgtattttattttattatgaytatttttttgagacagagtttcactcttgttgcccaagctggaatgcagtggcgcaatcttgactcactgcaacctctgcctctcgggttcaagtgattctcctgcctcaggctcccgagtagctgggattataggcgcccgccaccatgcctggctaattttgtatttt

SEQ ID NO: 754942 - DNA, 516 bp, Homo sapiens
gcacatgtaccctagaagttaaagtataataaaaaaaattaaaaaagaagacttataatggcaaacaggcctatgaaaaggtgctcagcttcattgatcatcatagaaatgcagatcaaaactaaaatgagatatcattttaccccascaaaaaatggcttatatccaaaagacaggcaataacaaatacttgcgagaatgtggagaaaagggaacccttgtaaactgttggtgggaatgtaaattagtacaattattatggagaacagtttggaactgcctcaaaaaactaaaaatggagctactatatgaaaactataaaattccactgctgggtgtatacccaaaagaaaagaaatcagtatatcaaagagatacctgcactcccatattttttatgtacagcagtgttcacaatagccaaggtttggaagcaaccttccaaagctgttgatgtgtccatcctcagatgaatggatacagaaaatgtggtacatacacacaatggaatactat

SEQ ID NO: 754943 - DNA, 516 bp, Homo sapiens
catccctcccctcagaccagcgtgcaatttaaaactcatgaactgtttatttctggaactttctatgtaatatattcagactgtagttgactgcagttgaactcaaacatcaggaagtgaaactgcaaaaaagtgggaagggacttatcgtacttgaacccatcaggtcacagcttctcactttctccgcctgcacactttccttcatttggctttctggacaccgttctctcctgattgttctactatactggccacgccttttcagcctccttcactgattcttattcccacagttttaatgttgccccagggctcagcctttgttctttcttaatctttctagactcactcccttggtgaacaacactstagtctcgaggctttaagtgcaggttatatgctgacatctcctatacttacatttccagttcagatctctctttcccttcttaacttcagattcacatatgaaattatctactcgacatttccactagattgtgtaaacgggta

SEQ ID NO: 754944 - DNA, 582 bp, Homo sapiens
gagacattacaactgatttcacagaaattcaaagtatcattagtgctactatgagcaagtagagaccaagtaaactggaacatctagaagaaagggacaaattcttagacacatacaacctaccaagatttaaccatgaggaaatccgaaactggaacaaatcaataacaagtaatgagatcaaagccgtgataaaaagtcttcctgtaaagaaaagcctaggacccaatagcttcactgctgaattctaccaawcatttaaagaagaagtaatatcaatcctattcaaactcttccaaaaagtaaaggagtagacaatgcttcctaacaaattctacaaggcaattattaccctgatatcaaaacaagacaaaaccacatcaaacaaacaaacccaactacaggccaatatctctgatgaatattgatgcaaaaatcatcaccagaatactagcaaactgaattcaacaataaatttaaaagattattcattctgaacaagtgggatttatctctgtgatgcaaggatggctcagcatatgcacatcaatcattgtgatacatcatattgacaaaatgaag

SEQ ID NO: 754945 - DNA, 490 bp, Homo sapiens
tggtgaagccagggcagttaggacatccttcacctgagtgacatacactgtacctattaagtaattcctcatcatcccattccctcactcttccaagtcaaacttccaagtcaaggatgggagctttgagtcaggccacctggatacagagatcaatcatgtggacaatcaatcaatccgctacataagggtgccaaatataaattctgaatactgaggcttgggtgagcttmgctggttggcaacgctctatgtagactgtcacatgaggaaactgggagactgatgtgctctaactccatgggagggagacaatgagagctgtgtctggtacttccgcagcctcggccctacgtacatcttcctttggctgcatttgatctgtatcctttccccgcaataaaccataacagtgaggatcacagtttcagtgagctctgtgagtccctgtagcaaattattgaaactgatgatggtttcgggaatccct

SEQ ID NO: 754946 - DNA, 631 bp, Homo sapiens
gttcagttggcatcatcctgacttcggcccagtggtggggggttaactgtaactacccctaagcgggaggattctgcagctggatctctacagcagtttgccatggttactacaggactgaacaaagggggacgaacgcagaaatgaaaacttaaaacaaaagtaactattttaaaggaaggagccattggaagaagaagagggctcccagctcctagtgatcaagagcagccacttgagcctctacagccctttgtatttattggacagaaagagcagggagcaggaggcaaccgttggtcagctgcttaattgatcacagggtcacattattgctaacaggcttcagatgtgcctaattacaagmaacactgcacttggggcatgactgccctcagcattccttctgggcggcagacgcagcttgtcagtttgccaatattctgcatttatgagaacagtttaatgtttactcatataacctccagtggtatacagagttgatcacgaccctcactcttttggcctgcaacagatctctctgtctggtttgttttaacatttctcagcatgcacataattggataaatgagcactgttcacagaagtgcctggtgggaaaaggtagaaa

SEQ ID NO: 754947 - DNA, 536 bp, Homo sapiens
gtctgtgtcatatggacctgcctctatgtggagagatgtctgagagcctgagactggataattctgtctagtttcagggagcactgttggctgtgtgtgtgtgtgtgtgtgcaacattcttcaatatcagcttattcagtaaataaaggcaggattttatccttcccccaacccccctattctcactccatttgttttatttccaagttagttcagaacttatgcacacaagacagatgctatttactgagcctatcaaaacaccccaacatctgctgcatgaattaatgagtttgaaaaagagacamtgaataaaatgtggaaggccacaacatatgagaagtaattgaggcttcttatgtgccttgagaggggaaattgaactctggagttgcttcattaaaacaaattgaggattcagctgatgacatgcacgcctttctctttttgaacaaaggcctcagcaacggcgcacacctcagaaagctgatcgtcttatcaaagatttgggccatacaaaacactgagcaagcttc

SEQ ID NO: 754948 - DNA, 536 bp, Homo sapiens
gtctgtgtcatatggacctgcctctatgtggagagatgtctgagagcctgagactggataattctgtctagtttcagggagcactgttggctgtgtgtgtgtgtgtgtgtgcaacattcttcaatatcagcttattcagtaaataaaggcaggattttatccttcccccaacccccctattctcactccatttgttttatttccaagttagttcagaacttatgcacacaagacagatgctatttactgagcctatcaaaacaccccaacatctgctgcatgaattaatgagtttgaaaaagagacactgaataaaatgtggaaggccacaacatakgagaagtaattgaggcttcttatgtgccttgagaggggaaattgaactctggagttgcttcattaaaacaaattgaggattcagctgatgacatgcacgcctttctctttttgaacaaaggcctcagcaacggcgcacacctcagaaagctgatcgtcttatcaaagatttgggccatacaaaacactgagcaagcttc

SEQ ID NO: 754949 - DNA, 582 bp, Homo sapiens
cctggcttagacttgggagggtgtatgtgtccaggaaattatccatttcttctacattttctagtttatttgtgttgcggtgtttatggtattctctgatggtagtttgtatttcagtgggatcagtggtgatatcccctatatcatattttattgtttctatttgattcttctctcttttcttctttattagtatggctcacagtctatctattttgttgattttttcaaacaaaaaaaacagctcctggattcactgatgttttgaargggttttcatgtctctgtctccttcagttatgctctgatcttagttatttcatgtcttctgctaggttttgaatttgtttgctgttgcttctctagttcttttacttttgatgttaatgtgtctattttagatgtttcctgctttttcttgtgggcatttagtgctataaatttccctctacacactgctttaaatgtgtctgagagattctggtatgttgtgtctttgttctcactggtttccaagatgcaaaatgatttccattattttgcatttgaggagtgttttacttccaattatgtggtcagttt

SEQ ID NO: 754950 - DNA, 596 bp, Homo sapiens
ataaaatcatattttcaaggagtgcagcaaaaaaaatgactatctctaatatgggaatacattgaggatgagaataaagaaaagaactgtagtaaaacaaacatttttgtattgttttcccaaagctatttagtaattttccccctattttagaggcagaatcttggtatgttgtctagactggacttaaactcttgggcaaaagggagccttcacctcacctcccaagtagctgggacttcagatgtgcaccactgtgccagacctaggtttttatttggtaatccttgatgggacacaaggagaaagatgaactgattgtcttggagttgttcaatgttaagtgtaggttgagacgaaaacttttactggaatgaaatgactcttttggttgaaaataagattgtctcagaacttaagaaatgtcrctagaaaagggcagccaagttaaacaggactttctcaatttctttgctaaaactctaacttatttggaattcaactttgacttcagaagttcaaatgacctctgtgtttaaaaccatattctctgacaaagaaaggtgtaacttatgatgacatccaatatgatttaa

SEQ ID NO: 754951 - DNA, 628 bp, Homo sapiens
ttctccatagaatttactaaataattctccaattttaaattcatccatgagtctagaacttctaaaagtctgaagtaactaaaagaatacaaattagtacatcaatgtagtgcgggaatcaagaaaaaaaacacaatacaaattagcattctctctaaagagggaaataacgggattcctctatctcagtgcatctgtccacagcaaaggttcagaattaggtgtgtctcaaggatttacacttggtctcacaggattcacatccacccagcttatctgggaattagaggttgagatgggtatggtggaagaacatcaggggaagaatgctctaggtgtgttacsttcccaagaaaccaacaacatgactagaacctttctcccagaagcctacaaaaccaaggagcaaccagaaacaaaggaattctaaaatacaaatacaaaaaaaacagaaacaggtcacagtgaccccaacaaccacttaactgcaacgtatcaactgattcccgccagacagtggctcacgcctgtaatcctagcactttgggaggcccaagcaggcggattacgaggtcaggagttcgagaccagtgtgaccaacacagtaaaaccccgtctctactaaaaa

SEQ ID NO: 754952 - DNA, 658 bp, Homo sapiens
tctagaagctgcaaaaggcaaggaaacagatcctcttctagagcctcccaaaggaatgctatcatgccaacaccttgattttagcccaatgaggccgattttggacttctgatctccagaatctaagatattaaatttgtgttgtttaaagtcatcaagtttgtggtatattgttattttagtaatttgttacatttggaaactaagatatcaataaatataccaagttaaagaatctctctaggattactactgagattawcattctggagtctagaatgtacaagaccagatagggagtacaatttagacaatgctatcttttggcccattacttcatctgggtgaaaacagaataatggcatcgacatataatagtttttattttttaatgtagtttttcaaatactattcttggagaaaattgagaaaacaattgccagaagcttctctttaagcaaccttaagtgtgtatgacagtgttgaattatctcatttgttaaaagtaacatttctaacccaatccatgatatttggtgtttgtcatggactactggagtttctaattccacataagtttgaaaagcttgcatcacttgcctttagactgctgtcagacctaggatcaataattgttaaccacatttggtaggggaca

SEQ ID NO: 754953 - DNA, 601 bp, Homo sapiens
aacagaattaatctaataaataaattaataaatggatgatgaaagaaatgagaagccaatcagagaagaagtgagacaagacagagatgattaaagtaggaatttaggatgactatccataggccagagggactgagagaagagttggaattaccaaagctctgagayagccaggtgggacgaagtccccagaaaacctccaagcagcctgctcattggggtggagccttgggaagtttgagccatttgcagcggagaggagcctggctactcctcttcccatggggaacctggggttcggggccgcgcgggaagcgctctagcagggaatctggcctagcagagtccctgtttctcccttttcttgcttttcacccaataaaaccctgtcttactcaccattcaaattgtctgcaagcttgaattttcctggccatgggacaaagaatcccgtctttagctgagctaaggaaaagtcctgcaacatttttggtgtgcaatgttgggactcgagaagcggtgagtaaaatggggactcaaaacctctcgctgttgctcttaagccttttcatcctcggacttctagggtgaggggaaccat

SEQ ID NO: 754954 - DNA, 523 bp, Homo sapiens
agaggaagcgggaaaatgaaagatattcatttcttgagatccaagatggacctaaaaccatttttttaatttaatgactgtcactaaaagataattctaaagaaatatattaagcatctattatgaatcagaacatttggtaggtgttgaggacactggtaaaatgtcatacatgtgctttttagaacttactggtgttaaagtgtggtgaacaagagagcaktgaagagatagaaattaattgtaaaagcaaatatttaattttgatacagtttcaaatggtacttctgcctagccattggtcctatgccattccacctcatttatctacactggtgtaatctagaaatgctcattttacttctttgagtactaattaatgttcagccattaaataaagctggtaagtatccaaaaagactaggaagggatagcgagtgagaagaacagttatatttccttttagtcagtaaaatgttgggccagaactcagacctggtaagccagcttcccatgacacttt

SEQ ID NO: 754955 - DNA, 494 bp, Homo sapiens
ttagctcatccgttattgctagcattagtgtattttatgtgtggcccaagacaattcttcttcttccattgtggcccagggaagccaaaagattggacacccctaacctaacagaaagacaaaactacaaaagtttgacaacacactgtattagggaagctgaagagaaacagacatgctcttgcattgctgttcrgagtgcggaatgatggaacccatacagaaggcactttggcaaaatctggaaaaaattacaaatactctttgacccagcaatctcaccatagattttatcacctatgaatgacatatgtacatattcattgcagaatatttgtaaaagcaaaagactgtaaataacccatatctaccaatccagtactagttaaattaatctatacacccactggaatactaagtagctgtagaacaagaatgaggaaattctctatataataagagtcagaacaatccccaggatatattctaagtga

SEQ ID NO: 754956 - DNA, 657 bp, Homo sapiens
cttcactcactgcatcctcttcgtgtgtatctgttagaaaatatctaaatcatcatgttactgaactgcgtattggggcagaagcactacacattctccttgcagccaagtgaccctaatccagttatgatacgtgtctctagtctcttattctatgcctaggcaaatatcaatcacggatcaatgctgctgagcacagcctcatagcattcttttctgctgttccagaaagccagcactaattgactggaactggcacttctctctgcagactgatttgtttttggtgttcatggccatcacagacctcaagtttacataactggggcattgtgagccaattttagatttcaagggaaaaaatatctaagtggctcagctcttatcaagcatccacccaatttwaatcgattctggttaggagtgtgggatgggtacagttagcatgagctacataatttgcagggcccagtgcaaaatgaaaatgcagggtttcttgtccaaaagaagcaggaaaaaggctttcttctttcttccacagtcttgacctgttttggtgtgagtttttatctgctacctaatgtcatactccatgaagcatagaatacttatggggcaagtacagaccctcacaggcaccagggatccttccctgtg

SEQ ID NO: 754957 - DNA, 584 bp, Homo sapiens
attgctcacaaggggtactctaggttagttgaccttaggaatgttgaggtcagtaaagtttttaagaggctcatgaaatatgttgatccttccctaagaaaactccctacacatacatataaatacagttgtgtatttgatccttccctaagaaaaatccctacacatacatataaatacacatacatataaatttcagttcagttgatatatcctctgatttccactcattaaccctagattaagcatatccactctggaaagatttttgcatttgggttacatttttaggtccttagaggtgtgatagtccacgttttaccacgccacatttcctctacctaagatgcacttatttattccctccattctcatattaatgcttctaaaattgggatgagtttaccaatcaaygtgtacacttaatgcagttaattttttgtttgttttctaaaaagcttttattaaatcaatggtgcagtcacacaatcaatagcatctttgatgtaagaaaacacagtgcagcatttattggatgatgtatttgtcattgctaaaaataaaagtaaaaacaagatgtctgc

SEQ ID NO: 754958 - DNA, 601 bp, Homo sapiens
caccaagagattatatcccacacctggctcggagggtcctacgcccactgagtctcgctcattgctagcacagcaatccgagatcaaactgcaaggcagcagcgaggctgggggaggggtgcccgcaattgctgagttagttgtttgattaggtaaacaaagyggccggccgggaagctcaaactgggtgaagcccaccacagctcaaggaggcctgcctgcctctgtatgctccacctctgggggcagggcacagacaaacaaaaagacagcagtaacctctgcagacttaaatgtccctgtctgacagctttgaagagagcagtggttctcccagcacacagcttgagatctgagaacaggcagactgcctcctcaagtgggtccctgacccccgagtagcctaactgggaggcaccccccagtaggggcagactgacacctcacacggccgggtactcctctgagacaaaacttccaggggaaccatcaggcaacagcaactgcggttcaccaatatctgctgttctgcagccaccgctgctgatacccaggcaaacagggtctggagtggacctctagcaaactccaacagacctac

SEQ ID NO: 754959 - DNA, 615 bp, Homo sapiens
ctagatatctgtctgtttttttgttttctctatatcttgctgcttgaaaattctatccttattcctagtgcttggcatctagtacttgaaacttgacagaaaattacacatacccactcatttgaaaaaaaaaaatagacacttaaacccatttgaaaggcagaggaactgaggcccacaagttaaatgacttacccagaaactgcctgtaactccggactaatataaaagtgctgacactttaccattatggagaccaatcatgaggtctcccacactagaactgactgctagagcaagcatattaaccatacttccttggcatacttcttccagatcaaataaggaggcattctctttggcwtagtgattttaggggttgtcacatttcctaaacagctgttgcagtggttgacttatagctggaattcatttgataaacactccacttacttctttcattatctccatctaatgccattgggaggggttacatatgaaatctctttaaccactatcccattggcataaactaaattttcagtcccttcaggaataggagggaggagagagaacatgaggataggttatgaggggaaggagggctcagtaata

SEQ ID NO: 754960 - DNA, 624 bp, Homo sapiens
aaaaacattgcttccacaaaatgtttggcttctgagcagttcttatacttcagaaattcttattcattactctataagtttttcagcaactaatccctttatgctgctgcaacagccactaacaactatcatttgaaagtttactacatctctcagcacatgtttaagttccttagataaattatccaaatcaataacatgttgaatcagataatattattatctttattttacaaaagaagaaactaaacgcatagaagttttaaaacttgcccaaggtcatgctcctggtaagtggtttgaaccccagtctgtctggttccagaatcagatctcttaacrtttaaattaaattgatctgtgtttgtactaaatagttggtagtatgtttgagatggcggagtattagccacactttcagatgataacaccggctcatacaattgatgccattcatccagtatcacagagtactatgggaggaagtagattttcagagtcttaatacaacattgctttccttagagtacagcagcttaataaatattcatttaaggaacatggaagcagattttttcagataagagaggcccttcttcatcattagattttattatatcgatt

SEQ ID NO: 754961 - DNA, 646 bp, Homo sapiens
aggtgaccctgataccccctcaaggctgagaagctttgcctaaacagtgccattcacgggaggcatccaggttatacccaagcccagggaatcatcatctctgcacatggactcagggactagaaattttaaaactctcctgagtttcccaaaggcagattgagaacccctgctttaaatttatcaccgttaaaattatcaccattccccactgaagctagacgcactctcagcccctagctgcccatgcagggaccactggaggaagggaaggtgtttgaggactagacgtatggttcttcaactgtggctgcacataagaatttattctgcaaattagaatttgtaagcaccctgggaatgcttacaaaagtccgctkcctgggccccatgcccagagattctgattcaattgttcggaggtgggtggggatgaaagcatcagtagatttagaagctcccaagtgactctaatatgtggccagggttgaaaaccgctgggctggacatgagtgagcctcctcctcaatcacttcaccatgccatgatatgggaagggcatgatagtctcctggtcaggaggcttgggatgttgtcaccaattcattcatttattctcatatgccacccactcacagattcacat

SEQ ID NO: 754962 - DNA, 644 bp, Homo sapiens
agagaaagtagaccctctttcaagtatttatcaagcacttttacccagccactgtctgatgtgctggaggtacaaagtcccagccctgacggagctcacactggaataggaggaacagataacacacgagcctgtgatttcaggtactggtcattgctgtgaagaaagataaagcatgttaagcagatagagggtgacagaggacactgcttttcagatggaagtcagaggrgacccctccaaggaggtgacattaagcagagttcaaagaaatgagagggagtggagcacgtaaatcccgggaagcgcattatagccaagtgcagaggccccgaaaagggagcgctgttggcgggctagagggttctcacactttaaggagtacacagccacctgtcttcttcactgctgatgtggactcaggaggtttggggtgagcctgactacgcacttctaacatgctcccagaggatgctcatgctgctggtgcccactttgcacagtgaaatgttagaggagtcaaaaggaggccagtgatgttttaaaatgcactcttcagttttacaaaaatgttctcttttcaccaaatacaatgatgttgacatcctttcaatcaggacttacaaatctacctcattctttta

SEQ ID NO: 754963 - DNA, 600 bp, Homo sapiens
ctgtttgttggttttccttctaacagtcaggatcctcagctgcaggtctgatggagtttgctggaggtccactccagaccctgttttcctgggtatcagcagcagaggctgcagaaaaatgaatattgctgaatagcaaatgtttctgcctgatggttcctctggaagctttgtctcagtggggtacctggccaygtgaggtgtcagtctgcccctactggggagtgcctcccagttgggctactcggaggtcagggacccacttgagaaagcagtctgtgcgttctcagatctcaaactccatgctgggagaaccactactctcttcaaagctgtcagacagggacatttaagtctgcagaggtttctgctgccttttgtttggctatgccctgcccccagaggtggagtctacagaggcaggcaggcctccttgagctgcggtgggctccacccagtttgggcttcctggaggctttgtttacctactcaagcctcagcaatggcgggtgctcctcccccagccttgctgccacctggcatttctatctcagactgctgtgctagcaatgagggaggttccatgggcgtgggaccctc

SEQ ID NO: 754964 - DNA, 600 bp, Homo sapiens
ctgtttgttggttttccttctaacagtcaggatcctcagctgcaggtctgatggagtttgctggaggtccactccagaccctgttttcctgggtatcagcagcagaggctgcagaaaaatgaatattgctgaatagcaaatgtttctgcctgatggttcctctggaagctttgtctcagtggggtacctggccatgtgaggtgtcagtctgcccctactggggagtgcctcccwgttgggctactcggaggtcagggacccacttgagaaagcagtctgtgcgttctcagatctcaaactccatgctgggagaaccactactctcttcaaagctgtcagacagggacatttaagtctgcagaggtttctgctgccttttgtttggctatgccctgcccccagaggtggagtctacagaggcaggcaggcctccttgagctgcggtgggctccacccagtttgggcttcctggaggctttgtttacctactcaagcctcagcaatggcgggtgctcctcccccagccttgctgccacctggcatttctatctcagactgctgtgctagcaatgagggaggttccatgggcgtgggaccctc

SEQ ID NO: 754965 - DNA, 600 bp, Homo sapiens
agaaagtcaaaactagaagggggcttagacattctgtagtctactcccctgagtttaaacaaactgacttccagggagattaatgctttatccaagaatggacaaacagcagaagcaaatatatgttgttaatatgccctgattttctttctttctttctttytttctttttttttttttttttgagatggagtctctctctgttgcccaggctggagcagagtggcgccatcttggctcactgcaagctccgccttccatgttcacgccattctcctgcctcagcctcccaagtagctgggactacaggcacccgccaccacagccagctatttttttttgtattttcagtagagatggggtttcaccatgttagccaggatggtcttgatctcctgacctcgtgatccacccgccttggcctcccaaagtgctgggattacaggcatgaaccaccacgcccggccaatatacccgagttttcaagcagattcctggaaacccagatggcaactttagcatcatcagctaaaatttaatacggggagaattgaatacatgtacagaaatctttcagctctgcttaccactgtggatagg

SEQ ID NO: 754966 - DNA, 600 bp, Homo sapiens
agaaagtcaaaactagaagggggcttagacattctgtagtctactcccctgagtttaaacaaactgacttccagggagattaatgctttatccaagaatggacaaacagcagaagcaaatatatgttgttaatatgccctgattttctttctttctttctttctttctttttttttttttttttgagatggagtctctctctgttgcccaggctggagcagagtggcgccatcttggctcactgcaagctccgccttccatgttcaygccattctcctgcctcagcctcccaagtagctgggactacaggcacccgccaccacagccagctatttttttttgtattttcagtagagatggggtttcaccatgttagccaggatggtcttgatctcctgacctcgtgatccacccgccttggcctcccaaagtgctgggattacaggcatgaaccaccacgcccggccaatatacccgagttttcaagcagattcctggaaacccagatggcaactttagcatcatcagctaaaatttaatacggggagaattgaatacatgtacagaaatctttcagctctgcttaccactgtggatagg

SEQ ID NO: 754967 - DNA, 618 bp, Homo sapiens
gttcaaggggatatttatctaaaaataacaaatctaaaccacaggaaaattcatgtgcccaaagtatgcaaatccctgctgactaataaatcaacaacttatgtcacaaagtccaatagttacaatgaccagaagtgttatacttatggcatcttggataagggaggcactggaggacagaaggtcattcctgcagacagagagccagctactttacaaggagcttcagattctttaagatcagaatgacactgtccaaatccagattcaatcactgtttcatatattagtcttagtgtagaagggacttgaaagcttcttggaaaatgaagatgatcatgcaataacaataacagactttgtggattatcatccaattgccttttggaagctggtgtggtgctttagacattttaacttgtgcagtcgcttagcaggattgwtttttttttttctgagcattgtaccaggtattcaaagattctccatcattatatgtctgaaggtgataaatacattttagtatgcatgttttagggaatataaaactacatctggatctgggacacccttgaacatcctctggaatgtccacacacaaaatgacccaatggtctc

SEQ ID NO: 754968 - DNA, 627 bp, Homo sapiens
gttttctctgaaactaggatttaaggatgtgatgtccagagctgctgcagccatcttgtgagcctgaggggagctagccaacaagcaaaggatggtagaagagaaagatagaaagagccttgtcattgatgctgagtcattagctagaaaaacattggattttctttacctctaagcttcttgttatgtgaaggaaaaaaatctcatcatctttatttaaattattttagtttgttttctatggactttactgaaagcaccctaaatgacacttaggagcttcacaaccagtcacagaagyttgatgacatagaaaagggtagggatgattggagagaatgggaatgaatagaaaaggaaaacaagtggaggagagaggtcagagttgctgggagtcagcatagagctaaagtatagagttaaagcttgggctcaggagttggactgactggagctccaatcctagctgttcattaatctttctcaatttgactttctcctctgtgagatggaattaaaaatagttgctgccttattgagctatgagaattaaatgtgctatgtgatgtaaggtaagcacttagcagagttcccagcctacagtaggtgtcatgaagagttaactct

SEQ ID NO: 754969 - DNA, 627 bp, Homo sapiens
gttttctctgaaactaggatttaaggatgtgatgtccagagctgctgcagccatcttgtgagcctgaggggagctagccaacaagcaaaggatggtagaagagaaagatagaaagagccttgtcattgatgctgagtcattagctagaaaaacattggattttctttacctctaagcttcttgttatgtgaaggaaaaaaatctcatcatctttatttaaattattttagtttgttttctatggactttactgaaagcaccctaaatgacacttaggagcttcacaaccagtcacagaagcttgatgacatagaaaagggtagggatgattggagagaatgggaatgaatagaaaaggaaaacaagtggaggagagaggtcagagttgctgggagtcagcatagagctaaagtatagagttaaagcttgggctcaggagttggactgacyggagctccaatcctagctgttcattaatctttctcaatttgactttctcctctgtgagatggaattaaaaatagttgctgccttattgagctatgagaattaaatgtgctatgtgatgtaaggtaagcacttagcagagttcccagcctacagtaggtgtcatgaagagttaactct

SEQ ID NO: 754970 - DNA, 557 bp, Homo sapiens
atgttctttagattccatgttaggtcaggggggaattttgcctcttattttctgtgagaagaaagcatgcatgcatagacatgaaaactgaagttaagagatgtgcttatgcctgtaatcccagagtgttgagagaccaaggtgggaggatctattgaggccaggtgttggagattaccctggacaacacaggaagaccctgtctctacaaaacacacacacaaacacacacaaaattagctgggcatgatgtcacacacctatagtcccagctatgtgggagctcgaggtaggaggatcacttgagcccagtttgaggctgtagtgaactatgatcgtaacactgcactccagcttgggtgacataatgagacactgactctttaaaaaaaaattaaamgaaggtataccagcaaaggccctaacaggaaacagattacttactcacataggttagttttaggagagttcagtaactataaaactgtacaaagattatgtacaaagttatggccaggattaaccaagaaacgcaaaagcatcatcaaattcacagt

SEQ ID NO: 754971 - DNA, 650 bp, Homo sapiens
ttttctattatcttttatctgagaaaagaaataatcagatgcacaaatgactctgcataatgtcttagcataaatcaaaatcatgatgatgtagcataaatcaaatatagacttctacactatgggcattctaccctaggggcccctgaaagagagtgaaacaaagaaatacttccagcttgcaaatctttaagtartacctctcttcatcaattgatagtcagagaagatgtggcacaaagtaaagatacacataatttttggccagtagctgatgactagttaagtgattagggtctttgaagactggacaaaaatgtttagacttaagtgtgtgtgagagcccctcagtatagacacaaatgcgatgttttgaggtttttgtcaatgttcttcaaagggtggccattatgaaggttataggattatttttctttttgtttttaataatctggtagacaaaatgatcaattaataaatttcactcatttttctttcctaatcacctcggtgattgggcaaagtgttcttgaacaaaatgcttttgttaaatggaggataagttttagatcaatatagtatgttctacactgcaagaatgactggttacctgtgctactgaggatccagtttgccaaaagccaatatct

SEQ ID NO: 754972 - DNA, 595 bp, Homo sapiens
cacctgccccattcccagggccatcatgttttcattaactcagtgctccataaccaaaagcttctgtccaggctgcatttgtcattaaagatcaacaccagcagaaagctctaggccctggaatcacgaagtccagtgtgctgattagcaagcacactagcagagttcctacttctcaagattatctggcaaagactcaaacacaaggaacaagaatcagatactagtactaatctacaaatcaagaactagaacttcaactgaaaggaaaaaagtgcctgattgttagaactagtgctcagtattgaggcagactaagaccaaagccatttgatattcattccaagaatatttccttggaactatttaaatatcyatcattagaaatgactgtaggtttttagttgtctaagccaacagatggtttcaaatacttcttgtatgaggaaggacctaggaccagcagagcctgacagtatattgctattttgcctctatttgttcatctgtaaaataaaaataatatgtcccctgcctacctgaagatatgtggaagtatcgaatgatatgatgtatatgaaagggctatataaaa

SEQ ID NO: 754973 - DNA, 388 bp, Homo sapiens
ccatgtgtacacattattaagctcccacttttaagtgagaatatgcagtatttaactttatgtttctgagttatttcacttaggattgactgctcaaactttcgctcatttttctttcactcattgactgtttgtcctggatggatacttaaatattawctcttcaacacatgtacattcttccctgtggagtatttcttcctgtggttaagcaactctctaaaaggtacccgggccatcatactcatccctattgccccagcaccttccacatacaaacctctctctttggcatccaatggttcatttccaatagacactcagaaaacttgctgtacgagcttatgatctcctcataagccaccagttccaaagactgtcttacccc

SEQ ID NO: 754974 - DNA, 632 bp, Homo sapiens
acccccatagagtggaaaatttgctcaagtttaaatgcttagacagaattgtataagctgaacaaattgagatgtctttggtgttggttattgtttcttctgttaatcttcagtctttttcaattaggacatgaatgagatgaatttttttccttgcaaattgatgcagatggtctgccactgcacgtttcggattttttaagattattaaacaaaaagaagtcagaaggagtcaaatcagcactgtaacgtggatacctaatgataatctaatttattttctaatgataattatatgaaggggtaagataatcatctacattatcttgtctctttatacaatgagttatccatttgtaaactgccgatttatttgaggtattgtccccatcaacttttygtaaagcatcaatgatttcatcattcttccactcaagctttaccataaatttgatgcttgatcttgacttcaatgttagcaaaattcatgttgttgcaatataactcttttcagactgaagttctattcttcttagtgcctcaaactagattctattcagacacggtggaacaaattagtttgaggctgttttggtgcaaaatattttgaaatccatgcatagttttttcat

SEQ ID NO: 754975 - DNA, 520 bp, Homo sapiens
tgtgttaagtattttcattattcccacttgctaggtaagaaacctcacatggagggggttaaaataaaaattttagacaaattaaacaattgaattgaacacagaacaattcaagaattggacaacccccgaacaagaataggttcagtgacttaggcacattggcatggttggagagtatttatgaacagaaaaaggcaagtgatgtacaaaaaaaatgaaaggtccagaaacagtcagattggttactactccatgtttgccttatttgaacatggtttgaataacaatttgctgcctgtgagtgatatgtagttgaagtatggtggctgtgattarctgagacttggcttactgctataacagcaggttacagtcttgtttacatatccagttaagttatagctcagtaggtgcagagaaacctttaggctgaatgtaaaatatgtaagaaagcagctgtaggctaaacttaatttaaaagaggttcccaaggtcacacatcatttaagtggtggaa

SEQ ID NO: 754976 - DNA, 612 bp, Homo sapiens
tacaaacaaatgcctcctgggttagttgatttttgaagggattttcatgtcttttctccttcagttctgctctaatcttggttatttcttgttttctgctagcttcggggcttgttttctcttggcactctagttsttttagttgtgatgttaggaagtctatctgagagctttctggctttttgaagtgagcatttagtgccataaatttacctcttaacactgctttagctgcatcccagagattctggtatgttgtctctttgttcttctcattggtttcaaagaacttcttgatttctgccttaatttcattatttacccaggagtcattcaggaacaggttattcaatgtccatggagttgtgtggttttgagtgagtttcttaattttgaattcttatttgattgtgctgtggcctgagagactgttataatttcagttattttgcatttgatgaggagtaatttacttccaattatgtgatcaattttggaggaactgccatgtggcaaagagaataatgtatattgtgttgttttgtggtggagagttctgtagatacctatcagttccacttgatccagagctgagttcaagtcctgaatatc

SEQ ID NO: 754977 - DNA, 612 bp, Homo sapiens
tacaaacaaatgcctcctgggttagttgatttttgaagggattttcatgtcttttctccttcagttctgctctaatcttggttatttcttgttttctgctagcttcggggcttgttttctcttggcactctagttcttttagttgtgatgttaggaagtctatcygagagctttctggctttttgaagtgagcatttagtgccataaatttacctcttaacactgctttagctgcatcccagagattctggtatgttgtctctttgttcttctcattggtttcaaagaacttcttgatttctgccttaatttcattatttacccaggagtcattcaggaacaggttattcaatgtccatggagttgtgtggttttgagtgagtttcttaattttgaattcttatttgattgtgctgtggcctgagagactgttataatttcagttattttgcatttgatgaggagtaatttacttccaattatgtgatcaattttggaggaactgccatgtggcaaagagaataatgtatattgtgttgttttgtggtggagagttctgtagatacctatcagttccacttgatccagagctgagttcaagtcctgaatatc

SEQ ID NO: 754978 - DNA, 612 bp, Homo sapiens
tacaaacaaatgcctcctgggttagttgatttttgaagggattttcatgtcttttctccttcagttctgctctaatcttggttatttcttgttttctgctagcttcggggcttgttttctcttggcactctagttcttttagttgtgatgttaggaagtctatctgagagctttctggctttttgaagtgagcatttagtgccataaatttacctcttaacactgctttagctgcatcccagagattctggtatgttgtctctttgttcttctcattggtttcaaagaacttcttgatttctgccttaatttcattatttacccaggagtcattcaggaacaggttrttcaatgtccatggagttgtgtggttttgagtgagtttcttaattttgaattcttatttgattgtgctgtggcctgagagactgttataatttcagttattttgcatttgatgaggagtaatttacttccaattatgtgatcaattttggaggaactgccatgtggcaaagagaataatgtatattgtgttgttttgtggtggagagttctgtagatacctatcagttccacttgatccagagctgagttcaagtcctgaatatc

SEQ ID NO: 754979 - DNA, 593 bp, Homo sapiens
ccaatgggctggagactcagggaagagctggtattgcagatgaattctgaaggcagcctgctggataattccttcttgctgagagtgggagaagttcagccttttgttctcctctggcattcaactgaattgtatgaggcccactcacattatggagggcaatctactgtacttaaagtccaccaatgtaatgtaaatgtcattcaaaattaacctcacagaaacatccagaataatgtttgaccaaatacttgggcattgtggcccagcgargttgacataaataattaaccaacatagatggtatatttcactttaaaatatttacagtaatcaattggtcaatcaatcaatcatcacttccttcttcagaggggccctttatgctacctgacatcatttctacatttcctgttcagctctctcttccattctttacaacagctatttcaaaactattttactctcttcaaacttacaaacttctacagttgattaatacttgctcatttcacagaaaatatagataccatgaaattgctcccctgcaccccctcatctcatctcaccattacgaagccaaaaattagacc

SEQ ID NO: 754980 - DNA, 593 bp, Homo sapiens
ccaatgggctggagactcagggaagagctggtattgcagatgaattctgaaggcagcctgctggataattccttcttgctgagagtgggagaagttcagccttttgttctcctctggcattcaactgaattgtatgaggcccactcacattatggagggcaatctactgtacttaaagtccaccaatgtaatgtaaatgtcattcaaaattaacctcacagaaacatccagaataatgtttgaccaaatacttgggcattgtggcccagcgaagttgacataaataattaaccaacatagatggtatatttcactttaaaatatttacagtaatcaattggtcaatcaatcaatcatcacttccttcttcagaggggccctttatgctacctgacatcatttctacatttcctgttcagctctctcttccattcttyacaacagctatttcaaaactattttactctcttcaaacttacaaacttctacagttgattaatacttgctcatttcacagaaaatatagataccatgaaattgctcccctgcaccccctcatctcatctcaccattacgaagccaaaaattagacc

SEQ ID NO: 754981 - DNA, 701 bp, Homo sapiens
ttttctcttgagatgaataaatcaatatatacatttgaactttatgattttgtcaccaacccacaaaacgcattttgtcttctaaccctagctttgaaaagtcagtcacatcactgaacaccattcactaaataataaaggtgaagaataaacaatgaattctacattaataataataaatttcatattgcattacagtctatagaaggtttttaaatatgtactctcatgatcatctgatctacccccaaaatctcagaaggaaaccatagatgaaaaatcataattttaaaatgaaaaaaacataagtctcatagaaggtaagtgttaacaattactggccgtgaaaattagggccacattaaaaactcaagttttctgaatatgtgtcaatcagattgaataagttgacattgcgtaccagcattccatgaccttagcatatgaaaagtttacttctcactcacaccaagtccactctgagtttgggtttatctcctggacttttgcccatttcatcattcagtattmtgggatactggctgagtctcgtttcctcacctccaatataacaaacataatcttccataattactatggcaaggaaagagagaatagagaatgtcacaccagcccttaaatgctactacagagaagtggcacataggacttctgctggttttaatagagaagtcacatta

SEQ ID NO: 754982 - DNA, 625 bp, Homo sapiens
ggtatacattcctctcaattctgtgcttctagaatataaactctgaatgttaagtggtgaattagtgtactccatactcagccaaagcaagcttgttactgtttccaaatcgagcagccctgccttccggctaccaccacttttcctttccacatccacaggttgaataatcctttccggattttttttgggcatttggcaaaattttctccatgcatgtttctcatgattggtaataataataataagaggcaacttgaaagagcactcactgtgttccttgtgctaagttttttacagatcttgcctcatttaattccataacaacccaaagagggctgttatattcccatcttacagctgaggaaacagagacccaaasaggtgaggaaacttgcccaaagttccacagctgttaagtcctagagttgggatgggaagccaggcctgtctgactcgaagccccttaagtcctaagaactcttcttaaaggaatgctttttcttttgaatcccaaagactttgaaaggaagtacttcctattcatatgaatgaatacattgtcattcattcccagcgctcaagctaggacacagtttgataaacctaggttagagttccccat

SEQ ID NO: 754983 - DNA, 627 bp, Homo sapiens
ttttctggtcaaagcaagtttccatcttgaactatcatctctgccatcagctctcgctttgcatcccctccaaactctcaaaggatgaacaattttctccatggagtgtattcaagagaatattccccaggggtcattggcagctgccaaggatgtctttccccaacttttggaaaaacagtaatattggctggtgtaagtgtgtggcctcccaaggtggctgtttgcaaggggaagggctcactggcaggcacagttctgaaggagtgttttggatgaagtccctttgctgtctagtggcagctgtaaggcagagtgttggggaatggccatgggcacaatagatggtgccaagcactaaccagcagccatgtgcactgcacctctctctgycccctggtgtctttcctgccaggaagcgtcatgctgccatcagtttgaagacccttgcacctggctggcacccatatgggtgatgcatgggacaatgcggtcacgccactttggcaaacacttggtgctcaccttggttcacagtggccagagaaaaaacaataagtgctcactaaatgcttttgcctggcataagccactgcacctggccctggaatgtaattttttaatagt

SEQ ID NO: 754984 - DNA, 623 bp, Homo sapiens
ctacagatgatagttcactgggttattttcaccactgtgtctagaatttactatgtgcatagcagtgtccagtaaacacgtgttcattgaataagcaactttaactcttgctcttctccagacttggtaaccattgtagtgaacacagaaggtcattgctttgcacattagttttaactccaagcagggcttttatccctgttttctcacccatgaggcctcagaatatactcaattcattcatgttcaaccagcatcggggcccatttgctctttttcattaacccactaacttatcacccttttggtaatcggggctcaaggacagctgtttcaccagcccctctggaaagaccccctgctctcagcagcaatgttccagggtccaggctcactctccctggcttctcctctcagaggagctgaatatcaagctgycaagtggggcagccttgttccccaagcacacctgcccttctcagatgaggcctgctgcccctaccctaaatgttcacacaatttaagtagccatttcaacagataaccatgtcaagaaagactccctttgaacattcccatttgtcttttctctttcctttatacagaaactatcacttactctt

SEQ ID NO: 754985 - DNA, 623 bp, Homo sapiens
ctacagatgatagttcactgggttattttcaccactgtgtctagaatttactatgtgcatagcagtgtccagtaaacacgtgttcattgaataagcaactttaactcttgctcttctccagacttggtaaccattgtagtgaacacagaaggtcattgctttgcacattagttttaactccaagcagggcttttatccctgttttctcacccatgaggcctcagaatatactcaattcattcatgttcaaccagcatcggggcccatttgctctttttcattaacccactaacttatcacccttttggtaatcggggctcaaggacagctgtttcaccagcccctctggaaagaccccctgctctcagcagcaatgttccagggtccaggctcactctccctggcttctcctctcagaggagctgaatatcaagctgtcaagtggggcagccttgttccccaagcacacctgmccttctcagatgaggcctgctgcccctaccctaaatgttcacacaatttaagtagccatttcaacagataaccatgtcaagaaagactccctttgaacattcccatttgtcttttctctttcctttatacagaaactatcacttactctt

SEQ ID NO: 754986 - DNA, 603 bp, Homo sapiens
aaggtaatgtttttgttgagtcttttgttggcatctacttatcaaatgctacatcagaatccaaatggcaagtaagcaaacctaactattatccatacaattccgtaactccagatcatctggtttgagatcccccaaattctgagagtcagctacttttcaatttcaaattagtttagagaaattccatgtctagggaagactttgcaggcatcaccacmtttccaaggtctttagaaaagaatcccaaactcctacaaaacagagcctggaagacctcctccatcttctgccttttgttctgatggaagataagtcaatgaccactgctttgatgcgacaccatgtactgtcttttctcctcaaattcaaataaatttgtctcaaacaaaatcctgaactcaagatgatatggtataaataagaactccagggctatgcaggaaaaaggactcctactctcagtttaaaacatgtgacaattatatttggactcagctaacatgctgaggattgacttacacttatttgatgttacattgatattaaatttattacttcattaaatcttctcatccacactgtaatgtagatattaggatc

SEQ ID NO: 754987 - DNA, 570 bp, Homo sapiens
gtggtcctagctggcaaggtaaggaatgaaggaatatttggtgctggtttcaagtgtgataaagcaaataatgacactctaaggaactgtgaactattaaagaaaatttattgctacatccacttaagcaatccacgtatttccatcttaaatatagtctttttaacagggtttggaagttagagtgttggcatctaccattcacagagagcacaagaggtgagggggtggcaaaattctgccagagtgaagactgaacatgcaggaaaaggagatacccttaaccaaggaatattaagatgtttctcccagctccctctaccttctaggggaaaatagggaattaattctcatacaacattaaattcttgttcagaatttacttgcaatagttggcatgtgattcagtcattgatttgtacataaagctgtgcaacattttgaaatttctagaggagtactactaagattgcaaaatccaggatgcagtgagcttgaatacatttcattgkaagattgaaaatattctgttatctggacaaacagactatatattatagagatatattt

SEQ ID NO: 754988 - DNA, 692 bp, Homo sapiens
gcatatagctagccagttatcccagcacaatttatggaataggaagtcctttccccactgcttgtttttgtcagctttgttgtagatcagatagttgtaagtgtgcagccttatttctgcattctctaacttgttccattggtctgtgttttaacaaacactgaagtttgagaaacaccaaaataaattaaaatctaaattccacaccagggcctacaaggccctataagatcttgtcatctctctaacaccaactctgatcatagyggcactgaccttctttctatgtcatgcagaggccaagtgggttcctctcttacagcctttgcataatcaattccccttacctggaatccctttccctttccctccttgcatgtctggctcctttcacacaatcgggattcacctaaaatgatctttactaaaaaaagccctcctagaccatcctagctaaatgagtctcccattcacctggtcacatcacccagttgtattctcttcaacacatttacaactgtcagatattttctgtattacttacttgcagactatctgtctgccttcctagaatacaggcaggtccttctatctagcaggcacttaataaacatttgttgaattgctgaggaagcactgaccttgagcccaggtacccaggaatacataccctactgctcacgacggcctat

SEQ ID NO: 754989 - DNA, 552 bp, Homo sapiens
gaaatgttccaaatctcagtctaaagtagcactcagaaacagataatagtgcaaactacatgaataagattaagtgttctttttttttttttttttttgagacagtcttgctctgtcacccaggctggagtgcagtggcaccatctcctytcacagcaagctccacctcccgggttcaagccgttctcctgcctcagcctcctgagtagctgggactaccggtgcccgccaccacacctggctaattttttgtatttttagtagagacagggtttcaccgtgttagccaagattgtctcgatctcctgacctcgtgatccgcccgcctcggcctcccaaagtgctgggattacaggcataagtcaccatgcctggtgaataaggttaagttttctagtagccataaaaagaaacaggtaaaattaattcagtaatatattttatttaactcaatatacccaaaatatcatcattccatcaggtaatcattattaaaaatattaatgagatattttactttttttctccttcttttgcattaagtctttgaag

SEQ ID NO: 754990 - DNA, 592 bp, Homo sapiens
ctcaaaatcctaggccaaaaactctatgtgactagagattaaattccttcattagtaggccaaggatcaaaatatattgtgtttttatttagatagtctgagagtattgaatttgtgcttttcttatcactaacattcatctctctggatcatccacttttctttgaacttgaaaaacagaaatttgataacataaaatatttaaatcaattaaaacaagaacccagacagaaccaagtaattctgggagttaacaataataactctttgatcttgataaagttcagtttaactgtttatttgaaaaatgaccagcatcaatactaactttccagggtgcataaatgtgtttttccacatttacaaatgctgtgttctgcttttctaagatgagaaatgaaccaaagtcatacaagtacttgttagcaaaagaaaaaagtcttcatttkcgagattaaaaatttgaaccaactttgcaaaattttctatcttatgcaggacaatttgcacatagtaggttttcagcaaagtttcttgacttatggtatggtcatggccatcaatgattgctgttgtgcattaaccaaataat

SEQ ID NO: 754991 - DNA, 554 bp, Homo sapiens
caaaccatgaaagtatatttatacaattaaattaaacattaaataaatccaaattaattaaatcaacttgatttagtttgagcaaaatgccctctattacagtatttttgttaatttgaatttaattagctttgtagtttcatttgtmtttgatgtgcgaatatgttttgagtttacagttgcataagctttgcaactacagaggtcacacttaggtttaggtttttacatatttaagtgacattctaataaaaatgatttttgtcaggaccagggttccagagcatttttctccccttataaagatttagtgtccactgactcaagtttggcacttgctcagtgtctggggtgaaccggctaacttttctgcgcctacgttccctcatctctaaaacaaagatgttctctgctcaccaccctgcacccccgacaacaacaaaacagactttctgtggtgtccccaaagctccagccctgctcctgtctggaaaggtcatgtggtaaaagtaacttgtgttctttttcccttgccccttcgctggggagacagg

SEQ ID NO: 754992 - DNA, 622 bp, Homo sapiens
tgctacatggagaactctgcaaggtagagttaaggctcaaagtagagtcaaaagcagatgggctcctggactccatcaatgttagccttgattcaataatatctgctggactttaccgtttccaaatgtaatggatcattaactttctaagaatatttcatacctattaatggtagttccaactatgccaatgatckaagatcgtaacatattttatcatgaaacaggaacaaataaagaggtaatctgtaaaaagctccccagctttcccatgtcctcattacaactccattccaggtactccccttatccttgaaagagcacccctttatctgtgagcatcatgagcaggaatgcaagtccagagccacctttgctccctgcaaatgaaatatattaatttcccatgtctctcattgtttcctgacccattcaggaggaattcgaggaagggagagcaagagagtgttgcagcatgactgcctgtggctgcaagcaagggcaccttcctgcttctcttgcttttcccctttcaccttttctctgctggcctccaagtgaaaaatactcatcttcccttagacccatgaaacaggaagaaatatctcattgacttgagaaa

SEQ ID NO: 754993 - DNA, 613 bp, Homo sapiens
tgatctaactttgtgaatattccatatgaacatatatatacatatattctatatatatgtttgtgtgtatatatacacatatatatgtatatacctgtgtgtgtatatatatatatatagtgttgttgttaaagttttctataaatgttacttaggtaaagttggtttctatattcttacagattttctatgtattctactttttctgttcattaccaagagaggagtgttgcagtctccaactgtaattgtagatttgtttatttctctttcaatgtgtattcatttttggtctcatttatttgaggtttggtcattagatacatgcatatttaggattgttatgcctttttagtgaattgrctcctctgtcattttgtgatgtccctttttacacttgtagtattccttgttctgaagtacgctttgtctaatattaatatagctactgcaggttcattgtgactaacattttcgtggaatctttccccatcttttagctttaatcttttcagtatgcttacaattaatgtgtgttcttatagataggacgtaattgggtttcaccttttaatccagtatatcaatctaccttttaattggtacatttggg

SEQ ID NO: 754994 - DNA, 637 bp, Homo sapiens
ataccaacattttaagagtgattatttttggattaggggattataaacacattttgttttattgaattctttttgtatatttctagttttctaacattttccatcatatttactgagggtcttccaagtgccagtaccactccagaggctggagacagagccatagacaagctggagacagtccatgcccttttgggtaaagcattttttaatgcaatraactctttgagagtagtaatatacacctgtgtttatctttttgcccagcattcattcacccttcttctaataaaacactattctaatttctcactcggaaaccacttctttctcatcatctgctgggttgtttatggggaactgacccactccaagctccaagaggtgatgtcgtctgaatgcttgtttcagcctaaaatgttgaaatctacttcccaatgtgatagttttaggaagtgcggcctttggtggatgattaggtgaacaggattagtactcttataaaagaggccccagagaactgccttcccttctaccatgtgaggaaccagacagaaggtgccacctgtgaaccagagactgggggttcaccagacaccgactgtgacagcgccttgatcttagacttaccagtgtc

SEQ ID NO: 754995 - DNA, 588 bp, Homo sapiens
tcccagttgggcaagatcaaagtctattcatcacctctttacaacatgactagaaagtagtgaacggctcatgtgaagtcagtattgtactggcctctgggtaccagttcagatgaagaataatgcatttatattcacccatggaataaatactcactgagatatttcttgcatttatataaagttttatattaagaacaatgcaattggagaaataaagggccaaaaatctgaagtcagtttgattggagctttatataacccccaaacattcactcctgtcacatttctgagtgcacattactgacataccacccaatgaacagtaatatttgcattaaaaaattttcattcacaatctctttgccactggggcttggaaaatcctcaagtctaatccagatgyctgctcatctaacttggaatggagcctttgaatcatctcaattattttagaatcatttgggttttctttaagacttttgctaaagaaaaaggtcgaggcaggatctaaaaccattgaagtagtcatagtcccatgtgttaggtggcccagataaaggctgggatattgcaatacaacatcag

SEQ ID NO: 754996 - DNA, 606 bp, Homo sapiens
tcactactcgtgctaagtgtgtacttttttccatagcatgggttcaatctttctaaatcctatgtcattttatgaaattttattagccattcattcaggcattaattcattccatcagtgctaagcgagcatcttctctttgtcatgtgaagtaaggattagaggagcagagcagatgccaggcaaatccaagcaccggccctacagagtctacattctcccaagagagacaaatgttataccaagagttacacaaacagatgcccaaggaccagcagtgctagaagctaaggaggaaagtcccaggctgcaggcagaatcacagggacatagtttaaattgtgaggagaagtcacccaggtcccaggtgatatttaggctgggacttgagctatgacaagracaagtctggcaaagagagggtgggagagcaccgagggtgatgcaatggcaggagtggagggaggtcttaggcagactagagttctgtgagttgaagtaacaatggaaaccatgccgccagggcagtaggggcggaaggaagagtaggagagaggtcaggcactgggtcattcagggtcacggggacataagaggcttagatgc

SEQ ID NO: 754997 - DNA, 647 bp, Homo sapiens
tccccaaagcaccagcacagtttctagaccacagcaggaatgcaatgacctcctattcctactgaatgaaaggtagttatttctttagtttgaaatctttaggtcactttctttaatccaactgcatttctttctttattttctaattacgatttctaataaggaaaaatactgcttgctctagcaatgtcctatcttagttctattggttttctcacttagaatagaaataagaaccctaactygctctactaaatatgattgtgcctatcttcactaagagatactggccgcctcatagagtttgtagttatgatgactgagggtatagtatgcatttggtcaaaaaggatctcaatcattataaaaccagtggcatttacctcacaaaaccatagagtcatgaattgtcaacaacccttccatcacacacggcctgtgatcatatctgagacatatatgctatagctttttatacagggaattctacagtagtgaaataacattagactgtggaaagaaatattcacatttcagcagaatggtttacaggtgttaaaaactttttatatatttggtgttatgtgtttccatctattcaggctgctataacaaaatatctcagagtgggtaatttataaacaacg

SEQ ID NO: 754998 - DNA, 624 bp, Homo sapiens
agaattgctatatcttgattatagtagtaaatacacaactgtaaatatttctcaaaactcatagaagtctatggcaaaaggagccaattttatcacgagtaaattgaaaatgtaaataaaaatacagtaaaatataccataagcaataacagctaaaaagaaagaccaaaacatatgctgtttcaaagaggagaacttaaatacaaagacacagataagtggaaggtaaaaagatggtaaaagatgtaacatgctaattctaagtggaagaaagctggtttggctaaattaagatcagacaaagacaaaggatgtcaccagagataaagacggccatattctaagagtgaaaataagacagaaaataagataaccaagaagacataaaaattcyagatgtgtaagcacataataacaggatttcaaaataatgaaacaaaaatttacagactaaagggagagagacgtagatccacaattgtagttggagattttaacaaatctctcttgggattttatcaaacatttcagccataaataaattagaatacagaagatttcaacaacacaatgtcttgacctaattcacatttatagaatatttcaactaacaactaccaaata

SEQ ID NO: 754999 - DNA, 641 bp, Homo sapiens
cttagcatggatttcaatctgcttgttctaggtaccacaaccaaattttccaactattacagactttggttgcttgaggatttcatgtctatttggataaaacagcacaacttttagaagcaattgctttatcatggatgttagtgaaagagagagagagtcctaaatttaaggcaaaataagttgttaggaaaatacagtgacttctcaggaaggttatacaactacatctcagactcaaggacaagaccccagtttatccgatttttaatcgctggtgctcactgcagtatctgtcttcacatgtgttcacagggagcagaaacctgcataaatgaatacatttaataaaatatatttactttcatctaaaaacggcagggttgtaccttacagtttttgcttttaaaaatatggttaacgccagggaaagcaaacaaacttattgcttcagaggggagaagtgacatcacagasgacaatttataaaaagaaataaaacatacactaaaatgagatggaagatgtatgtcatgataccctaaaccattaatttgtcccattctttaaaaatcacagagttggtgatctggtgaaatccatcgctgtttactctctaccctctctaaattgatggcgat

SEQ ID NO: 755000 - DNA, 588 bp, Homo sapiens
acatctacccatgatgaatagtggtcttttgatttagaataagaagagctgactgaattttgaacaaataagtattttgtgagaaacattatttttcattttgaatataagtgactaatactgtgtattcatatcccctttatatctcaatacgtgcttatcttttggtgtaccttagagaaataacccaccatcaatgaaaagaaggaaaggcaagaggaaaaaagtttatatagtaccttaaagtggtagattatttgtggccatttgaatttactgatttgaagttcttaaagatgctgagccatgccttacatagttattttagaatytaaagttgttctgtatttgcataaagtttctgttctttctcacctttaaaccctgaaagtgatagctgggaaggaggaaccagatatttggcatggtctgcaaacattaacttgtctttacagcaggatatgctcacaattggagtgttttcaatgcattatgtattctgtggatttaagtgaaatcagaaacttgagttaactccttccaggtgttaaattactgatttatacaggaaagttggaaaaggtggtc

SEQ ID NO: 755001 - DNA, 650 bp, Homo sapiens
tggaaggtgcccatcagggccagcagggtcgggcaaggcatagagcttctcaggctcaaccaccattagatgagacaccagtgcattcactgggcctgtcgtctgggggcctccagcgactgccaggggcccagcagggaaggsgcccgggaagggcagcgggtccacctctggcaccgcttgtactcccgcccaccccggacgcggtccaggcgcgctcccgcaggctcttggtgaagcggcaggcctgacaggccttgcgtctccgcttggtgatctcacactcgttggaggccagacagctgtactccatactcccctggatggtcctcttgaagaaggctttgcagtcctcacaggatgacacaccgcagtggtagccggaggccacgtccccacagaccaggcagaggcgcttggacagggagctgagcaccagcttcccaccgccctgctcgccaggcccagccccctccccatcctcctcttccttgtggcctgggaggcagtgggtgggagctggaccaggggccagggccacaggaggctcgggtctctgtctccgaggagccctttggactgtcaggcctggccggctctgccatgatgtagtggctcactgcccaccacctggctggacatggcgctgg

SEQ ID NO: 755002 - DNA, 608 bp, Homo sapiens
ccaaggaaataattctaacagtggcaaagtaattatgtacaaagaatctttgagatcattaagtatttatattcagaacaatgctggccctaagacagtatggtgagcacaatttaaggcaaaaaataagcaggaaaaattcctactgacaaaacttaggataattttactttatgggtattgcctcattcccaaccactattactggatcrttttctgaatgcttatattttattaagacacaggaatttaaaattaagtcatctgtgcttttgattagaagaatgtacttttcagtagtgaaatacagagtatcttaccagaaaaacaggaagctgaaatttatcattcagaactacagcttgtacactacacggtccacagagccgagcaataacttctttacccaaaaagtttgcatggaagataaacagcaggatgccagagcctgaaaatgggagatgtgtgtgaattacttcaaaggcaaccttcagtccccagaggaacactcaacaccagatggaagcaggcccctgagctgggcctggtcagacaggcatcacccactctgcctggaggctcagaggaggctggccctctcaaagctc

SEQ ID NO: 755003 - DNA, 604 bp, Homo sapiens
agaagctactagcttttagagtatcttttcacatatgaatgtttgcataaaattttacaactttcctctataggcctaccttgtttcactgagctttgctttactgcacttcacagggactgtgttttttacaaagggaaggtttgtggtaaccctgccacaagcacgtttattcacatcattaccccacagcatgtgctcattttgtgttgttgtgtcagcattttttagcaataaagtgttgtaaattaagatatataggttttttaraagatgtaatgctattcacatttagactacagtatagtgtaaacctaaattttatatgcaccaggaaaccaacaaatttgtgtgactcgctttattccaacagtctggaaccaaacccacaatatctccaaggaatgcttcaattttttttgttggtgttgtttttctttctttcttttttattgagacggtgttgctatgtcagcccaggctggtctcaaactcctgggctcaagcattcctcctgccacagcctcaagtagatgggattacaggtgcatgccaccacgcccagctctcatttttgtatcttctttttgttttgtgtattaaa

SEQ ID NO: 755004 - DNA, 604 bp, Homo sapiens
agaagctactagcttttagagtatcttttcacatatgaatgtttgcataaaattttacaactttcctctataggcctaccttgtttcactgagctttgctttactgcacttcacagggactgtgttttttacaaagggaaggtttgtggtaaccctgccacaagcacgtttattcacatcattaccccacagcatgtgctcattttgtgttgttgtgtcagcattttttagcaataaagtgttgtaaattaagatatataggttttttaaaagatgtaatgctattcacatttagactacagtatagtgtaaacctaaattttatatgcaccaggaaaccaacaawtttgtgtgactcgctttattccaacagtctggaaccaaacccacaatatctccaaggaatgcttcaattttttttgttggtgttgtttttctttctttcttttttattgagacggtgttgctatgtcagcccaggctggtctcaaactcctgggctcaagcattcctcctgccacagcctcaagtagatgggattacaggtgcatgccaccacgcccagctctcatttttgtatcttctttttgttttgtgtattaaa

SEQ ID NO: 755005 - DNA, 652 bp, Homo sapiens
tggacccagttagacaaaatgaacatacttgtttaggaagattgcattgcagaacaggcagaggtgctgcacaacgattcctatggaatcattattaattggtcccctaaggggatgtttagcttgaattgcacctctcagtctgtgtgccactgctacactatgtttagatgatctgaacaaaayggtcagatggtagaaatgataaaaagtacggcaagagttcctcttatctgaaaccatggcggtatagtggcacctcaacctcagatgatatggcccgttgtaggagctaaacataagataaggatttgtggcttaataagatcaaaaatttgggaaagaataaaaaagcatctagaaagacactctacaaatttgtctttagatattgcaaaattaaaagaacaaatatttaaagcatcccaggcacacctgaccttaatgccaggaactggagtgcttgaaggagctgcagacagattagcagctagtaacccattaaaatggataaaaacacttggaagctctgtgatttcaatgatgattgtgcttttaatttgtgttgtttgtatagtctgcagatgcggatcctgactcccgcgagaagtagctcaccatgacaaagctgccttggcttttattgctttgc

SEQ ID NO: 755006 - DNA, 624 bp, Homo sapiens
gggctgggtaaggagactgccacagtaacagcgtaatgctattagtctgaattctcccatgacggagccctcgctgggaaagacaattacaggcaaaagggtgataacctcacgaggcaataacctcctgagagatcctgtgccacatgtacaggttattaatttcagggaaggagccaaacttcaggggccctctcagaaccgactctttcaaggtttgcccatctctaatgagctgggtcttttttgcgattgtctaaccacacgatttccttaattcttagctggttgcataatggcaaagataaatgtggctttttccagctgcttctaaaataggttcaaggttgaattaatatgaatggaaatactttctgttcatgtaaagggttggaagaaaccgtatgtgtgggatttgctgatacctgctaaaatgtacactgtgtgtcctacatggaggacacaagacrggcagaggtggaataatgacttataggagccccaaagtcctaagacggtgaaattccaccaaatttattccatttcagcaggagctagaatattccaaaattcaaaaaaatggacttagttataaaggaatcttttcagaagtcttgactctca

SEQ ID NO: 755007 - DNA, 651 bp, Homo sapiens
tcagaaagccactgtaaaacccaatgaagtcttcatctgatgctctgaacagggaaagtttagagtgagggttgacatttcacatttagcatgttgtttaacaacttttcacaagccgaccctgactttcaggaagtgaaatgaaagtggcagaatttatctgaagatccgcaatctcgaaatggaaccactgctcttttgacaggtgccatctcagtggcatcactggaaagtccagattgcctgacacaytggtaaccaatgactaggggtcaggtcccagtagtggtctgggtttaagggagttaagtctttgctgaaagatggaaagggagaagaggacatagaaatgaatttgtttttccatagcacaaggcttttgtgccaaggtggccatgtgtgtcaacgtcagggaatccctcctcctgggagccaagaggaagtctctcaaaaccagaagggaaaggtgttttccccacatcagtccagctttggagacattctgttagtgacgtatgccccttcccccaaaaacaacaatgaagtgttctgtgtgctaacaacatagcttaaaaaaaagtaaaattatgcagttttataaaacttgataaaaaatagtatttcaaactgtgcagtcaacagaagtttaca

SEQ ID NO: 755008 - DNA, 644 bp, Homo sapiens
cagcaccttcagttttatgtgcctggtctgttttggcatctccattttctacagggctattcccctccttgccagcatcagcttttccctttttccctttgggtactttctctcccttctttgcaggggcctttttacgcttgggttctggctttggaggagcaggtttagctgacaacctcatggatcttctgtgtgattcgtccttcaccttggctttatctcctttagcatccccttcagcctttctcttgggcatggtggcggcaggatgtaggtgstggacgcgggatgcagtggtgcacgggctttggttggttaggggttcgttctcgcctcttcttcacactgctcccattttgaagtgttaagatttgacttccctgttggattttggacttgcatggggccagtagcccctttgttttggccaatttctttcatttggaatggctgtatttactcaatgcctgtacccccattgtatctaggaagtaactaacttgcttttgcttttacgggcttatgggcggaagagacttgccttgtctcagatgaaactttggagtatggacttttgagtggactgttgggaaggcatgattggttttgaaatgtgaggacatgagatttggaggggccag

SEQ ID NO: 755009 - DNA, 627 bp, Homo sapiens
atataatcaatatgattgtatttatatggttttatacatttctactaaattttccattttgatcaaagttttggagaggtttctaactttaaatagaaaagtaaaatttaagttagaaattcagagaacatagataatatattttgtgtatcatccctacatagtgaaaaagacataacacaaaatagttaacaaatttttggtatattgcatcacaaatcagaatggcttctgagactaactagaccttaatattataaatggtaaataatattagtacaaataactaacatttaaagattcttgctacrtgttgatttctaaaatttattgtgtaatttaagcacaatagtaaaattgtgattatatattttctttcacctaaaaattgagcatcacatacatttgatatttacacatcaaacatgcaagagtaagtgctatgtacaaatgagcattgtggcataattaggagtttaagatttaaaaaaatgtattggctgttctgaaccatattacttgtctctaatgattttttaaatggagagtacattacgattttacataattataaaaatgaatatatactatttcctaataaatttaactagttcagttccatcattt

SEQ ID NO: 755010 - DNA, 555 bp, Homo sapiens
tagcaatgaaatagaataatatatttcagatatgtaacttttgagattatgtaatgaaggactcaatttttagaggaacttcaagccaggaaatgttttattactttaagttatagaagcttagtgataaaaggaccaattgaaggtcaccttttccaaatctccaacttgtacttaaattccttctactacacctatttaatatgatcgatttcctaacattaaaggccagtaccaacactaaatatagtacttcccaatctattttatcccaccaataccagatgttctcaagttacacttacaaagtttttgtaacataaaacataaagacaaatgcctgtttcatcaaaaaagttgatattggaaacaaaatcaatstatgatttatatgcgtgaatatatggttaatttttatagtaggcattttaatttaaatcatttcaaataatgactttagctgattaacatgaaaattagatgaggtttaagtaagagtcaatcaatatctttttttgtaagtttttaaatgcaattttgaatttatattgatct

SEQ ID NO: 755011 - DNA, 529 bp, Homo sapiens
gaatttttgtaaaacttacaatgacttattatgtcctttactttagcccatgttagctgctataaagggtctcaggaatctcaaccaaatgataattatctttagaatctagcaatatttgagtccaacaacaataacaaaaatattagatcactaaagaagaattaaatttgaatctcctaggccatgttttcttttcttttttttttttttttttttttttgccaagactgccacccagatgttgtatcaagaatgactgtggttgccrttagggaaagaaagacacataatgctcagaaacggtcaaagacatcttaaatttgcaaaataggctgatatatgcctcaaccatttcatcattacctggaaagtagctgagaagcaatgattcccttctggagatagtctcattcaatgaccaaactaccttacaaagctttgtgggtcagaagaagtgggtgaagtagatttagaaattcttgagttcattccaactctcaacaactctcaatgcttatgcatggta

SEQ ID NO: 755012 - DNA, 592 bp, Homo sapiens
ctccacttaaccttttgcttggagtccaatgattcgattatccgtgcttgaggaacattcagaaatttatgtccctagagaatgacctacaggaaacacaaggatagcaaacatctctgtttcatttccacttgtttctgtgtatggccataatcccaaagggaattcagattatttccctaaacctcaaggrcattgtttgtgctaatctccagggaatggtgaaatcactgatatgtttctcaggaatagacatcaaagacaatttctcccaagatttatatttgttatttttgttgttgtttctgttctatggttatatatgtacgtaggggaaatatttcctgaaacaatttgctgtggtttattgcaggaagtaataatgttggacagcttcccacccaggaaggcattatgtaaacatttttcactgactaataggatttaattaccaagtagaatactaactgagttgatttatggactaaataaatgttattttattagtaccatcttttgggtgatagtctaaatgctgtgaaaaatttacgacaatcctaagttcttggatcattcaagttttttttttttg

SEQ ID NO: 755013 - DNA, 565 bp, Homo sapiens
agccatctattattattcctgtcatgctcatcagccagaagccaccagaaacacacctgtagttgaacagaaatgggtttagtaacctgttgcaacaaggaagaccacacaccatggggagtgggagctgtgtcccagtaagagtgtgttggggcgcttctggttagctggcagaaagcagtgttaattccatggctgggcatcatcataatttttatgtaggaggcaggaggaatagagtggggctaaagctgtcattggaaaaccagcagtaactgcatgtgtcagtcagaaggagaggatgcgtttggccatttttttgtggtttgcccactgctcatactttcatgctcagataggattcattacagactgtcttgtttttgtcttgtttcatcatggtcagcatgacatcttccagtgtgacyatcctatgaaattgcttaagtagggaacaccacagcctagcagtagtaccaggccagctactagctgacaacgatcaagactgggctcccggccgggcacagtggctcacgcctgtaatcccagcactttgggagct

SEQ ID NO: 755014 - DNA, 578 bp, Homo sapiens
acatacaatcaaaaccaagctaatgaaaaaacaaaacaaaaccgaatccccaaaacccagaatacaaaaacctgccatgtgttggttactggaggaaaataagtgttttcctaatgtttaaactcagcaactgaccctaaracttgttttaattttgcgattgttttgaagctgctagtctgccaggcatatggtgcaggtaagctttgccaagtcgttcctccgaagcattttattacgataataatcacaaatgtgacctcagtccttttatcctgtttattctctaccgtttcctgtgataagtgctacttctgtactttgccaacctcctccacccgcatttgtttagggaaagaatattaattagtgatattaaggaggctatgggctgaaaatgaaattttcataatggaattccttagactatctttgccctccgaggcatcctctgtttaagcagttcaattgaatatcattattaacatacataataataataattagcattattgcctgcatcagttgttgttcatggaaaactgcaagctcttttctatctattggcctcagttaaa

SEQ ID NO: 755015 - DNA, 335 bp, Homo sapiens
agatatatagagcagacccagaccaacccacagcgtggagtcaagccgagccaacagagcccagcagaaccacagcctatgcacagacctgtgaargaaaaaatatttttttgttgtaagcaagatttggggggatgcttgttatgcaaccttgttgtagcaatatctgacagatacatatgggaaaactacattatttcctttggctctattctacctccactaggaaaatattcctgattaacctcattccacaccagattgtgatctcttcaatgacaggaagtgtgtgttattcatccctgtgttcctagacttctgcacagggcctaaca

SEQ ID NO: 755016 - DNA, 657 bp, Homo sapiens
ccaaaaaagaacagaaacagctacattcatatcagaaaaaaatagatttcaagacaaatctataagaagagacaaagaaagtgattgtgtaatgataaaggggtcaattcagcaagaggatgtaacaaatgtaaatttatatatgcactcaacactggaatgcaaatataattygagctaaagagagagacagaccccagtacagtaatagctagagactttcacacctcactttcagaattggacagatcttctaggcagaaaatcaacaatgaatacacattcttttcttagcacatagatcattcttaaagatagacaatatgttaggtcacaaacaagtcttaaaacactgaaaaaatttgaaataatatcaggcatcttttctgaccacaatggaataaaactaggaatcaataacaagaggaattttggaaaacatacaagcatatgaaaattaaacaatatgctcctgaatgacaagtgagtcaataaagaaattaaaagagaaattgaaaaatttattgaaacaattgataatggaaacacaacataccaatacctatgagatacagtgaaagcagtactaagagggaagtttatagctataagtacctacattttttaaaagtagaaaaacttcaaataggtaaccta

SEQ ID NO: 755017 - DNA, 599 bp, Homo sapiens
ggaaaggtatacacctcacagcttagcttcactcctgtcccagtgttctggctattcagttcagacaggcatctttttttcatctataggaatttaatgttccaactagggaggaattctgactctgtgtctcatgcaggcctgaatctggggagtactcctcctgtgggctgtaattaccctgcattgtttcaggaaggctgtctataggtgcatccatgctgcyttcctgaggcaaaaagccccagctgtgtctgcagtggtgtgcctgagggaacaatgatcccttctccaaagcccttcatgatcacagaggttacctgcctattggggtagaggtgcagactttccctactgtgcccagcactgcagttgtggaaatatctgggactcaaggcctgctgttcagaatcttttattccatgaggttatcccttgatgtggtgctctcccccttcccctgggaacggggcttcctgagagcctgactgcagtgatttttattgctcttctgggtctagccacccagtaaggctaccagtttctgggctggtgctggagaatgtctgccaaggatccagtgatgtgacctgtcttca

SEQ ID NO: 755018 - DNA, 653 bp, Homo sapiens
accagcattctggagcttcttcatgttccggatgaataagggagagttatctggcattcagtctgttgagatcattgctaaagatatgctcaaggctgaacatcatttagtccaggagttttgccacaggacaatagctcatgagacctcattacacagaaggcagatggctcagttgtggccactcagctccaaggacctttgccttaaatccccaaaccctggcactgagggtgctgccctgtctcaaggtgagtacctttatattctcagtgcactgcatttgagtggttctgatttctaccacttaaagaaacccacttccctacttccccactggccggctcccactttttcytaatccacctttacagggatatggcttttccctcctccaacatgagacaaacaccctggctccctttttccactactttatctctttcaaaatggacttactagtttgttaagatgctctagataaagcaatgaagaccctaacttaacatcctagaagagtatattctggggataacattctccagtctttagaaaattaatagccagtatcccaaactaagcagcatgccacttctaagtggcagaatgcaaataatactgtggagtatttaggtccacatctggttctgttt

SEQ ID NO: 755019 - DNA, 637 bp, Homo sapiens
ccaaaagaaacttttaaaactatacaaatatatggaaattaaataatcttctcttgaatggtttttgggttaacaatgaaatcaagatggaaacttaaaattctttgaaatgaatgataatagtgacacaacttatcaaaacctctgggatacagcaaaagtgatgctaagaggaaagttcataacattaaatgtctacatcaaaaagtctgaaagagcagaaatagacaacctaatgtcacacctcaaggaactagagaaacaagaacaaacaaaacccaaactcaggagaagaagtaacaaagatcaaagcagaattaaatgaaagtgaaaaaaaacaaaaaagataaatgaaacaaaaagctggttctttgaaaagataaacaaaatggatagaccagtagcaagattaaccaagaagagagaagatccaaataagctcaattagaaaggaaactggagatattacaaccactaccacagaaatataaragatcattcaaggctactatgaacacctttatgcaaacaaactagaaaatatagaggagatggataaattcctgaaaatatacaaccctcctagattaaattaggaagacatagaaatgctgaacagaccaataacaagcagcaa

SEQ ID NO: 755020 - DNA, 541 bp, Homo sapiens
caatcccactactgagtatctatccaaaggaaaagaagtcatatgaagaagacacatacacacacgtttatagcagcacaattcgtaattgcaaaaatatggaaccaacctaagtgtccataaactaacaagtggataaagaaaatctggtatatatataccatggaatactgctcagctgtaaaaatgaataaaataatgtctagctggaggccattattctaagtgaagtaactcagaaatggaaaaccaaatattgtatgttctcacttataagtggcagttaagctatgaggatacaaaggcataggagtgataaaatggagtttggggactcaggaaggagggtgggaagggggtgagggataaaagacaacataytgtgtacagtgtacactgcttgggtgatgggtgcaacaaaatctcagaaatcaccactaaaaaacatccatgtaaccaaaaacaacctgtatcccaaaaactattgaaataaaactttttaaaagtacacagttctttgaacttccctagaaatgaacaa

SEQ ID NO: 755021 - DNA, 591 bp, Homo sapiens
gccaatatttctgatataacaaactacatgtaatccatcactagccatgataactgcaattttaattgattattctgattccacttttattcatttgagttattttaattatcttttctattgtttattctttttaaagtatgttattgcataatttataaaagaataaaattgcacttttaaacctctcttctaccttaaaatgtaaaacaaaaatgtaatgatcataagtctaaataaatgaagtatttctcactcattgcaagtatatctttttggttatcactgatacccacatgtttacattgatcatgactaggtagaacaatacaaagtatttttttagtcatgtgtttcacatttggatattttgaacatcaaygttttagtattaccaaagtattaggtttccaaatcttcactagctcaatactgttgtccttttggtttcaggaaaggaaataaaatgctcagcaaaaaaagggggcataaagtggtccgaaacttgaaaaagtatttgcccctacataaaaacccactaatcatagttctaatctggacgcaaaattgcaagaaatagaatgtttgtat

SEQ ID NO: 755022 - DNA, 625 bp, Homo sapiens
catcatccatttccccattttccctctccatccacaagcatatactcaatattcagtctttttttttttttttttttgagacagggtctcactctgtcgcccaggctggagtacagtggcatgatcagagttcactgcagcctccatcttccaggtttgggtgatcctcccatctcagcctcctgagtatctgagactacaggtgtgcaccaccacatcctgctgattttttttttaacttttaggagagatgaggtcttgctatgttgcccaggctggtctcaaactcctaaactcaagcaatccccttgccttggcctcccaaagtgctgagattacaagtrtgagccactgcgtctattcagtcttcattgcctgcatgcctgtgcgcatgcagttccctctgtcctttcttaccttctctgatggaaaacacaatcacctgtcaggacagttcagcttttcagtaaaacagcttccaacaactttagggaaattgtcacttcctcttctgtgcttttataagtctttgttcatacccctattataatacctatcacattatattataattatgtgttaaatttcaaggcattgattatgtctcaattatccagtgattaat

SEQ ID NO: 755023 - DNA, 722 bp, Homo sapiens
ggagtgcagtagtgcgatctcggttcactgcaacctccacctcccggatacaagtgattcttgtgtctcagcctcccgagtgtctgggactacaggtgcccaccagcatgcccggctaacttatgtatttttagtagagccagggttccaccatgttggccgggctggtctcaaactcctgacctcaggtgatccactccccttggtctccctaagtgctgggattacaggygtgagccaccgtgcctagccaagccttcatctattcttatttcatctttgtttatcattgctaatatttttgtgatccattcattattctagaacttgatagaaacaatttaaggccacgtgggagaataggttccaagataatttttttcccttgaagaaggaactgtgtattattcagatttgaaacacagtactcagaaaattttattttcaagtgaactctgctagagggaatggtttccttttggctgtcctcttcacccatttcctggcccctcactgaaatttcttgcacggcagagaacgaacctctggatgtgccagttttccggtttgcaaaatgaggataatcgcttttatgactgcagtactatattagaaagagcaactgcttatacagaactttaagcattacaggagaaaatatagaatactaataacataaataatgataccactgaatcaggaacagaagaaaacaaacagat

SEQ ID NO: 755024 - DNA, 576 bp, Homo sapiens
ccccagtctttatggtctagaagtggttctatcatgctctagccaggaataagaattgggcagagaaacttttagaggcagaaatggaatggaagtggaagaaaatactcatggaagcacttttcattataatttgcccctccccagccctcccccaccccccgcaacactggtccttctcttgctatgttttcctgggttctccatgcagacttgaaaatgtctgtagggtgagaacactscacaaacaacaaatatttgctcagtgatcactgtgtacaaggtgacagaattccaagcattgtgttggttttttatttgcacacaagtgcctgggttctattgagaaaattctaaagatacatactgacctttatgattatctctttccaaataacaagagtgttgaacctcctgttattctaaagagctcagaatgcttttcagccttcctcccttatttcagctgtaggtttatttgaccgtgaggttgcaaagagctcttgttctctccgttttgttaaagagaaaatgaagcccggggaagtgtggatttggtcaggttcatgtaattat

SEQ ID NO: 755025 - DNA, 658 bp, Homo sapiens
gaattaacgggctagggtgccttagagccaaaaatggctcactcaataacagattaggagtaagatagtttacaaaaacatttttttcctttttctatttccccctccacccccaccggtctgtcaatttatttatatgaaaatccacaatctaaaaagtttggctagggaattcacaaaactgcctctactcaaaatgaatcacatgatatcaaagcagtctggaaaaatttggaaatgatcatcagtgtatgcctagtggtacggaagggaactgacctatgaaactattcataatatggatgtttttgtgataatcttctgagagttgaaggcaggaggaggaagttatttaaaaaaaaatggtgccactgctcttaagagttatttacttattttctttccatttttggcatcagtgaattttaattgttgagtattctgattagatggagctgtacaattatttcaaagttcccggtaatcccagtttgcagatgcagtgtagaggaaaggttttytaaaaggtacactccaaagatatctcttgaccatttttggtcatttcctagccaagtagcttaggaccagacttaaaaaactgagaagtctttggggatccatcactaaagtattctgattttttaaatcatttttc

SEQ ID NO: 755026 - DNA, 618 bp, Homo sapiens
gctgaagtggttttagatggagatgaggaacttgttgggaactggagtaaaagtcacttttgctatgcaaagagactggtggcattttacccctgccctacagagctgcagaactttgaacttgagagagatgatttgaggtatcttgcagaagaaatttataaccagcaaagrattcaagaggaagcggagcataaacatttggaaaatttgcaggctgacaatgtgatagaaaaaaaaacaaaccccattttctggggagaaattcaagccagctgcacaaatttgcatcagtaacaaggagctgaatgttaattgccaagacaatggggaaaatgtcttccagacatttcagagaccctcccatgagaggcttggaagcccatgagggaaacatggtttcctgggcctggcccagggtctcccagctgtgtgcagcctagtgacttggtgccctgtgtcccagctgcttcagccatggctaaggctcaggctgtggcttcagagggtgcaagtgccaagacttgtcaccttccaagtggtgttgagcctgcgggtacacaaagtgtagaactgaggtttagaaacctctgcctggatctcagacgatgtatggaa

SEQ ID NO: 755027 - DNA, 598 bp, Homo sapiens
aaaaacaggtgcactcaaaggcccagagaagatgggcaagagaacacagcaagatgaccaggtttcaaaggcccagtgtggtgggggaggggaatcatagcagcagaagcctagaggcctgagaaagggccctgcattctagcaaaggctgcctcccgcctttgcgggctgcagaggcgggatggtgtcaaaagttgcccartttgcatagcaaatactgctgtcctcactgtatttgcttggtttaactgcttagtagatttggctacaattccatcacatggtatatcttggtgtccctttggtgaaaagtcttcactgaagaatccagaagagttaccataaatatgagtgaccaggggagagtggattatacttgatttcctatttacttctttctccaaggtcaacagaaaagaaaacagagtttgagaaaactctttgtttgcaaagctaagaaagacatacacacatacacacacacacacacaaacacacacacacacacacacacacacacacacgaaaggcacagtttgctgctaaacatagcagttaattgaaaaaaaatcatgtcacatttaaggcagaaagcctg

SEQ ID NO: 755028 - DNA, 556 bp, Homo sapiens
attttactgagatatgtacttttttgagatgggtttttccagaaaagatttacctaagttttttccaaatgcctagggacgggatctataagagtaggacccttttaaaaggaattcatagctagatgttcaacagatagagtgaattgtgactgcarcttgcatgatagctggtttctgtctataacttcttgtgggaaacttttcctccccatttacgcagaagtttctgagatgggagaacttctttggagtcctccaggagatgggtatttattaataattctcccatatactgaaaatgtaagctttatagggtttggttttattgggaaatcctatgctagacttaccttgggcagactctggagtttgtttgtctttgagctgtataaaactgtaaacatttacacctaagtttcacagagatcagaaaatgcccttcaggcagtcagcagcttcagtgctatgcttgcatttctaggtccttgttacgagtatcactgaccttctttccaggtcaaagcagcattcaaaaagataccaaaatgttttc

SEQ ID NO: 755029 - DNA, 537 bp, Homo sapiens
tcactaaatggagggacagcctaatgaagccgaaagcaatgtgttatgggcacacacaggaaacagctggatgagatgggagattagggaccacttcacagaacaggtagatttgggaaagaccttgggaaataggattttggaaggttaaaaataaaaagaagaaccttctaaattgttcctctctcttgaagccaggtgtgcaccttcctgttgtacccccagcttggcggttcactgcgattttaactcaaaaaactgaactcatcataactttcctttctctccaaacctgcatctccgtactctgcctcagatggtggctcctcccattcaccaaccactsaacttggaagttaaccttgatagatattatttacccccttaatatctaattctagtatctattcaacccctcaatatctaatcaatctaataacttctttcacctcctcaatatctaatcaatccttcccctcacaaccttgtcttgaaaagaaatgcaattgaagtcgaaggcctggcctaagggacaca

SEQ ID NO: 755030 - DNA, 537 bp, Homo sapiens
tcactaaatggagggacagcctaatgaagccgaaagcaatgtgttatgggcacacacaggaaacagctggatgagatgggagattagggaccacttcacagaacaggtagatttgggaaagaccttgggaaataggattttggaaggttaaaaataaaaagaagaaccttctaaattgttcctctctcttgaagccaggtgtgcaccttcctgttgtacccccagcttggcggttcactgcgattttaactcaaaaaactgaactcatcataactttcctttctctccaaacctgcatctccgtactctgcctcagatggtggctcctcccattcaccaaccactcaacttggaagttaaccttgatagatattatttacccccttaatatctaattctartatctattcaacccctcaatatctaatcaatctaataacttctttcacctcctcaatatctaatcaatccttcccctcacaaccttgtcttgaaaagaaatgcaattgaagtcgaaggcctggcctaagggacaca

SEQ ID NO: 755031 - DNA, 578 bp, Homo sapiens
gacattgaccagttggtactgggagggcataaagaaactataaagtacaaacaacacctgtgccaggtgaaaggcaatgctggggcaaaactgacagaaaccacaggcccacagaaagaagcaaatcccttcttcctgccgtgcagcccccctggaatgcaaatgactggcagaatatagtaagaactcccatagtaagrgagtgatagggtttgactgtgtccccacccaaatcttgtcttgaattgtagctcccataatccccacgtgttgtgggagggacccggtgggaggtaattgaatcatggcagtgcgtttttcctgtgctgttttcatgttagtgaataagtctcatgagatctggtagttttataaatcggagtttccctgcacaagctctcttgcctgatgccatgtaagatgtgattttgctcttcattcaccttccgccatgactgtgaggcctctccaaccatgtggaactgtgagtcaattaaacccttctcctttataaattacccagtctcgggtatgtcttcattagcagcatgagaacagactaatactaatacagggag

SEQ ID NO: 755032 - DNA, 633 bp, Homo sapiens
acttcttcctctcatcccactaagcacaactataaatcctgaaaatgacacaagagacaaccaaaggagaaccccaacaagcagtgagaaggaggcaagaatgtttggcaccccaggactagaggaacagaacagtgactggacattttgcaccctatacccaatagaagaagtctacctaaacctactgttttttgactcattacttagcaagagagagcatcccaggtagagtcacaggggtttgttgtacagacatttctccacccaggtactaagcctaacattcaatagttatttttttctgatcatctccctcctcccaccttccaccattcagcaggccccagtgacagttgttcccttctttgtgtccatgagttctcatcrtttagctcccacttataagtaagaacatgtggaatttggttttcttttccttgacagtttgctaaggataatggcctccaagtctatccatgttccctcaaaagacatgatctgtttcttttttatggctgcatagtattccatcatatacatgtgctgcctttttttaatccaatctgtcactgatgagcatttaggtttattctgtgactactattgtaaatactgcttcagtgaacattc

SEQ ID NO: 755033 - DNA, 496 bp, Homo sapiens
gcaaactatcgcaagggcaaaaaaccaaacaccacatgttgtcactcataggtgggaattgaacaatgagaacacatggacacaggaaggggaacatcacactctcgggactgttgtggggtggggggaggggggagggatagcatttggagatatacctaatgttaaatgatgagttactgggtgcagcacaccaacatggcacatgtatacatatggaactaacctgcacgttgtgcacatgtaccctaaaacttaaagtacataaaaaaaagaaacaaacaaaaaaaagaatatcccattctcctcgccaaagtgatttgtttagggatatagacataatggtccaagatggacaasttggaatcttctacaggctttctgctggaatttttacttaattccattggaaataacctttgaatctaggattcctgtgagatggaatttctgccctcttttctttcacgtggaaagaccctacccacgaactggc

SEQ ID NO: 755034 - DNA, 603 bp, Homo sapiens
aattcaagttcttcttaccttgactaatgcaataacattctgtttctcttcctatctcctctaagctttttccacccagtcatcagcaatcattctaaaatgtggttaaaagtgcagactttggagtgtggcaggtctgaatttcaattttttatttctatcaattataagctgtgtgactttggacaggatacatagcctctctgatgctaagtcgcctcacctttccatggggtaatgacacacatgccctgagtgtaaacaggaataaggtacacctcgactcctcctcatcgaggctgcctccacccacccttttcttagcttcccacaggatgtgaaatgtggaaaaaacytccaattaattgttcaaagcattctggttggttagagtttaagacatggactttgccatgtttgtgagtagatagagttactgtttcttaaaagtctggtcccctgtatggctacaatttggtgctttccacctcagatctaggtggggcttggactctcttccccgaaggtatgagaagggagggtcctaacagctatgttgcaaggagtgggtgtcttagtccatttgcattgctataaaggaat

SEQ ID NO: 755035 - DNA, 578 bp, Homo sapiens
aacaggacacaaaatctaaaagcaataaacactatctatccaaatccacatattcaaacaaagaagtttgtagaagttcctttagcaagccaccagttacttagctaacaacactgactcactctccttccctttaagtcatgtaccaaccgaggacccgaaaataactctggaaacttctatacaatgcctgcacttctgctcccaactgatgggtcagttgtttgtccccctaatgatattttacttacaactatgcaatttatttaaataatattacggaagtgaaatgtgagtttagaaagaaatagacttgtggtcatggtttcaatgaaaaccaaatagaattctttgtagacacatgataaagrtgagttgctaacaaaaatggtaagataactaccaaagaggaaaatgctgtgcaagtgtagaataatcttgcacccagatttcttcacaagtgaccaaattctcattcctccttagagaaacagaaactgggaagttgtattagtccattctcacactgctgataaagacatacccaagactgggtaatttataaaggaaaagaggtt

SEQ ID NO: 755036 - DNA, 624 bp, Homo sapiens
tgttctgtcttcaagggttgttttcttttcactttcacacctgccctcttaagagaccggcactgatgtagatatgaataggagcatcacatgagacagacagtcagagtggggtacaatgaggttagcaacttctgcatcacagttacttgattatctctctgcttttttttaaatcccaaatttaaaaatccaaatactttttagcaggtaaaacattttccttttcaatcaaaatgttctactatgctctctttgattagtctattgaaagctaaacctttgtccactgaagtttttttaatagtgaaatttcagatgaggagattggattggttgatggctagcatgtcaaaggacctggcctatcaagaagttattaaagcaattagcctttaacgaagctgctgcaggagaagctgtagcatcttttccactggcactcctgcaggtctaygccatttcgtgcctggcatgttatgtatgatctacttcatgctatcctcaaactcaccctacctttccctcttccagccttaaaactggtaggggaattttctttacaaagtccaaatctaatcacctgaaacattttaacggtccctcattacctacagaataaag

SEQ ID NO: 755037 - DNA, 614 bp, Homo sapiens
ttttggctgatttacttctttgctattaaaaatgggtgcctagatcataatgtacatcaattctgtggaaaattagcaattccatgtttttgctgtctttctctttaaaaaataataaatgaacatggggtcatgactgcagcaaagagacagttgcctgtgacagagaaaatgtwtataataagtaaatagctctgtgaattactcagtactttcagaattgtatgtaagatatgaaatgtggaggtgcaaggtcctaatgactagttttccgaggcattttctttagtgttacatccctcataactcaaatgaatgtttattactattctttcatattgccaaaatattttcatgaatttggattagaagcagcttgttctggcttgttttgcaactttgtttcaggaaacaaagtgatatttagaagatttttgtatgtcatagaagctttaattatcttacttatgttgaaggagatcaaattctgtttcagagttatgtaagaaaataagagtttatactatgctaattttatgttgccagataattaatgtctttcaaaaaatttgaatccgtgatttgaacagggttcgctgttaaataaccagcaa

SEQ ID NO: 755038 - DNA, 531 bp, Homo sapiens
ttcttgccttttgtctccgattgtcctctgtaatatatatttttacaaattctgcattatcttccaattgctttattgaatttgtaagtttgagtcttatattttaatctttcaggagctcttgactgctgagcagtcttattattttaaagtagcattgatatagcagttaagaagaaatcacttaggcagatagcaaggrcatgggagtcctcagtaaggcttttctttttaataaaaagcagccccaaatcattttctaacaaagagccgcctgcaagctgggagcttgcacgggtgaatgccagcaggaactagggactagacatgttcaaaatggcggctccatcttcccttctctgcctgccacgtgtacagtaagaagcaggcaagatggggctgatcaactggaaagtctgtttgcataagaagattagggtggggcaacctgccttccttagcgctatgtaaacgtcatacctgatcgaatcaatctgtgagccctgtgtaaatcagacaccgcctcctcaa

SEQ ID NO: 755039 - DNA, 602 bp, Homo sapiens
ttgctgattcatctaacaaatatttgagtgactactacattccaggcactattctcattgctggaggtatggcagtaaaaatatcaagacaaaagacaatgagctcccatgaagcttatgttctaatggagaaagacagcaaatgaacaaaaagtaaaaaacacaaattcatataaaggactatgcagaaaatagcacaatrtgaatgggtggtgtgacagattggctattttaggttgaatggttggagaagaatctctgagaaagggcatttgagctgatattccaatgtcagaaagatccagcaagaagaaaaagtacaaaagccctgggctggggaaaagctttgccagggtgtttgcaatacagtgcaaaggaggcacgtgtggtttgatatctgaagtcagaggggtaggtaggaaccagataataatgtagaaagatcacgctgctatatgaaaattagttcaagtggcaagaatgaagggaaggagaccagttaggaggctactgtagtgtgtgagagatagcagtggctggacagggcaatagtaaagataaagagaaatggacagattggagattttgaagacagactgatc

SEQ ID NO: 755040 - DNA, 577 bp, Homo sapiens
ctatgcaggagatatgtttagagacctctcagaaaaacttgcctggtttgagggtacacagtaccattttaatcttctgaaaatatctgtattcctgctctttttctgctgtcactgtcaatctgctatatttttcactatcctattaaaatattactgtctcctttatctgttcaatgtccatattttaaaaaaatcttccttgtatgagctattctgatcyaaataatttctctgatatttctctatatggctcccacaacaatttcattgttgttagcatatctatttctccatacattgtaaaactgtaatccttaggtatttctaaaacataaagaggagaattaagtcagctgcagaacaatggggctgattcttctgctttttctctggaaaatctttcattgcttttggtggaaatttacctagaggttacaaccacaggatgtagcttggtctcttatttgcctttttgggaaaccaattaagattaatacaggataaaggaaaaaagcaatctattcattatataacacagttgtttgtattacttgttccctgcaaaggaaatctg

SEQ ID NO: 755041 - DNA, 633 bp, Homo sapiens
catatcaatccatgtgcaaacagatttattcggtaagctccaatcctcttgctaacccttcactgcaataattaagcacactctaatgagtttgttagtaatttccatatgattttcctcctaattattatttgagttgcccatgtttataatacttagtaatatccttaaagtatcaatggtgaagacacaattttggctggtgtattaatttgtatttccttattcatatgctaaataaaccaggagaaaacattcatttaaaggtcaaaatttttggaataggattttwtgtgtgtgtatgctcatttcttatacacttattcaatacccatgaagcaaatgagtcatcttagcctaaatcaggtcatgtcattccctgcttaaagaactccgagttcttatcatggctttcaaataccattctgactttgtctcttaccacttgctacacaattggcttcagaatactgaccttcttcctgcttcacaaaaaggccaagctggtttatatcatagggtctttgaacttaggacagttatgcctggaatatccttttcccatcattttatgtagatggctcccttttatcatcaaaaaggggtccactcagatatcacttcatcagggaa

SEQ ID NO: 755042 - DNA, 581 bp, Homo sapiens
aaatatatgcgtttttaaaacaagttgtgtgaaggaaaacatattttatatttactctgttacaggttccaaattaaagaaatcccagttaacttggttacattatatatcaacagccctttcctttaatatcaaaaggcttttcttgccttttaaaagctttatttttaatgaacacataatgttatacatatttatagggtacatagtgatattttgacacatgtaatgtatagtgatcaaatcagagcaattcacgtatctatcttctcaaagatttatctttttttttttttttgcattggaaacattcaaaatcttccttctagctatttgaagctatatactatattattgtttactgtagtcctaccagtggtacaaaacacttgaacgtatttcttcctatatagctgttattttgtgtcctttaacaaattctkcctatccccttcttcccctatgtttcccagcctctggtattctctcttctacttttaatctctatgagatcatgtttttgtttgcttttgttttttatctttcacatgagtgagaacatggaatgcgacgtttaactt

SEQ ID NO: 755043 - DNA, 589 bp, Homo sapiens; identical to SEQ ID NO: 747675

SEQ ID NO: 755044 - DNA, 589 bp, Homo sapiens; identical to SEQ ID NO: 747676

SEQ ID NO: 755045 - DNA, 593 bp, Homo sapiens
gaattaaatactactttaaataattctgtgtttttaattttttgaacaataaacccatttaatatatagctctaaaaatacatataagcacacacggctcatacgcacacaattgttaaagtacaactatttttaaaaacaattatccagatttgcctcataaggaaaaacttgtgacatttgaattcataggaaaaaasttaagaataaaatttgttaaaataatgtctttcttttctacatgactactgtcaacctttcttttcacttgtttctaaatgaacccatctctgatacatatctatttcattttttcattgatgtatttgtcagaatgtctaactcataaagatgtataacttttcctgggatttatcacactacccaacatatttgaatctcaactgttagtattttatttcacaaaattcagtggtgatttgatttgatatggcatcaatccaacatgagtactcaaggtgggaaagatatattcgtccttttttaaaagttttttaaattgttattttttatgggtacgttgttggtgtgtaatttatgaggatgtatgtgtcctttcatcaaaatatata

SEQ ID NO: 755046 - DNA, 593 bp, Homo sapiens
gaattaaatactactttaaataattctgtgtttttaattttttgaacaataaacccatttaatatatagctctaaaaatacatataagcacacacggctcatacgcacacaattgttaaagtacaactatttttaaaaacaattatccagatttgcctcataaggaaaaacttgtgacatttgaattcataggaaaaaacttaagaataaaatttkttaaaataatgtctttcttttctacatgactactgtcaacctttcttttcacttgtttctaaatgaacccatctctgatacatatctatttcattttttcattgatgtatttgtcagaatgtctaactcataaagatgtataacttttcctgggatttatcacactacccaacatatttgaatctcaactgttagtattttatttcacaaaattcagtggtgatttgatttgatatggcatcaatccaacatgagtactcaaggtgggaaagatatattcgtccttttttaaaagttttttaaattgttattttttatgggtacgttgttggtgtgtaatttatgaggatgtatgtgtcctttcatcaaaatatata

SEQ ID NO: 755047 - DNA, 622 bp, Homo sapiens
ttcatcttttattgacttttttacttacacaactaattattaataccatctcctcagataaatggactttggttattttgatagctttcaggacctgaaacgtaaatcgattcacactgtaaatttgaaagatagataattcaacaattttaggccatctaccatgtatccaggttttggtgatgagggagataccaaatcaccatgagaaaacttctgtgtagacaaagtaactttytcatctgaaaaggctagactagttcctagagaacaatcaggcaagccatgctgcttgggaaaaaaaaaaaaaaaagtgcagctttagagaagtccaccacctgattcctagagactgagagagaactatgtgtaggaaaggacacttgatctttcctacctcctcccacctcagcctctcaaagtggtgggattactggtgtcaaccaccatgtctggccccaacctgaacttcttaatgtggctaaggcactgtatgatctaaccactctttagatgtcctaccccctgcatgtctttcactcacgaaggaacacaaaaccagtggcctagccacatttcagacccctgaggtgacttctgtttatgttctttcctttgcctg

SEQ ID NO: 755048 - DNA, 485 bp, Homo sapiens
aacaacaaggatgaatctctttctgcaagaagttaggaaaaaaagtatatactgtacagtttccatttgttagaattgtagaaaatgcaaactatacagtgtcagaaagaagatcagtggttgcttggggattggggaggagcagaatggagattaaaagggagatatgaggtgactttgaagaatgatggatatttttgctatcttgattgtggtgatggtttcaaagatacacatattaaaactttaaaaatcgaacactttaaatatgtacagcttattrtatgttaattatacctcacaacttaaaagggggagggaaaaagagaagagaaatatgggtatacattgtcaaaaggctctccaacttagaattttcaagtgaatggctatcctaaaacctgcatttttaagattattatttctgagtcagggccccaggctggagagcagtgcaacatcacaactgcagcctcaacctcctg

SEQ ID NO: 755049 - DNA, 619 bp, Homo sapiens
tccagtgtgaattctttcatgggcctgaagatgtgatctctgagtgaagcccttcccacacacctcacatttataaggtttctctccagtgtgaactctgcaatgaatgttaagatctgtgctacgactgaagcccttcccacaactgtcacatctatagggcttctctcctgtgtgaataggcaaatgagcataaagatgtgagctctgattaaagctcttaccacactcgtggcatgtatagggtttctcccctgtgtggactctctgatgagtttgcagatttgagctctgactgaaacctttaccacattcatgacaccaatagcgttttttcccagtacgaacactttgttgaacaggaatacctgagctataactggtgtccttctcakgtgtactacacgctggagacttctttcccaagtgtacctgtttatgaagttcaagactggagctatcattgaaggcttcttcacattcattaccctggtaggttttctgtcctgtgtgaatactacgctgggtaagaggtgatacctttagggtatctttaccacaatcactattgctatgaactttatctcttttgtgcactatattatcatcatgggggtgt

SEQ ID NO: 755050 - DNA, 598 bp, Homo sapiens
cgctctaggttccgcatcagctggtgtgctgcccctaccacttctcgaagcagctctccctgacaacttaagtgtccatggtgtggaagggtctcctgctattgtgattccagaagcccgtagtgagagcgggttgctaatttccggatcaamtcatccgttctcccaggagtagtcgttggatgtcaggaaggagtccaggtgcacagtagggctctgcagggtacccagattcttccttgagctcagcttgtgtcttccctccgtccactgtcactgtcttccggagatctattaggagtgtgccagttgtccgggtccctcggtggcagctgcatctagtcagccatcttctgcatctagtccgctatcatctagtcttttttttttttttttttttttttgacggagtctcactgtgtcgcccaggctggagtacagtggtgtgatctcggcttactgaaacctccgtcccctgggttcaagcgattttcctgcctcagcttccggagtagctgggattacaggtgcctgccactgcgcccggcaaatttttgtattttttgtagagaccggggtttcaccatcttggccaggg

SEQ ID NO: 755051 - DNA, 613 bp, Homo sapiens
actaacattgtccccattattgaagtttacctcattctaggtcagagaaacctctcttttttgatggagaaatttgaagcaagtttgaaagtggaagaactagccttcaactttcctcaggaacactactatcatccctaagaaaatgtagactaggacaggagattaccctgtattaccaagttttaattttttctactagcagtattttggagaaggctcttgtttcccattgtatgtcaaaaacacaaaaggacaccraaagagaaaaatgacattggctagcgtgaacttagattctaccgtaaaaaggtatttatttgagaatccttctgctaacatagattcccttaaaatctagccatttctttttaatcgaaagttgtaacagaaaatgatatctgatttacattttaaatttccacataactataaacttttatagtggtgaacagatgttgatgtgaattttacaaagctaagatatacttttcaaattcatgtcagaggaatgtcaaactgaaactaggaaaagaagttctaaaagatgagcaaaattgcagtgactactaggactgctttagtacgatgatatctttttcaactaacatcc

SEQ ID NO: 755052 - DNA, 643 bp, Homo sapiens
atccagtgtttcttaacaatggttaacttaagaagggggcatacatgaagagaattctgttggcaaggagataaagatttcagggaatggcttcatagattcttcaaagagactcaaggaaagtcttgtataaggcatcaaactcctagaaagatgtagccgtatttgatcacgaggcaagttggctggccagttaagaataggaagattctataaaaggaaagtacattttcagtggatccatgaccatgccatttaactgctgagttagcaaaccctgtagctaccctactcatggacttgttgttaattaagatactaaatatccttatgtttaagscatttgaaactgcaggttctattacttgcagctgaaagcattcaaactgatagaccatgctagttctcaagtatgtaaataaaatctcacaatagtatatagcacattgcacttttaaaaattgttttcaaatacatcacttcattactctcaaacaggttatatcacaatgaagacctttcattattttctagagataagaaaaatacagatttgcaagtttttctgatattccaaagctctccaaactccaaattagtgttttgttccacctcaaataatgaaattataaatacatcttac

SEQ ID NO: 755053 - DNA, 646 bp, Homo sapiens
ctcatcgtttgagaagctgagaagtcccagatcaaggtgccagcagatttggtgtctggtgagggccctcttcctggttcacagacagctcttctcactgtgtctcaggtggtagaagggccaagacagctctccgaggtctcttttataagggcacaaaagccaattgtgcaagctccacctcacgacctgatcacctcccatataccatcacctgggggttaggatgtcaacatgtggatttggggggagcataaacattcagtccattatagtagtgtataagccaaagtgtgaacattggcatctatgatgtagagatttgaggaatgatttttttccctttatctgtatttttaaaattttctacttgagaaacttttaagttgattcaaggaaaaaaaaatctatcgtaggtcaggccagayaggttcagtgaggatcctggttccttggacctgtcatacccgaaatctatcaacaggcgctaactgcttgacacaagctcctgaaacaagcatttactcagacgaactcccagcaatgccaccctccttcctgcacataaacccctcttggtccttgctcttcttggggatgatgaacagggtatttcctttcttggaaaagtgctgtgggtctgaag

SEQ ID NO: 755054 - DNA, 558 bp, Homo sapiens
aaataggttaaaagtaaaaggattttttaaaaggtataccatgctaacattaatcaaaagaaagttaaaatggctatgttaatatcagacaaagtatatttcagaacaaagaatattataggaatagagagtcataatgataaaggggtcagttcatcaagaggctacatcattctaaatgtttacatacttaacagagcttcaagatgtatgaagcaaaaactgacagaactacaaggagaaacagacaaatccatattcatagcctctcaatcatcaacagaagaagaagacagaaaactggtaggaggcttgagcaacaatatcaaccaacttgagttaactggcaccatacccaacagcaattttttttttwaaatgcacacagaacttttaccaagataggtaagattctggaccaaaaatcaagtctaaataagtttaaaggattcaagtcatacaaagcgtgttctccaacgatattagtgaaattacttagaaaaaaatttacaactctaaatgcttatattacagaattagaggtctcaaatcaataat

SEQ ID NO: 755055 - DNA, 568 bp, Homo sapiens
tgaaagacagagagaatatgcagtcttaacttcctgctagtctgttcctggtgaggctgggtgcagagtggcttcaatggccactttccagtagacactgcttgcttcctctttccttagtccttgtatcgagccttgtcccaaacaggaattgacattagattccgcaacggttggaaaatttcctcagtaactattacttaacttgattccagcaccataataatgactgctcctggtttcaggttttggatatgcattatgccaagctgacgtttttacgtctattakgtcaactacgccacccaactaaagcctaaacttggttcctgacctgtcttcatatccatttcctacttccccaagaatcaacccactttcttccatccattctacccagccatttccccatgttctttgtgtctttgtgattgagctgatattctctatttcattttactttagagacaagaacaacaacaaacagggcttgctggaatccagccaagcgaagtctggctacatggtgactatgggattgtggttttctctctagctgattgagagc

SEQ ID NO: 755056 - DNA, 665 bp, Homo sapiens
cgtcactttcaggtacaccaatcagatgtagatttggtcttttcacatagtcccatatttcttggaggctttgttcatttctttttattcttttttctctaaacttctcttctcacttcatttcattcatttgatcttcaatcactgataccctttcttccagctgaccaaattggctactgaagcttgtgcattcgtcacatagttctcctgccatggttttcagctccatcaggtcatttaaggccttctctacattggtaattctagttagccattcgtctaatcttttttcaaggtttttaacttctttgcgatggctcgaacttcctcctttagctcggagaagtttgtycatctgaagccttcttctctcaactcgtcaaagtcattctctgtccagccttgttctgttgctggtgaggagctgtgttcctttggaggaggagaggcactctgatttttagaattttcagtttttctgctctgttttttccccattttgtggttttatctacctttggtctttcatgatggtgatgtacacatggggttttggtgtggatgtcccttctgtttgttagttttccttctaacagtcaggaccctcagctgcaggtctgttggagtttgctggagacccactccagaccctgtttgcctgg

SEQ ID NO: 755057 - DNA, 497 bp, Homo sapiens
tgtcttttaattggggtgtttagcccatttgcatttaaggttaatattgttatgtgtgaatttgattctgtcatcgtgatgctagctgattattttgcagacttgtttatgtagttgcttcatagtgtcattggtctgtgtacttcagtgtgtttttgtagtggctggtaatggtttttcctttccatatttagtgcttcctccaggagctcttgcaagrcaggcctgctggtgatgaattccctcagcatttgcttgtctgaaaaagttttatttctccttcacttataaaggttagtttggctggatatgaaattctaggttggaaattcttttctttaagaatgttgaatattgacccccaacttcttctggcttgtagggtttctgctgagaggtctgccgttagtctgctgggattccctttgtaggtgacctggcctttctctttggctgcccttaacatattttccttcatttcaacattggagaatctg

SEQ ID NO: 755058 - DNA, 549 bp, Homo sapiens
aatttcatcaaagtacacacaggtacacatactcatgaggcactgagaaagataaaaactgaacacaaaaatactaagactgatgcacaacctactgtgaggctgggaaatcttgcctgcttgtcaaggcagggagaatgttggtgtcaatgtgtgaagggaatttagctcttcctttattccattaattcagataccaaacaaccagacagtagggtgatcactctagacatatttgatatttttatactaaacgattaaacaataaaagaagaacaatacataggtgmgtaatacttcatattggagtggtgaaggcctttattgtctaagtaacaaaggcagaaaccaaaaggagatatatttgatagatttgatatcatagaaatcagaaacatctatatcaaaagcaccacgcacatttataaaaccaaaggcaaattgattaaaaaaattgtgacatatataacacaaaagactgaattttaaacatgtttataaccctcacaaatgaaaaagaaaaaataaatgacagaaaaagtggacaag

SEQ ID NO: 755059 - DNA, 595 bp, Homo sapiens
acctttggcacaacaattacactgtcccaaaatatattctaaagaaataatcaggagtaactacagttatcaataataatatttttgtatactgcagtgctattaaaataggaaaacaaaggagtgggatagggaagcaacctaactatataagagatgattgattgaaaaaaaaaaaaaaagatagcacctttacattgtagaacactgcctaaccattaaaaatcatgtcttaaaagaatatccaggctgggtgcagtggctcaagtctgtaatcccagcactttgggaggctgaggcaggcagatcatgaggttgggagttcaagaccagcctggccaacatggcgaaatcccatctctactaaaaatacataaattagccaggcatggtggcaggtgcctgtaatcccagctacttgggaggctgaggcaggagaatygcttgaacctaggaggcagaggttgcagtgagccgagattgtgccattgcactccagcctgggcgataagagcaagactctgtctcaaaaaaaaaaaaaagtatctaatgatatggtaaaaattaccccaatataattttaaatgagtatacc

SEQ ID NO: 755060 - DNA, 593 bp, Homo sapiens
ttcttctttttcaaaattgttttggttattctcgttctcttgcaattccatttgaattttataattggcttaacaatttctataaagaagtctgctgagattctattggggattgcattcaatctgaaaacagggtgggagcattaccatcttaacaatgtgaagctttccaacccatgaayctggaatggctttcctcgtatttagacctttttaaatgtctttcaataatattttataattttcacagtataagttttgcagttctttaaatttttttctatttattttatcctttttgatgctattataagtagaattgttttcttaatttaatttttaaatttttaattgcatttgaattttagaatcagctcaccaaatataattgatttttgtatattaattcttgctgaatttctttactagttctaataggcttttagtggattccttaggattttctatatacaaggtgatatcatctatgaatagatatagtttttatgttcttttcaaatctggatgccttgtatttctttttcttgcctaattgtactggatggaacatcctgtataatgttaaatagagg

SEQ ID NO: 755061 - DNA, 585 bp, Homo sapiens
acactacaatctaaacccagggcataaaacaccttgtggcttggagagagcccagggcacagggcataaaacctcttgtagcctctggaatgtgtccaaactcactggacccttgctccttgctctcccaagatcataaattgattgtatcttgaattagaagaacctgttctcccttatttcaagtagcagaaaatatgctaaaccgtcacagctacgcttgatgcaccactacctttctatcctcacatcctcacttgtctacccccacatctgaacgtgctcaccacatgcttctttgtttgattaccaataaatattgtgagctcccagagcttggggccttcacagcccccaaactgacgttggccccctggacccactctatgtactcttaacttgtcttgtctcatttctttgactccrccagacttggtagtccccatgacatggtggtgggtcttatcactccaacataaaggaaccacgaagaaagaaagatgtaaagaaagttataaaaatgaggagatattttgtgatttgtgtgtgtctgtgtgttaagaaaacttacagaaataattttat

SEQ ID NO: 755062 - DNA, 600 bp, Homo sapiens
aagttttatattaagtgaaagttgcccttataattacattattttcactttaatggtagaatcacttgaacccatgacgtggaggttgcagtgagccaagattgcaccattggactccagcctgggcaacaagagtgaaactccatctcaaaaaaacaaaaatgcccaacatcactgatcatcagaaaaatgcaaatcaaaactacaatgagatatcatcatctcacccaagttagaatggcttatatacagaagacaggcaataacaaatgctggtgaggatgtggagaaaagggaaaccttgtatgctgtagatgtgaatgtayattagtacaaccacatgaaaaagtttagagttattcaaaaactaaaaattgagctaatatgtgaaccagcaatcctactgctgggcatataccccaaagaaaggaaattagtgtatcaaagaagtatctggactcctatgtttgttgtggcactgtttccaacagttaagatttgaaagcaactgaaatgtccatcaacacatgaatagataaagaaaatgtggtgtatatactattcagccataaaaataaatgagatccagtcatttgcaac

SEQ ID NO: 755063 - DNA, 602 bp, Homo sapiens
agagggaagtaggaagcccaaaggagatggagcacagtcagaatcacccacaacattgtaagtcacactaatttcaaaatcattaatgaaaggggtctgatgtctgataaagcaggatgttgagcagagggaaataatgaaaatatgcagcacctatgatgatattctccaaaaggcatcacttctcggggaaatgatgatgagtagcaaggaaaggtacttttgggtgayctcctgggaaaggaaagtacaggacctataagaggaaattaaagtcctgaggaaacaaagaaggatgacaaaatctaaaggtattctaattcatccttcctcacttaaatgttgtactatgctaaaaaaattataaagaagccacctatgaactaaaaatcttagaagacacccaaaaaccgtaactcttcctctatctatacagagccttacttcagcacttcaaaatgaacagaagacaaaaatcattgtaactccatagaaagctctggtaagaagaaaccaaaaaaggagaatcataacaattcaattcatgaccccctctgagagaaccaagagcaaagaacatttacaaaattgtgtaggttggg

SEQ ID NO: 755064 - DNA, 596 bp, Homo sapiens
taccatttttgaggaggctttggctacagatcttgaggctttgcgcaacctagtgacaattgtgtgctattacaatacattgctgattttgttattcgcagccctcaggagggaggaatgccttcaaggaagaaagaggcttcatcacctgctgtgtgaagctggttacaaagtgtccaaggacaaggcaaaacaagtctgttttcgggaagttagatatctaggattcatggtatcccaaggccagggcaggcttgaaagggcacgctaggaggctgtatgtgcattgcccaccccagttaaaggcagcaggtcagggaatttctaggcrcggtgggattctgccgaatctggattctaaacttctaccctataacaaggcccttacatgagtctaccaaaggtgggaaaagagagcccctcttatgggaaaaggaacaggaaaaggccttcaaggatataaaggaagctctcatccaggccctgtcactagggttgccggatgtaaaaaaagcccttctttttgtatgtggataaacaaaatggcagtcggtgtcttaactcaattgttggcctcttggcatcggccagtagca

SEQ ID NO: 755065 - DNA, 524 bp, Homo sapiens
atgttggccaggctggtctcaaactcttaacctcatgagccaccggcctcggcttctcaaagtgttgggattacagatgtgagccactgtgctcagccttgttttcatatttttgggaaatgtttgtctccaaactgggatgatttttccttttctattaataatgcagttttctcaaagcaagagtgatgtacgatggatgttagggaagagtgggagaaaaaggcatgagaatgtatgtagcagaaataaagtagtagaaggkattattcatcttgtgagtaggtgaattgttgttatgtggtaataaaatgtcaggggagagctgacaaaagggctctgtcaggaacaaatttatgattttatatgggcaaacatacatgaatatgtagtgtccaataagtattccctgaatgagtgaatatgcaagtcatagatacttacttatagtaactagtagattttatatgttagtgtttgtgtacgtgtgtgtatatatttgtatagtactttgtcttatctag

SEQ ID NO: 755066 - DNA, 571 bp, Homo sapiens
tttattatagtagagacagaggttcaccatgttggccaggctggtctcaaactctggcctcaagtgattccccccacctcagcctcccaaagtgctgggattacaggcatcagccactgcaactggcccattctcttctttttctagagcaggagttggcaaatgttttctgtaaatggccaaacagtaaatgttagactttgcaggccataaggcctctgccacaactactyaactctgcctttgtagccgaaaacagcagccacagacaatatgtaaatgaataggtgtggctgagctccaataaaactttgcaaaacctgggtctcctttcttgtctttggagccctcctccctctggagagctttttccttctttcttctctcttctttcttgccttttaaacactctgctccttaaaaccactccaactgtgtctgtgttgttttatccaattcgcgcaagacgagccctggtgctcctccactcatcggagccgtatcagtgccatcttcaaagcagagaccaagtcctcaccagacaacataatctgctcagccctgatcttgg

SEQ ID NO: 755067 - DNA, 482 bp, Homo sapiens
ttattccgtcttctgcctcaaatcatattccagtttgtagtattcatactctgagcttaggattttcccagtgtttcctgtggagggttgctttttcattgtctttgtctattttctttgtcaatgcaataacaacctctataaatctcttgcaaaattctttcacattctttgttcactaatgacactgawagccttctcttttatttttcgttatcatgtttaatctcttgctattgattgattccttttttttttctgatatttcaaagggatctgaacaggacagagcagtaaaattgtttgggtttagtttgccatattgaatcagatgtccagaacattagattagctccagaaacagaataggacaattccagtaactttgactattcttggtaaaagtcaaaaggaattgtaagagctactatcttagcctaatatgctgagtttatttttggtatattattaaaagggggaaa

SEQ ID NO: 755068 - DNA, 559 bp, Homo sapiens
attttaatgtagttttaactggtaattctcatattatgtgaaggtggagcatcttcttaagttagtgtctgtattagtctatcctcatgctgctaataaagacatacacaagactagggaatttataaataaaagacatttaattgattcacagttccatatggttgtggaggcctcacaatcattgtggaaggcaaaagaagagcaamgggacttcttacatggtggaaggcaagagagcttgtacaggggaactcccatatatgaaaccatcagatcacttcagatcatatgaccttagtgtttttggctaaacatactgaatactacttgcatgcagaagagaattagttgattacatgtttcaacctcttagggtgataaatacatgtataattgtttacatacttgaaaggaaaaagttgagtaaatttcttgtcatacagtggctctatgtaatgtagcttgtattaatgtgaaatacttaccagaatattcaaaaaaggatgaacagagaaagaaaaacattagatcttgtgagacttattcactattgtga

SEQ ID NO: 755069 - DNA, 597 bp, Homo sapiens
atcaggcaactattttgcccaattccaaggggcgacattcatatagcattcaacatgaataatgttagcattgtgaagatagtagtggccaaaataattaaatgaaatagaatacaatattgatggtgcacctggagttgttcattttgttgacactattaargattatttgatatgacagctgaatgatgaataaacaatcatggttttaaagaagatgacaatacagcaatcaattcctttttttaaagaaaatatagcacttctaccatgattccaaattcccagaagctaaaagcacatttataaaatttataaaattaaacctagctcaaaattcacttaatctaggaatatgtttctaacacccactccatagcaaaatcaaagggctgtttttctgtgttcccttaatagtcataaatacttctgctatggtattttgtcatcactcattctaaattgtattttttcacctcatcagtcagaacttaagcttgttacaattgcagcatgtttaagcccattgagagctgagtttaatcgttcaataagaaaaaagtataaggcagggtcttgtccaatcaagtctgaaaa

SEQ ID NO: 755070 - DNA, 480 bp, Homo sapiens
tcattcattgtaaggtaattctggcaattaatattaagatgtgaagaaagaaactccagttccttactaaattatttaataggcctctggtcaactcacatgaagtgtgaggatgagagcaatcagcagggtgaggcacttgttcagtgttgtttcaccagtactcattacagcatatactacgcacggcaggctactgtcttaaaagaaaattgcctaaattccttwatttcctcaccagtatctaaataatgaagcctgaaaaatatacgattatagagttttctctaaagaaaacccccaagataaagatgcgcctttggcatgtccacttcaaactttgcattttctaaggagaaggttaaacggctactcatatgtatccctattttcccattgcaggactttggctaagtgatagtaagttgtattggataagtgcagtaactcgaagaacaaagatgataagctcttttgtca

SEQ ID NO: 755071 - DNA, 480 bp, Homo sapiens
tcattcattgtaaggtaattctggcaattaatattaagatgtgaagaaagaaactccagttccttactaaattatttaataggcctctggtcaactcacatgaagtgtgaggatgagagcaatcagcagggtgaggcacttgttcagtgttgtttcaccagtactcattacagcatatactacgcacggcaggctactgtcttaaaagaaaattgcctaaattccttaatttcctcaccagtatctaaataatgaagcctgaaaaatatacgattatagagttttctstaaagaaaacccccaagataaagatgcgcctttggcatgtccacttcaaactttgcattttctaaggagaaggttaaacggctactcatatgtatccctattttcccattgcaggactttggctaagtgatagtaagttgtattggataagtgcagtaactcgaagaacaaagatgataagctcttttgtca

SEQ ID NO: 755072 - DNA, 664 bp, Homo sapiens
tcattttcatttctctaatgattaaagataagccttttttagatgctttttggccatgtgtatatcttcttttgaaaagttttcatgtcatttacccactttttaatggtattgtttgcctttttcttgtacattaagttctttatagattctggatattagacctttatcaaatgcatagtttgtgaaacttttctcccattctgtaggttgtctgtttactctgtttatagtttcttttgctctgcagaagctctgyagtttaattaagttccatttgtcaaatttcgttgcaattatttttggcgtctttgtcatgaaatctttgtcaggtcctatgtcctgaataatattttctagattatcttccagggtttttatagtttgaggttttacatttaagtctttaatccatcttaagttgctttttgtgtattgtgtaagaaaggggtccagtttcagtcttctgaatatggctgaccagttatcccaacattatttatcgaatagcgagtcctttcctcattgcttgtttttatttattttgtcaaaggtcaggtggttgtagatacgtagcattatttctgggctctctattatgttccattggtctatgtttctatttttgtaccagtaccatactgttttggttactgcagtcctg

SEQ ID NO: 755073 - DNA, 664 bp, Homo sapiens
tcattttcatttctctaatgattaaagataagccttttttagatgctttttggccatgtgtatatcttcttttgaaaagttttcatgtcatttacccactttttaatggtattgtttgcctttttcttgtacattaagttctttatagattctggatattagacctttatcaaatgcatagtttgtgaaacttttctcccattctgtaggttgtctgtttactctgtttatagtttcttttgctctgcagaagctctgtagtttaattaagttccatttgtcaaatttcgttgcaattatttttggcrtctttgtcatgaaatctttgtcaggtcctatgtcctgaataatattttctagattatcttccagggtttttatagtttgaggttttacatttaagtctttaatccatcttaagttgctttttgtgtattgtgtaagaaaggggtccagtttcagtcttctgaatatggctgaccagttatcccaacattatttatcgaatagcgagtcctttcctcattgcttgtttttatttattttgtcaaaggtcaggtggttgtagatacgtagcattatttctgggctctctattatgttccattggtctatgtttctatttttgtaccagtaccatactgttttggttactgcagtcctg

SEQ ID NO: 755074 - DNA, 618 bp, Homo sapiens
aaggtgtactatgttcattttctccaaacctcatgttgcaatttgatccccagtgttggaggtggggcttaatgggaggtctttgggtcatgggggcagatccttcatgaattgattaatgccctcccttggaggtaaattctcactctattagctcctaacaggtggttgtttacaagagcctgtacctcccacctctcttgcttttcctcttaccctgtgatctctggayatgctggctccctttcactttccactgtgagtggaagaagactggccctctccaaatgcagatgcccaaccataaactttccagccatcagaactgtgagccaaatcatccagccttaggtatttctttatagcagcacaaaacagatgaagacattaggtgtatctcagaaaattagagaggtatggtgactgtctatataagggtcctaggaggttacactattataaagagagttttcataccaacttcttactctgtcataatatttatgtttatatattatgtttaaatattatgtttatagctctaaacataatacttaccaattgtttactactggtctaataattgttaacagcttcacttataccatcttgattgtt

SEQ ID NO: 755075 - DNA, 618 bp, Homo sapiens
aaggtgtactatgttcattttctccaaacctcatgttgcaatttgatccccagtgttggaggtggggcttaatgggaggtctttgggtcatgggggcagatccttcatgaattgattaatgccctcccttggaggtaaattctcactctattagctcctaacaggtggttgtttacaagagcctgtacctcccacctctcttgcttttcctcttaccctgtgatctctggacatgctggctccctttcactttccacygtgagtggaagaagactggccctctccaaatgcagatgcccaaccataaactttccagccatcagaactgtgagccaaatcatccagccttaggtatttctttatagcagcacaaaacagatgaagacattaggtgtatctcagaaaattagagaggtatggtgactgtctatataagggtcctaggaggttacactattataaagagagttttcataccaacttcttactctgtcataatatttatgtttatatattatgtttaaatattatgtttatagctctaaacataatacttaccaattgtttactactggtctaataattgttaacagcttcacttataccatcttgattgtt

SEQ ID NO: 755076 - DNA, 578 bp, Homo sapiens
ctcatgttgacagaatttgccgtaacgaaatgagtccgtgctccgtgtcatctattaccgaatttcagtaaggtctctggcacccacgacgcccaggagggtaagcctctccttggtttcctatttctgtctcctgattgccagcacatctaggattttttgaaactctaattggttgtcttgatttacgcagagttcccagcgatgccaacggaagaagkcctgtagttgctgaagccagagtcaccagtgtggatctccacttcttcccacctcctcaagcccctcccatacctgtgtttagaaacttcacaggaagcagagttggcaagcatacctgagctgattgctctcgcctctctcaccatcttgagtacatcatcgtcaccctccagagccctcctaaacaaggtttggcaacagcaaaaacaaacactattttacaacatctttggatgcacttccaaaacgcaaaagcaattaatcagtcatctccctgagactctcctcaaggtggctgctgcctttgacatggagcttggctttgatgggagccgaagaagcaagtgaagacagcc

SEQ ID NO: 755077 - DNA, 501 bp, Homo sapiens
tcatcacactggttcctgtgtaccatgttcttgatactctccttgagagacagaactttcacagtttaagttttgtttgtttgttttaatacaaaatgatgaagtggggtcactggggccatggattttggcagtggacyatctcagtgatttcctgtgtcatactacctagatgaaactggcaaaccctgcagatcacaaccacgacaaaccagagctacgtttgtatttggatccactcatttgagacaaaaattacagtcaaaactctaaattccaggaagggcgtttcactgcacgtgggaacagtttcaagaaatcaagatcttgagaacagaaatgaaacaaatgaaacagcatttttgtttgtttgtttgttttgttttgttttgttttgtttttcgaatttccagaactgtactgttgaaaagaaactgatgataacaatacccttaacaattaacaatttcacaagttatttttcacatactttgtctcatg

SEQ ID NO: 755078 - DNA, 391 bp, Homo sapiens
aacatccattttattcaacaaacattccctgaggagcagtaatatgccttgcactcagcttggtgcacgtacacagaaagggccaactggcagaaggtgggagacatgtcaatcagtcacacaagtacatgtaaaattcaaggtcctgagggcctacaagggccatccatggtgcaatggagcmgagaaaacgtgtttctgagaaagagagttaagggaaagttgtggtattagatgctggatcctacttctttgacttaactttagaaagaatgaaatggggaaactagtaatgaaaaacaccatttttaggtctcagatggtcattgtctaaacctccgcctgcctgtaaatgtaggtgatgcatggtgcagctgatttctttttttaa

SEQ ID NO: 755079 - DNA, 607 bp, Homo sapiens
aatccagccaagagaaatgcactggacacttacttcctacttcactgcagtccacttaaaggtcactaaagcatagaatccaaattgccttgtgacttgaagttagcaacaggcaaaccataccccaccttgctacatgtccatcagaatttcattgggaagcacagctcagaagtttttcctgacagcctcaaggctggggatggtgctgataccctttcaagttcccacagcacctggtgtttggccaaagcacgtgggacactctgctatgtcattctgtccatctctcagaggaacccagagcaacctccaggcaggtcctgcatctgattcatggctctctctctctccggtgcctagacccaggccctggcacacagggcagagacacggcttccacacgtgtttgttgaaggaaggaaggaaaaacaggaygcgttaccatttttgtctcggtaaatattgacagactcactctctctacttgcagtctggtgtcactatgtctgctgttgctgtataaatgtgtgtgagcctggcgaaggttcattcgctgctattgtgtataatgtgtgtgtgtatttccctctttagctgtagaaaa

SEQ ID NO: 755080 - DNA, 549 bp, Homo sapiens
ggtccacggctttatgaacagaggcttgatcttagccttactcacactctccactgggcacccttgtgcaggcacaagtctatctgtgtgaggcagacctggagtgattttgtttgacccagtgtcctgaacgtgttttgaaataagacttgctgtaaggactggtaaaggtcagtgatgttttggctttgcgatattcacttaccagctgcattgtcgtgttttagggaagaagtaattgtactctctgaaggttttttccctatttgagtatgattattccttaaccactagagaatgtgtcttctctaagtagaatgggaggtgaaaatctccatggaatcgtgggaattcttagctctgctttcttactcctatttgctgtgtaaacttaggaaaactgcttaayctctatgagcctgaatcatctcatttgtaaaaattacatatttcataggcttgaaataaggattaaatgggttagaagatatgtaaatttcctagcaaagtgcctgacccatagcagtagacatttaacaactgttaatt

SEQ ID NO: 755081 - DNA, 541 bp, Homo sapiens
agtttgcaagtgttttctcccattctgcaggttatctgtctactctgttgatagtttggtttgctgtgcaaaagctcctaagtttaattagatcccacttgccaatttttgcttttgttgcaattgcttttggtgtctttgtcttgaaatctttgcccaatcctatgactaagatggtattgcctaggttttctcccagagtttttatagtttttcattttaaatttaagtatttaacccatctggaattgatttttgtatatggcgaaaggaaggggcccagcttcaatcttctgcatacagctagccagttatcctagcaccwtttattgaataggaagtcttttccccatcacttgtttttgtcagatggtcatagatgtgcagccttgtttctaagctctctattctgttccactggtcaatgtgtcttttcttgtaccagtaccatgctgttttggttactgtagtcctgtagcatagtttgaacttgggtaatgtgctgcctccagctttgttctttttgtttagtattgctttg

SEQ ID NO: 755082 - DNA, 539 bp, Homo sapiens
atagcaaatacttggaaccaacccaaatacccatcaatgatagactggataaagaaaatgtgtcacatatacaccatggaatgccaggcagccataaaaaaggatgagttcacatcctttgcagggacacagatgaagatggaaaccatcattctcagcaaactaacacaggaacagaaaaccaaacaccgcatgttctcactcataagtaggagctgaacaatgagaacccatggacacagggaggagaacatcacatactggggyctgttggagggtggtgggcaaggagagggagaccattaggacaaatacttaatgcctgatgggttgataggtgcagcaaaccaccatggcaaacgtatacctacataacaaatcttcatgttctacacatgtatcccagaacttaactaaagttcttattttacttaaagtaaaattaaaaaaaaattaaaaagttccttaactaaatagaaaactaaaatttgctacttttcacttcttaaaaaataacacttcaataatatttttgagag

SEQ ID NO: 755083 - DNA, 522 bp, Homo sapiens
gggagaggaagaagcacttttcctttctcttccctccagaaatcagcaccaaaagaggaggtcaagaccattaacaggttcacactgtgtatggctacccagtgtaagtgccccgtaattccagggagtcctttgacaaagacctcattgtgcctggcccttgacattgggcagccytgacgtggagaggtgagttatatatggcagatgagcagcaactgttcctaaggtagggatggagttagtggcagagtaaagacatggccttgggttcagcaccaccaggctgcagtcatgatatcctaggacagccactcaaccttggtaagacttttagctgtgtgttcatgagaaagctactctctccagtcctggtttctgcaactattaaaaaaggacataggacttgatcattttttaggtcctataagctctaaaattatacacctttgtacttcgactttattcatctactcacttacttattgactcagaggcagatttactgcgaagctaatgaag

SEQ ID NO: 755084 - DNA, 579 bp, Homo sapiens
ttccaaataaagccagtatgaaaggaagaatctaggaaagctatgataagccaggtacttaatcagcaactttatatatactttaaaaaatctcatctaatcttcacaccctccctaagaagttaataataggatctcatattatgcatgagaaaacaggctcggggtggaagtcatggaagtcacctgccgcatgaraagactgaggctcagggggtgtaagtcacttgctgcaacatcacaaggtagatggaaaaaaaatccatgtgcatcttactccatcacactgagaccagagcaatctgtgttctcaggatatttaaatgagtaatattttattcctgtgagacctctaaaccaaaaggtttggggatacaataaatctgttatcttggaaacaaagctggcagctgctcttggctgggctctatgtggtagctgtgcttcatggcagtgtttttgctctcactatccaatatccatccaccctcttctcagcgggcccaaacacaactattaatagaagtatggatactcggtttggatatctctttcaaaacaaagaagagtctcttaaaa

SEQ ID NO: 755085 - DNA, 656 bp, Homo sapiens
taggaccacaagcaatcagaatagcttgcctcctgggtcagtccgctggtctctcttcctgccactgagactctaagacccgcccactgtagtataaaaaggacacagagctgcagagttggaaatggctaatcaactgggtgcggtggctcacacctgtaatcccagcaccttgggagactgagaccggaggatggcttgagtccaggagtttgagaccagcctgggtctcaaatagtgagaccctatcgctacaaaaatattaaaaattagccgagcatggtagctcacatctgtagtcccagctactcaggagcttgaggtgggaggatcactggaacccaggaagtctaggctgcagtgagccrtgattgtaccactgattccagcctgggcgacagagcaagactgtctcaaaaataaataaataaataaataaataaataaatagaaatggctgatcagaagcagtggctctatatgcttgagtgagccagatgggacagggagtgggtgagacgaggcagtgagcagcccaggagccccgagggtgacccaggaagaaggaagagcagggaaggtggccctagagagcttttgcagttcctgccagagacacagctgcaaggctggatttcgagaagcacatttacttc

SEQ ID NO: 755086 - DNA, 516 bp, Homo sapiens
tctttccggatttttttgtccattttaatttttgtattgttgaattttaaactgttttttgtatattcagatacaagtgttgtgatttgaaaatatcttcttccagcctatgatccatctttttattttcttagagtctttcacagagcagaaactgttaattttaatagagcccaatttatcaatttttttctttcatgaatcatgctattgctgttatatgtaaacactcatttcaaggctaaggttacttatatgttttcctgtattttcttctagaagttttatagttttttyttctagtttggtctatgattcattttaagttaatttttgtaaaaggtgtatggtctttatcttgtctagcttattttttatgtgtacatctgattgttccagcaccatttatttaaaaggctatctatttttaaaatgaagtaagaggctatcttttctctattgaatttcttttgcttctttgtcaaatatcagttgactttttgtgtggatccattt

SEQ ID NO: 755087 - DNA, 611 bp, Homo sapiens
gcatagcatacaaactctgaggctggggtttagatgaagaactgattaaatcaaaatacttttttgtttgtttgttttctgtgtcatttgctcctgttattctaagaaactatgccctctttttttttgtctttgaaattaggaatgcttacttgttctactctctgtatatctacatctatatctgtgtctctatgacatgattctttttcttatgaggaagaagtcctaggtaacagcacaattgtctctaagcttaatgtttaataagtacaaaaaaatcctccrgtataaaacaaatttcggggcctatagtgcttcacctacaggaaacgtgtatatcatctactgtgggtcctagtactttgtcttacctcaagtggacccaggaaacaaatacccacgcccaaaatacaacactactgagatatgatgcagaatcaagacctaataataatttcagtccatgtgggccacaacacaattgctactaacttgaaaaatttagagtttaaaatattggcagggagtgggggagaagtataaagtatacctgtactagctttctttttcttaagcatgagaatattttcttaaacatttcatttgat

SEQ ID NO: 755088 - DNA, 586 bp, Homo sapiens
ttttcttgcttgctaacacagcatccaatctgcagcccatgaattaagaagtcatttttacttccaagttttattatttaagaaatacattttgtaaggctaaggctgtcatagatactgattcctctgatggatctgggcaaagtcaactgaaaaccctctagaaaaaattcacttttctttttttttttcttttctttggggagcatggatggagtttccctctgtcacctgggctggagtgcagaggcgcgatctcggctccctgcaacttctgccttctgggttcaagcaattctcctgcctcagcctcctaagtagctgggactacacgtgtgcactgccatatctgcctaattytttgtatttttagtagagatgggatttcactatgttggccaggctggtcttgaactcctggcttcaagtgatccatccacctcagcctcccaaagtgctaggattatagatgtgagccaccatgcccggccacacttttctaaaagtcattaagaacatttatgattcatgaggggaggtcaaaatatcaacattaacaggagtttggaagaagttgactttaacc

SEQ ID NO: 755089 - DNA, 627 bp, Homo sapiens
ttgctacattaaatgagcctaagagctgtgtttagttgattctcactccttttttttaatcactcttcatgatacctaaaaaaaaaaataggcatttctgtcttttctcctctacagtcaagtaggggaaaaggttattagagtttccggtattgtgcttaatttaaaaatactcttgtaataatttcttataccgactattacttgatggagcaactgctactcttaaaagtggcagaaaactttatccatgaaactcataaaacaacagggtccatttcaaactttcagaagctttttgactccactttctagggmttaaatcccggaataagaaataaaacttctatggtaaccttgacagtccatttccaagaatgtccaaaattacctttttagttgtggacacttaggaatttctttaactattacttctcacataaccaccaccaggaaatgaggggattacataaacagtgcctgaaaactttagcttcaaacacaatgttgcctctgagccagagtcggccagtaacttgcagctgttgattaaaatgagccgtaatcgccgggcacaatggtttacctctgtaatcccagcacgttgggaggccgaggcgggtggat

SEQ ID NO: 755090 - DNA, 448 bp, Homo sapiens
gaacaggatatcccacaactcatgttgcagccaatcttgcccctttttgttttgatattgttctttttgatgtgtggaaaatggaccattggaaactggccacttttgctatccttcccttcattgtcgagggaagtaataagctgaatctaaaagtgacacattatatttttagctgtttaatcagtcagtcttratttttggccttttcttgtgtgggcttgacaacttctctcattattttgcatataaattctactttacataattcattctcttctgtttaatatgtgtggttagtagttaaaatgtttattttcccactggatttaaactatttaagcgtagtgattgtatatgtttcgcatttttctccagaagactgagtacaattcatggaatatagaagaaacatgtcctgagtaaatatatgaatgaatgatccatt

SEQ ID NO: 755091 - DNA, 609 bp, Homo sapiens
  misc_feature 115: n = A,T,C or G
catttgctctaaatattttttgctagttggttttcaatcttgtcttttgctactcagttttaaagttttctgtcttatcctttattaatacactcaactaatatttattgaacanctatgtgcagggcatttttatagacacatcattagtgaacaaaatagtcaaaagtttcttggaatgtggtacttaaattttagtgagaggagatagacaatacctgataagcatgataaataggtaaattatattagttaataagtgctttggggggagaaatggaggacagaaggggttggtgatggggatatggaggctgcaattttaagtaatgttttgggtaggtcttaytgagaagatgacttttgaggaaggacttggaaaaaagtgagttattgtgcagattatctggaagaagagcatagtagacagagtgaataatcagtgcaaaagtcctaagggctggaacatgcctgaaatgtttaatcaaagaggttggagtgaaccaaagaatgaagtagaaaaaaatgaagtcagaggttaatggtgtgtgtatgaaatcatgtaggccactgtataagacttgggtgaatggagggttctcggcagag

SEQ ID NO: 755092 - DNA, 579 bp, Homo sapiens
ggttaataaattctgtccctagagctgtgctgtatctttcagataccaggcaccatgatacctagatattcatggattcctatgagtgtgtcccatggtgggatggaagtcctccctgatatattccacattgcagttctcactyactctgggaacacagacctaagatcatagaacctcaaaagcatacatccctctattacttccaaattacttcatccctatgaaggacatttgttgctttatacaagctcccatttctccctcctcctttccaaggttacccatatgttagtttctccacacagactctgagtttcagaggtagctaaaccaaccccaatgccagagatggctggttgcaatccttggtttaagggttaaacatatgacctaagcatcttgaatcagtgtgggcttcaaattcttgccaaaaatactaggccagaatctcctgctggatgtggaggaaagcacaggcctgaatgcagccaggagtcagccatgcaacaactatggtgagaggtggcctcaggatgaagaggacactgcagatggcagagctgaaaggcagaaagg

SEQ ID NO: 755093 - DNA, 642 bp, Homo sapiens
atttaaactttggaataggataaaataagcaaataacaataacaatgtggtaaatgctttagagacattatctcatttaatcctcacaaacaacctaaaagtaggaactaatattatccttctacagataagaaaaatgaggatcaaagaaggtataaaaccaacagtgatggcctttctaacttctaactatgctacacattgtctctgatgtgttagttatataacccaattgtaaaaactgatgcagaatggcaacttaaatctcattttattacacactcttatttttaaggaataaatggagggaatctataaacatcagacaggctgtgctggagtggctcaaaagaatgtgccaatgcatatttcctaacccactgttattaataagtattaaccaacaacattgcaacatatrgttttagtgtgattcctttcattcagtgtttttcaagagttttaaaacaacaccagctttccaattgtactgaatttgtttttttccctttcatcaccacaaaaatccagttttgcccagtatatggggaaaccattcttactgaaccagcagagggcgctgatgcactagtgatgtccgatatgcctaagacttaaaacatatagaaacatatttatgag

SEQ ID NO: 755094 - DNA, 617 bp, Homo sapiens
gttgttgtggttgctgttgacataacacttttttcctcctgcattgttacacgtttggagcagaatggtgggctttctaggttggtttggcttgcctctttgatcagaactcctgatgatacaggctgggcatggtggctcaygcctgtaataccagcacttagggaggctgaggcaggtggatcacttgagtccaagagttcaagaccagcttggccaacatggcgaaatcctgtctctactaaaaatacaaaaattaacggcatggtggtgcatgcctgtaattccagctactcaggaggttaaggcacaagaattgcttgaacctgggaggtggaggttgcagtgagctgagattgtgccactgcactccagcctgggcagcagagtaaaactgcctcaaaaaaaaaaaaaactcctgatgctcaatctttacagtacttaagctagctttgtacccaaatacctctcatcctctcattgaaatgaatattaaaaataaataaaatgcttaaataatgaccatactggtagcagtctctgccccacatccattttagctttgcttcaagcaaagcgaccctaaggtgataagacaaattaattgcaaaactaca

SEQ ID NO: 755095 - DNA, 570 bp, Homo sapiens
gtggctttgtggtctcactgacttcaagaatgaagtcgcgtgttacacctcttaagtgtggcacggacccaaagagtgagcagcagcaagatttattgtggagagagaaagaacaaaggttctaaaccatggaacaggacccgagcaggttgctgccgctgctggctggggggcgggggtggcaagcttttattcccttattggcccctcccatgttccatttctgtcctatcagaatgtccttttttcaatcttccctgtsactggctacttttaggattctgctgattggtgcgttttacagagcactgattggtgtgttttacagtcctagctacagagtgctgattggtgcattttacaatcctcttgtaagacagaaaagttctccaagtccccactcaacccaggaagtccagctggcttcacctctcagtaggagcagaaaattggcgttttggctgcaggtgattataacaataagtgttaggggtaattgtgttaattagagggccaggacataaatatttgtgtgaaaaggctagctgtcattgattttttaatattttt

SEQ ID NO: 755096 - DNA, 570 bp, Homo sapiens
gtggctttgtggtctcactgacttcaagaatgaagtcgcgtgttacacctcttaagtgtggcacggacccaaagagtgagcagcagcaagatttattgtggagagagaaagaacaaaggttctaaaccatggaacaggacccgagcaggttgctgccgctgctggctggggggcgggggtggcaagcttttattcccttattggcccctcccatgttccatttctgtcctatcagaatgtccttttttcaatcttccctgtcactggctacttttaggattctgctgattggtgcgttttacagagcactgattggtgtgttttacagtcctagctacagagtgctgattggtgcattttacaatcctcttgtaagacagaaaagttctccaagtccccactcaacccaggaagtccagctggcttcacctctcagtaggagcagaaaattggcgttttggctgcaggtgattataacrataagtgttaggggtaattgtgttaattagagggccaggacataaatatttgtgtgaaaaggctagctgtcattgattttttaatattttt

SEQ ID NO: 755097 - DNA, 517 bp, Homo sapiens
tgctctgtagcccaagctggacctttgcctctgggtctcaagccattctcgtgcctcagcttcccccgtcgctgggattacaggcgtgggccaccatgcccggctaatttttttttctttgagacggagtcttgctctgtcgcccaggctggagtgcagtggcacaatctgggctcacygcaacctccgcctcccaggtcaagcagttctctgcctcagcctcctgagtagctgggattacaggggcccactgctacgcccagctaattttcgtatttttagtagagacgggggtttcaccatcttggccaggctggtcttaaactcctgatctcgtgatccacctgccttggcctcccaaagtgctgggattacaggcgtgagccaccgcgcctggccccggctaatttttttgtattttagtagagatggggtttcaccatgctgctcagggtggtctggaactcctgagctcaggtgatccacccgcctcagcctcccaaaagtgtagggatta

SEQ ID NO: 755098 - DNA, 572 bp, Homo sapiens
ctctgccatgatagcatccacagagatgccacagaaaaccatagtgggccacaccattgacactatgctgattggtcctgatgggacgggagtagcaagtacattaggatcctttgtttcgggatctttggggagttgattggtgttgattttcttcctggaaacctccatggcgtctttgtccgagttctcrtcctgcatctgggaagaatgaggtacgcagacaagtgaagggtgaagaagacgaagaactttatttagtattagaacagctcagagaagacccacagtgagtagctcctctctgcagttggtcatcccatcatctctccggcctctggctgaccgtcctctgtcctgctctggctgagagcagggctgttatggacctcagaggggaggaagtgcatgctgactggtccactggtggccatgggtgggccagaggaggcaccacgagtccccactctggtccgtgggactggtagcccggccccagccttcaggccctccttgacctgaaggtggggtcttacagggaccccccgcccccgacttctgcccaggccttc

SEQ ID NO: 755099 - DNA, 572 bp, Homo sapiens
ctctgccatgatagcatccacagagatgccacagaaaaccatagtgggccacaccattgacactatgctgattggtcctgatgggacgggagtagcaagtacattaggatcctttgtttcgggatctttggggagttgattggtgttgattttcttcctggaaacctccatggcgtctttgtccgagttctcatcctgcatctgggaagaatgaggtacgcagacaagtgaagrgtgaagaagacgaagaactttatttagtattagaacagctcagagaagacccacagtgagtagctcctctctgcagttggtcatcccatcatctctccggcctctggctgaccgtcctctgtcctgctctggctgagagcagggctgttatggacctcagaggggaggaagtgcatgctgactggtccactggtggccatgggtgggccagaggaggcaccacgagtccccactctggtccgtgggactggtagcccggccccagccttcaggccctccttgacctgaaggtggggtcttacagggaccccccgcccccgacttctgcccaggccttc

SEQ ID NO: 755100 - DNA, 572 bp, Homo sapiens
ctctgccatgatagcatccacagagatgccacagaaaaccatagtgggccacaccattgacactatgctgattggtcctgatgggacgggagtagcaagtacattaggatcctttgtttcgggatctttggggagttgattggtgttgattttcttcctggaaacctccatggcgtctttgtccgagttctcatcctgcatctgggaagaatgaggtacgcagacaagtgaagggtgaagaagacgaagaactttatttagtattagaacagctcagagaagacccacagtgagtagctcctctctgcagytggtcatcccatcatctctccggcctctggctgaccgtcctctgtcctgctctggctgagagcagggctgttatggacctcagaggggaggaagtgcatgctgactggtccactggtggccatgggtgggccagaggaggcaccacgagtccccactctggtccgtgggactggtagcccggccccagccttcaggccctccttgacctgaaggtggggtcttacagggaccccccgcccccgacttctgcccaggccttc

SEQ ID NO: 755101 - DNA, 579 bp, Homo sapiens
ctttaaaaaagagagaaatattaataggatttgaacaactgaagaagcagaacatgttttacatttctacattccatctgtcaatggctaaagaaaacgtgtaaatacacaggagaatactattcagctattaacaagaatgatgtcattcrtttgcagcaacatggatgaaactggaggtcattatcctaagtgaaataaatcatgcacaaaaacacaaatattgtatgttctgaattatatgtgggagttagaaatgtgatcacatagaggtagagagtgcaaagacagataccagagactgggaagggtgagtggtgagggacgatgaagagaagtgggttaaagggtacacacatacagtaagatggaatacattcaatgttggatagcagaatagggtgattctacttaacaaaaatgtattgtactcgggtgatgaacactctgactcaatcactacacattatatacatgtaacgaaatttcagatataccccataaatttgtacaaataaaaatatctaattttaataaaaggtgttgtttctatcagaatagaaataatgaaatatgaag

SEQ ID NO: 755102 - DNA, 579 bp, Homo sapiens
ctttaaaaaagagagaaatattaataggatttgaacaactgaagaagcagaacatgttttacatttctacattccatctgtcaatggctaaagaaaacgtgtaaatacacaggagaatactattcagctattaacaagaatgatgtcattcatttgcagcaacatggatgaaactggaggtcattatcctaagtgaaataaatcatgcacaaaaacacaaatattgtatgttctgaattatatgtgggagttagaaatgtgatcacatagaggtagagagtgcaaagacagataccagagactgggaagggtgagtggtgagggacratgaagagaagtgggttaaagggtacacacatacagtaagatggaatacattcaatgttggatagcagaatagggtgattctacttaacaaaaatgtattgtactcgggtgatgaacactctgactcaatcactacacattatatacatgtaacgaaatttcagatataccccataaatttgtacaaataaaaatatctaattttaataaaaggtgttgtttctatcagaatagaaataatgaaatatgaag

SEQ ID NO: 755103 - DNA, 589 bp, Homo sapiens
tgcctaatgtgttgccatattaacaaagtttaatataaaaaaacttcttggttctttgtttaaactgaatccttatccactcttcagcgctttttggttaagattcagtgattccattgtaataagtggcattactgataaaaaataactgcgcccttaattctaaataaaagcatgtattaaaattaacactacraagttaagtagacgaacatctatttattatatgaagatgttaatgcttacactaacaaattggtatattcttaccacctacaagtcaccttattaaagctaaatgagaaatgcaagtaagggctttaactgacactaccactggatggaccgttgtggacgtcattggaaaaaacacgcagttacttagtcacttctttgtctctaggctgtgaaatagcaacctgtctcacttgacttttaaaaagtgtttataacaaccaggctgggatacagtaaaactgggttgccacagagtaaaataaaatggcaggatctttgcttacaaaggcataaaactcaacaaaatggctgtaacacctggaaatccgacacatttgacaccaaagtgggc

SEQ ID NO: 755104 - DNA, 589 bp, Homo sapiens
tgcctaatgtgttgccatattaacaaagtttaatataaaaaaacttcttggttctttgtttaaactgaatccttatccactcttcagcgctttttggttaagattcagtgattccattgtaataagtggcattactgataaaaaataactgcgcccttaattctaaataaaagcatgtattaaaattaacactacaaagttaagtagacgaacatctatttattatatgaagatgttaatgcttacactaacaaattggtatattcttaccacctacaagtcaccttattaaagctaaatgagaaatgcaagtaagggctttaaytgacactaccactggatggaccgttgtggacgtcattggaaaaaacacgcagttacttagtcacttctttgtctctaggctgtgaaatagcaacctgtctcacttgacttttaaaaagtgtttataacaaccaggctgggatacagtaaaactgggttgccacagagtaaaataaaatggcaggatctttgcttacaaaggcataaaactcaacaaaatggctgtaacacctggaaatccgacacatttgacaccaaagtgggc

SEQ ID NO: 755105 - DNA, 611 bp, Homo sapiens
tttaaccattgagtactatctactgtgcggatgcgctgcagtgaattcacctattcactcgctgagggatatgtgcgttacttctaggtttgtgtgattataagtaaagctgctacgaacattccagtaagtctttttgtggacatatgttttcatttttctttagttaatatccaagagtagaattgctgggttaagggcttaaatgtatttttaattttgtaagaaaccaccaaactgtttcccaaagtggttttattattttgcctttgtaacattggaaagttctatttttccacatcattctaatacttcgtattgtcagcattcttaatttttttttgttttggtgggtgtgcagtgatatctcattgtggttctaatttctatttgcctgatgactaatatgaaaatttcctcatgtgcttactggtaattcatgtatcttcttyttttctgtttttaagtcttttgctcacttttctattgtttgtatttttataattaatttgtggttgtaatttattcattctagatacaagtgctctatcagatacatgttttatgaatattatttcccagtttgtggcttacctatttattttatttta

SEQ ID NO: 755106 - DNA, 615 bp, Homo sapiens
cttttctatggatgcagttgcacagatgcatggcagaggcagacatgagatttgctgcagctgccagggaagctcctgtgaagcacctgctttgtaaatccaggccactgagaagggtagtggcagagatgctgatatggtttggctgtgtccccacccaaatctcatcttgaattgtagctcccataattcccgtacgttgtaggaaggagccagtgggagacaattgaatcatgggggtggtttcccccatactgttctcatggtagtgaataagtctcatgagatttggtggttttatcaggggaagccccttctgcttggttctcattctctctcttgcctgccrccatgtaagacatgacttttgccttccaccatgattgtgaggcctccccagccatgtggaactgtgagtccattaaacttctttttctttataaattacccagtctcagatatgtctttatcagcagtgtgaaaatggactgtgtgatgctccctgggactcatgaggtgtccatgacctccagggaaccctgctgaacctcccgtagttagcaacgcttctctgatttcatgcagttgcactggttgtgtaaacctctagttccc

SEQ ID NO: 755107 - DNA, 574 bp, Homo sapiens
gtgtcccaccggcaatctcgtgtcgaattgtaatccctaatgttggaggaggggtctggcaggaggtgactgaatcatgggggcagatttcctccttgctattctcacgatagtgagatctcacaagatctggttgcttaaaagggtgtagcacctcttccttctctctcttcctcctgctctggccatgtgtagatgtgcctgcttccccttcaccttctgccatgattgttaagtttcctgaggcctcctcagccatgcttcctgtatagcctgtggaactgtgagccaattaaacctctyttctctataaatgacaccatctcaggcatttctttgtggcaatgtgataaaggagtaatacagaatatatacaaatcaataagaaaaacactaaccatctactagaaaaaatgggcaaagcatataagctgacagtgcacagaaaaggaaatgcagatggcccttaaacatatgccaagatgttcagtcttatatataataagggaaatggaactaaaatcacacagagacataatttttaaattatgttaaatgggctaaaatttaaaag

SEQ ID NO: 755108 - DNA, 609 bp, Homo sapiens
gcctaccttcagtggttatggcacttatggctatttccacaaagtttaacgttcgggtgtcctctaattcttccctgaatgcatgcttatttatttccccagtttttaagccaattaaggggaggactgtttctcacacatcgtgtagtcgtacagcgaagggcagaaagggatcaagggcaactgtattcctgtgagtcaaggacagaaatgattaacttaagtataggcagatggctatgcatggctggagacccagagggattctctcaccagaagggccaggcctctgrccttccaatccccacagaactgtcccatggtcaacgattccacccaaccagggagaggatccctgaggtcctctgagacttccttaccagcagaatcataggaaacctcatcagtagccatagagcatggacactggtcagtcagaacagacatccgaatggatatcggccctgcctgagggaatggttatatcctccagacctctctggactgtctggagattaggcttggtttgtgttcttttaggtgatggtcagtcagtgtggccacaaggagaggggacacaggagaggtgagggaaaaagtttattatac

SEQ ID NO: 755109 - DNA, 609 bp, Homo sapiens
gcctaccttcagtggttatggcacttatggctatttccacaaagtttaacgttcgggtgtcctctaattcttccctgaatgcatgcttatttatttccccagtttttaagccaattaaggggaggactgtttctcacacatcgtgtagtcgtacagcgaagggcagaaagggatcaagggcaactgtattcctgtgagtcaaggacagaaatgattaacttaagtataggcagatggctatgcatggctggagacccagagggattctctcaccagaagggccaggcctctggccttccaatccccacagaactgtcccatggtcaacgattccacccaaccagggagaggatccctgaggtcctctgagacttccttaccagcagaatcataggaaacctcatcagtagccatagagcatggacactggtcagtcagaacasacatccgaatggatatcggccctgcctgagggaatggttatatcctccagacctctctggactgtctggagattaggcttggtttgtgttcttttaggtgatggtcagtcagtgtggccacaaggagaggggacacaggagaggtgagggaaaaagtttattatac

SEQ ID NO: 755110 - DNA, 490 bp, Homo sapiens
gaagaattcgtaaaaactgctttggtaaacaccaaagcacacaggaggcagtattttactaaacaaatattatactaagatattaacagtttttgaagtaacgcgctttcttattttatagagatgcagatagatctttgascatacctgatgaacagttacactcatttgcggtaagtggcacttttattgaggttgtattttcatcgtacacttgtatctgtttcatgctgaagtcaaagccatctttttttaaatcttccccatttcatgttgcatttagtcatcttaagtgttgtaaaaagaatgtgctggagtaagaactgatctgcagctctgtttagttagtgagctagtatgagtaaatattctatccaaacaacagaaaatgtatctttttttttttttttttttttttttatggactctctttctgtagcccaggctggagtgcaatcgcgcgatcttggctcactgcaggctctgcctc

SEQ ID NO: 755111 - DNA, 490 bp, Homo sapiens
gaagaattcgtaaaaactgctttggtaaacaccaaagcacacaggaggcagtattttactaaacaaatattatactaagatattaacagtttttgaagtaacgcgctttcttattttatagagatgcagatagatctttgagcatacytgatgaacagttacactcatttgcggtaagtggcacttttattgaggttgtattttcatcgtacacttgtatctgtttcatgctgaagtcaaagccatctttttttaaatcttccccatttcatgttgcatttagtcatcttaagtgttgtaaaaagaatgtgctggagtaagaactgatctgcagctctgtttagttagtgagctagtatgagtaaatattctatccaaacaacagaaaatgtatctttttttttttttttttttttttttatggactctctttctgtagcccaggctggagtgcaatcgcgcgatcttggctcactgcaggctctgcctc

SEQ ID NO: 755112 - DNA, 388 bp, Homo sapiens
aagtcaggaaaccctctgcaagtcaggatccaggagaagaattcgtaaaaactgctttggtaaacaccaaagcacacaggaggcagtattttactaaacaaatattatactaagatattaacagtttttgaagtaacgcgctttcttattttatagagatgcagatagatctttgagcatacctgatsaacagttacactcatttgcggtaagtggcacttttattgaggttgtattttcatcgtacacttgtatctgtttcatgctgaagtcaaagccatctttttttaaatcttccccatttcatgttgcatttagtcatcttaagtgttgtaaaaagaatgtgctggagtaagaactgatctgcagctctgtttagttagtgagc

SEQ ID NO: 755113 - DNA, 531 bp, Homo sapiens
ccctcagaaaagtccacgagggaagaaaaggaacggtggatcctttccaaatatgaggagaagctctttctggccccactaccctgcactgatctgtccctgggccagcagctgctgcgggccaccgctgatgaggacctgcagacagccatcctgctgctggcacatggctcccgtgaggaggtgaacgagacctgtggggagggagacggctgcacggcgctccatctggcctgccgcaaggggaatgtggtcctggcgcagctcctgatctggtacggggtggacgtcatggcccgagatgcccacgggaacacagcgctgacctacgcccggcaggcctccagccaggagtgcatcaacgtgcttctgcagtacggctgccccgacgagtgygtgtagttctgttttatttgactacagtctccttggtgcaaaaacaaaatgggaaaaataaggataactcagaatttcaaaaggaaatcacaaattcagcttataatagcattttcagtacttctcataaactaa

SEQ ID NO: 755114 - DNA, 365 bp, Homo sapiens
actaggtgagcttatgttctttttaggcaacattctttttctggctgaagtcctagaaacggaggcaggaacacatacgtgttttagaaggtttgctgtggggtgccgagaaaaagtcgtcatcatcatcaccatcatcatcatcaaagaggccagtgggagggggaccataggggcttttccttggagtgggctgctcaggcttctgtggctccttcaktgatggaacggaggcagcaccaaacacatccgtgtctcctgtgagtgaagggacaagacagccacagctgtgagccagtgtgggccggttgaatttacagaaaaaaattatcacccaccaaaaactttccatttcagttaatcca

SEQ ID NO: 755115 - DNA, 671 bp, Homo sapiens
aagtagacattccgcacaatttatgacagaattgttaaacattaggctatttgccagcggtttaatccagtgtaaaaatacattattggtgagattctttcattagcttcaaatgttgtcgtttcaataagaaaatatttcttcttattacaaaaaaccaaaactttcactggatttaaatttctgcttgtggaggttgaaaaaagggaaacggagctatagactgtttgccagcagtttaatccagtgaaaaatacattattggtgagattattagcttcaaatattgttggttcgataagaaaatgtttgttcttattacaaaacacaaaactttcactggatctaaattccgtagtggaggttgaaagaagggaaacgaagcaagtaacaaaaagaagttgtggagtttattttcttggaactttccamgattgtctatctaaaataatgatctacttaatttgttgtaaattacctggagaaaggtcctaattttttaaaaatgttaataacgctccctgctggtttgcttcagaagggagcaaactacatcttcactgaaatttgtttaaggaagacaacaaaggaaaatagaaggaatttgttaaaatcactttttaaaatacttggtgcattttgatatagtatagcggaggcatcagcagaag

SEQ ID NO: 755116 - DNA, 581 bp, Homo sapiens
ccttttaactttggagaagttgaggaccttgtcgctcatttggcagaaggtgggacccggatctcagtcctggcaggaagggatggctcagaacctaggcggagtcaggtccgctgtggtcacgtctccggtgacccacttccagctctggtctttaccttgtaccgcccacctcagggcctggatgtaaaggcaccggttctcatttcctgctggttttgtttcattcattaatttagagacraggtctccctgcagcctcgaacccctgggctcaagtgatcctccgccccagcctctccgtcccgagtagctgggacagcaggcacgtgccaccacacctggctgattttcagatttttttagatcaggtgtagctgtgttgtccaggctggtctcaaactccagccacaagcgatccttccacctcagcttcgaaaagtattgggattacagtagttagccatcgtgcctgaccttttaaattttggaactttaggtttacctgaaagttgcagagctagatccccctagtgttaacataaactcagtacatttgtcaaaactaggaaattaacatt

SEQ ID NO: 755117 - DNA, 593 bp, Homo sapiens
ggggttataaatatatgagtagtacaagataaactgaaaaggaaatttaattttgtggtgctccttgtcattatacatgtatttctcaatattccatattccacagatgagtattatctgttttcgtcccatttctttgtttctcctcttcttgttagaaatttctcaaattgtggtttcagggctctaacagtttaragtaggtgtgcttctctaatgattctaggaggactaactgtatttagagaaaatggtttttggttgattctaagtctgagaaaactgaagaagtgaaatttcctccaactttgctgtcgtgtgcaatgtggcactcaaatgtcttgagcagagccatgcagctcattgttggctgcatgcagctggggctggctgtatgactggcctccagtgatatgactcaggctgggcctgcgagtatgctagtgaaactgggtcatttgcttcagctaaatagaagactaccctgaaatgcctaacctttggagacagttcttcacatagaaaaaccacaagaagtataagttttacaggttctcttatttgaagagtcaaccctgaagtgagaccaggct

SEQ ID NO: 755118 - DNA, 598 bp, Homo sapiens
tttctagggaagggtgcttgagaaacatattttttgagatctaccttgtagttctgaggatgattgttgactgggtatagaatcctagtttgaaaataatttaaaagcaaatttgtaaatgcattgtttctttgccttgtagctttcagtgttgttgagaaattcaacgatattcttattgtcaatcttttacatgygcattttcttatctctgaagcttttatggcctttatttgtgatgttctgaagtttcatgacattgcatgtaggcgtgggattgcattttcttcattatgctgggttctcagtgggcctttcaatctagaggactcatgtcaagaaaaattccttaattagaaaaaaatcatttctctatgttatgtctgctatttgtttctggaatgtctgttatttctggacaaggaataataaatcaaacaaggtttctggacctccttgtttgatctcctttttttttttttttaacatccttttctgggagattttcttaacgattttctaatatttctactgattttttttaaaaattatgctattatagttacatttctaagagctcttccttatcctccaattt

SEQ ID NO: 755119 - DNA, 641 bp, Homo sapiens
tattaagaaagggagggagaggagaggagatgagagagaggagaagaaagaaagggaaaagaaaaaatgcaccttgaaacacatgggtgttgtgaagcctggctccattaggaacttctaatttgggcaagtcattctgccactttgaaactcaccttaacacgatggaattcgcatgagttcagataactcaaarttcagtttaaacactaaggactatttattatctcaaataacaaaaggtcccacgtggagctgctccaagttgtccaggtttggtaatgcagaactcagtggcatcactaaagtccaggttcttacaatttattctttgtccccctgaactctcctgcagttacagagttcaaggcagcacatgcagctgagacaaaattgagcagatgaggccataccttctttgagtctcttttttatgaatgtaagaccttttcctaggactactacaggtgacttttgaagttggaaagaatagctctgaaatttggacatattttagaagtaattttaattgttactttcgatgatcgatcatagggaataaaaatggtataaaagtttcctatcaaaatcagaattctcagaaagcataccaaggaaaacacacctttctatttttaaac

SEQ ID NO: 755120 - DNA, 617 bp, Homo sapiens
aggaagagatgagacccacactgtttgagaaaacatatcagcaggtgcattcgaacaaagctgtttacagagcatgtggaactgggcactgcatcgatggctggataagaggcggaacggaaagtttataaagtggtgcacaagccacctcatgaaagttaattttgctaaagttagtcataattcatttttgcttatttaaagatttttacttagaaacttatattgattattcaataattccaacatctcaatttgcttgtggtcactactgaaacccacttatagtgcttttgtgtgcacttaatgatctttgattctgaccttgatatgatttgtctttatccatgaaaatttgtggcttaaattgaggatgattacctttggagaagaattatgtttgtttctatcagaagcaggaaagtactactggccttargcaactttgtcttccttggggagttcttgggttaataatcctagagtctgattcatttcacccattttgttcatggtccaagacatagtttcccaaattgtagcacaaatacaggcatgtgccgtaaaagtaaagttatttttgagtgtgttcatggttccattttcagcatgttttt

SEQ ID NO: 755121 - DNA, 632 bp, Homo sapiens
gaaagtacagtagcttctaaatggttaacagtcttccttcgcattttggggaagcttaatgtactgtttactttcctcactgactgtgctttagacttcagagtccaaatgtgaatcgttccagttacaaacatattttactgttttccttcatactcacactcacacacacatacacacttcatacacacatgcatgcatatacatacacaaattatatttacrtatttatttgaaacgttttaactattaagaacttctgctactttgcagcttcaggaacactttttttttaggtattagcatacatgacaatgcttgctattcatttatgggaaatgaaacagaaattggtacaatatggggtttctaggaaatttacttcaggaagtcagccttacccagagtaaacttctgtctgttcatgttaacacttaacctgaaacacattgtccaagtctgctggactcaactcaagaatacaagtacatatagaggtctcagcatcccataaaatgattagtagcaatgcaatgtctttctgattttgtttgctttcttgttttggcactttactactagtatgaccttctgcttagcatggtactactccagagagggtatcttggatc

SEQ ID NO: 755122 - DNA, 632 bp, Homo sapiens
gaaagtacagtagcttctaaatggttaacagtcttccttcgcattttggggaagcttaatgtactgtttactttcctcactgactgtgctttagacttcagagtccaaatgtgaatcgttccagttacaaacatattttactgttttccttcatactcacactcacacacacatacacacttcatacacacatgcatgcatatacatacacaaattatatttacgtatttatttgaaacgttttaactattaagaacttmtgctactttgcagcttcaggaacactttttttttaggtattagcatacatgacaatgcttgctattcatttatgggaaatgaaacagaaattggtacaatatggggtttctaggaaatttacttcaggaagtcagccttacccagagtaaacttctgtctgttcatgttaacacttaacctgaaacacattgtccaagtctgctggactcaactcaagaatacaagtacatatagaggtctcagcatcccataaaatgattagtagcaatgcaatgtctttctgattttgtttgctttcttgttttggcactttactactagtatgaccttctgcttagcatggtactactccagagagggtatcttggatc

SEQ ID NO: 755123 - DNA, 577 bp, Homo sapiens
aaactattattggcagcagagaaagaaggcctgaatcagcattcggatttgagagccctgaccatctaacctggtcactccaggtcagggctgagagtggcgtgtttgcagggtttaaaatgggaacatttaagggattattgcctgatgccatttgacggtctatgaataaaatgattattcagatatctagcgtttcccatctggcacatttttatgtacttaattgcatcaagagaaggaaayaccccgcccccttatattgaatatgatcttttatcagcctcttaaaaaatacaagcagatactgcaggcactattactatgtaacagtgtattcaagtactcaaggttgttttaaatagtcattgtgctgacagagctcacatttttacagaatgacaaagcgatgatgaggaaaagcaaagaaatccatgccaaagggccattcagcagtgaaagcatggcttttagtgagcttgcacgttcgtaggcagtttactactgaccacctcaagggcagcagaggctccatggtggttctatccaaagagtggaattctcaaggctttatttg

SEQ ID NO: 755124 - DNA, 577 bp, Homo sapiens
aaactattattggcagcagagaaagaaggcctgaatcagcattcggatttgagagccctgaccatctaacctggtcactccaggtcagggctgagagtggcgtgtttgcagggtttaaaatgggaacatttaagggattattgcctgatgccatttgacggtctatgaataaaatgattattcagatatctagcgtttcccatctggcacatttttatgtacttaattgcatcaagagaaggaaatmccccgcccccttatattgaatatgatcttttatcagcctcttaaaaaatacaagcagatactgcaggcactattactatgtaacagtgtattcaagtactcaaggttgttttaaatagtcattgtgctgacagagctcacatttttacagaatgacaaagcgatgatgaggaaaagcaaagaaatccatgccaaagggccattcagcagtgaaagcatggcttttagtgagcttgcacgttcgtaggcagtttactactgaccacctcaagggcagcagaggctccatggtggttctatccaaagagtggaattctcaaggctttatttg

SEQ ID NO: 755125 - DNA, 519 bp, Homo sapiens
aactgttgtcttcagaattttacttttttgtattgccttattgaatataaattgcctttacatatttttgtggattgaatgtgtcccctacatttcgtgtgttggaagcttaaccccctaaatttctatgttaattggacgtggggcctttgggatgtaactaggagcagwgacctagtcatcaggtcattggggtggggcccctgatgagaccagtggctttgtaaggagaggaagagaggcctgagccaactcttaatctgtgtcaccatgcgatgccacccaccacgtcatggcacactcaccagaagctgagcagatgccagtgccatgccctgggactttccagcctcaagaactgtaaggaataaatttattttctttataaattatccagtctcaggtattcagttatagcaatagaaaatgaaccaagatataatcttagcattcatctttgtttctgcttcccctatgagtgactgaccatgttctcatttgaggtttacattaatgagg

SEQ ID NO: 755126 - DNA, 605 bp, Homo sapiens
cctaaatttctatgttaattggacgtggggcctttgggatgtaactaggagcagtgacctagtcatcaggtcattggggtggggcccctgatgagaccagtggctttgtaaggagaggaagagaggcctgagccaactcttaatctgtgtcaccatgcgatgccacccacsacgtcatggcacactcaccagaagctgagcagatgccagtgccatgccctgggactttccagcctcaagaactgtaaggaataaatttattttctttataaattatccagtctcaggtattcagttatagcaatagaaaatgaaccaagatataatcttagcattcatctttgtttctgcttcccctatgagtgactgaccatgttctcatttgaggtttacattaatgaggttggatccactcgtcccatcatgacactgaggctcagtgacttgcccaagaccacagggctatgcaggtcctcaaagcagttctattctgctgtgcacagctctttgattttcttcatctattcctaaagcaaagaggaaaaggggtggaatgaaatgtgctcagatcctgagaactcactataggtcgaaggaaaaaggag

SEQ ID NO: 755127 - DNA, 605 bp, Homo sapiens
cctaaatttctatgttaattggacgtggggcctttgggatgtaactaggagcagtgacctagtcatcaggtcattggggtggggcccctgatgagaccagtggctttgtaaggagaggaagagaggcctgagccaactcttaatctgtgtcaccatgcgatgccacccaccacgtcatggcacactcaccagaagctgagcagatgccagtgccatgccctgggactttccagcctcaagaactgtaaggaataaatttattttctttataaattatccagtctcaggtattcagttrtagcaatagaaaatgaaccaagatataatcttagcattcatctttgtttctgcttcccctatgagtgactgaccatgttctcatttgaggtttacattaatgaggttggatccactcgtcccatcatgacactgaggctcagtgacttgcccaagaccacagggctatgcaggtcctcaaagcagttctattctgctgtgcacagctctttgattttcttcatctattcctaaagcaaagaggaaaaggggtggaatgaaatgtgctcagatcctgagaactcactataggtcgaaggaaaaaggag

SEQ ID NO: 755128 - DNA, 609 bp, Homo sapiens
tcatagatgcagaatttctgccatcgcaaatccacaggccacaccatggccctttttgtttcctttgccctccctggtgaccccaagcacagcgcgccgtgacacaagtattccacaaacaaggagcgtcctctttggccctggcccacacttccaaattccatggtctctgcagggctcggcctccttgagaggggccaggagagtggaggccctgcgtgcccccggcgccttctccagtgggacaaggggccacagcttaaagctcggttctgcacctttagccccargctctcctcacctccacccccagaaaacacacttgttgtcgttgccatcgctcaaagtttctgtccgactcttcacaggcagggagcagactatctatctgctggacaggagctggagctgagtgctcgacaaaagccctggctcccactgggcacagcctgcaagcctctccccatccatgagagaggtcacctgcggcccactctgcagccagtgtacagcctgtccaaggtggccaaatggagaggcacggaccaggagcccattagagccagcagagctgcacgggcaatgccctcctcgtgccaagaggctgat

SEQ ID NO: 755129 - DNA, 584 bp, Homo sapiens
cccactgggtccctcccataacatgtaggaattatgggaactataattcaagatgagatttgggtggggacacagccaaaccatataagtttgtgttctcaaaaacacaaacatccaaaagagacacatcacccttccaccatgtgaggacacaacaagaaggtgtcatctataacccagaaagtgggccctcaccaaacgtcaaatctggctttggtcttagacttmttggcctgcagaactgtgagaaataaatgtatgttgtttaaagtcatccagtctttggtgttctgttatagaagttcaaatggactaagatatttgtcttcttctgaagcttacatttaattgatagggacatgcaattgtaaaataagtaatgtattattttgtgaaattatgaaagctctatattctgattttatccccttttacaccacaaaccttatatagcacaccacaaaattctgaattcacagtgctcattggaaacagtttgatattttttctacagagaaagagttaaaaaagattttcatagtgttattagaaacagtaactttaactggcccttttattaataa

SEQ ID NO: 755130 - DNA, 605 bp, Homo sapiens
catcctactcttcaattagaaaacttcattgttatgaataggtaatttccagacaggggaaatgcagggcatactaaaagcacatgacaaaaaatctgacaaatctgaaaattctcagaaagctggggaatggacaattgtcctgcactgctgagaaagtgtaaaccgacagagtgattctgaagagaaatctgtcattatttrgtgagattgattgtatatataccagatgatgcagctatcctattttatgacatataactcagaaaaactatcacaaatccccagagggacagacatgagtatatatttatcagatcattagttagtgggctcatcagacaatctaaatggctacctgtatccatttgctagggcagcagtaacagagggtcataaactacatgggttcaatgatagaagtttattgtctccccgttctagaggctagaggtctgaaatcagagtgtcagtgggtttattctttttgagggctatgaaggagaatctgttccatgtgtctcttccagctttggtgatttgccagcaatctttggcattcggcttatagatgtgtcaccccaatctctgcctttatcttcctg

SEQ ID NO: 755131 - DNA, 605 bp, Homo sapiens
catcctactcttcaattagaaaacttcattgttatgaataggtaatttccagacaggggaaatgcagggcatactaaaagcacatgacaaaaaatctgacaaatctgaaaattctcagaaagctggggaatggacaattgtcctgcactgctgagaaagtgtaaaccgacagagtgattctgaagagaaatctgtcattatttagtgagattgattgtatatataccagatgatgcagctatcctattttatgacatataactcagaaaaactatcacaaatccccagagggacagacatgagtatatatttatcagatcattagttagtgggctcatcagacaatctaaatggctacctgtatccatttgctagggcagcagtaacagagggtcrtaaactacatgggttcaatgatagaagtttattgtctccccgttctagaggctagaggtctgaaatcagagtgtcagtgggtttattctttttgagggctatgaaggagaatctgttccatgtgtctcttccagctttggtgatttgccagcaatctttggcattcggcttatagatgtgtcaccccaatctctgcctttatcttcctg

SEQ ID NO: 755132 - DNA, 508 bp, Homo sapiens
acaacaaaacagttaaggaaaactaataaatgatcacacaaattgcatgatttctgagtgctctaagtgtaagcagaaattaacaccagctgcttgttaatgctaactttagttagtttaaaagaatttgcaagacagaatcccaaaccagcttcttagcttgtgatgggtctcaggctgtagactggtatctaccatcctagaagcagggaaaaaaaaaactcctcttccatgttggaagtgagctcaaactccataaaggagttacctgccttccatygtcatgaaagtaggaagacatgccttccttgttggaagcaagtaggtctccaaaaaaagaggagttgtacagcaaaataaactttagatctcgaccaaattttgagagatcagggattcgctggagaaggtgttcaaatacctccacaaattgtcctattggtttgagccataaagttagctgatgcgggtaccaaacacctataggagatttgtgaaaggtcagcag

SEQ ID NO: 755133 - DNA, 621 bp, Homo sapiens
cacatgttcctctctcatctgatggtctccacttgcacgagagtccttcccccagctgtatcctagtcttcctctcctcactccttcttcccagggtcatctctcatcaaagagcttgccattgtcctcccctcagccttccttgccagagattaagtcatatgcrtagaaatgcagccccttttggccctctgtatgtgtccatgaaactggatgactgaattttcaacatggttgggagacagaaaaatgctagcaagtaatcccacaaaggaatttatacagtgtaaaaatgttttcgtttggagaaatttaaagcccctcccactcaaatcactttgtatttgggtttcctgaaattcccagtaaaccagaaacaggccatgtaacacttcagtcctcgtgtttcaggactgagcctgagtacacgtagtacacatgtccctctccaggcctagagaggagtggcaggtcacttagccctagcctctaactgagaacagcaccaactaccaaacctgtctcctgagtagctctcctgcctttaaagatatctgagtctaaaacagaggcagggaaaatattactggctgcccatttctagctgtggcccaaccactc

SEQ ID NO: 755134 - DNA, 589 bp, Homo sapiens
attgtctgggctcctgccctgccctgcccccctggcatccgaaggcacttgatttggacagcttggcaagaaaaatttccaaatttccaaccccatgggtaatagcaaaagaggttttaaaacttttaggtaaccagagagtttagtttttgttgttgttgttgtttgggttttttttttagacggaattttgctcttgttgcccaggctggagtgcaatggtgcaatcttggttcaccgcaacctccacctctcaggttcaagtgattctcctgcctcagcctcccaagtagctgagattacaggcatgtgccaccatgcccagccaattttgtatttttagtagagacagggtttcgccacgttggtcagtctggtctcgaactcctgacctcaggtgatcctcccgcctcggcctcccaaagtgctgggattacaggcatgarcgctgcacccagccaagagttcagttttagatggcagcctggcccctgcaagagctgacggtcaatgcagtcactgcgctgtaggtctcagtttccttagctttaaaatggcggtaagagaacagaggcttcatggggaagat

SEQ ID NO: 755135 - DNA, 560 bp, Homo sapiens
aaatggtggggagtaaatgggcttaaagagaggtaaagtttctatatttcacttcaactggtaaagtgttgacaccagtaaactttattaactaatgcatatatagtttaatagctagagcaaccactagaaaaccaacaggaaaggagatacaagagatactattgataaatcaaaatgaaattcacaaatgttcaagtaacccaaagaaaggcagagaaaaaatraagaaatgaaaaggagagaaaaataaaaaagcaaaattataataaaagacttaagcactaacaagcataacaacaattacattaaatacaaatactctaaatacaccaagtaaaagagactgatggagtggagtgaaaaaacacgacctaactacaagctgtctacaaggaactcacttcaaatataatgatatatatatgtggaaagtaaaaagatagaaatatacatgccatacaaacaatgatcaaaagaaaataggagtggctattttaacataagatacaaaacaaattcttaccatatgacccagcaatcatacatctaggcactta

SEQ ID NO: 755136 - DNA, 625 bp, Homo sapiens
acggctgctctgggaatgtctgtcttatgcagttgagataaggactgagatatgtcctggtctcctgcagtaccctcaggcttactagggtggggaaaaactctgccctggtaatttgtgatcagactggttctctgctctcgaaccctgttttctgttgtttaagatgtttatcaagacaatatgtgcaccgctgaacacagacccttatcagtggttctgcttttgccctttgccctgtgatctttgttggacccatatcagtagttctgcttttgccctttgtcctgttccctcagaagcatgtgatctttgttagaccctgattagyagttctgcttttttggcctttgaagcatgtgatctttgtacctactccctgttcttacaccccttccctttttgaaacccttaataaaaacctgctggttttgaggctcaggcaggcatcatggtcctaccgatatgtgatgtcacccccagcagcccagctgtaaaattcctctctttatactgtctctctttctcagccggccgacacttatggaaaatagaaagaacctacattgaaatattgggggtgggttcccccagtattctcccatatgcccctcagcttctcact

SEQ ID NO: 755137 - DNA, 525 bp, Homo sapiens
ttggctagaaagaaaaacaaaaccaacaataccgacttctggcaaggatgtgaaaaaatgggatcactcatacactgccagtgggaatgcaaaatggtactgccattgtggatatcagtttggcagtttcttatgaaactaaacatgtaactaccatatgactcaataattacatcccttggaatttattaaccccaagaaatgaaaacttgtgtttgcacaaaaatttgtacatatttatagaatatattattattatttataatagccccaaactggaatcagcccagataacccataaaaggtaagtggttaaagaaattttggtacagagataccgtggaacacaactccacaataaaaagaacaaactgttcatacaggcarcaacttgggtaaaactctagggaatcctcctgcctcaacctcccaaagtgctagtattacaggcatgagctgctgacaaaattttagaagtggagaagagaatagtgattactcaggggttaaagacatggccagggg

SEQ ID NO: 755138 - DNA, 583 bp, Homo sapiens
cctttcacagtatctactcatccaggggtcctcaactctgggccatggaccagtcctgttaggaaccgtgttgcacagcaggaggtgagtcgggggcaagtgagcaaagcgtcatctgtatttacagccacttctcattgctcacattaccacctgagctctgcctcctgtcagatcagcaagtggcattagattctcatgggagtgcaaatcctgttgtgaactgcacacgcgagggatytaggttgcacgctccttctcagaatctaatgcctgatgatttatcacgatctccgtaaacccccagatgggactgtctgatggcagaaaaacaagctaagggctcccactgattctacattatagtgagttgtataattatttcattatacattactatgtaataataataggaataaagtgcacactaatgtaatgtgcttgaatcatcccataaccaccttccctacagtccctggaaaaattgtcttcaacaaaaccagtccctggtgccaaaaacgttgggtactgcagcagtcatctataatgccagaagtgggaagaagcctgaatgtctcttaca

SEQ ID NO: 755139 - DNA, 583 bp, Homo sapiens
cctttcacagtatctactcatccaggggtcctcaactctgggccatggaccagtcctgttaggaaccgtgttgcacagcaggaggtgagtcgggggcaagtgagcaaagcgtcatctgtatttacagccacttctcattgctcacattaccacctgagctctgcctcctgtcagatcagcaagtggcattagattctcatgggagtgcaaatcctgttgtgaactgcacacgcgagggatctagrttgcacgctccttctcagaatctaatgcctgatgatttatcacgatctccgtaaacccccagatgggactgtctgatggcagaaaaacaagctaagggctcccactgattctacattatagtgagttgtataattatttcattatacattactatgtaataataataggaataaagtgcacactaatgtaatgtgcttgaatcatcccataaccaccttccctacagtccctggaaaaattgtcttcaacaaaaccagtccctggtgccaaaaacgttgggtactgcagcagtcatctataatgccagaagtgggaagaagcctgaatgtctcttaca

SEQ ID NO: 755140 - DNA, 583 bp, Homo sapiens
cctttcacagtatctactcatccaggggtcctcaactctgggccatggaccagtcctgttaggaaccgtgttgcacagcaggaggtgagtcgggggcaagtgagcaaagcgtcatctgtatttacagccacttctcattgctcacattaccacctgagctctgcctcctgtcagatcagcaagtggcattagattctcatgggagtgcaaatcctgttgtgaactgcacacgcgagggatctaggttgcacgctccttctcagaatctaatgcctgatgatttatcacgatctccgtaaacccccagatgggactgtctgatggcagaaaaacaagctaagggctcccactgattctacrttatagtgagttgtataattatttcattatacattactatgtaataataataggaataaagtgcacactaatgtaatgtgcttgaatcatcccataaccaccttccctacagtccctggaaaaattgtcttcaacaaaaccagtccctggtgccaaaaacgttgggtactgcagcagtcatctataatgccagaagtgggaagaagcctgaatgtctcttaca

SEQ ID NO: 755141 - DNA, 650 bp, Homo sapiens
taagtctttagcttccataggtagtaatttatttgatggatctgggtaaagtaaattgaaaaacttctggaaataatctgtaattttagattttattaagctcataatttgtgggagggtagaaaaatatcaacattaacagaaatttagaagcagttgattctaaatctcrtggaagattttgaggggttcaatcttgcctgtgggacgtaactgcagatgtggtgcagatagcaagagaactagaattagaagtggaatctgaagattagactgaattgctatgatttcttgataaaacttgagcggatgaggagctgcttcttatggacgagcaaagaaagtgagattgaatctatttctagtgaagatattttaaacattgttgaaattaaaacaaatgacttagaatattacataaactcagttgataaaccagaagcacaattttagaggattgacttcaatttcaaaagcagttctactgtgggtaaaatgtcatcaaacagaatcatatgctacagagaaatagtttataaaaggaagagtcaatcaatgtggaaacttcatgattgtctttaagaagttgtcatggccaccccatccttcagcaaccacaactctgataagtcagcaaccatcaacatcaa

SEQ ID NO: 755142 - DNA, 548 bp, Homo sapiens
tgtaggattagtaaccatttcggtcactgcttgtaaggaaatgatgctcctgtcaaaaggacatggcaacaaggactatctagccaggccaatgaaaagcgtgagtttcaagtcagggaacaaaaggcaagatcctcggagaagtgctttctccctcacctcaccactgacactcgtgtgacatttgagagggaatcaggctgggcgagaattttcttagtacaaattctatcatctctcttaatcttrttccaactaaaaataagccctccatacatttgcagaaagtcccattcaacagtttgagataaagttatttaaaaagaaaattgcccattttcttttcattgaatctcagtgggaaagtacatgctaatttctcatcttcaaaacactgaaaatttctatgcttcttgaatatttattacaaacaaatttgtaattgccctttgatgtagtacacgcttcacagcaatccaaatgccaaagtggtgactggctggggttaaacacctcttaatattttaactgagatttaaagtcacagg

SEQ ID NO: 755143 - DNA, 642 bp, Homo sapiens
ttgctgtaaagacatgcgtaatatatttaaccttatgataatgatttgaagcttgacatctttactaaatgatatgttactcatcaaaacatacatgaacagttaccaatcagctctctaagagtttacagccctattcaaccaccaactccccccacctttttttcttttgccattatgagttgtctatattctcgttttaccaaataaactataagtgccccaagggcaggcactttgcctcattcatttttatatcctgcactctaccttgtacaaaacaatgccaataacaggtgctcatcttgagatgaaatgaaagacaaccgtaagtcaaaaacagctatacattttgaatcattttaataataaatttaaacactatatrcaacataaattaatttttgtatagtttttccctaagtggaaaattagataatatcaagactactataaacctggtatttaaaaggatactagaggcaagttttcttttgagctcaggttcttggactacaaaattgttaaatagaaattccctctcccttgcagaaaagaaaagaactgtttcaccgtcagacattccttcagcgcctgctatatgcaagtcactggaacaggcactggggagacacgggggta

SEQ ID NO: 755144 - DNA, 633 bp, Homo sapiens
gcctaattgctctggctagaacttccagtacaatgttgaataaaagtggcaaaaacaagcatccttgccatgttcctaattttagaggaaaactttcaatctttcaccattgagcacaatggttgctgtggatttttatacatggattttatyaagttgaagtagtttccttctattgctagtttcttgaaggtttttataatgaagagatgtttttatcaaatgatttttttctgtatcaattgacatgattatgtggtttccttccttcattctgttaatggtatattacaccagatctgtattatattgattgatttttatatgctgtgtcatccttgcatttcacaaataaatctcacctggttatggtgtataatcctttcaatatgctactgaattcaatctgccggtaatttgttgaaaatttttccatgttcataagaaatatgaatctgtagttttcatttcttgtaatgtctttggttttagcatcagggtaatgctggaatcaataaatgagttagggctgggcacaatggctcacacctgtaatttcagcactttgagaggccaagccaggaggatctcttgaacccaggagtttgagagcagcctgggcaacaaagtgag

SEQ ID NO: 755145 - DNA, 617 bp, Homo sapiens
tttgaaacctgtatatttgttgatatgaagaagcttacattttgacttaagtttaatttggctaaaataatttattttatgattattcacaaaaatactataataaatattttatttattcagaattagcaattttctgataggcaatttgagttcaacagtgaaaatwaaagtcaacctcaattatatctgtcactactaaaggtcaactattaatccgagaagttgtttttattttaacaatgtaaatatgcatagacatggaaatctgaataatacccaaaaatgtttcaattatagaataagttattagccatgagaagtaatatttgttgcatgtaatagcatattttcattacaattataatctaagtaaagttgtattataataaaaagtatagcaatataaaataaatacaacgttaattattgattacatttaaatagttaatctcttcagttacatattttatgcttattattaactacaaactactttaaattgcatgtaattaatatgcattgaaggtctacttaattacttttcatttttcttatataccacaattgtatattttaggcccttatttatcttttgatgttttattttcaatttt

SEQ ID NO: 755146 - DNA, 726 bp, Homo sapiens
tatagcacttaacaaaatccaggatcctttatgattaaaaccctcagcaaaatcagcatagaagggacattatgtaataaaagccatttataacaaacccacagccaacatactactgaatggagaaaagttgaaaccattccctgagaactggaacaagacaaggataccccctcttatcactcctattcaacacaatacatacatacatacatacatatatatatatatatatgtctatatatatgtctatatatatatgtctatatatatgtctatatatatgtctatatatatgtctatatatatgtctatatatatgyctatatatatatacacacacacatatatagagagacatatatatatacatatagacataaatatatatacacacacacacacacaccatggactactattcagccataaaaaaagaatgaaataatggcatatcagcaacctggatggaattggagaccattattctaagtgaagtaactcaggaaagaaaagccaaacattgtatattctcactcttaaatgagacacaagctatgaggatgcaaaggcatatgaatgatacaatggactttgaggatttagggggaacggtgcgagttggatgagggataaaagactatgaattgggtacagtgtatactgctctggggataggtgcacacaaatctcacatattactactaaagaaattactcatgtaat

SEQ ID NO: 755147 - DNA, 609 bp, Homo sapiens
aagaccagcatccatttggatcctgattcaggcttatagcaccggcttagacaactggcccccaggatggaaggggcaccaggagcagagatgaatggggccatctgcccagcctatatcacactgcctttgccacatcccartgaaattatcacaaaacacaagacaaattgaatcatcaaaaatcagtagcaccgtaggggtgcaggggatgaggttattaattcctgctgaagggattgggataagctgtgtgaatgtaaaccaggcttcattgtagagatcatgctcgaatagctgggtgccacagcagaagcccctcgaggtggaggacctagcagtaagtgctgtttgagaaaaggaagggcaagagagaaacctggaaggggagtccatggggtcagggtgtagagaacactaaatacccagaatttccagtgggggcttgtcactggattcttgaagatggccaagaaacattgaagggagaaaattacctgagagcagagaggcagtcacagggaagatgatacaaacaccttaaagagccaggttagaactaacgcaacccaagccatctccatctggccagatctcttttggatacaa

SEQ ID NO: 755148 - DNA, 553 bp, Homo sapiens
ccatttcttgagatttatagactagatacctggaaatgttgtggttcctttcatataaatagaaaatgaggaagcgggtgaagtttgagggtcaggatcatgagtctgatttggggatgttgagttttgaggtgctaggcagggtgcacaagtgtagatgccctgaaaatgacaaatacaagcctggacctttttttaagtttctctctgacctaggacctactccagtcattcagaaattcctaactctagataagcccaaactcaaatgtgcaaggaagatggtgggtrttcaggaagtgttacattaactaattaaaagaagcaatgggctgaccactaagaaacatgggttgaagcctaatcactgtcccttgttctggtaaaattactcccctctccctttctaggcctcaatttcctcttctgttaaacaagagagttgaactggatgtctaaagctgctgccagctatagtcccacccttatccttatactacttcccatcttggagttgagcacaaaaggatccttctcaataaagcccaagtgc

SEQ ID NO: 755149 - DNA, 663 bp, Homo sapiens
agacaagagaagggaactggggaagggagagaaaagtaaagaggggcaagtgtgaggtctgcatgaagaggctcactgatgtccttgcctttccctgttccagccccatcccatacagggcacatagcccaaggctgsatcccacaccaagacaggagatggaactgagatagaatctgaggccagagtggatcacagtgggaggggggctgtgacttgcatggagtggctgcaggagggctggggtggagtgggagagggaagcagggtcccacgatgttcctgaaccacaggccctccccacaccctgactatgccccactgaggctgaagccttgcaagtcatgtccacccctagggaaaaaagcaatgcagtcaaactatcaatcaatcaccaaaagcaagcaagacatttcctctgttcctttttggggcctcaagaggattgggcctgggacacagacacacagattcactggcaggaacacagaaaggaacccacaaggatggcattgtggcccctgtccatactactaatccagacttagatttgtccacatctatatggacctctgcattccgtctactcacctgcaccttctctcatgagcagacacgcaccaagaaacacatatagaaatgtgagaggatccccaacaccta

SEQ ID NO: 755150 - DNA, 582 bp, Homo sapiens
aaattatatagcctgaaataaagatattgatttatctagcttcccactacaggcagaatatctgcaacttaaaaatcttatttttcaccaactctcatcaactcccctaattttcttacacttttaattatatatatatatatatatatatatatatatatatatatatatayacatatagttatgttactttccagtgagtacagaggtcaccacttgaaattcagccaacaattctaacaactttgaacttacatctcattaaaaaaaattaccaatgctgtatgctagttccctaggtaaccaagactccacttcaaaaatggactggatagtcaaaagaaagcataacacagatacgctaaccaaacaaaaagcaattttgcttcaattgctaaaatagatttgaccaagtgtttttacgtagtggcagatggtagctgcattaatatttatgttggacatggtaagaggggcttggaggaaaaggactttagattggagattcatctttggaaataggtaaaaatcgacttagtgtagaatgaacacaggctcccaaatctgagttcgaattaatcc

SEQ ID NO: 755151 - DNA, 582 bp, Homo sapiens
aaattatatagcctgaaataaagatattgatttatctagcttcccactacaggcagaatatctgcaacttaaaaatcttatttttcaccaactctcatcaactcccctaattttcttacacttttaattatatatatatatatatatatatatatatatatatatatatatacayatatagttatgttactttccagtgagtacagaggtcaccacttgaaattcagccaacaattctaacaactttgaacttacatctcattaaaaaaaattaccaatgctgtatgctagttccctaggtaaccaagactccacttcaaaaatggactggatagtcaaaagaaagcataacacagatacgctaaccaaacaaaaagcaattttgcttcaattgctaaaatagatttgaccaagtgtttttacgtagtggcagatggtagctgcattaatatttatgttggacatggtaagaggggcttggaggaaaaggactttagattggagattcatctttggaaataggtaaaaatcgacttagtgtagaatgaacacaggctcccaaatctgagttcgaattaatcc

SEQ ID NO: 755152 - DNA, 653 bp, Homo sapiens
gaaccatgagcaataaatgtctgctcttcatataaattacccagtcagcggtattccattacagcagcacaaaatagactaagacaccatgtctatttagtccctattccatcactgtgcgtgtgtgtctgtgtgtgtgtgtgtgagagagagagagagagagagaagagagatcgcgagtgagagagatctggggagaataccttatctttttagttgtctataacaagagaagctttatccagttccaatatggagactaccaaccatcacccagagatgccagactttgagattaatgcctttactgaacagaacttttggattgtctcactttgtgataggagtaaatctattttgtagtgtgaagaaagtgaactgtaaactggtgactagaaggatagatcacagtaatccttgatactatttaccaataaattctggttatcttctttttgcacatataataggatcgcacttccctgctccctttaagatagatacgcccgwataattcgctttggtcaatgaaatgtgagaactgacttgtatcacttttaggaagaaccagttcgccattcttcatcttccttttgcctatcacccaaggggggacgttgcagagattccagcctctttaaggatccagttgc

SEQ ID NO: 755153 - DNA, 594 bp, Homo sapiens
aatactaagggaaactaatatgtgctttgcatattctgtgtgtcaagaactgtgctgaccccttttacgtgcagtatttcatacactgaggaggttggaacaatttttattgcactcgctctgaaagaagagacaccaaggcttaaagaagtttctacttttccaagaatcttaactagtttgtcatcatgttatttgtcttttttaggtatrattattaacatgtgttaaaagtggcatggctcctttaaataaatgacttattcaaaaattttctttcaagtgtgatgcagagggaggtatttaggggaaaggaggcaacaagcattcgagctaaggttgaatgactcttgtcgtagaagttgccagaagaaatcatgaattggatgctaagttagaccagataatatttatattctcttccaaggtttgaatctttgatatgcttcagtgaaaattaggttcatagtgactaatctatatagtttagagaatgcttatgaaactcatattagatgatggttatagttgaaaaatgtcaaagtactgcacaatagaagaggcgttattagctttatcttttcttagtttata

SEQ ID NO: 755154 - DNA, 643 bp, Homo sapiens
caaggctatggagaaaacagaatgtttatactctgttggtgggaatgtaaattagttcagtcattgtggaaagttgtctggagatttctcaaagaactaaaactagaactatattcatcccagcaatcccattactggatatatattcaaaggaaaataaattattctaccagaaagacatgtgcacttatgtgttcatcacagcgatattcacaacagcgaagacatgaaatcaacataggtgcccatcaatagtgtactggataaagaaaatgtaatatatatacaccgtggaatactacacagccatgaaaaagaataaaagtatgtcctttgcagcaacatggatacagctggaggcygttatcccaagcaaattaacacaggaaaagaaaaccaaataccacatgttctcacttataagagggagctaaacattgggtatacatgggcataaagatgagaacaatagacgctggcaggtactggtggggggaatgatggaggggtgcaagggctgaaaaagtacctactagggactatgctcactacctgggtgttgggatcagtcataccccaaagctcagtatcatgcaatatacccatgtaacaaacctgcacatgtaccccctgaatctaaact

SEQ ID NO: 755155 - DNA, 599 bp, Homo sapiens
tgggctttaaatattcagtaaatgacgatgtaaacagatctgctgtcatccaggatttgttgtttcatttgtagaacacaggcacagtagatttagcataattcttatgggccctagaattttcggaatgatcaatgaacattagcctcaacttacaatcaccagcatcattacctgataacaagagagtcagcctgtccttccaagctttgaagcctggcactgacttctcctgtctagctatgaaagtcttagatggcatcttcttcctgtagaaagctcttttgtctacatygaaaatcaactatcttagctagatctggataacttgctgcagcttctccatcaacacttgctgcttccatcttgcacttttatgttatggagatggctccttttcttaaacttcatgaaccaacctctgctagtttccaactttttttcttcagcttccttatttctttcagtcttcatagaattgatgacttagggccttgctgtagattagggtttggtttaagggaatgttttggctgctttggtcttctatgtagaccactcaaacctcttcctatcaacagtaaggctgttttgctttc

SEQ ID NO: 755156 - DNA, 544 bp, Homo sapiens
agcaagatccgagaagaggatcctgaccacatcatgaacacctccagtgtaatgccctcactcaaagtgtttggcactgtggctgagccctgcagtgccccctccccatccatccactggtagagaacactgatgagacctgcggcacagacattgaggctccttataatattcgcttycgcaccctcgagctgaccacacaaaactatgaggacctgacccacctgtctcagctaacatgcgtggggtcaccaccttcctctgcttccctcaccagctcaattcggacctctgcaagctagcagtcaatacagtgtccttcccacgcctccagttcttcatggctacctttgcccctctcaccagttgtggaagccagctgtatagggctctcaccatgcccaaactcacccagcaggtctttgatgccaagaacatgatggctgccccaccaggactgccttcttccatgaatatccatccattcatgaaggaagtcaatgagcagatgctcagtgtgcagaacaagagtcgccagcagcta

SEQ ID NO: 755157 - DNA, 544 bp, Homo sapiens
agcaagatccgagaagaggatcctgaccacatcatgaacacctccagtgtaatgccctcactcaaagtgtttggcactgtggctgagccctgcagtgccccctccccatccatccactggtagagaacactgatgagacctgcggcacagacattgaggctccttataatattcgcttccgcaccctcgagctgaccacacaaaactatgaggacctgacccacctgtctcagctaacatgcgtggggtcaccacctkcctctgcttccctcaccagctcaattcggacctctgcaagctagcagtcaatacagtgtccttcccacgcctccagttcttcatggctacctttgcccctctcaccagttgtggaagccagctgtatagggctctcaccatgcccaaactcacccagcaggtctttgatgccaagaacatgatggctgccccaccaggactgccttcttccatgaatatccatccattcatgaaggaagtcaatgagcagatgctcagtgtgcagaacaagagtcgccagcagcta

SEQ ID NO: 755158 - DNA, 544 bp, Homo sapiens
agcaagatccgagaagaggatcctgaccacatcatgaacacctccagtgtaatgccctcactcaaagtgtttggcactgtggctgagccctgcagtgccccctccccatccatccactggtagagaacactgatgagacctgcggcacagacattgaggctccttataatattcgcttccgcaccctcgagctgaccacacaaaactatgaggacctgacccacctgtctcagctaacatgcgtggggtcaccaccttcctctgcttcccycaccagctcaattcggacctctgcaagctagcagtcaatacagtgtccttcccacgcctccagttcttcatggctacctttgcccctctcaccagttgtggaagccagctgtatagggctctcaccatgcccaaactcacccagcaggtctttgatgccaagaacatgatggctgccccaccaggactgccttcttccatgaatatccatccattcatgaaggaagtcaatgagcagatgctcagtgtgcagaacaagagtcgccagcagcta

SEQ ID NO: 755159 - DNA, 595 bp, Homo sapiens
cgagatggagttcgctgaggccgagaacaacatgaatgacttcatctctgaacatcgacagtctaggacgccgccgcagaagagggagaggactcagtgaggaagcccagtgggaggcctaaggcagagctcccatcacctcwggcatctcaattccttcagccttcttccttggctgcccctttcttctccctcagtagtcgtgtttgctgcctttaccttgtttatctggggagagggagggtctagagcagtgcctggtacatagtaagtgctcaataaatatttgtctgctgaatgtctcctctctctttccactccaggaaacctagatttctgccgatctgggtaaccgtgtatttccttctggtaccctcctcccatctgcccaattaatatgtccctctgttttcaaaataattctccaggaagctgggtcccattcagatcccatttagaaccaaccgggtgctgaaaacccagataatgtgcaccatcctatgtccacgtagtagccagcactgggaaggtagaaggtggcaggaagaagttactgcaaggggctgggcatggtggctcacgccagtcatcccag

SEQ ID NO: 755160 - DNA, 599 bp, Homo sapiens
tgtgactaagaatgcctaacctcctggggatgcagcccagcaggtctcagccttatttcacccagcccctactcaagatggagtcgctgtggttcaaacacctctgacaaaatcacggaaagtcgaagctgtcctcttttgctgaatcagttcctgggtagaggccacaggatcccatgtggkgccagctgatcatcgatcatcatgtgcagggtctacaaatcatctcaagcactgatcttaggccttaccatagtgagtttattctcaggagcaatttgggatggctcagaatcttggagtctccagatgcatgactcctaaaccctaatttctaaccttacagctaatttgttagtcctgcaaaggcagtgtagtccccaggcaagaagggagtttgttttgggaaagggctgttattgtttttgattcaaagcaaaacaataaaccaagttcctcccaaagttagttcatgcccaggaatgacaaggacagcttgggggttgggaagcagaggagtcagttaggtgagatctctttcactgtcatagttgtctgttataattttgcaaaggcagatctaccatttctctgaaggt

SEQ ID NO: 755161 - DNA, 613 bp, Homo sapiens
gcaaggtccacgttccgggttcacgccattctcctgcctcagcctcccgagtagctgggcctacagatgtccgccaccacacctggctaattttttgtatttttagtacagacagagtttcaccgtgttagccaggatggtctcaatctcctgacctcaagatccacctgtctcggcctcccaaagtgctgggattacaggtgtgagccaccrcgcccggccaattttttctatttttaggagagacagggtttttccatgttgccaaggctggtctctaaactcctgagctcaggcagtcggcccatctcagcctcccaaaatgcggggattaaaggcatgagtcaccacgcctagcctggcctttggtttctaagcttctggacagtaatgggtcactcctgctgagaatgactttcttcatcacctttgcaaattctatccctctcttaggtcttctctcacatctaaaagtcagggcagcagaatggttagggcacccatgttagtgtcacactgccttagtaaaaaccccaactccacttcctaatgaaggtaataataatacctatcttataaatttcttgtgaggattaaatgatttcatttatct

SEQ ID NO: 755162 - DNA, 613 bp, Homo sapiens
gcaaggtccacgttccgggttcacgccattctcctgcctcagcctcccgagtagctgggcctacagatgtccgccaccacacctggctaattttttgtatttttagtacagacagagtttcaccgtgttagccaggatggtctcaatctcctgacctcaagatccacctgtctcggcctcccaaagtgctgggattacaggtgtgagccaccgcgcccggccaattttttctatttttaggagagacagggtttttccatgttgccaaggctggtctctaaactcctgagctcaggcagtcggcccatctcagcctcccaaartgcggggattaaaggcatgagtcaccacgcctagcctggcctttggtttctaagcttctggacagtaatgggtcactcctgctgagaatgactttcttcatcacctttgcaaattctatccctctcttaggtcttctctcacatctaaaagtcagggcagcagaatggttagggcacccatgttagtgtcacactgccttagtaaaaaccccaactccacttcctaatgaaggtaataataatacctatcttataaatttcttgtgaggattaaatgatttcatttatct

SEQ ID NO: 755163 - DNA, 497 bp, Homo sapiens
aaaagtgaatattgaaataaagtgagtcacaatttttttttgtttctcagtgcacttaaaggttatgtttacactatggtatagtctattaagtgtgcaatagcatcatagctagaaaaatcacatatataccttaattaaaaatactttattgcttaaaaatggtaacaattatctgagccttctgcaggttgtaatctttttgctagtggaaggtcttgccttgatgttgatggctgctgacttatcarggaagtggttactgtggcaatttcttaagataaggcaacaatgaagtttgctgcatcaatttattctaccttttgtaaaagatttctctgtaacacctgatgctgtttgacagtattttaccaatagtagaacttctttcaaaattggagtcaattctatcaaatcttgatgctgctttttcaatgatttttatctaatattctaaatttttgtcatttcaacaatgttcaaagcatcttcaccaa

SEQ ID NO: 755164 - DNA, 493 bp, Homo sapiens
cagtccttactcctgtcaaatgtcctctgttatactactagctgtcactcaaagacatcagagacttaaatgacagagatgcacccactatacagaaaaaaccattaaatatgtcttgattacttagtatttgctgaacacatgcctaacttttttgggaaatgagggaaaattccatgacttagcccattttcttgaatttctaatgatacattcagggactcaaacacattactataagaaaataaggtggacggatcacctgaggtcaggagtttgagaccagcctgactaacatgragaaaccccatctctactaaaaaaaaatacaaaattagccaggcatggtggtgcatgcctgcactcccagctactcgggaggctgaggcaggggaattgcttgaacccaggaggcagaggttgcggtgagcagagatcatgccagtgcactccagcctgggcaacaagagcaaaatttcatctcaaaaaagaa

SEQ ID NO: 755165 - DNA, 550 bp, Homo sapiens
aaagtgtctcagttttctcagaagatacttcagttggtaaattattctaggttgatagttattttcacctagtatagtgaggatgtcattccactctgtttgggtttttgctgttcctgttgggaagtcagcgttcagcctaattattcttttgaagacaagagggtaatttatttccctctgggatagtttttgagatagtctctgttcctggtgttgctcagtttcactgtggtgggtctaagtttagggcttccttttatctatctatcttgttkgggattcactggacttaatctgtggattggcatctgtcatgagttctgggaaatgactggtcattgtttcctcaaacattacctctgtgccattttcgctgtcttctctttacaaaactctgtttggacagatatgttggaccttctcattcctttcttcacatcactttatcactctttctccttttccataccttaatttctttgtgcttcactgtgggaaagtgtttagacctatccttaagtttattaactctcagcagctgcctcta

SEQ ID NO: 755166 - DNA, 550 bp, Homo sapiens
aaagtgtctcagttttctcagaagatacttcagttggtaaattattctaggttgatagttattttcacctagtatagtgaggatgtcattccactctgtttgggtttttgctgttcctgttgggaagtcagcgttcagcctaattattcttttgaagacaagagggtaatttatttccctctgggatagtttttgagatagtctctgttcctggtgttgctcagtttcactgtggtgggtctaagtttagggcttccttttatctatctatcttgttggggattcactggacttaatctgtggattggcatctgtcatgagttctgggaaatgactggtcattgtttcctcaaacattacctctgtgccattttcgctgtcttctctttacaaaactctgtttggacagwtatgttggaccttctcattcctttcttcacatcactttatcactctttctccttttccataccttaatttctttgtgcttcactgtgggaaagtgtttagacctatccttaagtttattaactctcagcagctgcctcta

SEQ ID NO: 755167 - DNA, 397 bp, Homo sapiens
cactgcaacctccgcctcccaggttaaagctattctcctgcctcagcctcccgagtaggtgggattacaggcatgcgtcactatgcccagctaatttttgtatttttagtagagatggggtttctccaggttggccaggctgttctcaaactcctgatctcagattatcyggccaccttggcctcccaaagtgctgggattacaggcatgagccactgcgcctggccgacctaattaatttttataacgtgaacacccttgtaaccacctcccaggtcaagaaatagaactttgtcacaccacagaagcctctccaatagaccttatttgttttagtctaaaagaccagagactgggtagtagagatgcctattgccactggacgagggtgatgtta

SEQ ID NO: 755168 - DNA, 613 bp, Homo sapiens
agttctttttaagacacttgcactgatgttgcaagaatttattcctctcagcaattagatgccatgattagacgatcttttatgttacattagagcaatccttaaacagcaaatcagatccctagctcatcaaccttcttgcgataaggaagtcttaaggaagacaaccatttttaacttaaaagaaaagaaaaaaaggcaggtcagcccaggaaagcctgaaggagaccagcagtkggttttaaatctcccttctccacttccgaacatgcttgcttgtttctaaggatggagagttattttgagccaaaattattaaaatcataaagagacaaaaagtgaaactagcagagtctttggcatggtgggtcgggtttggaaatttttttttgtcttctttccattcattcgatccaaaatgacagccttgaaaattcctctgtgaaggtcaccacgtgctaaaacatgacaacgcccataatgcaaaattacagataggggtgtgtgcgtgcgtgtgtgtgcgtgtgtgtgtgtgtgtgtggtcttctttaaaaaaaaaaactggtaatgaagttgtaaatgtagaatttctttcattacctattcattaaag

SEQ ID NO: 755169 - DNA, 613 bp, Homo sapiens
agttctttttaagacacttgcactgatgttgcaagaatttattcctctcagcaattagatgccatgattagacgatcttttatgttacattagagcaatccttaaacagcaaatcagatccctagctcatcaaccttcttgcgataaggaagtcttaaggaagacaaccatttttaacttaaaagaaaagaaaaaaaggcaggtcagcccaggaaagcctgaaggagaccagcagttggttttaaatctcccttctccacttccgaacatgcttgcttgtttctaaggatggagagttattttgagccaaaattattaaaatcataaagagacaaaaagtgaaactagcagagtctttrgcatggtgggtcgggtttggaaatttttttttgtcttctttccattcattcgatccaaaatgacagccttgaaaattcctctgtgaaggtcaccacgtgctaaaacatgacaacgcccataatgcaaaattacagataggggtgtgtgcgtgcgtgtgtgtgcgtgtgtgtgtgtgtgtgtggtcttctttaaaaaaaaaaactggtaatgaagttgtaaatgtagaatttctttcattacctattcattaaag

SEQ ID NO: 755170 - DNA, 436 bp, Homo sapiens
cctgcctgcactcacgttttcttcccaaaaggttgatttcaagcctctagtgctatagcagaggctgtgtcctgcccatggtcccccattccccaactttcacctctagaagccaaaggaggcttgctgcaaatgctgcaatgttctccctgcaagcttcatctctggccagcaaggggctgagctatggacaggaaaagccaaacattttaaagagggatgcccagaaagcagcttcatccactgatatgggagcccatggctgggwtaacataggcatttcttcactttctgctaaaggtcccagggggatggagctcaccacagacactgactcattaattcatccctttttggctttcctcctgtcctatctcacttccccatgccactgccagtatatcctggaatcacctcccaaaccaagctacatagg

SEQ ID NO: 755171 - DNA, 562 bp, Homo sapiens
tcactacacccagggtaatattttaaaataatcacattttggccttgcgtgttggctcacacttgtaatctcagcactttgggaagccaaggcgggcggatcacctgaggtcaggagtttgagaccagcccggccaacatggtaaaagtacatctctactaaaaatacaaaaattaaccgggcatggtggcaggtacctgtaattccagctactcaggaggctgaggcagaagaaccacttgaacccagaagatggaggttgcaatgagccaagattgcaccactgcactccagcctggaaacagagcgagactctctctcaataaataaataaataataaataaataaaatcataacattttaactctttgaagaaaacttttatgtttgttgttcagaawatttaaaatattttattgtgaaataattttaaatttacggagattttgcaaagaaattgtgaaattttccatatactgttttctccaagattttaacatctgtgcctgagttgctttatcattctctttctctttcctcctccatattatttgttatgaa

SEQ ID NO: 755172 - DNA, 641 bp, Homo sapiens
cagaccatatccagcagataaaaaagtgaaaataaaacacagacagaacatataacaaagctcccatcccacatgaattagtaccgtgagaatttatcttatataattaacatagcacttacctagaatatatgaatcctcgaacttatgtgttaattcttgatctcaatgctaaggcttgaatcttcaattcatgtgactgtttgattaatcctcatgaatacttgaccgtttttacaaaatcaatattttgactttttgtatcacrtgtgttctattcctttctgaaatttcttaacacagctgacaaacacaggtacaaagatttatagcttgggttctgaactgagctactttgatatgaatctaaaaagacatgccatattaaaatatgcctttagtctacggccaattaaagaaattagtgttaaaagaagaaatctgggtgattctgagatttagtttataatctgggaggagtgcaaatattattaatattataaattagtagtatgaaccataataataaaaataataaagcttctcatgtaaactccccaaatataataattatgttttataggtatctgactcagggcagaaaatagatcagctttataatattgactgtctaatgacta

SEQ ID NO: 755173 - DNA, 625 bp, Homo sapiens
gtaaatgagttggataaacagtggcctattcacaccatggaaccttattcagcaataaaaataaatgagctatcaagtcattaaaaggcatagcttaccatggctcatgcctgtaaactcagcactgtgggaggccaaggcgggtggatcacctgaactctggagtttgagacaagcctggccaacatgatgaaaccctgtctccactaaaaatacaaaaattagctgggmgtggtggtggatgcctataatcccagctactcaggaggctggggccagagaatcacttgaacccaggaggtagaggttgcagtgagccgagatggcaccattgcactccagcctgggtgacaagagcgaaactctgtctcaaaaaaaaaaaaaaaaaaaggcataggagaggcttaaatatatattgctaagtgaaagaagccaatccgaaaatgctacactggatgataccagctatatgacattcactataggacattctagaaaaggttaaactatgaagataataaaaatatcaatggttgccaggtgttcagagtgaggaagggagggatgaataagaggaaaaaaggagatttttaggggagtaagactattcttgatgacaatgtaa

SEQ ID NO: 755174 - DNA, 663 bp, Homo sapiens
ttttgtcagacttctacaagaccttcattgtcctgatgtgtttttttaatttcttatttaaaaaatacatttgcaattattaaaattgtattatgggtatatacgcttctatttgctctgctgttttcctccttagttgctggtcaattctcccaggtcttcactatttttttcattatattcctatgataatcatgtgagatcacaatagtttcaatactccatgctaatcttttgacacaatgatatatttaaaaatatatagctctccatataacattattccaaagaattgtatgagaccctctcttcacatttcacttacagaatgatttcaaaaacagccaatttcatcatagaaaataattgcttatttttctgataaataacatctctaagtttttctctgtaatgagggtgacaataggaaagggatatattattttctcttctttccaacactgcattgtttaatgagttaaggatgtgcatggcaacatttctcgatataaagtcaatgrtatttaatttaatgatagattttcaccaattctgccaacacattgcctgacagcgttagctttcttcttgttgagaattccaccatcttctgtactatgattactacttggtgacaaacttgtgcaaaaccatttttgagta

SEQ ID NO: 755175 - DNA, 563 bp, Homo sapiens
aaccacccccaagattcaatcacctcccaccaggcctctcttccaacactcaggatcacaattcaacatgagatttgtgtggggacacagagacaaaccatatcaccctccttggtcaacccaaaaaatattttatttctgatttttatgagttggattgtatcccccaaattcacaggttgatgttctaatctcyagtactttgcagagtgaatttatttgtaaataagttcattgcagatgtaatgatttgagatgagttcataccagagtaggttgggtgcctagtccagcatgactggtgttcttatagaaagagaaaatttgaacccaaatacccatggatggaggaggatgtgaagaggcaaggaagaagatggatatcagtaagcccaggagatagacctgacactgagctttctttgacccccttaaaaggaaccaacccttttgacaatgccttgatcttggacattgagcctccagaactgtgaaatgctaagtttctattgtttaagcaattcagtttgtcatacttctttacaacaatcctagcaaagtaa

SEQ ID NO: 755176 - DNA, 559 bp, Homo sapiens
tataacaaatctgaatacctcttccttcttgaaattcttcttttgtttgtcttccataatcatttgcttcccactttttccatggacaaatgctaaaactctaatgtttatcacagaataaagtgtgctcttggtgacaaaatatgaacctcaaactwtatttccactattatttgtcccctgagttacaaatcagtatacgtaaatggctattagatattatcatgtaatagttctataggcatttcacattccaagctaacctaattccttcttggatccctactgcattgattgtaccatctacacaataccttctttacaaccctccccctttttcaattgcttgtatatcaccaagttctttcttctgcctctatccatcactgctctcaatgaagtatgaaaagacacagtcatcactcgcctaaataactactagaccttcacaactggtctgcctgtaatcagataaaaactcttctaatttgtcctcctcactacacccagggtaatattttaaaataatcacattttggccttgcgtgttggctcacac

SEQ ID NO: 755177 - DNA, 551 bp, Homo sapiens
agggaaaaaaagtgaaacaaacaggtgtgcatataacttaaaaagtcagtgaaacagagtcaagagtccaaaatacattctccagcaaaaatgggaaaataattatattatagagtggatattaaaaatgtgtcttactccagtttctgttgttatagcaaaaggccacagactaggtaattaaaaagaaaagaagtttatttggctcatgattctgtaggctgcaaagtccaagaacatggtgccagtgtctggcaaaggtcttcatgctatgccatctcttggtgaaaggacaagtgagcatgctaaacagagaggaaaytggaccaagcccatctttttatctggagcccctcccatgataactaacccactgccattataaaggtgttaatctattaatgagagcagaggtctcatgatctaatcatcccttaatgattccacctcctaatgcaacgtatgtgttacaatggcaatcacatttccaacacatgaactttagggagatgcttcaaaccatagcaaaaccaatggggaaaaaatagact

SEQ ID NO: 755178 - DNA, 477 bp, Homo sapiens
aagcttgtcactgagggaagaatactcacaggtatccatcctgacagtaggagtcgcgctttgtgtgctaagtgaggcggtgactcgaaaaatacatttgtttccacccacgccatctcccactgacaaatgctgttcctctcagggccaaaattctagaattatattycaacaaatagatttactaaaaaaaaaaaaaaaaaaaaaaaaaagaaaaagaaataagagaaaattaaaagttaaaaaaaaactgccagagttatagcacctgcctaaaattggttatctagttgttcccctaccccaaaaacagtactttctaaagcaatctagtgttgctgtctcaaaccagggcacatgtctaaatgggcccatagttaaacacatctggtcatagggctggtagacttgctggaactatataaaacatctattcttttataactccaaatgctcagctggttaagaataccgcct

SEQ ID NO: 755179 - DNA, 613 bp, Homo sapiens
tattgacaaaacagtgagacaaaaatgttagtaaaggcacagaagatctgaacaacactatggaccacatcgacttaattgacatgtatggaacactacccccaagaacttcagaatacacattcttttcaagtgcatatagcacattcactgaaattctaatataaattaagttctaagtataatgcctaccaccatgaaattaaaatagaaatcaatatattttgaaaatccccaaatatttgaaaattcatcaacatgagatactgttatgaaaataagcaagctggccggcacggtggctcacacttgtaatcccagcactttggaaggccgaggcaggaaggtcacctgaggtcaggagtttgagactagcctggccaacatggtgagaccccatttcttctaaaactatgaaaattagctaggcgcrgtggtgcatgtccgtaatcgcagctactcgggaggctgaggggagagaatcacttgagccctgtgcctgggaggcagaggttgcagtgagctgacatcgcatcactgcattccagcctgggaaacagagcaagcagagcgagactcagtctcaaaaaaaaaaaaaaaaaaaaagcaatgg

SEQ ID NO: 755180 - DNA, 631 bp, Homo sapiens
tatgcatagtgttaggatttctgggtcagagggtatacaaattttataatttaacagataatgtcaaaaatgttcaaaaaaacatgctccaggtccttgttaccaatggttatttttttcagtagtggtattttttgagattttaatttgcttttccctgattactaatttgattaaacatcttttcatataattatttcacttttctttttaaaaaaattcatttatacattttggaaattcccccctccctccatcagtttgggttattttttttaactgcatgaaaatatccttttcatattttgggcaacagggtttttgttagctttttaaatgttgagtattttctcccatgttgcgactggtatttgtattttcttcacggtatcttttgataaatacagtttatatattttattatatatattatttattatgttrataaatacaatattaacttttttgtattttaactcattagtcttttaatctattctcatagctttttttattgtttcataacatgcattgaagtaggttcttgtaaatatttcactctattatattctacataataatattctgtccatagttttagcttttctttatttggaattgatattttaat

SEQ ID NO: 755181 - DNA, 567 bp, Homo sapiens
actaccttaaacaagtggtcaagtttaatatcactggtaagaagtcatgttgataccatgtaatccctgatgtgctgtgctgaaaatgatccatcaacagacaaatggataaagaaaatatggtgtatatacacaatggagtatttttcatccgtagaaccagattctgatatttgcaacaccgtggatggaactagaggtcattatattaagtgaaatcagcccaggcacagaaagacaaastttacgtgttctcacttatttgtggaagctaaaaattaaaacaactggactcatggagatagagagtaaaatgatggttaccagacactgggaagggtacagtagtgcgggggtcgggggaagcacagcgtggttggggagaagtagagatggttaacgggtataaaaatagagttagaatgaataagaactagtatttaatagcatgacagggagactatagtcaaaaataatttattgtacatttaaaaaataactaatagtataatttgtttgtaacacaaataaatggtaaatgcttgaggtgacagatactttgtttac

SEQ ID NO: 755182 - DNA, 361 bp, Homo sapiens
gaattcagctgacattggagtgttatacaagcagtctgtaagccagcccctacaatgcagaggagaatagaaaagggctctggggaagaacagacactagataagcacagtcagtctctcccatgtttcttgatctgtaaaatataaattayagtaaccaccacagaagattagtgtcaggattaatgtaaaacaatgtgctaggctttgaaaagtgtcatgagagttgttactattattgcttgaaggaatccagtagtcccagagctaaagagtcttccttcctttggtttctttataactttggataagatacccatctgtgatcatcaataagacttaaaattaggaatttattttt

SEQ ID NO: 755183 - DNA, 571 bp, Homo sapiens
gaaaagaatttataaagaaggaaaccatggcaacagaatcatttatttttaactgtaccaacccttatctctactttcacccccaaactaagcacactgaagccatagccttttctagactgccttatccccactgtaattttgcaccagtcaaaaatagcaacaggaattgtcatatttccattactaagtactgtgcatgccatgcttctcttcctctttacttgctcacattatcctgcagacagcctttgaggaacttttgtgattgtcaaggggaagctcagctattgcatactgcagggccaatgtcactgctaatgccaacgacaggctctctagtggttagattgaggtcctracttaattcctcagagatcccacatcttatcagaagtgagctgaccacacaggacaagagcagatgtaactgcagcatatcacaacacagcatcccttggctcccggggatcctgtctgtacacatatctgaatagctctgttttgctacaccactgccttttatcttcctggtcatacttacaccgcaatgccaggagaacttacactt

SEQ ID NO: 755184 - DNA, 645 bp, Homo sapiens
ttctggctgctgttgaatggtgatattttgttctaagcatacaatgctttcctgagctttctagggattatgaaatcatttgagaacatttaataactgcaagaaatttgcactatcaaagtaaagaattgagcaaactgccaaaatagtatgacaattagggatagaaaaagggaggagagtactttcaccctaattcagatttcaggcaagaagaatagtcacttatagaattatctggaaaattactttcatacttttattcactcagatggtgaataaaaattttggcctctttgatagtttttattatgtacactaacattatgattaaatctgataaatctatattttggtaaaagtgacttttaatgacagaaagccttgcattctacagttttcatytttttttaaacttaactttcctttttgattattactgaaaccaatagtctgctgtgatttgaattcatgcagtgaatgcttaactatgtggtactactcaagtgtgaaattaataatggagctgggtttgttgtgtggcctctgacttgcttcccacaatttgagaaggtgtcagaattatggcttctattaaccttcctttgtgagggatttgtgaacctatcagatttgcttccagct

SEQ ID NO: 755185 - DNA, 557 bp, Homo sapiens
acatgaggcactctgatttggggagaggctcagagcatcctgtacctcacaattatacttcagacaaaagatattttctctgccctttgtgacaacttatgcaattgttgtgttcgggcaatgtgagatacagtcctgctactacacattcagatatatgtgggtgattctcatttttagtgttaatttgagctttgtaactttttgatgtttccagtttattttttattatgaagagtacacacagccttatggaagacaatagctagtagatataaccagagccaaattaaacttctgctgatctatttcagaaaataatgttatcytggatttcctctgacaggtggaagacaattattattctttgtccatctttcttgtcccatgtttgcagttgaatgtaagacaaagaaggtacatatatttatatgcaaagagtgcatgactaaacatattctacataatttagaaatttcttatatttccaacattttgtttttctctaatttcagtctttccatctcaacaggaaagtgatggccaatttgaagagt

SEQ ID NO: 755186 - DNA, 596 bp, Homo sapiens
tactattaattttgatgtactatattcatatgaaggaaagtggtagggcctctatccacttcaatttcaatgaaatatttgtaattgttttctttgttgaagacagtactcagtcagaaaagttctttggtttttgtttctgtgccttgttctctatctaattgtgaatacttttttggattttgttacttggagttactgacaacagggttctgatattggttttgactttctatgttctttcataccttttctcatttctttacttacttgaatatttgactttccaaaacctttgggtgactttttttttttttttttttttttttactttctaaggggtttttcatctcttcttcaatttccgkggctttagggtcttggctctgctttatgccaaaatatatgctgttaacccatcttacctgtgcctaagcttcctcccatctcacaaatacaaataccactgaaatgcaattccaaagcacaaaagtagaatgtcttatctttatttgtttctaaaagatttattgaaaagccactctatttctttgctactcattttagcctctctttcaatttctgaatgtcaagct

SEQ ID NO: 755187 - DNA, 553 bp, Homo sapiens
ataaaacacttaaaatatcttagcaatttcaagaatattgttatgaactgtagtcaccatgttgtgcaatagattttttgaatgttttccttttatttaatcgaaattttctatcctttgatccacagctttgtaaaccttctctccccacagtgcctaccagccctgggtgggctactattttctgcttctatgagttcaactttttcagatttaatatagaagcgagatcatgcaatattttttttgcgtctgttttatttcaattaacataaacttccccaggtttatccatgttattgcaaataacaggactkccttcgttttaaaggctgactagaattccattgtggacatatgttacattttccttattcattcatccttaatggacttagatagctttatatcttggccattgtgaaaagtgctacaagaaacatgggaacatcgatatcttttccacatactgatttcatttattttaggtatacacacagtagtaggattgctggatcacatggcagttctattgttattattatttttttaa

SEQ ID NO: 755188 - DNA, 553 bp, Homo sapiens
ataaaacacttaaaatatcttagcaatttcaagaatattgttatgaactgtagtcaccatgttgtgcaatagattttttgaatgttttccttttatttaatcgaaattttctatcctttgatccacagctttgtaaaccttctctccccacagtgcctaccagccctgggtgggctactattttctgcttctatgagttcaactttttcagatttaatatagaagcgagatcatgcaatattttttttgcgtctgttttatttcaattaacataaacttccccaggtttatccatgttattgcaaataacaggacttccttcgttttaaaggctgactagaattccattgtggacatatsttacattttccttattcattcatccttaatggacttagatagctttatatcttggccattgtgaaaagtgctacaagaaacatgggaacatcgatatcttttccacatactgatttcatttattttaggtatacacacagtagtaggattgctggatcacatggcagttctattgttattattatttttttaa

SEQ ID NO: 755189 - DNA, 566 bp, Homo sapiens
actctagcctaggcaataagagcgaaactccatctcaaaaaaaaaaaaaaaaaaaagaaagtagaaaagaatttaaaatccacaagaactgtaaaaaatacaaatagccaatcaatctggagaaagaacaaagctgaaattatcacacttcctgatttcacagtatattcaaaagctgaagtacggtggctcacacctgtaatcccagcactttgggaagccgaagcgggcagatcacgagatcaggagattgagaccttcttggctaacatggcaaaaccctgtctctactaaaaatacaaaaacaaaattagccaggcgtggtggcgggcgcctgtattcccagctactcgggaggctgatgcaggagaatggcrtgaacccaggaggcggagcttgcagtgagccaagatcgcgccactgcactccagcctgggcgacagagcgagactccgtctaaaaaaaagaaaaaaaaaaaactaaagtaatcaaaacagtaacgtattagcataaaatcagacccatagaccaatgtaataaaatagagagcactgaaataaatctat

SEQ ID NO: 755190 - DNA, 585 bp, Homo sapiens
ttttcttaaatcctaagcagatgaacatccccataagaactattaatgagtattcattacactttatgaaggcgttcccatggtgaactcaacaccaatagctttaggttctcaggtaagaaagaggggcctctggaggaaacttatacttagcgtttctgagctacaattgttttcctattttatttatatccacttcttttctccctcctgtgagagaattaaacagcaattccactcactggggcaattagctcattattcactgcatttcaaatgaaatattgacattaaacaggcccctttaatcattacattgcccataactagcatctatattgttcttgaagaaaacaccttgctctctctggaatgcctccattattacacttatacttttytcagaaagaagtagcaccacaatttttattacacatccactgcaagtctcactttttataattgtttcttcccccttcaattcagtttcctgtagataggactgacagactagagtaacccaacatggtagcttatttttaaccttgatatttttatttgatagagcataaatctatactgctt

SEQ ID NO: 755191 - DNA, 585 bp, Homo sapiens
ttttcttaaatcctaagcagatgaacatccccataagaactattaatgagtattcattacactttatgaaggcgttcccatggtgaactcaacaccaatagctttaggttctcaggtaagaaagaggggcctctggaggaaacttatacttagcgtttctgagctacaattgttttcctattttatttatatccacttcttttctccctcctgtgagagaattaaacagcaattccactcactggggcaattagctcattattcactgcatttcaaatgaaatattgacattaaacaggcccctttaatcattacattgcccataactagcatctatattgttcttgaagaaaacaccttgctctctctggaatgcctccattattacacttatacttttctcagaaagaagtagcaccacmatttttattacacatccactgcaagtctcactttttataattgtttcttcccccttcaattcagtttcctgtagataggactgacagactagagtaacccaacatggtagcttatttttaaccttgatatttttatttgatagagcataaatctatactgctt

SEQ ID NO: 755192 - DNA, 570 bp, Homo sapiens
gagggagaaaccatcgtgctgaggtgccacagctggaaggacaagcctctggtcaaggtcacattcttccagaatggaaaatccaagaaattttcccgttcggatcccaacttctccatcccacaagcaaaccacagtcacagtggtgattaccactgcacaggaaacataggctacacgctgtactcatccaagcctgtgaccatcactgtccaaggtatgmggagtctgccaagatgtaaggaggggagaagaggggatggacaagggctgaggtcacatgggcctacatggaggtctgagaaaggccacagcgcaaaattgggcactggagcaaagaggagtggtgtggaggcctggctaagtattgaccaatgagcaggagtaggggccagagcttggagccctcaggtgataggtgaccaggctgttgttccactttgaaatgcaggccccagactaaggacggcagcgaagcagagctccctcgttggtgcagaggttccctaagctcctgggcattcctaagaactgaggtttgcctttattcttctcatggctcatgttaca

SEQ ID NO: 755193 - DNA, 570 bp, Homo sapiens
gagggagaaaccatcgtgctgaggtgccacagctggaaggacaagcctctggtcaaggtcacattcttccagaatggaaaatccaagaaattttcccgttcggatcccaacttctccatcccacaagcaaaccacagtcacagtggtgattaccactgcacaggaaacataggctacacgctgtactcatccaagcctgtgaccatcactgtccaaggtatgcggagtctgccaagatgtarggaggggagaagaggggatggacaagggctgaggtcacatgggcctacatggaggtctgagaaaggccacagcgcaaaattgggcactggagcaaagaggagtggtgtggaggcctggctaagtattgaccaatgagcaggagtaggggccagagcttggagccctcaggtgataggtgaccaggctgttgttccactttgaaatgcaggccccagactaaggacggcagcgaagcagagctccctcgttggtgcagaggttccctaagctcctgggcattcctaagaactgaggtttgcctttattcttctcatggctcatgttaca

SEQ ID NO: 755194 - DNA, 633 bp, Homo sapiens
ttattcttctcatggctcatgttacagccattcactccagaaagcctggcacgtcatggaccgttcaaggctgtgctccatagagtaatgatgcctccagctatgcgaggctttgggcccacccttcccactgcccctgagggctaaggggagcccttccctctgttcctgcctgctcacmaatgtacctttattagtttggtggagaaacctcggtaagcaggaggcataagtccagccacagaaaccctgtgcagatgaggctggggatgtagtgagtgctgcagaagtgagtgactcagacacagaagagcttcgggtgacaagcactaggacatagcattggatgggggggaggtgggacaaggagagtactgcctgtcctgatgtctgtcttccctagctcccagctcttcaccgatggggatcattgtggctgtggtcactgggattgctgtagcggccattgttgctgctgtagtggccttgatctactgcaggaaaaagcggatttcaggtttgtagctcctcccggtccctttggttatcagtttccacttggcccaggccctaaccccagacattgccagaatccctctctttgggctagatacacattcagatctaggcccg

SEQ ID NO: 755195 - DNA, 633 bp, Homo sapiens
ttattcttctcatggctcatgttacagccattcactccagaaagcctggcacgtcatggaccgttcaaggctgtgctccatagagtaatgatgcctccagctatgcgaggctttgggcccacccttcccactgcccctgagggctaaggggagcccttccctctgttcctgcctgctcacaaatgtacctttattagttyggtggagaaacctcggtaagcaggaggcataagtccagccacagaaaccctgtgcagatgaggctggggatgtagtgagtgctgcagaagtgagtgactcagacacagaagagcttcgggtgacaagcactaggacatagcattggatgggggggaggtgggacaaggagagtactgcctgtcctgatgtctgtcttccctagctcccagctcttcaccgatggggatcattgtggctgtggtcactgggattgctgtagcggccattgttgctgctgtagtggccttgatctactgcaggaaaaagcggatttcaggtttgtagctcctcccggtccctttggttatcagtttccacttggcccaggccctaaccccagacattgccagaatccctctctttgggctagatacacattcagatctaggcccg

SEQ ID NO: 755196 - DNA, 572 bp, Homo sapiens
tataacatgagccatgagaagaataaaggcaaacctcagttcttacgaatgcccaggagcttagggaacctctgcaccaacgagggagctctgcttcgctgccgtccttagtctggggcctgcatttcaaagtggaacaacagcctggtcacctatcacctgagggctccaagctctggcccctactcctgctcattggtcaatacttagccaggcctccacaccactcctctttgctccagtgcccaattttgygctgtggcctttctcagacctccatgtaggcccatgtgacctcagcccttgtccatcccctcttctcccctccctacatcttggcagactcctcataccttggacagtgatggtcacaggcttggatgagtacagcgtgtagcctatgtttcctgtgcagtggtaatcaccactgtgactgtggtttgcttgtgggatggagaagttgggatccgaacgggaaaatttcttggattttccattctggaagaatgtgaccttgaccagaggcttgtccttccagctgtggcacctcagcacgatggtttctccctcct

SEQ ID NO: 755197 - DNA, 603 bp, Homo sapiens
cttacgaatgcccaggagcttagggaacctctgcaccaacgagggagctctgcttcgctgccgtccttagtctggggcctgcatttcaaagtggaacaacagcctggtcacctatcacctgagggctccaagctctggcccctactcctgctcattggtcaatacttagccaggcctccacaccactcctctttgctccagtgcccaattttgtgctgtggcctttctcagacctccatgtaggcccatgtgacctcagcccttgtccatcccctcttctcccctccctacatcttggcagactcckcataccttggacagtgatggtcacaggcttggatgagtacagcgtgtagcctatgtttcctgtgcagtggtaatcaccactgtgactgtggtttgcttgtgggatggagaagttgggatccgaacgggaaaatttcttggattttccattctggaagaatgtgaccttgaccagaggcttgtccttccagctgtggcacctcagcacgatggtttctccctcctggaactccaggtgaggggtctggagcaccagccactctgaaagacacagaaaaccccagaggacccgggagg

SEQ ID NO: 755198 - DNA, 578 bp, Homo sapiens
gaatctaagttcttcatgtgcaaatgagggtgataatacttatcttctgggattgttgaaaattagaaataatgtgagtctagtgcctcctccatagtaataatgtgaaaggaaaataaaaactcaggattccaatacactgtgccaaaagaaaaaacaaattaaactgaaagctgagtcgtgcaagatactgactttccgttggatcctaagcagatagctacagagaaaagattaaaaatctccgtagatggccaggtgtgttggctcatgcctgtaatcccagcgctttgtgaggccaaggtgggtggatcacttgaggtcaggagttcaagaccaggctgtccaacatggcaaaacctcagttctactaaaaatacaaaaaaaaaaaaaaaaraaagaaagaaagaaattagcagggcgtggtggcagatgcttgtaattccagctgcttgggaggaggaagcaggagaatcgcttgaacccgggaggcggaggttgtagtgaaccgaggtcacacctctgcactcccgcctgggcgacagagtgagactctggcaagaaagaaagtaaagtaa

SEQ ID NO: 755199 - DNA, 612 bp, Homo sapiens
atttatctatcccagttggaactaattgtgcttcctaaatctgaggattcatgtctgtcaccaattctggaaaattctcagctagtcttttttttttttccatatttcctttcctccattctctgtagtgcctatttctgtaactcatattaaacatacatttttcttttcattcagtgttatcccttagactttgaaaaatatattttctttctttttattgctctttcttgcattttgagtagtttcttcaaatatttcttctagttcattaagccttttctcacctatgtctaatcttccatttaacccttatattgagtttttaaartttcaatggtgatatcttcatttttagaagttctacttggtcatttttttttcctatctgtttttgtgtttcatagtgtcttgttatgttattattttttataacttattttgggtatttaataattttaaacatgtctattatatagtcttatgtgatagctcttgtatgtctacactcactctttgttatacctgctgactcttttatggtggaattgtgttcttgtgggttttgttgttttagattgtgagctcatgtttggtgggacattgtctact

SEQ ID NO: 755200 - DNA, 572 bp, Homo sapiens
taatgcagtttatttcctaaagctgtttaactaagtgttaactactaatgaactacaggtgtgaattataggtgacatctacaatgccctcatatggttggtttggggagggtgctcaaagcctacccttattcaaacagccagargcagaaggtaatacagatttgcatattgatatactatttctaagggaggaggactcactaaaggcaacacctagagcactttttgagtgagccagaccctaaagtcaataaaccaaagtacagttgacccttgaacaacatgaatttgaactgtgcggaggatcctatttacttccattttctcccacctctgtcacccaccccgagtctgcaaaaccaatgccacctcttctacctcctctttctcctcaccctactcaatgtgaagatgaggatgaagacctttatgtatgatgacccacttccacttaataaataataaatatcttttcttccttataattttcttaataatattttctgtagctttattgtaagaatatggtacaaaatttgtggaaattggccatttatgttattggtaag

SEQ ID NO: 755201 - DNA, 505 bp, Homo sapiens
tctccatcaccactggactcaatgaaaccttcacacacagctggatgcattttttaatttcttggatttatgattgatgactttctcactattgttgattcattagggtttatgggttcacttataatatgattctgtcargctttagcctaaaatattacccttgaacttaaaaaaatgcaatggtgtaggccagcctttaaaaaaaaagtacagaacatgtactctggaagactgaattattcattccaactttttactcccctgcaattggattatacatctataccctttgccttgtagcattgcattgttcctccacaggacaatgagatagtgagaggggtttgcttccccctaaactcctctttattgaatatggactcggccaatgaaatatagtagaagtgacatgaacagaggctttatgtatgcttacatggtttggttgtccttttgtgctcctgtgattatcatgaaaaaagcatgacccagttagcttcta

SEQ ID NO: 755202 - DNA, 631 bp, Homo sapiens
ttggacattcaatatgaactcaaaaggaatttctcaatctttactcaggtcaacaaatttggtatacacaaaatagatcaagtctacttataaaatgtggccctgatttaattagatgcttctgatataatgaataaaaaccaacaagaaggaaggtaattgtaagaatatgagggcatgtggaaatgggaatttcctccagacttccagatctcttaggacccttctccttgtttacctttgtctagtatagcctctgctgattcctaactgwcatctccttgtccatagtgatccttccagactctcattctctctacctgaatgcctttcagcttctgttcctggtaatagcctgatttgtccagattttcccagttcacaccgccaagagtgatagtctgatggccccagctcatttctatttgggcaatgcttctagcccctagattgacctcctataccataagcaggcagcctttgttttgctgcccttgactcagattccttcggccatggctgcagacgacagtgtcacaggatcacaacatagttccactggaaactgggtagaacatttttccttatcaaaagctgtgaggactgtaagtatggcaatgacataattgga

SEQ ID NO: 755203 - DNA, 591 bp, Homo sapiens
tggatgatagctaatactcattgagcatgcactatgtacttactgagcaatcacatatactggggcatgtgattttcacgtacagctcattggattgtcatggcaaatgaggtagatattacagtatcattttccccacttaaagataaaaagctggttcaggccaggcgcgttggctcatgcctgtaatcccagcactttgggaggccaaagcaggtggatcacctgaggtcaggagttcaagactagcttggccaacatggtaaaaccctgtctctactaaaaatacaaaattagcagggtggggtggcacatgcctgtaatcccagctacttgggagactgaggcaggagaactgcttgaagctgggtggcagaggttgcagtgagccaagatcgtgccaccgcactccagcctgggtgacagagwgaaactccgtctttaaaaaaaaaaaagcaaagctagaacagagaaagatgaaataacttgcccaaggacatagagctaataagtattaaagttgggatctgaactgcacttatatggctccaaagtccctgctcttagtcaatgtgttatatggtctccccc

SEQ ID NO: 755204 - DNA, 589 bp, Homo sapiens
aacgcattctcaaatgacagggataagcccacctctaagaatcaccagtatctgagggaaatctgcaccaggaaagcgaggcaccaaactcatcagaagaacatgcacataaagaaaaagaagacagaaaaaaaaaaaaacccagtgtttcaaaagatcattatcttcagagggaaagggaggataccacattcacaagcaagaatagactttttcatttcctagaaatgaaaaataatagcaaaaattaaaaaatttagagggataaagaagaattcaccactgaaaagcaaattaccaygctggaagtctgtgctgacaaattcttgcagaactcagaaccacagggcaaagagaggagaactatgaatgggaagttgtaatatttgaaggataggactgcaaggtccagaaataaagaatagatatgttagaggtaagaaaattatttaggaggccgaggtgggaggatcgcctgagcccaggagtttgagaccagtctgagaccccatctctataaaaaattcaaaaaattagccgagtgtggtagcatgcatgtgtaatttcaactactcgggaggccttgagg

SEQ ID NO: 755205 - DNA, 619 bp, Homo sapiens
aagaaggagacagattttttttttccttcacaaggtctctcaagtgacaaggagacagattttcaacaggaaatcaaaaccaaggaatacaaactatgccatgatggaattagaagtggggctagctctgttttggaaaaggataaaactggatgaaggggactgtttcccacacaatggtcacggcaagaaaggatgagctcttcaaacactgttagcacatgaaaagatagtcaacattattatccacgtgggaaatataagttaaaaccacaatgaggcatcactattcatctatcagaatggctwaaaaaaaaaaaaaaaaaaaaaaagtggcaacaccagatgctagcaaagatgtggagaaactgaatcagttgcactttactggtaggaatgtataatgtaaaacatacactgtataaaggtacagccactctggaaaatagtttgacagtttcttacaaaactaaaggtgcaactactctaagacacagcaattgcactcttgggcatttatctcagatgaatgaaaacgtgtgttcacacaaaaacctgcgcatgtgtgtttatagttttagcacctttatttgtaatagccccaaactggaaaaaaaac

SEQ ID NO: 755206 - DNA, 630 bp, Homo sapiens
gtgaggaaattaatttctatcattgaacccacacagtttgtggtattttgttatggcaaccctcacaaactaatacattcaccatttaacaattctaagatataaatgaataattttgcaaaacaaaaatacatctttatgggatactgttgtaggacacgtaaataagttgttatgcttcccggaaaacctattagtgctatggtgagatatggggaatcataggaagtacaagtcactgcatagttatcatttattgcatagtctgttctgatcatattagtctggattaataagaataaaakttattctggaatcgtatcaaggtcgaccttggttacataaaacacagctgtggaaatattaattatcctataatactggattgtgttataaaatcaagccagtcagaaaatcaagatattggaaacatacttcattcaaatctctgcctctttcttgtaagagagtctagtttttaaagcagtgcttatagaaggcatatttggcaagcaccctgcataatgacaaatatgcttacctcttcaggaggacgtgacagccagcaggggctttggatagcctgcaatttgtgagcaggtaattttttttcacaaaccttataaccca

SEQ ID NO: 755207 - DNA, 586 bp, Homo sapiens
gctctgagtaggaaaatacttggggtgttcaagaaggtgacagaaaatgatcattgctcatgaagctcagtgggtagcaaaacatgaagttggaaaggaaggcagaatttgggttatgtaggttcatgtagtctggtgaggaattttaacttatttacaagagcaattaagccactgaggttttaagtaagatgttattaaattaaaaattaatttaaaaaactgattctcttgtgtctacaacatattggaaaataagtaagaataaaactaggaaaaacaaatcagatactggcaaagaaatctaggcargaaatgatggtggcttggaaattctgtggtagtagtggagacaagtggacaaatgcagaatattttgggagttaatttaaaaggtctattgatatttggaatatgagtaggcagatgagataagcagaggaattaactagatttttaatttaataattaatgataaaatgggaaagaacagggaaggtagagagatggagaggaaagaatcgagaactccatatttagtcttactgaatttaagatggtttcacctaacatcccagtggagaca

SEQ ID NO: 755208 - DNA, 462 bp, Homo sapiens
tcattcattgtaaggtaattctggcaattaatattaagatgtgaagaaagagactccagttccttactaaattatttaataggcctctggtcaactcacatgaagtgtgaggatgagagcaatcagcagggtgaggcacttgttcagtgttgtttcaccagtactcattacagcatatactacgcacggcaggctactgtcttaaaagaaaattgcctaaattccttwatttcctcaccagtatctaaataatgaagcctgaaaaatatacgattatagagttttctctaaagaaaacccccaagataaagatgcgcctttggcatgtccacttcaaactttgcattttctaaggagaaggttaaacggctactcatatgtatccctattttcccattgcaggactttggctaagtgatagtaagttgtattggataagtgcagtaactcgaagaacaaaga

SEQ ID NO: 755209 - DNA, 462 bp, Homo sapiens
tcattcattgtaaggtaattctggcaattaatattaagatgtgaagaaagagactccagttccttactaaattatttaataggcctctggtcaactcacatgaagtgtgaggatgagagcaatcagcagggtgaggcacttgttcagtgttgtttcaccagtactcattacagcatatactacgcacggcaggctactgtcttaaaagaaaattgcctaaattccttaatttcctcaccagtatctaaataatgaagcctgaaaaatatacgattatagagttttctstaaagaaaacccccaagataaagatgcgcctttggcatgtccacttcaaactttgcattttctaaggagaaggttaaacggctactcatatgtatccctattttcccattgcaggactttggctaagtgatagtaagttgtattggataagtgcagtaactcgaagaacaaaga

SEQ ID NO: 755210 - DNA, 662 bp, Homo sapiens
tcattttcatttctctaatgattaaagataagccttttttagatgctttttggccatgtgtatatcttcttttgaaaagttttcatgtcatttacccactttttaatggtattgtttgcctttttcttgtacattaagttctttatagattctggatattagacctttatcaaatgcatagtttgtgaaacttttctcccattctgtaggttgtctgtttactctgtttatagtttcttttgctctgcagaagctctgyagtttaattaagttccatttgtcaaatttcgttgcaattatttttggcgtctttgtcatgaaatctttgtcaggtcctatgtcctgaataatattttctagattatcttccagggtttttatagtttgaggttttacatttaagtctttaatccatcttaagttgctttttgtgtattgtgtaagaaaggggtccagtttcagtcttctgaatatggctgaccagttatcccaacattatttatcgaatagcgagtcctttcctcattgcttgtttttatttattttgtcaaaggtcaggtggttgtagatacgtagcattatttctgggctctctattatgttccattggtctatgtttctatttttgtaccagtaccatactgttttggttactgcagtcc

SEQ ID NO: 755211 - DNA, 662 bp, Homo sapiens
tcattttcatttctctaatgattaaagataagccttttttagatgctttttggccatgtgtatatcttcttttgaaaagttttcatgtcatttacccactttttaatggtattgtttgcctttttcttgtacattaagttctttatagattctggatattagacctttatcaaatgcatagtttgtgaaacttttctcccattctgtaggttgtctgtttactctgtttatagtttcttttgctctgcagaagctctgtagtttaattaagttccatttgtcaaatttcgttgcaattatttttggcrtctttgtcatgaaatctttgtcaggtcctatgtcctgaataatattttctagattatcttccagggtttttatagtttgaggttttacatttaagtctttaatccatcttaagttgctttttgtgtattgtgtaagaaaggggtccagtttcagtcttctgaatatggctgaccagttatcccaacattatttatcgaatagcgagtcctttcctcattgcttgtttttatttattttgtcaaaggtcaggtggttgtagatacgtagcattatttctgggctctctattatgttccattggtctatgtttctatttttgtaccagtaccatactgttttggttactgcagtcc

SEQ ID NO: 755212 - DNA, 645 bp, Homo sapiens
tctcactccttttgcagttaagaatttatagaatagcaaatattaactcaaattttatgctgctatttcttaagtttatgtgttgtactttcaattaaattatgtaatacttaaggttaagggattttgccttactcatattcttcattgcccagtgtatttaggatgacattgagcacattatacattcttactactgcttagtgaatcaaattgagctgaattgaattgaaatgaatcaaagaagaaactttcataacattttgccttctgggtttggcagatagaacagtaaagtgctagttagaattactgtacttagctctcaaccagcaagtaattttgagtcatttgaaagctttccaattctccatctagagaatatggatgatgcctgttatcttcaagaggatgccatgaagattatataccatctctacatcaaaaaaagyttaataaatatgaagtattctcattcaatacctggacatgttaagcacagagctgcaagtgatataattaaggcctaattaagatatatgaaaatttgttagggtggataaaaatgcgtagaagaaagtcgtaagataaaatttttgtgatttgactgcacctgtcttattagcttagtaattctgagaagcc

SEQ ID NO: 755213 - DNA, 549 bp, Homo sapiens
cagctcaggggacatcacagacctaccgatatgtgatgtcacccctggaggcccagctggaaaattcctctctttgtactctttctctttatttctcagactggctgacacttagggaaagtagaaaggacctacaytgaaatattgggggcttgttcccctgatatttcttttctttcgcgttttcctttctttccttctttcttttcttttcttttttttatttatttttttttttttgtgtgtgtgtgtgagagagagagagagagagagacagggtcttgctctgtccaccaggctggagtgcagtgacaccatctcaccttacttcagcctctgccccctgggctcaagtgattctcatgcctcagccttggagtagctgggatgacaggagtgcaccaccatgcccaggtaatttttgtattttttgtggagatggggtttcaccatattgtccaggctggcctcaaatttctgggctcaagcaatacacccacctcagcctcccaaagtgttgggattacagtcatgaaccactgcttccag

SEQ ID NO: 755214 - DNA, 549 bp, Homo sapiens
cagctcaggggacatcacagacctaccgatatgtgatgtcacccctggaggcccagctggaaaattcctctctttgtactctttctctttatttctcagactggctgacacttagggaaagtagaaaggacctacattgaaatattgggggcttgttcccctgatatttcttttctttcgygttttcctttctttccttctttcttttcttttcttttttttatttatttttttttttttgtgtgtgtgtgtgagagagagagagagagagagacagggtcttgctctgtccaccaggctggagtgcagtgacaccatctcaccttacttcagcctctgccccctgggctcaagtgattctcatgcctcagccttggagtagctgggatgacaggagtgcaccaccatgcccaggtaatttttgtattttttgtggagatggggtttcaccatattgtccaggctggcctcaaatttctgggctcaagcaatacacccacctcagcctcccaaagtgttgggattacagtcatgaaccactgcttccag

SEQ ID NO: 755215 - DNA, 599 bp, Homo sapiens
ccttttaaagtcctggataaacacctgctggttttgcagctcaggggacatcacagacctaccgatatgtgatgtcacccctggaggcccagctggaaaattcctctctttgtactctttctctttatttctcagactggctgacacttagggaaagtagaaaggacctacattgaaatattgggggcttgttcccctgatatttcttttctttcgcgttttcctttctttccttctttcttttcttttcttttttttatttatttttttttttttgtgtgtgtgtgtgwgagagagagagagagagagacagggtcttgctctgtccaccaggctggagtgcagtgacaccatctcaccttacttcagcctctgccccctgggctcaagtgattctcatgcctcagccttggagtagctgggatgacaggagtgcaccaccatgcccaggtaatttttgtattttttgtggagatggggtttcaccatattgtccaggctggcctcaaatttctgggctcaagcaatacacccacctcagcctcccaaagtgttgggattacagtcatgaaccactgcttccagctgagaaaataact

SEQ ID NO: 755216 - DNA, 627 bp, Homo sapiens
gtgttggaagaacaatcaagatggtataagtgaagctgttaacaattattagaccagtagtaaacaattggtaagtattatgtttagagctataaacataatatttaaacataatatataaacataaatattatgacagagtaagaagttggtatgaaaactctctttataatagtgtaacctcctaggacccttatatagacagtcaccatacctctctaattttctgagatacacctaatgtcttcatctgttttgtgctgctataaagaaatacctaaggctggatgatttggctcacagttctgatggctggaaagtttatggttgggcatctgcatttggagagggccagtcttcttccactcacrgtggaaagtgaaagggagccagcatgtccagagatcacagggtaagaggaaaagcaagagaggtgggaggtacaggctcttgtaaacaaccacctgttaggagctaatagagtgagaatttacctccaagggagggcattaatcaattcatgaaggatctgcccccatgacccaaagacctcccattaagccccacctccaacactggggatcaaattgcaacatgaggtttggagaaaatgaacatagtacacct

SEQ ID NO: 755217 - DNA, 627 bp, Homo sapiens
gtgttggaagaacaatcaagatggtataagtgaagctgttaacaattattagaccagtagtaaacaattggtaagtattatgtttagagctataaacataatatttaaacataatatataaacataaatattatgacagagtaagaagttggtatgaaaactctctttataatagtgtaacctcctaggacccttatatagacagtcaccatacctctctaattttctgagatacacctaatgtcttcatctgttttgtgctgctataaagaaatacctaaggctggatgatttggctcacagttctgatggctggaaagtttatggttgggcatctgcatttggagagggccagtcttcttccactcacagtggaaagtgaaagggagccagcatrtccagagatcacagggtaagaggaaaagcaagagaggtgggaggtacaggctcttgtaaacaaccacctgttaggagctaatagagtgagaatttacctccaagggagggcattaatcaattcatgaaggatctgcccccatgacccaaagacctcccattaagccccacctccaacactggggatcaaattgcaacatgaggtttggagaaaatgaacatagtacacct

SEQ ID NO: 755218 - DNA, 608 bp, Homo sapiens
  misc_feature 127, 182: n = A,T,C or G
ctatttaggtgaatagttgacctgatctccctcataaatacatcattatgtgatatataccaagtatgtagagccccaaaagacagcagctgcttctataagcaatagggttcctggcacaacccantgtataaagaaaacctaatttagttaagtatacacttgttttgatgatgaaaganaatgttgttgaggcaactatgtaaactatttcaggcaaaagagattagtmttattttgtatgacctgtgcaagacctgtcttgtttttagtggcaaatagctcgaagttcctaatctgtttgaaggctgatctgttatggcacccaaagcatattcttctattagttttattacatttgcttacttggaatattgggtggaatcagtagaattcagaagtgactatagaactgcatggcgataaacttaatagggattttatcttttggttctttcaggtgaaagtagtatatatgtcaaagtacccaaaagattcctaaatggagctgtatgcttagatcattcattcattcattccttcagtgaagaacattgcttcctgggcattgcctgtgttagataattccatcggggagggaaagattt

SEQ ID NO: 755219 - DNA, 636 bp, Homo sapiens
ttaatgactgtcagccattggcagtggacttgagctatccccagaataaaggaactccagctccagccccacccagtccagagtgctggggacccaggttgtgacttgatgatattcacagttgttacctgcagggggatgccacaagaagtcagagaaggcacttccattatcaggcaccccaaacccctgtgactcagcatatgtgcccttggctgtatataacctgctcaccccccaccccccgccccatttctgctgggccaccttcrtgggggtctcacccaggccctcctgtgtgcacctgcagctactccttgtttctggcttgcatgacttatcacacatgggaatgggaatcatctgttccttcccttggatcctcagtcagggcagggatggattctgatttactgctgcattctagtgtctcacataaggacttgcacattcaggcactaagcctgtatttgctaaattcatggattcatttggtcattcatttgcaaatatttatggcttgttttatgccagacactgttttaggtgctgaataaatgaacaaatgagcaagagtgggtagaactgctgctattccttcgggctgctgtcactttgtgttccccttgaagttta

SEQ ID NO: 755220 - DNA, 520 bp, Homo sapiens
cccaaaaggagacaagggagttaaaattcaagtgtttgcatgtgtactcatgtgcatatccaaattttaagattctttcagtatctctcttccagatccattttctcctacaaaatattaaacatagaagaatacttttcagmatatggatcatttcccttcatagaattcttcttcttgtgcttgtgcattcattagtttgtttcttaagacatacaggtctcaggattcatcaccacaaagcaatttagaaaaactcaaaacgcaggatactccttgcccctgtccctatgttatacagttaaatctaagtctaagccaatgcaaagctgtgaaccatgggccactcccttccaatggacttctactcgtggggtacactttgtctgagcatggacttgccagcctttccccacgagccccaaatttccctgaattgcaacaggccctgaaacatttgtaacactaaatctgaggctgattattccatgatgatactcagaattttctagggcatgac

SEQ ID NO: 755221 - DNA, 539 bp, Homo sapiens
gggagttctagggccccgcccaccaccagtccctctctacactaccacggctggtgctctccggaaagcaccacctcctggtgagaggccaaccagcacaaaaatagagcattaaaccaccaaagctaaggaccctcaaagagtctattgcatcctccaccacctccaccagaacaagcgctggtatctgtggctgagagacccatagayggttcacatcacaggactctgtgcagacaactcccagtaccagcctggagccaggtagactcactgggtggctagactgagaaaagagacaacaatcactgcagttcggctcacaagaagccacatccacaggaaaagggagagagtactacatcaagggaacaccccatgggacaaaaaatctgaacaacagccttcaaccatagaccttccctttgacagagcctacctgaatgagaaggaaacagaaaaccaaccctggtaatatggcaaaatgaggctcatcacactcccccagactcacactagttcaccagcaatggatccaa

SEQ ID NO: 755222 - DNA, 539 bp, Homo sapiens
gggagttctagggccccgcccaccaccagtccctctctacactaccacggctggtgctctccggaaagcaccacctcctggtgagaggccaaccagcacaaaaatagagcattaaaccaccaaagctaaggaccctcaaagagtctattgcatcctccaccacctccaccagaacaagcgctggtatctgtggctgagagacccatagacggttcacatcacaggactctgtgcagacaactcccagtaccagcctggagccaggtagactcactgggtggctagactgagaaaagagacaacaatcactgcagttcggctcacargaagccacatccacaggaaaagggagagagtactacatcaagggaacaccccatgggacaaaaaatctgaacaacagccttcaaccatagaccttccctttgacagagcctacctgaatgagaaggaaacagaaaaccaaccctggtaatatggcaaaatgaggctcatcacactcccccagactcacactagttcaccagcaatggatccaa

SEQ ID NO: 755223 - DNA, 704 bp, Homo sapiens
ggtttctgctgagaaatctactattagtctgataagctttcctttataggttacctgatgcctttccctcatagctcttaacagtctttccttcatctggactttagataacctgatgactatgggcctatgtggtggctttttgtgatgaatttcccagatgttctttgagcttcttgtatttggatgtctagatctctagcgaagccagggaagttttcttcaaatatgttttccaaacttttagatttctcttcttccttgggaacaccagttattcttaggtttggtcgtttaacatattcccaaacatcttagaggctttgttcaytttttaattcttttttctttgtctttgttggattgagttatttagaaagccttgcctttgagctctgaagttctttcttctacgtgtttgattcttttgctgagactttccagtgtattttgcatttctctaattgtgtccttcacttccagaagttgtgattatttttatttatgctatctatttttctggagattttcccaatcatattctgtatcttttttttatttctttaagttggtattcacctttctctggtgcctccttgagtagcttaataattgactttctgaattctttttctggcagttcagagatttcgtcttggtttggatccatcagtggtgagctagtgtgatctttcgggggacat

SEQ ID NO: 755224 - DNA, 652 bp, Homo sapiens
aaatttagagtggatgttatgtactgtcaccacaaaaatgataactatgtgaggtaattcatttgctaattagctagatttaatgactccacaatgtacatgtactttaaaacatcatgttgtatgtgatgaaaacatagagtgttatttctccatttaaaataagtaaacttaaaattttaattttttttaagtgcagtgagaaagtgagtgttcaatacatggtagctctcatttttaaaaatttaattattttaggaacttttttatttcataatgtgagatacacgagtaggctattcttataaaaggtcataaggaaatataagatctgggtgttaaaaaaaaaaaaaaaaaaaaaaaggaggattttttagaggcttccaggaggcccaggaactccttggtaggcctaggtatttaaaatataggctgctttttttaaaggatcttacattctttttgkggaactaaagccacaatggtgaattttggtggagaggaacacatcaggactcttacagtctcatgcagtgggatgtctctgccaaattcctagagtatttaatgggaaatattgatatgaatcttttttcaggtccatgaaaacagttggcctcctaaaagtcctcgtccttaggcaatgaggagt

SEQ ID NO: 755225 - DNA, 638 bp, Homo sapiens
tcttactgatccttggaccaggaaaagggattgtattttacgtgagcgccacccaaattatcttgtcacatagaattgtgttttataaataaaatgcccttgttagttatttgttgaaagaaagagaagggaggaaggaagggagggaggaagggcaggaggaagacaggaaggaaggaaggaaggaaggaaggaagaaaaatatcttctcaaatttcaaattgggtaataataatactgtaatataatgattgaaaatacmcgctggccaggtgtggtggctcacatctataatctcggcactttgggaggcctaggcgggtggatcacttgaggtcaggagtgcatgaccagcctcactaacatggtgaaaccctgtctctattaaacaatacaaaaattagccaggcgtgttggctcatgcctgtaatcccagctactagggaggctgaggcaggagaatcacttgaacctggcaggcggaggttgcagtaagtcgagatcacaccactgcattctggcctgggcaaaagagtgagactccatctcaaaaaaaaaaaaaaaaagaaaagaaaaaaagaaagaaaatacaagcttaattcttactgtattccagatgtagtgctcagtgttctaca

SEQ ID NO: 755226 - DNA, 617 bp, Homo sapiens
ttttttaactccatggcctgcttcccataattctaaggcactcagatatgtcagatagacatctcattctcttcctaaatggaaggtaaggaaaagcaggtgacattccaagagccacattaaaaaaaaaagtctctggtaactgtgttgagatattaaggccaatggtccaattatacactattaaattccatgagtgagtagggattmgttcctttatttacaaggaccaccacagtgctggatgaagccacttaaaagtgaattctgtcaacttgtgaagagcaattctctagtaccataagtctttcaaagtatgatttattgcctccaataacacttaaatataggctgaaatcattcaatcattttttcacggattcaaataaatttgtcagaaagttataaatcatagcccaaggatagagagggaagcctataatattctgcacagtatccatttggggtatgaatcaatcaattgtgctcatgataaattgaacaacttacgtgcctcacactattaaaaataattttagtgaatgagtcacataattttcttagtggtatgcaatagtcttttttaagcttgtgaaatacgttaaatgttaaaagaa

SEQ ID NO: 755227 - DNA, 589 bp, Homo sapiens
cagaaagttataaatcatagcccaaggatagagagggaagcctataatattctgcacagtatccatttggggtatgaatcaatcaattgtgctcatgataaattgaacaacttacgtgcctcacactattaaaaataattttagtgaatgagtcacataattttcttagtggtatgcaatagtcttttttaagcttgtgaaatacgttaaatgttaaaagaaggaraggaacacatacccacatgtatatatagatatatatgtatacatctttatgtgtggatacatgcataaactacacatacacgtgttcacagatataaatcatgatagagagatagagggggagaatagatatacgtgtatagaatgaattaatcacagacaacaaacagagatgtttagagttacaatagttatttaccaatgtggtgtagtgtttggtgcatgccaactgagtaaatgatcctttctctcccacgagcacagatctccacagtgctaagtttacgaattcagttttctacagttgtaaagactaaataggatatttccagttcatcattatgagctcctaattttatgaaat

SEQ ID NO: 755228 - DNA, 653 bp, Homo sapiens
caaatgacatacaaatgaccactaagtatgtaaaaatctcaagatcagtaataatcaggggagcacaaatcataatcacaataaaataccacttcacactcactgggatggttgaaataaacatagacactaacatgtgtttctaaaactatggagaaattggaaccctcacatactgctggtggaaacataaaatagtgcagccactttggaaaacagtgtggcagttcctcaaaaaattaaacataaagttatccataaaacccagtaattcctsttctagctatatacccaagagaaatataaacgtaggctcacacaaaacttgtacacagatattcatagcagcagaattcataatagccaaaaagccaaactcaaatatccagcaattgataaaatttaaaagatgtagtacatccataaaatgtaatattattcagccataaaagaaatgaagtgctgatacatgctacaacatggatgaaccttgaaaacattatgttgagtaaaagaagctagccacaaaatataacatattatgaaattccatttacataaaacatagtgaatatgttccataaagacagaagtagattggtgatggctaggggatgggtaggggtaaatgatgggcaactattaatgggtac

SEQ ID NO: 755229 - DNA, 609 bp, Homo sapiens
caagtgggagtcccaagatttatcatcatcccaagtccttttgatcaattcagcatcccttctctagacttactgagttttttaaagtcaacttcattaagatataatttgcatataataaaatgcatcaattttaagtgtctagtcatgaatgttgccaaatataacaaccatcacaatcaagaactagaacatttctatgacccagaaaatcccttgtgccctttagcatgaatcatcacacttagggtaccagacagccattgatctgctttcgctcactataaatgagtttgcctactctaagttatcccacaaatgaaataatatagtatatgcttttctatccagcctctttcatacaatgtttttgagatygaccctcactgtacatcagtagctctatccacttcattactgcatagtagtgttccattgtttgtgtgcatatgtgtaccattaacttatctattgacatcttcataaatgttgaattgtttccagttttgtggcattacaaataaagctaccctgtgtataaatctgggtgaatattagtatataaatctttgtgtggacatatgttttcattttctcgggtaaatatct

SEQ ID NO: 755230 - DNA, 609 bp, Homo sapiens
caagtgggagtcccaagatttatcatcatcccaagtccttttgatcaattcagcatcccttctctagacttactgagttttttaaagtcaacttcattaagatataatttgcatataataaaatgcatcaattttaagtgtctagtcatgaatgttgccaaatataacaaccatcacaatcaagaactagaacatttctatgacccagaaaatcccttgtgccctttagcatgaatcatcacacttagggtaccagacagccattgatctgctttcgctcactataaatgagtttgcctactctaagttatcccacaaatgaaataatatagtatatgcttttctatccagcctctttcatacaatgtttttgagattgaccctcactgtacatcagtagctctatccayttcattactgcatagtagtgttccattgtttgtgtgcatatgtgtaccattaacttatctattgacatcttcataaatgttgaattgtttccagttttgtggcattacaaataaagctaccctgtgtataaatctgggtgaatattagtatataaatctttgtgtggacatatgttttcattttctcgggtaaatatct

SEQ ID NO: 755231 - DNA, 612 bp, Homo sapiens
atataaatcctctatgagttgtgggttgagtctactattgtctttgcagtgaaactagtgggcatgtattaaatagtttctacctggatggagaatcactctgtctctgcaccttttgcagagtgggtagacttccaggggtgatgtttttcggctaagtcaacgagacttaaaaccatgaaaccttaaaaaaccatgccagcattcagtttagaaaagggccaggctcaagaggtcaacattagtgtcaatatcagaattcactcctcacaagttstggagatccaatgacctctaccaacctaagctgattccaatatgacttgtaagatctagttagaacaaggattttcagatccttaaagtaatgtgaactccttaaggcaacctccaacctttctttatcttttgaggatgagtgactcatgtacaacttgagccaggagaatctgctggattagttgtgggttctatgtgcattactcatacccggccctgccaactaccaccaccaactctgtggaccatgtcttatgtctggagccatgaaactttatcttctgggggttagtgaagcctctgtaatttttgcatcacagtatatgtttaact

SEQ ID NO: 755232 - DNA, 538 bp, Homo sapiens
acatacaccctcccaagactaaaccaggaagaggttgaatctctgaatagaccaataccaggctctgaaattgaggcaataattaataccctaccgaccaaaaaaagcccagggccagacagattcacagccgaattctaccagaggtacaaagaagagctggcaccattccttctgaaactattccaaacaacagaaaaagagggactcctccctaactcattttatgaggccagcatcatcctgtaccaaagcccggcagagacacaacaaaaaaagagaattttagaccaatatccctgattaacatcgatgcaaaaatcctcaataaaatactggcaaaccgaatccagcagcacatcaraaagcttatcgaccgcaatcaagttaccttcatccctgggatgcaaggctggttcaacatacgcaaatcaaaaaacgtaacccatcacataaacagaaccaaagacaaaaccacatgattatctcaatagatgcagaaaaggcctttgacaaaattcaacagcgcttcatacta

SEQ ID NO: 755233 - DNA, 654 bp, Homo sapiens
taaggatttcaatctttaagaacaatggagaatgttttctgtttgttttgaatcagtgaagtgtcatgtttatatttgtattttataaagagaaatgctcaataattttgagagtctttatttgattgctaattgacaaactgaatgacatcattccaagggagagacatatgacagcttataggagaatagtgactctcaatggaaatgaaagaaatggatgaaccaaagatatatttagaaagtaaattagctcaggktgatgaactttataggttagaggaaagggagttattggctcctgagtttctggatgaacacaatttgctaagctgaaataccaagtaagagaaccaatatctggagggaaaaccacaagtttgttttgggataatttgagtttgaagtgcttttgaattatccaagtaagggaggttaaatacgataagtgtgtttgaaactcagatatcagggccagagatgtgaatctattgccaatggcgtggagcctacaacttcgatgtaagtgcctagaagagggtttcttaatctctgcaccattgacattttgggctggttaatactttgttgtaggggagctactctgtgcattgtgcatcttatagcaggatcccagctgtctcccctagatgt

SEQ ID NO: 755234 - DNA, 546 bp, Homo sapiens
aaagtgttgatgcaggaagagtggattttttaaaaggtatagtttgcataccataatagtcacctttttgaagtgtacaattcaatggtttttaatatacttacaaaattatgtggcaatcaccaatacccaacttgttaaagatctttgaaaaaatttttacttttccaccagctttattgaggcataattgccaaatagaaattagatatatttatggtgtacaaggtgatattttgatatatgcatacattatgaaatgattgccataatcaagctaattaacatagctgctttcttacatagttattgtttktttggtggtaaaaatgtactttgttgacatattttaaatacacaatgcattatcgttacctatagattttacaactgccaaaagaaacctcatgtccattagcagtcaatccccattactctctcttcccagcccttggcaacaacttatcttctatccctttctatgaatttgcctagtctggacatctcataatgtgatcttttgtgactgttttttttttcacttag

SEQ ID NO: 755235 - DNA, 572 bp, Homo sapiens
gatggaacacaaaaaattttggccctaaaattgcctctgcttactgcctggaaagaaatttcatactctttagtgaaaagaggacagcccaggaagagtcccaaatatttccagagttgaggagacttggcttagagtctagagagattgtattggctagagtttgcagaacatactaccagaagagagtttcatagagagagaactatggatgtcttcagagagcctgccacaaatattctagagtactgatcagcatgtagtatttggaaactacccaaggctggggaaagaatcgtctaagaggattaaargcaaaagtgttcagcatttacatggggccagaaacaatatgcgttcccaccagataagcaagaagattgatattttatgtgccattgggcagactatagaaaagggtctaaagcaacagtggacaatatttatccctagactgatcactgctttggagctgcctaacaactaataaatgcaagatcaaaaaagataaaaatgtttccaaataactgcattcataaataaagctcaagaagatttagaagaagacaaaa

SEQ ID NO: 755236 - DNA, 649 bp, Homo sapiens
tcctagtctaactatattggattccaacagcatagaaatacagtcaaattatcaaagaaagactggccattcctataaaagagttgctggaagtgtgaaatgaggaaatgggaaaataatgagttatttgcaaaataagtagtagagtggaaagactgaagacctggcagatacgctgggtattatacaaaggatattgaaagatgaaaatgtataccttggtttgaatactaattgctaaaaacattatgagacaattagggaaatttgaagcttggtagatatgttttaaatgacattaagaagttatttgtattttctttagatgtgataatgatgtttgacagtggaatartataatgtctgggatttgctttaaaatagttcagaggagagagcttggtgatagctgcatatacatatgggaacataatattctttctctgtttttatgtgtttgataattctaataaaaatgttaagaaaagataaaaatgacaaagccaaagatagtaacttatttagaattgaggttgtgtgatggagtttttactttaatgggaagaacttaaataaactgaaggtctgtcctaaattctttgggtgaagcttcagtctatacctgactactttttagttgtagcattgt

SEQ ID NO: 755237 - DNA, 649 bp, Homo sapiens
tcctagtctaactatattggattccaacagcatagaaatacagtcaaattatcaaagaaagactggccattcctataaaagagttgctggaagtgtgaaatgaggaaatgggaaaataatgagttatttgcaaaataagtagtagagtggaaagactgaagacctggcagatacgctgggtattatacaaaggatattgaaagatgaaaatgtataccttggtttgaatactaattgctaaaaacattatgagacaattagggaaatttgaagcttggtagatatgttttaaatgacattaagaagttatttgtattttctttagatgtgataatgatgtttgacagtggaatagtataatgtctgggatttgctttaaaatagttcagaggagagagcttggtgatagctkcatatacatatgggaacataatattctttctctgtttttatgtgtttgataattctaataaaaatgttaagaaaagataaaaatgacaaagccaaagatagtaacttatttagaattgaggttgtgtgatggagtttttactttaatgggaagaacttaaataaactgaaggtctgtcctaaattctttgggtgaagcttcagtctatacctgactactttttagttgtagcattgt

SEQ ID NO: 755238 - DNA, 709 bp, Homo sapiens
ataaaactttaaaggttatatggtcatataggaggcagaatttgcacaattgaataaacatttagaaaagaataaatttaaatctctgcttacaaatgtcagataaattacaggacatccaattaaatttgaatttcaaataagcaacaaatacctttttaattagtatgtacctaaagattattcatttttatctgaaattcaatactttaaaaaaattacattgattcataataattgtacacatttatgtggtgcttgtgatattttgatacttaacaatgtgtaatgatcaaatcaggttaattaggatctccatcacctctaacataattccaaatctcttctccctatttgaatttatttcttctgtctaactgtatttttgtgtccattaaccaaactttcttcatgccctcttccatgttatttccagcctctggtaaccaccattctactctcaaattccataagatcaattttattttttagctgtatattttagctatatagttagctgtattttttttgacacgtgctatttttttttctgtgcctggcttayttcacgtaacatgtcttccaggctcaacaccactgatttccagggacatgcaaatcaaaaccacatgaggcattatctcacctcagtttatcaaaaagaccaaaaaataacaaacgctattgagaatgtggagaaatgagaaag

SEQ ID NO: 755239 - DNA, 586 bp, Homo sapiens
acacaaactctcctagatactaaagaaataattcccaactcattgtatgaaactggcataaccttgacacaaaaatctgataaggacattacaagaaaggtattcaaagaccactgtcatatcgtgaatatagatgagaaaaaagatccttaaaaaaaaattagtgaatcaaagccagttatataaaataaattaaaatctttttttaaattattcagcttttattttaatatagagggcacatgtgtaggattgttacatggctatactggacccagtagtaagcacagtgcccaatagatrgatttttaacccaagctccccttcctccctctccctttagtagttcacagtgtctattgttgtcatatttgtgtccatgtgtgttcaatatttaattcccatttactagtgataacatgtgatatttggttttctattcctatattaatttgcttaggattatgtcctccagctccatactttgttgctgcaaagaacattatttcattttctttaatggctgtgtagtatttcatggtgtaaatataccacatttttcttatccagtctaccattgatgggc

SEQ ID NO: 755240 - DNA, 600 bp, Homo sapiens
accacccaacttctttcttttgtaaatttcccagtctcagatatgtctttatcagcagcaggaaaacagactaacacaggtatcaaaattgaagagttcagcgcatcgctagagcaaaccaaggtttccaagagagaagccaaatctgtctcggcccgtggaggccttcctgatcacacattgaataggatgtgtgaggaaaaagaaaaaagagaggattcactaacttagttcaatcccagctctggttttgatgtactttaaagtagcaggagacatcatttatccactgaatttttcagtaaaaatgctacygagtcaaatagtttatcaacatttaattcattagattacaataaattgcatatttttcatagagtgagtcaagaacaatttcaaatcatagttctcataaagatgtaaaatagcacaacttgccctaaggaaacaggaacattttgaaatttataacacctaacaatttttgaccaaacagggaagaaaatatgaataacgattatggccatcaagatagaggttaagaaaaggaaatttaagtcaatcccctaactttgtataacatgggcatgaaaagaggag

SEQ ID NO: 755241 - DNA, 614 bp, Homo sapiens
atgcatttaatcgtgctcaaggcttcatgaaattgagttcattaaattaggattttaaatcattatggctaagaaaaacatgtatatctaaatattaaataaaacaaaatgtaaagatatctaagatgttaagattttagtaaaataagttaatgaaaaagaaagycagggtctgggaagtatgaatatttaggactactaaactatgggattataagagtgggtaatgacagttagccactcaagaaatacacattttcaagcaccaaggttgtccttgtcaaatgagtctgggctttctgttttctctggcagatctgaaggtgatagattacctaacaccttctgtgatgcttcctgggatctttgtgtcggggtgcatatttagtggaaaaccctctgaataagtcagtcctgaatcccagatggccctgctatgatcctgcaaaggtcatcctgatcccaggattagagagggccactgcccaagggcacagaaatgctgccataaacacgtagtgtcagaggaggatgagtttcagatcagggtagaccctagatgtcctttcttcccaaacctagcatttctttaaaaaggaactgtgctgcttaaa

SEQ ID NO: 755242 - DNA, 675 bp, Homo sapiens
gtctttgtgactggcttatttcactttgcataatgtcctcaatgttcattcacgttgttgcatgtgtcagaatatttttccttctgaaagctgagtcatatgcccttgtatgtatatgctacatttgttgatgcactcatctgttgatggacactagggtttcttccatcccttggctattgtgaataatcctgctatgaacacgggtgtacaaatagctctttgagacctattttcaattctgtcagatatatgtgtagaagtggaattgctggatcatatggtagttctattattagttttttgagaaccactatgttttctatagcagtggcactattttacattcccaccaatggtgcacaagagttccactttctccatatcartgccagcacttgttcttttcttttctttcctttttttgatagtagccatccaaatgggtgtgcggtgatatctcattgtgtcttttttctttgcatttctctaatgattatttcatacacttagccaaataacacatttttaacttaatctttagttgtgtcagtgtctgccatctttagagggactaaaatgttttaaaaattaatttttcaaatatctcaaaactaagtacagataaatttaaatagtcttcttcgttttgtaagtttgtaagctcattttgta

SEQ ID NO: 755243 - DNA, 434 bp, Homo sapiens
aaaagacttttaatgccggtgcatcagtgcctcaatctaagatttcattttcatcaagctagagtgggtatcatgaagttatttcaagggaatctgtgaaaaactcctctaagttataggaaaaaagtttatttatgtttgcctgtttctacatccattgctttatacctaccatcagattcccaggggatccactaccctctcaagatgaaagaaagccacattataattagaacctaaagkctctgattgtccaaaaatgacccagtgacctgctaattacaaaactcaattcctttgtgcctccccactctctctctctctttctgacattcatgttatcattttctccttgtttcctgctccctggtaaattgcttttcagtttttttctctctgctcttccttcacttcccagtaaatgaaactgtttt

SEQ ID NO: 755244 - DNA, 434 bp, Homo sapiens
aaaagacttttaatgccggtgcatcagtgcctcaatctaagatttcattttcatcaagctagagtgggtatcatgaagttatttcaagggaatctgtgaaaaactcctctaagttataggaaaaaagtttatttatgtttgcctgtttctacatccattgctttatacctaccatcagattcccaggggatccactaccctctcaagatgaaagaaagccacattataattagaacctaaaggctctgattgtccaaaaatgacccagtgacctgctaattacaaaactcarttcctttgtgcctccccactctctctctctctttctgacattcatgttatcattttctccttgtttcctgctccctggtaaattgcttttcagtttttttctctctgctcttccttcacttcccagtaaatgaaactgtttt

SEQ ID NO: 755245 - DNA, 525 bp, Homo sapiens
ctgttgatatcctgactcatagtggttagaacagtctcagctcccaccctgtctgtatcctactctcctagcctatatactcttgtgtgtgggtgtgggtgtgaagcatgtgtatgtgtgtgtgtgaagcatctccccacctgtaatgtaagtccatgagtgcagaatttttgtcatattctttacgtgttgagttttaacaaatgtttgtggagtgaatgaacaaattaatgaatataggctatttattaattaggcaatatagtcacataggctggcaatcrcatctaattaaatagagtggtaaatgagttccagaaagaactaaggtactacaaggatgttatgaaagagaaaaatgagttatgtgaaaaataggagacagtgataagagggaaagaatcccaaagtgtgggccacattttgaaactaatgacctattattctattattgttagctgaaagtagaaaacgtcatgggagggaatatctgctagtttttggtaaaggatgttgtgatggcag

SEQ ID NO: 755246 - DNA, 629 bp, Homo sapiens
aattcttgtcctgagaaccaaaatatatatttgatgaaatagttctcttcttttactcattctgaagtcattggaattgaatttggcatatgatataaatcctaattttatattttatgatattcaaaatttctaacaaatatttacttaataatctaatccaggtttctattgtttcttctgtttcctttataatgctttttctgaagttatttttcctagacttaaatattagtataatattatcatagaggaaaaaatatctgttagctatgaataaaaggctttcatcttattgttgcattaatatatttaaatgtagagagcatacagattagcaaagaaaaagtataattgcctttttttatagttgacatgaacatgtataaagaaaarccaaaaaaatcaataaaacaactagaacttattagtgaatttagcaagatcatagcatacaaagccaagattcaaaattccattttatttatctactaacaaaaactatttgaaatttgaaaatttaaatatgccatttacaataacatcaaaatattgaacaataaagtatttaggaatttataaaatgaaatctcctataccaggaattacagaccattgctgaaataaat

SEQ ID NO: 755247 - DNA, 609 bp, Homo sapiens
gatggctgaattctcagcagggctctgtgccgcaaatgaaattgtcaggcatgagcaaggtagctatgcttatggtctctcagtggggaaggcaggtcacccgcaactggagcaggggaggctgacagctgtgggccacatgacccgcttgcactttcctcccatggaagtggtcatggatttcaatgttgggggtttgcgaaggtgccrtttttgctcactgtcttcctggcccagaatggcaggagcagatggtggcggtggcaactgctgagcagctgaaaggcagattgccggtctccgtgggctggctgttcagaagaattctcagtttcagtgaagtgctcacgttgcagtgtggtggctacacgtcacctgtagtggggtggtggtgggatgctgaagacataccttgtttagcaggaagcagaagagggaagtagtcatgcagtacatagtcttcccattccttcatttccacagctatgtctttggagtatgtgaaagtgcctggcctcttagctattttattagctgtgtggtggtagctggaactgggctactcaggtaccaaaatcctgtgagattccaggcattgagcagtgcagt

SEQ ID NO: 755248 - DNA, 611 bp, Homo sapiens
agtgtctgtgatgtccagaggcactcttctgatgctttacacaaattatcaaatttaatgctcacatgagaagctattagatagaaattatttttcctattttatagttacatatttgagggacagagaagtagcttccacaaatacaatattcaataatttatttttgtcatrgtcaggattttagccttattttatctgtctttaaaatgtatacttggaaccactttgatacctgtgcacagaaaaataggacagcagcaaagtaaatggctcacaacacaattttacctaaggtcatttctctcctactaggatgttagctgaagccaagatatagatcattactgaaaaagaactgtaaaatgttctaatcttgataggcttcagaaataaaagagattgtagggtgtttggtaagagaggcagctgtcacttgccaggaaaatgtaattctttcaaaacaatgtcagaacttcctcaacagaactgggttcatttacatcaaatgagggtttaagataggttattacaagatattaataatatttaatccacagtacatagcactaattgaagaaacatgcaaattttgaccatcgaagagacca

SEQ ID NO: 755249 - DNA, 644 bp, Homo sapiens
aaggaagaagaatgtactagtggtcttctggaaggatatttcctccctggccaaaggaaaaaggcatattaagaagtcactttcacctggttatgctttgtaccttctgtctttgaatagcagttgtgtaaagaaataaaacctagggattttgcagccacctgtaagctatcagggaaygtttaagagaattggtagagaattatctttctgtgttgggtttatttcacttaatgtaatatcctctgggttcatccatgttgctgcaaataaaagaatttcattttaaggctgaatagtatttcattatttgtgtgtgtgtatacatatatattatatataatattttctttatccagtcattaattgatgaacaacaagtggattccatatcttggctattgtaaataatgcagcaataaacatgagagtgaaaaatagctttttaaaatactaatttaactttttttgaatatatatccaatactggggcttccagaccttatgctagttctacttttgattttttgaagaatctccatactgttttccatatgactatactatatctccacaacatgcaagaattctctcctcaccctcatcagcacttgttatcattcacctttttaataatagtcatt

SEQ ID NO: 755250 - DNA, 650 bp, Homo sapiens
cctgtagtcccagctactggagaggctgaggcagaatggcgtgaacccgggaggcggagcttgcagtgagccgagatcgcaccactgtactccagcctgggcgacagagtgagactccgtctcaaaacaaacaaacaaacaaacaaacaaaaacaagaaaactgtccaaagtcaaagacaaacagagaattytaaaaacggcaagagaaagactctagtcacttataaggaaacctacatcagactaacagtagatgggtcagcagaaatcttataggccaagagagaatggaatgatatattcaaagtgctgaaagaaaaaaaaaaaaacctgccagtcatgggtactaataccagcaaagttatccttcattaatgaaggagaaagctgagggaattcatcatcactagactggcactacaagaaatacctcagcaacttttatacctggaagcgaaaaaacacatctatcatcgtaaaagcacaaaagtgcagaaccctttggtagagtacatacacacaattgaggaagagaaataactcaaatgttatgactacagaaaaccaccaaaccacaatgataaacaataagggagaataaatcaaagaaaggatataccaaaaaataccccagaaattaattcgtata

SEQ ID NO: 755251 - DNA, 650 bp, Homo sapiens
cctgtagtcccagctactggagaggctgaggcagaatggcgtgaacccgggaggcggagcttgcagtgagccgagatcgcaccactgtactccagcctgggcgacagagtgagactccgtctcaaaacaaacaaacaaacaaacaaacaaaaacaagaaaactgtccaaagtcaaagacaaacagagaattctaaaaacggcaagagaaagactctagtcacttataaggaaacctacatcagactaacagtagatgggtcagcagaaatcttataggccaagagagaatggaatgatatattcaaagtgctgaaagaaaaaaaaaaaaaccygccagtcatgggtactaataccagcaaagttatccttcattaatgaaggagaaagctgagggaattcatcatcactagactggcactacaagaaatacctcagcaacttttatacctggaagcgaaaaaacacatctatcatcgtaaaagcacaaaagtgcagaaccctttggtagagtacatacacacaattgaggaagagaaataactcaaatgttatgactacagaaaaccaccaaaccacaatgataaacaataagggagaataaatcaaagaaaggatataccaaaaaataccccagaaattaattcgtata

SEQ ID NO: 755252 - DNA, 630 bp, Homo sapiens
tcagaacatatcagaacacttctgcatctttaaactttgatgcgtgctcactttcatccatttttctgagctggcagtgcaacattttctcattctgtttgtggttgccacctttacagggtaaacagtgtctcttacgataaagtgactgtgtcacgctaagctcccttgacatacattaggacacacgctctcccactcctagagtggcattgagaactctgataactgtaaacaaaaattatattttacttgctggctaacaagaactttggctttttcgatgagtttttcagcctgaggcacaaacacacacaaatgattttgtgagagcttatagattaaaatcactgctttaagcttaaaactaatttttccacattttcccaacatgtcttaaaaatcaatacaggagagtaatttaggagaaattatagaaaggcacgtcatgagacattcttaaacaacctaacttactktaattttaagttaacattatatgcaaacaagtgttttttaccaaatggtttcctagacccggacaaaaaacttgttgctttatgcaggggaattcaatcatattcaaagatggcataaggatttaaaccagaacatctatttttatgatga

SEQ ID NO: 755253 - DNA, 607 bp, Homo sapiens
cccaaggataagaactaaaaccataaactctgagaagaaaacatgggagaaagcttcatgacactggatttggcaatgattaattagatatgatgcccaaagcacaggcaacaaaagaagaaaaatagacaagcaggcttcatcaaaatcactcttgagtgtcaaaagatactactgatagagtagaaaggcaaccagcagatgtggtggctgacgcctgtcatcccagcactttgagaggctgcggcargtagatcacttgaggccaggagttcaagatcagcgtggccaacatagtgaaaacctgtctctacaaaaaacacaaaaatgaacggggtgtggtaggacacacctattgtcccagctacttgggagtctgaggtgggaggatcacttgttcccagtagtttgagctgagattgtgccactgcaccctggcctgggcaacagagtgagaccctgtctcaagcaaaaaaagaaaaacagaagcaagtcaagtgtccactgtgagatgaacggatacacataatgtggtacatccacacaatggaacactattccgccttaaaaaggaaggacattctgacataatctgtaacacggatta

SEQ ID NO: 755254 - DNA, 531 bp, Homo sapiens
ggtgtgggtcacagagatcacatgcttcaagggcaataaaatatcacaaggcagatgggggcagagtgagatcacagtaccagagtgaaattagaattgctgatgaagtttcatgtcccactgggcacgcattgtcattgataacatcttatcaggagacagggtttgagagcagacaaccggtctgactaaaatttactaggcaggaatttcctaatcctaataagcctgggggcgctacaggagactggggcctatttcatcccttatctacaaccatataagatagacactcccagagyggacattttagcgacctccgcctaggaatgcattctctttctcagggctgttgcttgctgagaaaaagaatccagcgatatttctcctatttgcttttgtaagaagagaaatatgactgttctgtccagcccctcaggcagtcatgcccaatggttatctcccttgttccctgaaaatcacagccatcctgttcattttagatgcccagatttcatattgttcaaacac

SEQ ID NO: 755255 - DNA, 524 bp, Homo sapiens
attctaatctacaaagctcatgaataaagaaaaatacaaaaacctcaagttttacaaaaaaaaaaaacttttaagtctacatacattaacaataaaaccatttcttccagataacaggtaaaagtataaaggcataccactgactttttttttctrgatagccaggaatgaacgaatgtttaatatctacgacgcttattagggccttcaaagttgcccccttgacttcctctaccaaagccaccaggaccaccactcacaggacctacgccactcattggtgcttgaggggtttcagaacctgttctactccccataggtgaacccatctgagatggtggtccttgaggaaatctgtcattgtgctatgataccacacaataaggaatagaatatgaagtccatttggaacacgccaaatataagtgacaagaaaaattggcaaaatcccaagtggtggtgtcatgaagttcggcagaaagcccagcagaatcaggatcacacatagaaggaagaaaggagca

SEQ ID NO: 755256 - DNA, 654 bp, Homo sapiens
ctcattcaccctgcctcgggcaattgtataagtttaaggctttactatgtaaaattaaagtctcccatttcatcagtttgaaaaattcaaaatcataaataacagatggatttaaaaaaagaacatcccactgcatcatctgtcccattctggatcaagtggaatcacctctatgagccatccagaccarcacaggctgaatttgttgctccttcatctgcgttccaggaagtcatttactaatatttcttttacattgtttattaatatatgtgaagctattgcctgcgattctttgagggctggggcagtatctcatttattggcatcccaggatgtatcccaatgtctctttcatgggttagcttaaggtcctatatattatagcagctactacgtatggattcatcaatggggtatttagatctctggaaacttaactagattaaacaaaaatagtacctactgaacctttctcaaggatggtattgaatgtggatggaagaaaatatcatgagtctatttccttcgggtcagaaactggcaaaaggcggacccagagggctcttttgctactctttttcgatacagtgcttcactactccacttaaaaacacggcgaacaaatatttagtgaataccagtgtgaagtgg

SEQ ID NO: 755257 - DNA, 593 bp, Homo sapiens
ttcctcttctgtaaaacttaatcccagtgtaacactgttatgattgaaagtttttcattatcatgtcttttgtgacatacacacacacacacacacacacacacacacacacacactcagtatacttgttttttaaaaagtgcttgtgacaataaggctctaaatgttgaaaaacatttcttttgaattgttattatgatttttcactagtacacgattgaccagaacaacacgtgtaatcaaagcaagtgtttctttttaaatggaagtgcttaagaaatcttgccatataaatatatgggaatgaagtcagtataattccattctatcttctaaacccctgagttatatgcccaaagatatctagtgatttatcacagaaacgatttttcaatgttctgttgcttgacatttgattaggtcttcstccagtgttgatctaagcaaagaaatagaaactttactctgactcccaaaaggatttttctcaggcctgaaagtctttcactttgtcagtatctgtaatcctatgggtatttcaaaatggccttctgcttggggcctggagatttttacaccccaaggcaatgcac

SEQ ID NO: 755258 - DNA, 605 bp, Homo sapiens
atcgtgtggtagtaatatttttaattttttgaggaaccttcatagtgttttgcatagtagccacacccttgtacattctaatcaacagtgtacaagggttccaatttctacaatcattatcaacaccattattttttaaagtttctttttttttttttgatggggtctyactctgtcacccaggctggagtgcagtggcatgatctgggctcaccacagccttgatctccccagactcaggtgatcctccaacctcatcctcctgagcaggtgggactataggtgcaaaccaccacacccagttaatttttgtatttttagtagagatagggttttgccatgttatgcaggctggtcttgaactcctgggctcaagagatctgtccacctcggcctctccaggagctaggattacaggcatgagccactgtgcctggccttttttttttaaatagtagccatcctaacaggtgtgcagtgatgtgtcactgtggttttgatttgcatttctctgattattagtgatattgagtgccttttcaatatattttccaaatattttatttctgggttctctattctgttttattgggctctctattctg

SEQ ID NO: 755259 - DNA, 605 bp, Homo sapiens
atcgtgtggtagtaatatttttaattttttgaggaaccttcatagtgttttgcatagtagccacacccttgtacattctaatcaacagtgtacaagggttccaatttctacaatcattatcaacaccattattttttaaagtttctttttttttttttgatggggtcttactctgtcacccaggctggagtgcagtggcatgatctgggctcaccacagccttgatctccccagactcaggtgatcctccmacctcatcctcctgagcaggtgggactataggtgcaaaccaccacacccagttaatttttgtatttttagtagagatagggttttgccatgttatgcaggctggtcttgaactcctgggctcaagagatctgtccacctcggcctctccaggagctaggattacaggcatgagccactgtgcctggccttttttttttaaatagtagccatcctaacaggtgtgcagtgatgtgtcactgtggttttgatttgcatttctctgattattagtgatattgagtgccttttcaatatattttccaaatattttatttctgggttctctattctgttttattgggctctctattctg

SEQ ID NO: 755260 - DNA, 595 bp, Homo sapiens
ccatgctgtacacagatgtgctgtcatacaggctttgttgctccatttatagaccataggctgagtacctttggtataatttttaggaggggtcttaggattttcaaaatagtaaacaaatgttggattcaatttaaagttaccaactacattagcccctaacaagagagtcagcttgtcctttgaagctttgaagccaggcattgacttctctcaacctatgaaagtcctagatggcatcttttccaatacaaggctgtttcttctactttgaaaatctgttgtgtagtgcagccaccktcatcaattatcttagttagatcttctggataacttgctgcagcttctacatcagcacttgctgcttcatcttgcacttttctgttatacgtacaacttcttttcttaaacgtcatgaaccaatctctgctaacttccaagttttcttctgcagcttcctcaccactctcagccttcacagaattgaaaaaagctatagccttgttctggattagggttgggcttcagggaaacttgtggctgctttgatctatcactaaactttccactgttactaaagctgtctccactgaaa

SEQ ID NO: 755261 - DNA, 560 bp, Homo sapiens
taaattatttggagaggcttaaaagataaaactattttaacaaggtctgtacagaattctcttggtttcaacttcgcatcctgaatacaaggatattgcctttccttctagtatagagagtgtgtcttttacatgggagtttcatattctgcttttaagaaacagcattatgatcaaaccctgctttttttctagtgtctttagcttaaacattcaatatggcagaatagcatatttcaactctttcagttggctgagcttaagcttttttttctaacataagcatttgccagaaattacccaagttaacttttcacttatgtttgcagtttaagtaaggttaaggctatttttaaggcccagttaatttgtttgytcagggatttttcatgctcagtgtccattttattttattttttaaatttattttttaatttttgtaggcatagaacaggtatgtatatttatggggaacacgagatactttgatacaagcatgcaatgtgtaatagtcacctcttgaaaaactgggtatccatcttctcaagcatttatcattt

SEQ ID NO: 755262 - DNA, 618 bp, Homo sapiens
gagactaatacatttttaaaaaatcattagtttatgtttgggttatgcaacgtataaagtggtaattttgtgacatcacaataaaaatgggcaaggatggaactgttaaaggaacagagtttttgtatattattgaattatgctaccttaaattcaaattacagtgttctaatttgatgaagttaaatataactcccatggtgatcacaaaaatatarctataaaatatatacaaaagtaaactataagggaatttaatgttttgctacaaaaaaaatcaatgaaacacagaacaccatgatgcagaaaatgaagtaaaagcaagctatcagccatatagaaaaccaacagcaaaatgacagaattaagttcttcctagttagtaattactttaaaggtaagtggaatatacttccagtcaaaatactgagattggcagaatggattaacaaacagaatccaaatacatgctgtctataagagactcactttagatctaaagacaaaagtagattgaaagtgaaagatggaaaaagatgatccatgcaaactacaacaaaaagatagtaggggtagctattataatatgagacaaataagtaaaaaatgacaaaagac

SEQ ID NO: 755263 - DNA, 589 bp, Homo sapiens
agaacaaagctgaagaactcatgttttctgattttgtaccttactataaatctataataatcaaaacagtgtggcactggcataaagacagacagacagactaatggaatagaataaagggttcagaaataaactctcacacatacaatcaaaggattttcgacaaggatgttaagaccattcagtgtggaatggacagtcttttcaacaaatggtgctgataaaatgggataaccacatacaaaagaatgaagttggacccttacctagcaccgtatacaaaaattaactcaaaatgaatcaaagaagtaaatrtaagacctaaaataatgccaccattaagaagacatagggtaccatcaatgatagactggattaagaaaatgtggcacatatacaccatggaatactatgcagccataaaaaagcatgagttcatgtcctttgtagggacatggatgaagctggaaaccatcattctcagcaaactatcgcaaggacagaaaaccaaacaccgcatgttctcactcataggtgggaattgaacaatgagaacacttggacacagggtggggaacatcacacactg

SEQ ID NO: 755264 - DNA, 622 bp, Homo sapiens
tgattcaaataaaaagacaatgacaagtctcagtgaagatatggagaaagaacccttattcattgcagaggggattataaaatggtgcatccacttgggaaaatagaatagcaatttctcaaaattttgaacatagagttaccatataatatgtagatatctcccatgtaattttttggagttgtcctcagtagaagaaaccagaagtcttctgggccttgtggcaaagacttttttcttctcttcagtggttaattttttctggttatttgatgagattcctagggaatgggtcttaagacaattgcatatgtgtttaaagaaatttttctttcagataagggaactttcagagagaccctccaygcctgcactggaggatgcagtgaggggataacaagagaaagttaggaagtctttggttctgaggcaacttctaaggtcttccgttttcctttaattcataagtgctcagtatgccaaagcaccatacctggttatctgaggacatacatttgtgaaactccactaattgctgcttgattgctctattgcttgcaataatgctgtggggcataagttgcttcacacacaaatccaatcaaattaatcttctttgaag

SEQ ID NO: 755265 - DNA, 614 bp, Homo sapiens
aggatctagaactagaattaccatttgatccagtaatctcattattgggtatatacccaaagcattataaatcatgctactataaagacacatgcacatgtatttttactgtggcactattcacaatagcaaagacttggamcaaacccaaatgtccatcaatgatagactggattaagaaaatgtggcacatatataccatggaatactatgcaaccatcaaaaggatgtgttcatgtcctttgcagggacatggatgaagctggaaaccatcattcttaggaaactgtcacaaggacagaaaaccaaacactgcatgttctgactcataggtgggaattgaacaatgagatcacttggacacagagcagggaacatcacacaccagggcctgtcaggcggtggaggactgggggagggttagcattaggagaaatacctaatgtaaatgatgagttgatgggtgcagcaaacaaatatggcacatgtatacatatgtatcaaacctgcacgttgtgaacatgtaccctagaacttaaagtataataataaaataaaataaaataaaataaaataaaataaaaaagatttgggagctacatcatccaagcact

SEQ ID NO: 755266 - DNA, 614 bp, Homo sapiens
aggatctagaactagaattaccatttgatccagtaatctcattattgggtatatacccaaagcattataaatcatgctactataaagacacatgcacatgtatttttactgtggcactattcacaatagcaaagacttggaccaaacccaaatgtccatcratgatagactggattaagaaaatgtggcacatatataccatggaatactatgcaaccatcaaaaggatgtgttcatgtcctttgcagggacatggatgaagctggaaaccatcattcttaggaaactgtcacaaggacagaaaaccaaacactgcatgttctgactcataggtgggaattgaacaatgagatcacttggacacagagcagggaacatcacacaccagggcctgtcaggcggtggaggactgggggagggttagcattaggagaaatacctaatgtaaatgatgagttgatgggtgcagcaaacaaatatggcacatgtatacatatgtatcaaacctgcacgttgtgaacatgtaccctagaacttaaagtataataataaaataaaataaaataaaataaaataaaataaaaaagatttgggagctacatcatccaagcact

SEQ ID NO: 755267 - DNA, 573 bp, Homo sapiens
tctttttcaggtaaatcagggatttcttcttggtttggatccattgctggtgagctagtatgatttttttggtggtgttaaagagtcttgttttgtcatattaccagagttggctttctggttccttctcatttgggtaggctctgtcagagggaaagtctagggctgaaggctattgttcagattcttttgtcccacagggtgttgcttgatgtagtactctccgccttttcctatggatatggcttcctgagagctgagctgtagtgattgttatttctcttctgggtctagccacctagcaagtctatcaggctctgggctggtactgggggttgtctgcacagagtcctgtgatgtgaaccatctatgggtctctcagccattgataccagcacagtatctggggtgtctccccggtctggcaggagcagtctgcttccttcagagggtctgtgggtcctctcaggattccwgatttattcctgcagtcgttctggagctaaaattcaccatgcgggcctctgcacacttctctgtctgtccaagtcagagctgcaatctagtcctgcc

SEQ ID NO: 755268 - DNA, 645 bp, Homo sapiens
ttgagaaatttggccaatttgaaggaacaggtaaacacagtgccagtggcttctaggcagggacaattctgggggaggcaattaatagtgacatggattctgtctgagttagggtagatattgggcgaaaactaggtgactaggattcgggttcaagattactaagctgggatcagagctgckgtccaagacaaggcacctgggaggagactgtgcctgtgcatgatgatatgaaagaagaatctagagctggttgcttatctagcacctggggctctgaacactcctcgctgaacccaggtgttctgacctgaaaaacagaaggcagcagatttacatcagacctctcctgcctctcttcacccctggatgaagggagctctcaatacaacataaatcttggttctcattggctcaagaactggacaagctgactgcacagggagcaggttattattgctggccgatgactatgctgagtcagagaaggaagtgcataagaatctacatgccaggagtctccaaattcctctaatttacttcttatagagataaaaaataaaatacacacacaccatacaggacctgtagcataaacttggcaggcttttaaaatgtatttatgaatacaattacatgagaagt

SEQ ID NO: 755269 - DNA, 653 bp, Homo sapiens
tacaacatccccttaagccaaagtctaatccagagtaatgccctaactcttcaattctatgaagactgagagaggtgaggaagccgcataggaaaagtttgatgctatcagaggttgattcatgacgtttaaggaaagaagccatctctataatataaaagtgctagtgaagcagcaagtgctgaagcagaagctgtcgccagttaaccagaagatctagctaagatcaatgatgaaggtggctacatgaaacaacagatttctcactctgtcrccaggctggagtgcagtggtgtgatcttggatcactgcaacctcagcctcccgggttcaagcaattctcctgcctcagcctccggagtagctgggattacagacacacaccaccacgcccagctgatttttgtatttttagtagagacacagtttcacaatgttggacagactggtctcgaactcctgatcttgtgatccaccctccttgacctcccaaagtgctgggattacaggcgtgagacaccacacctggatgaaacaacagattttgaaagtagatgaaacagctttctatcagaagaagatgccatctaagactttcatagctagagaggaaaagtcaatgcctagcttcaaagcttcaaaggacaggctga

SEQ ID NO: 755270 - DNA, 537 bp, Homo sapiens
gactatgccagcagaatctcaaaacattgccttttcttattcaccagcctgcctttgatcaaagttgtagacctaggaataaatttatgaaaggttatcaaggacaaactttatttaccttctctaacaagaatgccayctgtgggaatccaggtttctgttacccaccttcttcctaagaatttgggaaattttgaggtttcaatgcagtatgaaataggaataaatgggaataaaccaaggatgatttctgaaatcaaactgaggtaaaaatttttctctataggtctgtcagccataaacacacctatttccagagaggaatgttcatgagttgagtcactccattgccaaaacaccatctaccatacaaaaagtctctgaccatattagtatagggagaaaaaacataggctccatgaggagtggcaagttcattcacactcccacattcagctccccaccagaactattacatgtcaccatgaaacggcatactagcccaaggtctaaaccagtactaactatcaagaagct

SEQ ID NO: 755271 - DNA, 537 bp, Homo sapiens
gactatgccagcagaatctcaaaacattgccttttcttattcaccagcctgcctttgatcaaagttgtagacctaggaataaatttatgaaaggttatcaaggacaaactttatttaccttctctaacaagaatgccacctgtgggaatccaggtttctgttacccaccttcttcctaagaatttgggaaattttgaggtttcaatgcagtatgaaataggaataaatgggaataaaccaaggatgatttctgaaatcaaactgaggtaaaaatttttctctataggtctgtcagccataaacacacctatttccagagaggaatgttcatgagttgagtcactccattgccraaacaccatctaccatacaaaaagtctctgaccatattagtatagggagaaaaaacataggctccatgaggagtggcaagttcattcacactcccacattcagctccccaccagaactattacatgtcaccatgaaacggcatactagcccaaggtctaaaccagtactaactatcaagaagct

SEQ ID NO: 755272 - DNA, 598 bp, Homo sapiens
gaacaagggagaggagcctcttacagctttttccttcctgtccccacccagccacgcggaacgctgctgactggtggctctcccactggatctctcagctgaaggctgagaatagctcccaggaggcgcaaccctccaccagcccagcttctatggggctcttctctccgcagctgctcctcttttcccctggaaacctctagtgagtggctggggctgggggtaggcctggtgctctcagagtggtcgccaggcagggagtgagggttgtggccggtattccagatgctgtgacttctggagggtgggagagatggcatgggggaggagaaaggacccccgagtggccctagttttggttaccgacagccccctcctcaccacccagcaycccagtgttcccactgcccaaagctgcccccaatggctcctcagacatccgtttctacctcaccgtgtatgcgaccattgctggtgtaaattccctctgcacccttctccgggcagtgctctttgcagcaggcacccttcaagcagctgccactctgcatcgccgcctgctgcatcgagtccttatggtgaggggctgggacctcgg

SEQ ID NO: 755273 - DNA, 598 bp, Homo sapiens
gaacaagggagaggagcctcttacagctttttccttcctgtccccacccagccacgcggaacgctgctgactggtggctctcccactggatctctcagctgaaggctgagaatagctcccaggaggcgcaaccctccaccagcccagcttctatggggctcttctctccgcagctgctcctcttttcccctggaaacctctagtgagtggctggggctgggggtaggcctggtgctctcagagtggtcgccaggcagggagtgagggttgtggccggtattccagatgctgtgacttctggagggtgggagagatggcatgggggaggagaaaggacccccgagtggccctagttttggttaccgacagccccctcctcaccacccagcatcccagtgttcccactgcccaaagctgcccccaatggctcctcagacatccgtttctacctcaccgtgtaygcgaccattgctggtgtaaattccctctgcacccttctccgggcagtgctctttgcagcaggcacccttcaagcagctgccactctgcatcgccgcctgctgcatcgagtccttatggtgaggggctgggacctcgg

SEQ ID NO: 755274 - DNA, 519 bp, Homo sapiens
aagttttttattttgtatttcagtaactttagaggtacaagtagcttttggctacatagatgagttgtatagtggtgaagtgtgggcttttagtgtacccatcacccaaatagtatacattgaccaaataggtaattttttatccctcaccctgctcccaacctctccccgtctgagtctccaatgtcatacctctctatatgcctttgcatagccatagtttagctctcacttataagtgagagaatgtggtattcagttttctattcctgagttatttcctttaggataatggcctccaattccatccaagttgtgcaaaagacattattttgtatttttatggctgagtagtattccatggcacatatacaccactttttctttaaccagtcattggttaaggggcactttggttkattccatatctttgcagttgtgaattgtgctgcaataaacatgcatacacaggtgtctttttgatatttatacaataacttattttgcaaatgaactggt

SEQ ID NO: 755275 - DNA, 523 bp, Homo sapiens
gggttgtttttttcatgcaaatttgtttaaggtctttgtagattctggatattagccctttgtcagaagggtagattgaaaaaatttctcccactctctagattgccctgtcactctgatggtagtttattttgctgtgcagaagctctttatttagatcccatttctctattttggcttttgttgccattgcttttggtgttttagtcatgaagtccttgcccatgcctatgtcctgaatggtattgcttaggtttccttctagggtttttatggttttagatctaacatttaagtcattaatctaccttcaattaatttttgtataaggtgtaaggaagggatccagtttcacctttctayatatggctagcctgttttcccagcaccatttattaaatagggaatcccttccccctgtcttgcttttgtcaggtttatcaaagatcagatggttatagatgtgtggtgttatttctgaggcctctgttctgttccattggtctatatctctgttttggta

SEQ ID NO: 755276 - DNA, 569 bp, Homo sapiens
catgaagtccacttggcaggcaagatggctgtttgcagttccagacttccatcctcctagtttaacaaccacagtagaaaatgcttctttattttctctttgaaattactaaaaaaagactttgtctgaccttgcttggytcatatgcgcacccttggctcctgccatggttacatgcccattctgtatcctgaatggtgatttcctcaaggagaagaagctgccagacacaaagaagaggtctacttcaaagactgagtcaaatctgagttacctttgtattcctcctctacaggtattcaacctcccagatttttaatcagtggatgccagagaagcaaagtaacattgtcactgatgaatttatttaatatgaaaagaggccaaggtatgttactagaaagaaagaagtaaagcaaaagcagagaagattggcaggtaggagagcagatgtgaagagaaggggaaaacatacacaatgtgaaaaataaggtgaaatttgtctttgctttgttttatgtgcttgtagagagagtcagtaaaaaaccatggtgactttattcatgaga

SEQ ID NO: 755277 - DNA, 452 bp, Homo sapiens
acttcatctctgggatgcaaggttggttcaacatatgcaaatcaataaatgtaattcatcacataaagagaactaaagacaaaaaccacataattaccttaatagatgaagaaaaggctttcaataaaaatcaacatactttcatgttaaaaactctaataactaagtattgaaggaacatacgtcaaaataataagaactacatatgacaaacccacagccaatattatactaaaagrgcaaaatctggaaacattccccttggaaactgggacaagacaagtttgccctctcttaccactcctattcaacacagtattggaagttctggccagggcagtcaggcaagagaaaggtataaagggtgttcaaataggaaaagaggaagtcaaatgatcttttttagcagatgacataatcttatatctacaaaattccattgtctcagccca

SEQ ID NO: 755278 - DNA, 452 bp, Homo sapiens
acttcatctctgggatgcaaggttggttcaacatatgcaaatcaataaatgtaattcatcacataaagagaactaaagacaaaaaccacataattaccttaatagatgaagaaaaggctttcaataaaaatcaacatactttcatgttaaaaactctaataactaagtattgaaggaacatacgtcaaaataataagaactacatatgacaaacccacagccaatattatactaaaagggcaaaakctggaaacattccccttggaaactgggacaagacaagtttgccctctcttaccactcctattcaacacagtattggaagttctggccagggcagtcaggcaagagaaaggtataaagggtgttcaaataggaaaagaggaagtcaaatgatcttttttagcagatgacataatcttatatctacaaaattccattgtctcagccca

SEQ ID NO: 755279 - DNA, 495 bp, Homo sapiens
ataaaagcatgattattgtcattgatggtggttgaactggcattacctgagaatgagatgatgatggaaataaatcaatttcaggtggttttagacaacacgtgccctgtacatgcaaaactttacatacccttctcatttgatgttcccagaaaacctatgagttcagtattattgcctctggcagagaatgttaatcaacccttcggcatctatttcatgccttttctttttagcaatacaattctgctttctctgaattttaacagggcctctcactacgcagttggagattctgttcccagcctcctttgcagctagatttggtctctggactaagytgtcatccttgcaaagtgaccagaaagtggtatattgccacacattgtatgtcctttccttcaaagaaaatcctgctttgtgcttgtttccttctttcttcaatcatgcgtattgtgatggggtttggtgagcaactttcaaccatgcagaaaa

SEQ ID NO: 755280 - DNA, 633 bp, Homo sapiens
tgggcacaggaggcagtaatgtacacctcccacatctacaagactgtccccagcaggctccctccccatggctgtggtttctcagaggaccttcatcaggagtgaggcccagaggccaccccttagcacacttttgtttctctcctccctgtctcttcatttttctattgcccactgtgattcctgggtctcttggcaggtaaactacctgaacccaagtcctgtctttggggaggcccttgggataaccagtctaagaagctagtacttatgaggcacttactccatgccaggttctgggctaattgyttccatgtgaatattatgtgtgccatttttccacataagcaccttcaccctgaaaacatctttcctgggcaggcagtgatagcagtgggggcagaggcaggtttgctgaagcctgaaacttgttcaattttgaatgctctctttaagaaaaattatgctgggacattcgtatttgtttagagtgggaaaatacatttgaaaaattacaaattttaaaaagctgataagtgccacaaacaaacaaataaaaagtatatcgataacattgttttatttaaccacctgacacagctctgacctggtgccccacatcacagcatggga

SEQ ID NO: 755281 - DNA, 638 bp, Homo sapiens
tcatctgggcactggggatgcagcagtgtcacacccagatcttggtttctgccttcagggagcttacagtccggtggaggggcatggacaagcaatgtaaaattaaatgatgggccattttaatcacaattatggcacaggccacagtggaccatagtgggtgttctgggggctcattacagggatcccgacctgttttggaaggcagcagcatttaccccggaattggagttcatcaggtggaagcacattccagggaaaggggccggcgtgtgcacagtccagaggyaggaaggagctgcagagctgggctgtggtttctgccctgcctgttaccacccagcaggcatacatgtatggattgttctccttccctttccttccaaataggcatttgcagattggacatttgcaggtggagaaaactcaccattatttacgatgttgaggctatagaaaaatgaatttagggtgtcaaaaaattgacttataactgatttttttttccatctggctattgttcttactcaagtgcatgcgtatggtagctgcccgaaaaactagagtgctaatcacattggccgttaaattgtcagagttttccaccttgacatatattaatttcaggctcatcaatc

SEQ ID NO: 755282 - DNA, 585 bp, Homo sapiens
tatctgaagtcaattgactgtaaatgttgaccacatccacaaaataccttcacaccaatatctagatgagtgtttggccaaacaactgggcaggatggcctagccaaattgacctataatatgaagcatcgtaaagtccatctgaaaaataagtgcaagaaaaaaggctwatcttacagagaaccatacgcggaagaactgaagaagagccacaagccatgaaaacatggactgggaagatgccttgatgaatgatgcagtcttcctggagaaagaatcagaagctctcccagtggaggctcgtttggtaaccaaggtgcctactctggccatccagacagggagttccttacactacagaaaaagtaagctgacatggtcctgagagaggaggacctaaagcaggatcctgagtagaaaatgagattagggcccaggaagaggacacaaaaaaggactgggaccttgtagacccaggttatcacccaggatattactggttgtatatgtactgggtgctggcatcatgtcaggtgctggagaggccagaaaaatcctctaagatgtagcaagcagaaagaataa

SEQ ID NO: 755283 - DNA, 607 bp, Homo sapiens
ttacaagaactgtatctcttctctggagcaagacaactgaaaacattctgtttatttctcccatcatccagatgaaaatcttggactgcccatcgggcccagccatcagcaaagaaggtctgcactcaaggagggcaaaaaggttttttggggaagctttgcccttttgcaggtcaaggacctccacagatttcccagatgtagtcagagaagcccatgaggcataaagccacgtgcagggaaggaatcttcytgcagggtagggtcactgagggtgaagagatacagctgctctgccacggggaggtcctaaatggaaatctttatgaagtgagaaacgacaagatgccctgctgccaggaatcacctgtgaaatccagcatgctcaaaggctgggaagccaagccaaagcgaacagcaccctctaaccatcatctccgggcacctgggctcctggcttctgacccagcaaataagagcacctcttctaccaaacacaagtccaaggcctaggtccaaggtctacatcagttctgcttccaggcaagccctggagcaacaccaggccccacactgggcactggggagagaacaaggtttctatatg

SEQ ID NO: 755284 - DNA, 600 bp, Homo sapiens
ctgccctgctgaaaaacttggcccagaatagggaagaactcaacattcaattttatagtgagtcagtggaaatgaaaaccagtgcagtctgtgagcctcatgtcctaacagcctcccctgggaaggtccaggcctactgcgtgagacataaggggttggtcaggccctccccaggcactctgtctctccaccagcctgcaagatcttgcccatgatgtaatgaccaaggcagaagtctgcggygctgggggctgtggagtctagctcactctgaccatggcctccctgggctgtgagtcacagccgaggcgatgctcaggaggcatctggccagccctgcagcgggaagtctgtgcgagagaaggttcgcggcccaggtgctctgagaagctctcaggacacccaggaggaccatgggctttgggcgaccaactatgggtcctcacccacaaggaatggagtgagggaccaggcagtttttgcaccctaagaaatccaggactaaggagcacagagcagggttccccatcttacagttactgtgaactagtttaaacaatgagaagaatttcacctccagccaccaggcctttcactgtg

SEQ ID NO: 755285 - DNA, 687 bp, Homo sapiens
aagctggagtaactgtgttttttccacaaaagaaaaatgtaggagttacctacattttttttgtttgtttaaggctcccagaaggcttatgtccttactatgtacaccgccccttcctgaacccaagatgtagcctgtaggtgactttgaatatmaatgaactctgtaagatgttttgcctcttaagtggccttaacatttttttctgtgttcaaaggactgatgaaatgtaagacgttcttttaaaatatattgaaactgtcttgtgtaggccactctgcttgcacaaagagttatagtattgctagatatgctgaaaatgctttcatatctgctcatgaagttgaatgttgtttatgattggtttccactcatgcaagcatactctcaaagtaggtgtacgtcctctatagcacctagattctgcatgagaatctcttcaaaataaattctctaaaatttatatttccagccagaacactgccccaatcccccatcctaattcatcttgttcacggcacataggactttaagggtcaatgacaaatgaaccaaaattctagcaatttaagtctcagctgtgatgagatggaagatctccaggactggtaaaattccagattctttaaaaattgcatttcctattctcacaacaggtttggttatttcctggatcccttgggatta

SEQ ID NO: 755286 - DNA, 593 bp, Homo sapiens
ggggttcttagacagttggcccaaacacctcgctgacaatgctcacggagcctgtgtgcctgagccctgcccagcgtttgcctatagtgcacatgggccattgtggtgaactttacttgcttctagaatttcacgtggacagacatgtgtagcttgcattaaaagaaaacaaaacaaaacacgtagaggtacagcttcttaatcaatgaatgacacatttagaaaacatttaaataaacatacagtgtgatggcctgggagaagctttgttagtaagtgttgtgtaaataccttgagaacacaagacagtgtgtgtgctggcggtcttcagcgggttacacttcggatggtaacacatcggttgttcatttaacaatagttttaaaaatagtcatgctgttcttttcctctttcttcacyttcttttcaaaaatggcaaacattgtttttcaggtttctatatgaacaaaatctgctgaggggcttgcagcaggccagtgatctttggtgtctttccaaagggcctttagggatgattccaaagacagtttctagtcacatagtggacacaccattaatgaatgttggatgct

SEQ ID NO: 755287 - DNA, 640 bp, Homo sapiens
gcggtactttctcttgcagatgccaagcaaaggcagacatctgtgacctttccaacacctgtctgtcagggatcagcaccaactgcatcatttagagtctcttctgttggaaaatccacaagtcaacactccaggcctgcccaatgtcagtccttttctggggcccctggctacgggaattttcatacctggaactatttccttcccttcaggaactctcaattttctgctttagaggttgcattgtcccaaagtagcctgaatgaggcacccaaccttgggctaggaacatagaatggcatggggtgggatgcccagaggaggaagaatagctcagaattccagattgcatgattaccccagaagtcaactctctctctsagagctctcagaagccgtggcttctgacaattggtacactttcccatgccacggtctgcccaactgtgaaacagccagaaaatacacttacctcctcgaagggcagaggggcctatgggccactccacaagtgaataacctgccaagcgttcaaaggaagttggggaatgcagcagaaaactgtcaaagcatcattgcaacccaggccccaacccccatcccagacccccccacattcaatccaggctaaagagtgagg

SEQ ID NO: 755288 - DNA, 640 bp, Homo sapiens
gcggtactttctcttgcagatgccaagcaaaggcagacatctgtgacctttccaacacctgtctgtcagggatcagcaccaactgcatcatttagagtctcttctgttggaaaatccacaagtcaacactccaggcctgcccaatgtcagtccttttctggggcccctggctacgggaattttcatacctggaactatttccttcccttcaggaactctcaattttctgctttagaggttgcattgtcccaaagtagcctgaatgaggcacccaaccttgggctaggaacatagaatggcatggggtgggatgcccagaggaggaagaatagctcagaattccagattgcatgattaccccagaagtcaactctctctctcagagctctcagaagccgtggcttctgamaattggtacactttcccatgccacggtctgcccaactgtgaaacagccagaaaatacacttacctcctcgaagggcagaggggcctatgggccactccacaagtgaataacctgccaagcgttcaaaggaagttggggaatgcagcagaaaactgtcaaagcatcattgcaacccaggccccaacccccatcccagacccccccacattcaatccaggctaaagagtgagg

SEQ ID NO: 755289 - DNA, 647 bp, Homo sapiens
acaagcgatttcacatctcttagaaagaatgacaatggttttcttatcactaccatattacatcaatgtagagcctttgagtccttaataatggaacacttatgtattttgccattatcaaaagataaaatttagcctttcagagggaattttgayaccatactatattttataatgatgtagaaagtgatggattttaattaccagttttatcttcagagtgctataacttatatttgtaattgtagtttggaagttcccaatgtcattatgttttttttgaaagagaaatgatggcatcttgaattaagcccacaatttactcaatctaatcttacttaaaatgactccacgatgcaaatgtacttccccagttcagtcaaatcagctcctccttccctgtgtcactgatttccctaacccctgccactaacatccacagacaaaggcatttttacagacaactggagactgtattgtccttcccatctctcttcttcagacagacctttgtattcatcagaaaatgaagtccaaatgaacaaatttgatcatttctttctcacttgatgggacaaaagggagactttcctgacttctaaacaataagacttctggcaaaaatctctttttttcccatctgtggc

SEQ ID NO: 755290 - DNA, 574 bp, Homo sapiens
cagtcactttccattccctgctcctccatctctggcaaccattaacctgctttctatctctatggatttgcccgttctgttattttatagaaatggaatcatacaataagtgccttttgtgactggcttctttcacttaagcatggtgttctcaagttcattcatactgaggcatgcattagaatgtcattccttttctacagctgaatcaccttctgccttgtggatgaaaacatattttgcttatccaagtgttgagcacatgagttgtttctactttttgactattatgagtaaygttactatgaacacatgtgtacacatttttgtaaggatgtgtttccagttctcttggatatgcactatgagtagacacgtgggtctaaaagtaaggttgctggttatatggaaactcaatgtttaactttttaaagtactgccaaactgttttgccaagcagctgaaccattttacattcctgtgagcattacacgagggctctaatttccccacatattcaccaacacttgttattgtttatcttttcaattatagccatcctagtggatataaa

SEQ ID NO: 755291 - DNA, 561 bp, Homo sapiens
tagtttgtttactctgttgatagtttctcctactgtgcagaagctctttaggttaattaggtcctatttgtcaatttctgtttttgtcacaattgcttttgagaacttgaccatgaattatttgccaggtcccatgttgagaagagtatttcctaggttttcttctaggatttttacagtttgaggtcttasatttaagtcttcaatccatctcgagttgatttttgtatatggtgataggtaggagtccagttccattctcctgtgtatggctagccagtaatgccagtaccatttattgaaaagggattctttcccccttttctgattttcactgactttgtcaaagatcagatagttgtaggtgtgcagctttatttattggttctgtattctgtttcattggtctatgtgtcactttttgtatcagtaccatgctgttttggttactgtagccttgtagtgtagtttcaagttgggtaatgtgatgcctttggctttgttccttttgcttaagattgctttggctatttgggctcttttttggttccatatgaattt

SEQ ID NO: 755292 - DNA, 527 bp, Homo sapiens
ttttttctgtgtctattgagatgatcgtatggtttttgattttagttctatttatgtggtgaatcacatttattgatttgcatatgttgaaccaacattgcatcccaggaataaggcctccttcatcatggtaaactaactttttgatgtgcttctagagttggtttgctagtattttgttaaggatttctgcatctatattcatcagggatatcagcttgaagttttgtttcgttttgtttttttttgcccattgtttctctgccaggttttggtattaggatgatgytggctttgtagagtcagttagggaggagtccttcctctttgattttttgggaacagcttcagcaggactggtaccagtttttctttgtacatcaggaagaatttggctgtgaatccacctgtttttttttgttggtaggtttcttattactgattcaatttcagaatgtgttactgatctgttcaggttttcaatttctttctggttcaatcttggaggttgtgttattctaggagtt

SEQ ID NO: 755293 - DNA, 506 bp, Homo sapiens
atcacttgcacgctgaaggaacattctcaaagttttttggagttcagactctaaggggaggcaggaaaagatgaggggtattctaggaggagacagtctagggctggctggatgtggcctgatgagagtcacctcctgactgggattatgtaacttgggaagtgaaggttgacaagatttatttaaataatgcattttttttggtaggggagatcatattcagaaccttaaaattctctgtcatctgggagattttatgataaaacattgaggaatatgttagaaaatcaaatatctgktgcaggaagttaaagagaaagtaagccatttatttctacccaacagtgatagctctaaagaggaagagacaggaagatgggaggagcctctgaagttttctcaaaagaaaatgggatcagtgtatgaaaatttaacatgagggatataccctacttctggcaaaacaaacaaaacagaagtactgaggacctggtcattaaaatgta

SEQ ID NO: 755294 - DNA, 593 bp, Homo sapiens
tgtgctctgaagccagtatagcactgggtctcacttaagacccactgtaaccactccctggctactgctgtgttctttcaaggccctggtgtcctaccatcagcaggtggtgaagccaggcttgtatccttcccttcagggcagcaagttcccccaggccccaggtgggtccagaggtatcatctgggagccagggactggagtccaaaatcttagaagtctacctgtgttctattgtactgtggctgagctggcatacaaaccacaagacacagttcttcctactcttccctcccctttccrcaggcagaggagccttaccccatggccagcatcacaggcccacagggagtactacgggactaccaccaatgttttcttaagggccaagggctcttcagacagcttgtcattaatgctacctgacctgggactccccttacagggcagtgggctctctgttgctgggcaggtccagagctaagcctgtaattggagaccccccagagcccacttggtactatatccccctgtggctgagctggtacctaaggtacaatacaaagtcccctttgctatttcctcttcttttt

SEQ ID NO: 755295 - DNA, 644 bp, Homo sapiens
ctcaagtttacacaagatgatatagttaatataaaaagcataaaatttggaactagatatccctggactagattccagaatttaccattttctagttttgaccttggcaagttacttattcttctgagcctcaattttcttatcaaaaaacaaaacaaaacaaaaaaaagaacatttttaaggttgtttttttttttggagtgagacaatatgcaaaagtcmttaatttcaaaacttagttcgaagcgcacagtaattaaaacagtgtgatactggcatagaaacagacatgtagaccaatgcaatagaatggagagcccagaaataaaccttcatttatgtggtcaaatgtcagcaaatctgtcaagaccattcaatggggaaagtacagcctttcaacaaatggtgttggacaaatggaatatacacatgcaaaacaataaagttggacccttacattacagcatatacaaaaagtaattcaaaattgacaaagtcccaaagagataaaagtataagttattagaagaaaacattgggaaaaatcatcctgacattggatttggcaatgatttatttgacaccaaaagcacaggtaacaaaaacaaaagtagataatttagagtttatcaaattaaaaagaa

SEQ ID NO: 755296 - DNA, 506 bp, Homo sapiens
attttatgtgtggctagtgtaaataggattactttttaatttcttttttatattgttgcctgttctcatagaaatgctactggtattttatgttgaaattgtatcctgcaackttgctaaatttgtttattagttctaacagttttcctgaggaatttttagggttttccaaatcatatcatatcatctgcaaacaggtataatttgacttcttcatttctaatttggatgccatgtatatctttccttgtctaatttctctagctaggacttccagtactatgtggaataacactggtgagccaggttatattccagatcttagaggaaaggctttcatcttttccccagtcagtatgatactagctgtgggtctattgtataaggcttttattatgttgaggtatgttccttctagactcagtttttttaggtatttttttatcatgaaggaatgtcaaattttttaaaatgattttttagtataaattgatataataatattg

SEQ ID NO: 755297 - DNA, 506 bp, Homo sapiens
attttatgtgtggctagtgtaaataggattactttttaatttcttttttatattgttgcctgttctcatagaaatgctactggtattttatgttgaaattgtatcctgcaacgttgctaaatttgtttattagttctaacagttttcctgaggaatttttagggttttccaaatcatatcatatcatctgcaaacaggtataatttgacttcttcatttctaatttggatgccatgtatatctttccttgtctaatttctctagctaggacttccagtactatgtggaataacactggtgagccagkttatattccagatcttagaggaaaggctttcatcttttccccagtcagtatgatactagctgtgggtctattgtataaggcttttattatgttgaggtatgttccttctagactcagtttttttaggtatttttttatcatgaaggaatgtcaaattttttaaaatgattttttagtataaattgatataataatattg

SEQ ID NO: 755298 - DNA, 497 bp, Homo sapiens
tattcgttgaaaatgaggatttatcttcactcaattttaacataaaatctaaagattacttagaattataaaacataatttaaataaaataaaaatatatataaaataaacattaaaatcaatataaaaggcaactaggaaagtttaacaatttctaacatttcaaagacttcttttttcccttattgttttttccttattgtttgtcaatttctaatttaaatacattaagaattagggccaggcatgctgactcatgcctgtaatcccagcactttgggaggccgtcacggccagatcacgaggtctagagatcgagaccaccccrgacaacatggttaaaccccgtctctactgaaaatataaaaaattagctgggcgtgatggcacacacctgtagtcccagctactcgagaggctgaggcaggaaaatcacttgaacctgggaggtggaggttgcaatgagctgagattgtgtcactgcactccagcctggg

SEQ ID NO: 755299 - DNA, 586 bp, Homo sapiens
atttatttatatattttcaaattttcagaaagtttctttatagagccagcctttcctgagtgctattatatatgagacgttatactagagctttacgtcggtattctgattttttcctcccaacagctcattgctataagtactactattactctcattgaaagctgagaaaactgacacttggagacttttaagaacttgctgaaygtaacctctctagcaaatgggcaaactgctttggaatctatggcttttgaattctaaatcacatatagcccactcttttcattgggtttctgtagtgaactttagtaaaagtgtaaggttaggcataatatctatgtgaggttgttagctatttctctggggagctagaatatagattaaaaacacgcagataaagcatcagtgaaaataggtggacatgggtcctcaaattttagtattagtattacctggagagtcgttaaaacacagctttctggacatcacccacaggatttttgtttcagtgagtctgaaacaaaaatttgcatttttgcccaagaatttgcatttctaacaagttgtcaggcgacgcctatgc

SEQ ID NO: 755300 - DNA, 542 bp, Homo sapiens
gtcctcaaattttagtattagtattacctggagagtcgttaaaacacagctttctggacatcacccacaggatttttgtttcagtgagtctgaaacaaaaatttgcatttttgcccaagaatttgcatttctaacaagttgtcaggcgacgcctatgccgctgggtcagtggttcataaacttgaagtcacattggaatcacctggagggaattttaaaattcctgggctttatctcttttaattaatcttggatgggtccaggcatccataggttttatgagttccccaggtgattytaatgtgcagtgaggttgcataccattgttttacactttccctatttaatatcacttgctttggttgggcttgagacagggcattgaaaaaaagacaacttaaaattagatccttgaccagttcctaaaaggaagggattatgctattgattgaaaggagttggcaggcaagtaggtgccacggtcattgatatggtttgactctgtgtccccacctaaacctcaccttgaattttaataatcc

SEQ ID NO: 755301 - DNA, 627 bp, Homo sapiens
ctccatcatttctaacaaactaattgtgtagaaagaacattgggctgtgatagtttcaagaaactctaagatccttgaatggaatataaatgatttgctcagctttgtcctcccaacatctaaagcagggcctggacatgtgaagaaatgaattgcaccaaatggaaaattggagtcccttctaaattacttactacagataaatcattctacatgttgtatcatgcattgataacacaaatgttgaataatgcaacctatgcatagcatgaagacaaactcagcatgctgtgttgtttctaaagtcactatttgctcatatgttttgattatagaaaaggcagttgatcatcaasaactgtgttaggatagaaatattggttgtactgtatgtgcatgcagaatagactgagaatggatctagatgaaaaataaaatgttgccttgcttccttttatttaagactgtgcactattcaaattagggctgatattcaaaatatttaacaacgagtgactgcaggaccctgataggatccagcgcctatagatgctactgctgggagaattgaaacctggttaaaacgcagatatccttcaaagttgtacccattgtggggtttcactt

SEQ ID NO: 755302 - DNA, 564 bp, Homo sapiens
caggaccctgataggatccagcgcctatagatgctactgctgggagaattgaaacctggttaaaacgcagatatccttcaaagttgtacccattgtggggtttcactttagtcagaatgagcttttcagatcttaccaggaaattggtttttaaaaaagaaggaaatgagtatgagcacctgactcctctgctggggagaaggaaagggaaaagggtacccataagtttggcacactacattaaaaaaaattattgaggccaggcatggtggctcacacctgtaatcccagcactttgagaggtygaggcaggcggatcacgaggtcaagagatcgagaccatcctggccaacacagtgaaacctgtctctactaaaaatacaaaaaattagctgggtgtgatggcacgcgcctgtagtcccagctactctgggggctgaggcaggggaattgcttgaacccgggaggcagaggtggcagtgagccaagattgcaccattgcatttccagcccggcaacagagtgagactccgtcttaaaaataactaaataaataaaattatt

SEQ ID NO: 755303 - DNA, 564 bp, Homo sapiens
aaatggttatattaatattaaaatacagtgattccaaaaatgccacacgcaaactgaataagtatgtttctggatatttcttggcttcctatgtttcaacaaatttcctacagattttcaaagaagacatgacagtttatttttaaaattccagtagacatgtagcaaagaggatgattatgaaacttcaaaggtaataracagggtggttccaagatggccgaataggaacagctccagtctacagctcccagcatgagtgacacagaagacgggtgatttctgcatttccatctgaggtactgggttcatctcacaggggcttgtcagacagtgggtgcagcccactgagtgtgagccgaagcaggacaaggcatcgcctcacctgggaagcacaagggaccagggaatcctctttcctagccaagggaagctgcgacagatggcacctggaaaatcgggtcactcccaccctaatactgcacttttccaacagtcttagcaaacggcactccaggagattatatcccacacctggctcagaggatcccatgcccatggagc

SEQ ID NO: 755304 - DNA, 564 bp, Homo sapiens
aaatggttatattaatattaaaatacagtgattccaaaaatgccacacgcaaactgaataagtatgtttctggatatttcttggcttcctatgtttcaacaaatttcctacagattttcaaagaagacatgacagtttatttttaaaattccagtagacatgtagcaaagaggatgattatgaaacttcaaaggtaatagacagggtggttccaagatggccgaataggaacagctccagtctacagctcccagcatgagtgacacagaagacgggtgatttctgcatttccatctgaggtactgggttcatctcacaggggcttgtcagacagtgggtgcagcccactgagtgtgagccgaagcaggacaaggcatcgcctcacctgggaagcacaagggaccagggaatcytctttcctagccaagggaagctgcgacagatggcacctggaaaatcgggtcactcccaccctaatactgcacttttccaacagtcttagcaaacggcactccaggagattatatcccacacctggctcagaggatcccatgcccatggagc

SEQ ID NO: 755305 - DNA, 522 bp, Homo sapiens
gtgctgtgtcctttacacacctacactttcagccctacaaagtcaaatgcaccgaccgccaaagttatggacttttgtatcggaagcacacatgctaacaaagtattttcatcagaacatcttttttttttttctgactcattttcttggtgaaattgttgtktgtgtgtgtgtgtgtgtgtgtgtgtgtgtgtgtgtgttcttttttttactaggtctcatatgttttaggcccagcctgacatttcagcagtttcttgctaaagcgcttactgtgaatactgtgtagtatgtgtgcaaatgactcccgacttattagatttcttccggtgtgtgcatcctagcagaagacaccccagcaggccttgagcactgctgctgcttcacttcacataatgaatattcagaggctgcagtcattgagaactcaggtggcaaaaatagtaaggtgattgaagcaaaccctaacatgaaagcaaatctgcatttcagtgactcagaaacactgattacagcacagat

SEQ ID NO: 755306 - DNA, 539 bp, Homo sapiens
ctttccttgtctgttttatctcgaggaccctgacactggtcctgagagtccttcccagctccagtagtatcccttgtgctcctactgcaggacacagtaggagcacaagggatacttggagcacaaggcatacaaggagcacttgggcaggactacaaatcacagtgtgtcctcttctagctcccttgacactgtcctgtwgaatgaagaaatgatagtgggtacacagctctctgcccagggctctgtacttttcctccagccttcattaactcatctgcaattcttttaggccagtgactctcaactgatgagagaagaggcttcatcaggttcatctggggttagcgtaagcacctggcctggtttgcccaggactgaaaggtttcccaggattccactttcagtgctagaacaaggacggctatatccctcactccaagagcatattagaattcatggagtgtggtggggcaaattgtaaagcaagggagagatcctccatgccacctgtctctaaaaccatctcagccttgctt

SEQ ID NO: 755307 - DNA, 612 bp, Homo sapiens
gtgtacaccattagaagcagccaggttacacattgaatgctttgctgcttagaaatttctttcagcagataccctaaattatctccctcaagttccaagtttaacagatctctagagcaggggcagaatgccggcagtctctttgctaaagcagagcaagagtggcctttactttcattctcaacaagttcctcatatttatatgagacctccacagcctggacctcactgttcatatcagtatcagcattttggtcataaccattcaacaagtctctagaaagttccaaacctactctcatcttcctgtcttcttgtaagccctccaaacttacccaacctctgcccattactcagttccaaagatgcttccacatttttaggtatctttataacaatgcttcacttcactggtagcaattttattagactgttcttacactrctatgaagaactacctgagactggataatttataaagaagagagttttagttgactcacagctctgcaggttgtacagggggcttggctggggaggcctcaggaaacttacaattatggtggaagggcaatgaagaagcaagcacagcttcacatggtggcagaagag

SEQ ID NO: 755308 - DNA, 631 bp, Homo sapiens
caattttagatgtactgagcatgtgacagaagtctcatattgattccccaaaatcggaagtgtggctgttgtgataggaagtgttaaatgggagcccctgaaatttctccatcacttctagccaagaaaatgaattagaatcaaaaacacccactgcctctatgaggacctgtagagataaacaccactatcacacatctgaagaatgcaggaggagtggcctcactacatctgcattcaactcacctgstctgttctctgcagaaaccaggacatctgccacgcctatggcagatgacagtgtagtgtcatatatttaatcatatctttgtcccagttgtagccactgttctcaatatggtatgtttaaatgataagattaaccttgcccctgggaattatcatgtgccagcgattttatgaaagctttcttctcaatcctcaatcaataaaaaagatgaaaagcatggcttctttacctgaggacagtgacaattataaatattttctgttttactttattactctttaaactcttctgtgctgtgtccataaaagagtcaacagggcaggacagcacattgaaacatagatttcagtgtatagcaagtgatgtaaatgtcatcgtaag

SEQ ID NO: 755309 - DNA, 493 bp, Homo sapiens
ccaaacatgctcaaattgtattgcattttatactctgtgaaagcttgtcactatcaccttaatgtgatttttttctgtatatagtgaaagagtaatcagatgttttaaaagttcagttatgtgtttactatttccccattgarcaaagtgttccttattccttagattaatttatatttagtctcaccactatgactacttagcgtctcatcctctctgttgaaatacttcaattcaacaaatattgaatgagtaggcttactatgaaaaacaattactattctaggtgttagtatgctggacaataaatatacatataaatgtatgcagagagggtatatatgctgtgtaaataaatagagcaaattaaggggtatttgaaaggcagatatcttgttgggtaaaatttcaattgaagtggtcagagttggacttagtgaaaaggtagaacctgaataagaacttgatgtgagagccactagtaaagcagtat

SEQ ID NO: 755310 - DNA, 493 bp, Homo sapiens
ccaaacatgctcaaattgtattgcattttatactctgtgaaagcttgtcactatcaccttaatgtgatttttttctgtatatagtgaaagagtaatcagatgttttaaaagttcagttatgtgtttactatttccccattgaacaaagtgttccttattccttagattaatttatatttagtctcaccactatgactacttagcgtctcatcctctctgttgaaatacttcaattcaacaaatattgaatgagtaggcttactatgaaaaacaattactattctaggtgttagtatgctggacaataaatatacatayaaatgtatgcagagagggtatatatgctgtgtaaataaatagagcaaattaaggggtatttgaaaggcagatatcttgttgggtaaaatttcaattgaagtggtcagagttggacttagtgaaaaggtagaacctgaataagaacttgatgtgagagccactagtaaagcagtat

SEQ ID NO: 755311 - DNA, 655 bp, Homo sapiens
tttaatttttatttttgtaggtacatagttgtatatatttatggggtacatgacatgttttgatacagacatgcaatgtgtaataatcacatcatgtaaaatggggtatccatcccctcaagcatttatcctttgtgttacaaacaatcaaattatactcttagttatttcaaaatgtacaattaaatcattaytgactacagtcactccgttgcgctatcaaatactaggtcttattcatgttttctatttttttgtactcattaaccatacccacacctccctgcccaccacctgtcaactatccttcccagcttctggtaatactccttctacttactatctctattagttgaattgtttcgatttttagatcctacaaataagtgagaacatacaatatttgtctttctaggcctgacttatttcacttcgcagaatgacctccagttccattcatgttgttgcaaatgacatgatctcattcttttttgtggataaatagtactccattgtgattaagtaccacattttttaaatccattcctctgccgatggacacttaggttgcttccaaatcttgactattgtgaacagtgctgcaacaaacacgggagcgcagatcgctctgtgatatactgacttcctttgggta

SEQ ID NO: 755312 - DNA, 567 bp, Homo sapiens
tctattatttctgaggcctgtttgtgcttagctttcaaatttcagtctatgacctgcttcccatagctttccaatcttgtgtactattacataagtagaagctgattctcagataagacaagttgtccaaaatcacacagataataaatagatgaattaggattcacatctctgttagactgaatccacattcataatcttaataaattcattatactgttcctatgatcacatctcaaatggaatttgyaaaaagcccagtaacatttgtttattgccttagcctaccacttagaaattacaatgaaatgttaactatatctgctattttgctattcgcaagtgacagatgacttggaaagcatgtccactttagtcctctaagcacatttacattttcatattgccttcacatgacatttctgtggctacacttgcaatccagactagtctttcatcctctgttgacaatgatctgtttcattttcagagaaaactacccaataagtctctttaacgttatggatatagtctttctaaggaataggaagaaaatattttttcatt

SEQ ID NO: 755313 - DNA, 567 bp, Homo sapiens
tctattatttctgaggcctgtttgtgcttagctttcaaatttcagtctatgacctgcttcccatagctttccaatcttgtgtactattacataagtagaagctgattctcagataagacaagttgtccaaaatcacacagataataaatagatgaattaggattcacatctctgttagactgaatccacattcataatcttaataaattcattatactgttcctatgatcacatctcaaatggaatttgtaaaaagcccagtaacatttgttyattgccttagcctaccacttagaaattacaatgaaatgttaactatatctgctattttgctattcgcaagtgacagatgacttggaaagcatgtccactttagtcctctaagcacatttacattttcatattgccttcacatgacatttctgtggctacacttgcaatccagactagtctttcatcctctgttgacaatgatctgtttcattttcagagaaaactacccaataagtctctttaacgttatggatatagtctttctaaggaataggaagaaaatattttttcatt

SEQ ID NO: 755314 - DNA, 500 bp, Homo sapiens
tacccttcccagcttctggtaacaatccttctactctctctttccgtgagctcagttgttttaaatttttagttctcacaaagaagtgagaacatgtgatgtttgtctttctgtgcctggcttatttcacttaacacaatgacctccagttccatccasgttgttgcaaatgacaagatatcattcttttttatagctgaatagtactccattgtgtatatgtatcatattttctttatccattcctctgttagggacacttaggttgcttccaaatcttggctagtgtgaacaatgctgcaataaacacgggggtacagatagctcttcaatacactgatttcctttcttttgggtatatacctagcagcgagtttgctggatcatatggtagctctttagtcttttgagtaacctccaaactgtcctccacagtggttgtactaatttacattcccaccaacaatgtatgagagttcacttttctcaacgtcctctcc

SEQ ID NO: 755315 - DNA, 634 bp, Homo sapiens
aaagacaagatgtaccagtccattaaggagatgagtttattcgggttattgaagtggggggatgttcagaaatgaagaaggtctgaaagaagagggagaaaaggtgaagatttataacacagggaaccaggaaggctggagktgggccttatgatatgcaacggcaagttggttttcgtggcttaggacgtttcccaaaaagcaaaagggtaaagatttctgaaccttggttattgacttcaggagcactgggcccctgataaccatttgataaaatggttaaaaaaaataaagtaaaaatattttttcaagtagtaagaaaaacatattgggcttttcattagttgttgttttaccgatgtttaattcaaactatgttaatgttgcgattgccttcttcgttggcccaagaactcctaaaaacaagttttcattatacaaattgaaaatacctattctaactctaaactattgaaagcaattaattaagaagttttatctgcttatatctctcacttaaatagcccatatgagaaaaatagtctactatttattctctatatggacctggctgttaaataattcgaagtcactagtacctaattcttaaattggtatataccttcactggctc

SEQ ID NO: 755316 - DNA, 634 bp, Homo sapiens
aaagacaagatgtaccagtccattaaggagatgagtttattcgggttattgaagtggggggatgttcagaaatgaagaaggtctgaaagaagagggagaaaaggtgaagatttataacacagggaaccaggaaggctggaggtgggccttatgatatgcaacggcaagttggttttcgtggcttaggacgtttcccaaaawgcaaaagggtaaagatttctgaaccttggttattgacttcaggagcactgggcccctgataaccatttgataaaatggttaaaaaaaataaagtaaaaatattttttcaagtagtaagaaaaacatattgggcttttcattagttgttgttttaccgatgtttaattcaaactatgttaatgttgcgattgccttcttcgttggcccaagaactcctaaaaacaagttttcattatacaaattgaaaatacctattctaactctaaactattgaaagcaattaattaagaagttttatctgcttatatctctcacttaaatagcccatatgagaaaaatagtctactatttattctctatatggacctggctgttaaataattcgaagtcactagtacctaattcttaaattggtatataccttcactggctc

SEQ ID NO: 755317 - DNA, 532 bp, Homo sapiens
aatgctgtatttttttttttttttttgagacgaagtcttgctttgttgcccaggctggagtgcagtggcgtgatctcggctcactgcaagctccacttcccaggttcacgccattctcctgcctcagcctaccgagtagctgggactacaggcacctgccacctcgccgggctaatttttttgtrtttgtagtagagacagggtttcatcatgttagccaggatggtctcgatctcctgacctcatgatccgcccgtctcggcctcccaaagggctgggattacaggcatgagccatgtacaatgctgttttaaaagcagcgctcgtctttgctgcctttcaactttacatgctttggtttctcatagagaaaataaaaattgtttttaatccttaaagaacttctgacaggagagaaaaatgacttgtgtgtcccaaagcccccaatcccaaagacatctaagcaaaaccaagttgggggtgggggtggagaatttaaatagcagtaattatcgtatctcaatttgcaaga

SEQ ID NO: 755318 - DNA, 532 bp, Homo sapiens
aatgctgtatttttttttttttttttgagacgaagtcttgctttgttgcccaggctggagtgcagtggcgtgatctcggctcactgcaagctccacttcccaggttcacgccattctcctgcctcagcctaccgagtagctgggactacaggcacctgccacctcgccgggctaatttttttgtgtttgtagtagagacagggtttcatcatgttagccaggatggtctcgatctcctgacctcatgatccgcccgtctcggcctcccaaagggctgggattacaggcatgagccatgtacaatgctgttttaaaagcagcgctsgtctttgctgcctttcaactttacatgctttggtttctcatagagaaaataaaaattgtttttaatccttaaagaacttctgacaggagagaaaaatgacttgtgtgtcccaaagcccccaatcccaaagacatctaagcaaaaccaagttgggggtgggggtggagaatttaaatagcagtaattatcgtatctcaatttgcaaga

SEQ ID NO: 755319 - DNA, 633 bp, Homo sapiens
aaatataatttaactatgcagaaaataaagtttatgatcaagtgtgtttatcataggaatgtgaagtgtttaaaataaaaaaaatatcagtgtaatttgctacatttaaaaactaaaacgaaacaaaataaaagcccaatagatagtgacaattcattccataaaatcaaacagtcattccagrggaaaaccctcagcaaactaagtgtagaagataaattcctcaacctgttaaggaatatttacaaaaatcttacaatgaacgtcacacataatagtgaaaaacggaatgcttactctcaaaatcagaaagaaagatgaggagttccacactcaacactttggctcaatattgtactagaagtaatggccaatgcaattagttaaaaaaagagaaagagagataaaaggcatctagtctgaacaagaatctaacaaaagtctttatttacaaacgacataattgaagcaggatatttccctgacctttcgtgggacttgtgacaggggtgacttgtttacccagcctgcagttttcaattccttgtgggagggagtacacaagtgaacggggcaggagctggagtgtgggaattttggaagcagccagccactatggcaggggcaaactcc

SEQ ID NO: 755320 - DNA, 633 bp, Homo sapiens
aaatataatttaactatgcagaaaataaagtttatgatcaagtgtgtttatcataggaatgtgaagtgtttaaaataaaaaaaatatcagtgtaatttgctacatttaaaaactaaaacgaaacaaaataaaagcccaatagatagtgacaattcattccataaaatcaaacagtcattccaggggaaaaccctcagcaaactaagtgtagaagataaattcctcaacctgttaaggaatatttacaaaaatcttacaatgaacgtcacacataatagtgaaaaacggaatgcttactctcaaaatcagaaagaaagatgaggagttccacactcaacactttggctcaatattgtactagaagtaatggccaatgcaattagttaaaaaaagagaaagagagataaaaggcatcyagtctgaacaagaatctaacaaaagtctttatttacaaacgacataattgaagcaggatatttccctgacctttcgtgggacttgtgacaggggtgacttgtttacccagcctgcagttttcaattccttgtgggagggagtacacaagtgaacggggcaggagctggagtgtgggaattttggaagcagccagccactatggcaggggcaaactcc

SEQ ID NO: 755321 - DNA, 607 bp, Homo sapiens
gtggccttcaaaatatagaacataattaaattacataaaacaatgacatagttaaagtgttccaagttccttgagttgttcaggatcagggtgaaaataacaattagtatgagactttggtaagtgaagaatgaagttttctctggcgaacagtacaagaatcttaagactgcatatcatccaagctaataggagatgaaaagaaatatttaaaaactcaatctaaaagaaggccagatgggagagaaaacccaaaacaggaaggacaaatagaaatggctgagtaagatggcgaagctaaaagatattkgtaattacattaaattaaattacattaaacataaaaataactaaatactctgtttcaaagataaaaacagaattaaaaatacaaaactcaactatatactctttataaagccctcatctgaaatatgatacagaaatatgaaaagttaacagatgaagaagttatactttgtactattaaccaaataaggcagatgtgactatgttaatatcaaagacagctctgaggcagaaagcatggctaaaaataaaaaagggcacttcatagtggaaaaaagttaaaatgaacccggaagct

SEQ ID NO: 755322 - DNA, 596 bp, Homo sapiens
ggaatatttcccagaaagaatccattgaatgtaggttaccatggtgattagcaagaatgtggaatgaagttcatttcatgataattgctacatatttgcagctgaagtgcatctttcagtttcagtctcagactttgagaccataataatagctctggaatatgagttgtwtatttaaacctataatattgtgcaggggcatatctaattctgtggaggttctttttttgcagtgaccaacatggtaatttttaaaaagcttattcctgtttgttggaatttctgtgtatagattatgtttgattgattcttaaaaaacagaatttataatgtctccaaatcaatttaaagataaaagcattttattttaaaatcctccccccttagaaagaaagctgaatttaattttgaggcagctgaatgctcttgctttgtaattatttctgaagaagttcatggtcagatgccaacttttgtgaattaataataagttttgataaattgtgccaaaatcagaaagttagtgctttgaaaagctgttttaacactttggggctaagcaaaaattaaatgcagaatgtaacaagttgctaagg

SEQ ID NO: 755323 - DNA, 545 bp, Homo sapiens
aacctaaaggtagtggaagacgttactaaaggaagcttaggtagtaacgtatttgtcgtctcagttaacacaaagaccatagatggggcagatctgcaggatgcaaaaactttcttttttctcacctcatagtagycatatggctactgcaattctctggtttcatgtgcttacaaaatgtcctttagttaaaaacaaaaagaaagagaaagagagaaagaaagaaagagaaagaagaaggaaaaaagatagaggaaaaataatttcttcatgtgtctatttaaattaacaaagacgtgaattgtcccagacctccctgtgatgattaatttcatgtgtcagttttactgggctaagggttgcccacatggctgataaaacattatttctgagtatgtctgtgtttccagagaaattagcatttgaataggtaggctgagtgaagaggatcatcctcaccaatatctatgggcatccttcaatctcttcagagcccaaataaaacaaaaaggcagaggaagggtgaatttaatctgtcttcttga

SEQ ID NO: 755324 - DNA, 545 bp, Homo sapiens
aacctaaaggtagtggaagacgttactaaaggaagcttaggtagtaacgtatttgtcgtctcagttaacacaaagaccatagatggggcagatctgcaggatgcaaaaactttcttttttctcacctcatagtagccatatggctactgcaattctctggtttcatgtgcttacaaaatgtcctttagttaaaaacaaaaagaaagagaaagagagaaagaaagaaagagaaagaagaaggaaaaaagatagaggaaaaataatttcttcatgtgtctatttaaattaacaaagacgtgaattgtcccagacctccctgtgatgattaayttcatgtgtcagttttactgggctaagggttgcccacatggctgataaaacattatttctgagtatgtctgtgtttccagagaaattagcatttgaataggtaggctgagtgaagaggatcatcctcaccaatatctatgggcatccttcaatctcttcagagcccaaataaaacaaaaaggcagaggaagggtgaatttaatctgtcttcttga

SEQ ID NO: 755325 - DNA, 593 bp, Homo sapiens
ctgggcagttgtctacacccaaccctgatcctcttagtgccatccttcagatgttaggccagcaccttcaactacaaattaggcaaagctaagagacatatatgattaatttcatatattaattttatatattcctatattaatttcccaaaaatattttaaacaaaggttatacaatgaagctaatcaaatagaagtggcaaatcaagataaggaaagaaaacccaagaattcrtgggagcaaaagggctgttgtaaccgcatcagaatgtgggcatgaggttcctagtttccagagcagtaaaaacaaaacaaacagcaacagcaacaaaaacaaacccacataaaaccaccaagttacgcagttctcatcagaaagaggaaagcattccagattcttagcagagatgcattttccctcccaaatttctaaaatttaaacataacaaatttgttttttatttttttattttaagttctgagatacatgtgcagaacgtgcaggttcattacagaggtatacgtgtgccatggtggcttggtgcatctatcaacctgtcacctaagttttaagcctcgcatgcattagccat

SEQ ID NO: 755326 - DNA, 652 bp, Homo sapiens
acgtacacttcttgagtgctttccatgtgccaagcatttctaaatgctctgtatatattatttccttaattgcacataactctgaaataggctctattatacctctttttttcagatgagaaaactattgcacagagaggtatgttctccctataaatgagatgatgtctgtgtgtggattttatttttacatatggcatgttggttttattaaaataatgatttatttagttaattaaactttaattttaaacaaaccaactttgtagcattatcaccccatgttgtgaatttagatcacacaatcacttattagatgatagactgctgcagtacaatgctaaaggtcatgattactacatatcctacttagaacacaactgtttggatttttcttttattttttgagacagagtgtctctgtgtcacccaggctggcgtgcagtggcatgcaacctcaatttcctgggctcaagtgatctaagattcttaacaaacacctttccrcttaaaaatctaatatataggctgggcactgtggctcatgcctgtattcccagcactttgggaggctgaggcaggtggatcacttgaggtcgagtttgagaccagcgtggtcaacatggtgaaaccccgtctctactaaaaatat

SEQ ID NO: 755327 - DNA, 658 bp, Homo sapiens
aatattgttctcccctggcaggtggcctctgctgagatctttctggaaagaaatcaaaatcctaacaggagtggaaaatcactggaatcaagagccttggaaagtggatttttatttgtgtttattctcaggctccattcttttctgctactggcccatttctcaccgggtgtcatctaagacatgcattaaaaatgagtacctctgttgcaaagtggaaaagaaattaatccaatcatttagtaattatcaaaactattatctatatacctcactccattatcctaacwctactcctttaagttatacctccagagccacttagaaacctttttgttcaaatacaaaccccttaactgtttattttagtgaagaaaaccataaacttatacttccctagattaataaatcgtaagagaatctgatgaaagtaacctttattttttaatttttagagttatgcaagatgaagctggctcacttccgaaagctttctaggttcaaggtaaattcctgccaacatattcatggttatagtaatttaagtaatggcataatattattgtccacccagtgtctatttccaggacgattccgtttcataaagtgaataagaatggaaataagtacgattttacaacattttctccaaagcttg

SEQ ID NO: 755328 - DNA, 597 bp, Homo sapiens
aatgaaaggagacatcagagaagaagaaacaacacattcttatgtcaattactgtgtaatttgctttcagccaagatggagcaacagagaactagatttatactctctcctgaaacaactaaaaaagcagataaaatatttgatacaatggttatcaagacattggttatctagcaacaaaggacagtgattcttgagagatggaaaacaactgagcaatacaatggcccccactttaatgactaaagagaatctctcaggtgcagctcagggaaggaaacctggcactgcctggaggtctccctctgttgaaggacagagctggaaatccagggaggttaagaattcaaaagggcaaaaatcaaaaaggagagacctgtacagagacacatgcagagaacttcatagggttctgcttgattattmagctgaaaactcatctatgtgaagtgatacagtaccgcttgaagatagactgcagtaaaagatagtatatactatcaggtgaagaaagactgtgataacataggtatagtatgcctaagtgtgtaagtgcagtcatacctgggggatattgcaggttcagatgcagatcac

SEQ ID NO: 755329 - DNA, 555 bp, Homo sapiens
ttaggagctttgcatacatacttcaaatttgtcagctgcaggctttattaaagggtgatttgagtgggggacatagaacagcaatttcaatacctttacatattttgtgtcttctctgaccatctgaccagtgcatcggaagtcttttctgctcttctgccatgaaagcagaagcctgaggtgacagcgtcttgggaattgaaacacagggcaaagaagaggtctcaacagttactatgcaagcatttgcttgttctcctggtatcagtacagtagcttgctctctccagtgtctgatgccctgcagtaggtccacagaccttgtgttgtactgtctccagataatagattttcagacttctgccaggttgmgaaagaacagttagtgtttctacaaagcagaagaggacatctgtgtgtctaactgcctctatgccttttttgaacctgtcctccctttcgaaactctatggttatccccacatgcagaagtactggtgccaacagtgcctaagtcatgggtgaggggtttggttctcagtgcatgtgcggttg

SEQ ID NO: 755330 - DNA, 645 bp, Homo sapiens
cattctcctaaacttcgtgtagtctgaggctaaaaaataaataatactaaataaggtcaaatgtcatctgcttaagcttaattgacaactctgtcttcccagatataaaaatacactgtcagcactttttaaataattaatcctcgggtcatctaagccatgagtgggagagaattgcaaaattaaccagaagggagggctagtaactacaagacagatcatatttccaattcttgacagaaaacattgagttattttataagcaattccctgtatagaggtgatgcttgaatgaagaggagcaaakagtgcagtctactacttcaattatctgactaagggaggacaattcaatacataagacctaagtaccaattaggtaaatgaaaaactcaagcatgctacacaatttcagggcagaaagacactcagaaaggcaacagagctctgcaattgcaggctgatcttcagccacactgacacagagaacctgggaaagatttgaccctttggagatgctgctgaaggttattagggccctattagagagcctgagagaacaacaatagcatttaaagggactctataaataaggttccattttcagtatagatgagattatttttaaaaataccatactgaaag

SEQ ID NO: 755331 - DNA, 632 bp, Homo sapiens
tcagtaatgacactgagaaattaaattagaggagcctaaactgttatgtcaaatacatgcaatacagagttctggattggattctgtactagacaaaaaagtattctataaaaaaactattgtattagttgaccaaattggaatatggttgattaattgaataaacgtatgataccaatgttaaatttactgaaattaaaaattactgtggttatgtaaagaaaatgtctattcttcrgaaattaacacggagatatctagagataaaaaacacctagagataacaaaggccaagatgtatgcaacttgctctcaactggttcagtgaaatatatatatgtatatacttagtctacccacagagaaattgatgaagcaaattgacaaaatcccaatgaatctaactgggtaaagcatacagaatattctctgttttatttctgtaaccttttaaaacataaatttgaatttaattctcaaatatagaatggaaaaaacagaaaaaagaaataatcattgataaggtgaactgtaaggaagctcacatatccagaaacatctcaggaaaggtgtttttttttggtgaaagtatagttgagttgcaagagttaaaaagtagaatggcaactgta

SEQ ID NO: 755332 - DNA, 632 bp, Homo sapiens
tcagtaatgacactgagaaattaaattagaggagcctaaactgttatgtcaaatacatgcaatacagagttctggattggattctgtactagacaaaaaagtattctataaaaaaactattgtattagttgaccaaattggaatatggttgattaattgaataaacgtatgataccaatgttaaatttactgaaattaaaaattactgtggttatgtaaagaaaatgtctattcttcagaaattaacacggagatatctagagataaaaaamacctagagataacaaaggccaagatgtatgcaacttgctctcaactggttcagtgaaatatatatatgtatatacttagtctacccacagagaaattgatgaagcaaattgacaaaatcccaatgaatctaactgggtaaagcatacagaatattctctgttttatttctgtaaccttttaaaacataaatttgaatttaattctcaaatatagaatggaaaaaacagaaaaaagaaataatcattgataaggtgaactgtaaggaagctcacatatccagaaacatctcaggaaaggtgtttttttttggtgaaagtatagttgagttgcaagagttaaaaagtagaatggcaactgta

SEQ ID NO: 755333 - DNA, 632 bp, Homo sapiens
tcagtaatgacactgagaaattaaattagaggagcctaaactgttatgtcaaatacatgcaatacagagttctggattggattctgtactagacaaaaaagtattctataaaaaaactattgtattagttgaccaaattggaatatggttgattaattgaataaacgtatgataccaatgttaaatttactgaaattaaaaattactgtggttatgtaaagaaaatgtctattcttcagaaattaacacggagatatctagagataaaaaacacctagagataacaaaggycaagatgtatgcaacttgctctcaactggttcagtgaaatatatatatgtatatacttagtctacccacagagaaattgatgaagcaaattgacaaaatcccaatgaatctaactgggtaaagcatacagaatattctctgttttatttctgtaaccttttaaaacataaatttgaatttaattctcaaatatagaatggaaaaaacagaaaaaagaaataatcattgataaggtgaactgtaaggaagctcacatatccagaaacatctcaggaaaggtgtttttttttggtgaaagtatagttgagttgcaagagttaaaaagtagaatggcaactgta

SEQ ID NO: 755334 - DNA, 631 bp, Homo sapiens
aattttctatgaatgttttcagacatagtgctatgagtttacacaaaattgaatacatacatacacatatgctttcacacacattatgtatgattcatttgtttttataaatataataaaataaatgataattttaagtttttttctacaasttgatttttttaacttaatatatgcagagaaacccatatttagaatagctatactattttttaaattactacatagtattgcttaatatagaaaaaacataatttgtgtaccatttacatattttgttggggatttatatagtttctaatctaatttctttaaaaacaagtgtatagcttgtacacatgtctttgtaaacatataggaatagttttaaggaataaattccttgaagtgataggcaatgaaaaattacctttcattaagtttccacaaatttttactcaacgaattcaccaacttactttaccaaaaatatatttacaaatttttaaatttatctgtgcaatgaaaaatagataccaatttcttaacagaatattatgtttgaacagattttcatatatgattagtggccacttttattcttttctctgtgagaaacctctaaataaacttcgactgtattttctattgg

SEQ ID NO: 755335 - DNA, 608 bp, Homo sapiens
ttattcaaattcttatttttttacccattttactgtgttccattcctcgatgaatgattagcataagtgcttttattactgacttgtatctgaagtttaatgaggtacctctcaatatgtcctgggatccaggctttctctgggttatcactccggttcacttcatgaactcttcttttctgttagccttctctgatccaagtcaaccaagtaataactcacatatcactgcccatattattaataccattcaaaaaacaataagttctgagtatatctgtggaagatgagccatacaaaaggcagacatttttgccttactttttttttttactctgaggtattgcaagtgcctaagaaagtattttttaaatgaataaataaatctatatttttagcctgtcatctaaatctagtttggctkcaatgaccttgcctccttttaagtatgcccctcctgtatgccttgatacttccacagtgcgcttgctatttccagagctaaaatcacttcctgagcttcattcatctaacatcttgaaatttctctgatgtcccaatttcttatagtctttcagttctaacaaattctctacagtaaaataccc

SEQ ID NO: 755336 - DNA, 618 bp, Homo sapiens
cttccactctccaaaatgactgtttcataacttgtcctctctccttaaagctacaacacctcagtctcatctgatgaccttgcttcatgcttcagtgagaaaataaggtattggaagggaacttcctctaattctttttttttttgttttttgagacggagtctcgctctgtagcccaggctggagtgcagtggtgctatctcggctcactgmaagctccgcccccggggttcatgccattctcctgcctcagcctcccgaatagctgggactacaggcgcccgccactgcgcctggctgattttttgtatttttagtagagacagggttcaccgtgttagccaggacttcctctaattcttaccatcaaatgcagagggcgtccttttctgcacctgtagtttctaccctatattgtattacaatggttgtggtggccttgctccatcttaagtcaagccttgcctttttctttgaatcccatgccttcttgtgttccctaactatatgtttgttgctttacatcatcagtttctccgtctctagtgcatcattgccattaacataaaagcataccttagcgttttccatccaccctttccagctattcctaatccc

SEQ ID NO: 755337 - DNA, 477 bp, Homo sapiens
aacaattataacttactataaaacaccgaacaaagaaaactctgtaagtcctggaagacatttcaaaaagaaagcatgagagagagatatccaatgagcacctttagtgagctgagccagatacatacccctggacttttgaatcatgtgagctgttattttccrttttccctttgagaaggtttgaatttactctctttaaatgcaacttagagtttagaccgatatgatattttgttttgataaatacagaattgtatctacatacatctcatcatgctctcatgtagaaaaatgattaacttttttttctcataatgaactgaatatttgaatgaggaatttcaaagtcttatgcgcatatatgtacagagatatctatcaaacagttctggaagattatattttacacctaacttttcacaaaatagagatttttcacaagtgtcatgtaatgtcctgcaatttcaactgctg

SEQ ID NO: 755338 - DNA, 658 bp, Homo sapiens
tgtccgccccgctccccgacctcatggaaaaattgtctttcacaaaactggtacttggtgccaaaaatgttggagaccactgctctaggttcattcatcttgttgcaaatggaaatattttgttcttttttatggtacatttttaatctatttatccattgatggacacaaaggttgattccacatcttggctattgtgaatagtactgcagtaaacgtgggagtgcagatawctcttcgacttactgatttcatttattttggatatgtatccagtaatggaattgttggatcataaggtagttctatttttaatttattgacaaatctccatattgttgtccataatggctgtattaatttacattccagtcaacagtgtataagagttttcctttcttcatatcctcatcagtatttgttattttttgtctttttagtagtagccactttatctggagtgaggtgatatttaattgtggttttgttttgcatttctctgatgattagtgatgtcaaatatttttccatgtacctgttggccatttgtgtatcttcttttgagaactatctattcagatcttatgcacctagataatccattttaattagattattatttgtgttattattttgctattgagttaagttgcttata

SEQ ID NO: 755339 - DNA, 616 bp, Homo sapiens
aataaatgcaatataacagtttaaaatacctttgatcagaatcttaggaggacaggagacagtgaatcatgcaaaggcaatatttattttggttttaaaatcaacctcattgggatataattgtgggaaataaggtgcagccattttgagtgtagagtttggtgagctctgacaaaagcatacactcatgtaaccaccgctgcaattaagatacagaataagccacatgcggtggctcatgtctgtaatcccagcactttgggaggccgaggcaggtggatcacttgaggtcaggagtttgagaccagcctcgccaatatggtgaaaccccgtctctactaaaaatacaaaatttagctgggcrtggtggcacatgcctgtatcccagctacttgggaggctgtggcagaagaatcgcttgaacccatgaggcagaggttgcagtgaaccaagatcgtgccactgcactccagcctgggtgacagagtgagactccatctcaaaaaaaaaaaaaaaaaaaaaagatacagaataggtccattgccctaaaaagttccctcttcccttttgtagtcactgccccacccctcaaatcccagtcctaggcatccaaact

SEQ ID NO: 755340 - DNA, 604 bp, Homo sapiens
ttaagaactttagaatttatatgaaaatgtacttatacataacatgtagattaaaaaagataataaatattagaaaataatttgaggccaattactcctataatctcagcattttgggaggccaaggcaggaggatcagtttcttaagtccaggagttcaagaccagactgggcaacataatgaaaccgtgtctctacaaaaaacacaaaacttagccagctgtggtggtggrcatctgtggtcctagctacttgggaggttgaggcaggaaaactgcttgaacctgggaggtggaggttgcagtgagccgagattgtgccactgcatatcagcctgtgtgaaagagtgagaccctgtctcagaaaaaaaaaaaggaaaataatttgaactaaataatagtactatgtatatcaaaacgtatactaaagctaagacatagggaaaaatttataacattgaagaatgcatgcattaggtgaaaatttgagccatgcttctatttcaagaagtaagaaaaaagaacagcaacatgaaagaaaggagaggggtaacaaagagcagaaagtaataaaattatgtaataaacacaaaatagaaaagatt

SEQ ID NO: 755341 - DNA, 500 bp, Homo sapiens
actgcacccaaacaaaaactcttttttttttaagcaaaattataatgttaccatcacatctaaaaaaattaacaataattccttaatatcatcaaatatctggtcattgttcacacttccccaaatgacttcttattatatttttctttttcttcttttttttttcctttcttgagacagggtcttgctctgttacccaggctagagtgcagtggcatgatcatggctcaatgcatcctccacctcccgggctgaagagactctcccacttcagctycctgagtagccgggactacaggtatgcaccaccatgcctggctaatttttgtactttttgtacagacagggttttaccatggtgcctaggctggtcttgaactcctgagctcaagtgatccacttggccttttaaagttctgggattacaggtgtgatccactgtgcctggctttcttcttcttttacagtttttgtttggatccaaataaggcccatgcatt

SEQ ID NO: 755342 - DNA, 500 bp, Homo sapiens
actgcacccaaacaaaaactcttttttttttaagcaaaattataatgttaccatcacatctaaaaaaattaacaataattccttaatatcatcaaatatctggtcattgttcacacttccccaaatgacttcttattatatttttctttttcttcttttttttttcctttcttgagacagggtcttgctctgttacccaggctagagtgcagtggcatgatcatggctcaatgcatcctccacctcccgggctgaagagactctcccacttcagctccctgagtagcygggactacaggtatgcaccaccatgcctggctaatttttgtactttttgtacagacagggttttaccatggtgcctaggctggtcttgaactcctgagctcaagtgatccacttggccttttaaagttctgggattacaggtgtgatccactgtgcctggctttcttcttcttttacagtttttgtttggatccaaataaggcccatgcatt

SEQ ID NO: 755343 - DNA, 580 bp, Homo sapiens
gattactgtgctaagtgaggtgggatacttttaaagaatatatgtttggatctagtaaaggtatactaagttattcagattaatcaattcagtaaaaactccacaactctgtaaaagcatcaaacagaggaaaatatagtgaaaatgttccaagacaayttctgaatgaaagcttataatgagaaaagctaacagaatcttggagcaccaatacttcctctttcctggatggcatttacaatactgcacacttgggatctgaccctgttaccactgagagaaaggggtgtggtggagagatcctctccatcgttgatctggcatcccaaaagagcatcacttcaaggttaaagtgaaccatatctgaaagcatgccacttctctcaaagtcacaggactacagggaagctactttggttatgaacaaagcagaagaaaaaacgtattcttctgtggccacagaccacagatacacctcaaaattaacaaagcccagaaaccccacccttagttgaagttctcacacccagtagtgctctcaggcacccagaagaggcaaaggcaaagattctctatggaa

SEQ ID NO: 755344 - DNA, 624 bp, Homo sapiens
agtgagctatgattgcaccactgtactccagactgagtgacagagatagaccttgaaaaaacaaaaaagaaaagaaaagaaggaacgatgaaagaaagaaagtaagttagttccaagatggccaaataggaacagctccggtctgcagctcccagcatgatctatgcagaagatgggtgatttctgcatttccaactgaggtacctggttcatctcactgggactggttggagagtgggtgcagcccacgaaggatgagccaaagaagggcagggcgtcacctcacccaggaggyaaaaggggttgggggatttccctttcctagccaagggaagccgtgacagactacctggaaaaatgggacactcctgctcaaatactgtgtgtttcccaaggtcttagcaaccagcagacaaggtgattctctcccatgcctggctcggtggctgccaagcccatggagccttgctcactgctagcacagcagtctgagatcgatctgtgagatgacagcctggctgggggaggagcatccgccattgctgaggcttgagtaggtaaacaaagtggccgggaagctcaaactaggcagtgccaaccgcagctcaacaaggcctactgcct

SEQ ID NO: 755345 - DNA, 589 bp, Homo sapiens
aagtggtaatgtgtgttcctgagttctgtgagccattctagcaaattatcaaacctgaggaggtagcagatatgtggctggttggtcaaaagcacaggaggcctgggactgaagaccagcatctgaaataggagggactgagtcattcacctgtagggcctgcacaggtagagtcggaattggttggaattgaacgctcagctggtgtccagagaatcagaaaataggttgttggtgtggaaaacccccataccttttgggtcagaagtgttgtgaggagatacagctcaacaataaacatttattatctcatcatttctgtgagaaaggaatttgggcgcagcttatctggttggttctggaytggagtcttgccaagaggttgtaatcaagacgttgtcctgggctgcagtcatctgaaggtttgactgggcctggaagatttacgtccaaagtgactcactcatatgactgtctggtggttacaggtgtaggcaggaggcctcatatcaccagttgggcctctccagggcgctgctcagtccatgacagccggcttccctcccagcaagtgcccaagagagcaaag

SEQ ID NO: 755346 - DNA, 561 bp, Homo sapiens
gagtcagcaaaggtttagtgtaaaaagaccagataacaaatattttcaaatttgccattttaatgcaaaagcagccagatgatacataaatgattgggaataaccttggttcaataaagctttatttacaaagccaggtggcaggccctcatttgctgaccccttctctagagctaaactacctaggtttaagtcaactctgtcatttatgagatacaggaaattaagcatgtcacttaatctctttgtgcctcagtctcctcatctataatatgggtcatattcataatgtacctgccttctagggcataaaatggtgtcttatatatgaagtgttcaaagcatgcagtaagtgctatgaaaaaacaatgcatgccattttgtgttgtaggattcaagtatytcaacagagtggccagaataatcatagttaacattcatatagcacttaccctctgcctaggcactttacgtatgttaactcatttaatcctcaggataccctaggctataggtaagatatcaccatcaacatcatcatcatccccatttacaaatgag

SEQ ID NO: 755347 - DNA, 546 bp, Homo sapiens
agattctcaaggatccgggtattttaggaacaaaacaagccagcaggtgcagaggtcacaagcctcctgagagggccagggcagagtgagtagctgcaggggcagctgtcctttgcacctgggcctagagtgccagagacttagtctcatttgtttacaggagactgatgggttcctgagcagcctaggaggggaggggaagcactgcgttctcagtgtggtgcttggccctcccaggtgcctggttgtggcctgccacttagcacccacccctgcctatccagccccatccctggggaaggttcccacctgctccaacytctggtactcccaggctgcctcacccaacgatgacagtgactagcctcagagcctggctgcttggaagacctttgcccaagcagagaactgttgaggaaggtgagccttccgagggccagccctgcctctcctcccctctcctagcctgcttctgtctgggctgaaggcacagcagggacaatcgctcttccggggttagaactgggggagcagggacaaaaagcg

SEQ ID NO: 755348 - DNA, 588 bp, Homo sapiens
ggcggggagcaccaagggtagaggcaggggagcaatggatgggttgaatgaggaagcttcacagccccccggccaccgcaggtcgggggagcactgtccccggggccccgcagccagctgtgctgggcaaggcaggacgggatccttggtgatgggcagaatgtggggagcagggtaggacgggccccttggctgagagccagatgtggggagcggggctgtcgaggctgatctcaggatgcttgctgcggctgctgggtgggggataacaggggttttccgaggccctgaaggactggagagtaggagcaggtctcgggggtagcttcctgaagagatgagtcaggtcccaggcacattcagtgccagccagggaggtgagaggtaatcctggaagctgctatgtagacagaagcgagggcaagaccaccgctcctccrccataaaccgtgttggatgggcctcctgcctcctccagcctcagtttcccccactgtgaaatagggatgacctcctgtgctggggcctggctgtggcttcccaggccccggctgggaccaccgcagaggtgatgtctccaggaggctt

SEQ ID NO: 755349 - DNA, 623 bp, Homo sapiens
tgaataatctccagggccagggtggccgtggggttcttaaacaggatccagaaagcacaaacctcaagactaaaatgtatgaacttgaatgcattaatgattatggattaaggatttctgttaaataaatccatcatggcaagggtcargactgttttcataataatactaaggaaacaatttgcgtttttcacttttacactcatgaatgtaactttgccatgactcattacaagatatttgaaacaattaaagctgaggagggaacaacagctaaaatataccagaaagcaccacaaatcattaagaaaaaggtaggaagattgccagtttgcaggagggttaacaaacagatgaaaatttgcccaagctaatcagttatcagagaaatgtaaatgaaagcaacagctattcttcataggagaagcattagaaagtaggataaggccaagtgttggcagaaggcaaggaacaagcctccctgtgtgctgcaggtggggacggagacaggcacagacgttctgaagagctggccaacacttcttcctcaaataaaatattttatacctgtggcccagcagtttccctcctaagtaaacatgctggagcagttctcacccaga

SEQ ID NO: 755350 - DNA, 623 bp, Homo sapiens
tgaataatctccagggccagggtggccgtggggttcttaaacaggatccagaaagcacaaacctcaagactaaaatgtatgaacttgaatgcattaatgattatggattaaggatttctgttaaataaatccatcatggcaagggtcaagactgttttcataataatactaaggaaacaatttgcgtttttcacttttacactcatgaatgtaactttgccatgactcattacaagatatttgaaacaattaaagctgaggagggaacaacagctaaaatataccagaaagcaccacaaatcattaagaaaaaggtaggaagattgccagtttgcaggagggttaacaaacagatgaaaatttgcccaagctaatcagttatcagagaaatgtaaatgaaagcaacagctattcttcataggagaagcattagaaagtaggataaggccaagtgttggcagaaggcarggaacaagcctccctgtgtgctgcaggtggggacggagacaggcacagacgttctgaagagctggccaacacttcttcctcaaataaaatattttatacctgtggcccagcagtttccctcctaagtaaacatgctggagcagttctcacccaga

SEQ ID NO: 755351 - DNA, 596 bp, Homo sapiens
attttgtcatgtcatgacatctcaaacaaaattcagatacataagataaccaaaaagtaattagagttttatggtgaatttccaatctctttcctgggaagcaatatatgtcagctcatattggtaaaactccagacaacttcacagaacagtgatatttttaagatgcagaagtcttcaaattttaaagaagtattatcttgtgactataatccatcaaccactaccacctaatcagatgttttcacctataagagtagttgcctaaatgcagtttggggacataaatttctcagaatgcaaaatttcagatatgacagtaacatcagaacgtcaggttggggagggtaggtatatcaggcagcatgtttgggtaaagaaaggatgtacgtacgcttccttgagatagaagatgaagaaataatactccaggataaacactggaagatcatgytagagatgtgctggcaccccagttcatttaataaatgagagcctaatatatcgtgtagataggagatatatatataacatattgaatacgtgtgtatatatgtgtacatataagtgaatatatgcacacatatttatatatt

SEQ ID NO: 755352 - DNA, 540 bp, Homo sapiens
ctccactcttggctgaatatctggacctgcaagttaacatgtgactcaatgtggactaaataaaaaagagttaatgaatataaaatggaaagatgatggttcagcggcagtagcctcatgatgttacacctgccgtttgggctgcacggacctagcagaatgtacatttgcaaggagtagagtgaaagctccatgagggcagtggttcttgtctgctgtatccccagtacctaaaacaaggcttggtatgaagaaggtgctcagtatatactggatggacaaatgattgaaggagttatgtaaataatgtgattgacaatctattagcttagaataatatctcaatgcagcagccatgaaaatcttcagagrtaatacgaagttgcttcttaatcaggactttcttttttaagagaggccatatgggagtctcttcttttgaatgtgctagaaatagggcagtcgtgtaagtgatattcttaaaatagcaaagcttatcagaactaggaacttcacaaggagtatgaccaaattaaaaaa

SEQ ID NO: 755353 - DNA, 624 bp, Homo sapiens
ctcctttttactattctcagcatccctacttcagtcaaggacctagtcgtttttcctttctattttattgacctatttacttcactgccttcattcttgttcacaacacatttgtgtaagtgatatcttggtaaataaaaagcagatgattcaaaagagattcatttcagtcctttcagtactctctcaagccttcacaatgaaacctaacttgttagcaaacatacaatatcatttatgtcccagcatacgactctttgtctgtcaggatgtctccattcaccactcacactgactcaaacttcttgaactatttagagtcttcttgatgtactctaatttctctggcctttgctccactttttctcctgcatagacagctaccacctcccaccgtcattatcctgggtgacttctacacatctttcaagactaatttccctccaaagccttctctgactsccaggggtgaatcaggtaaccttcatttgtattatagacatcagcttttgccttcacttatactgggttatgatttttgttgttatttgtttttttactgttcattctcctcaatgaatacattgtcttccataactgcatcctatccctgtattacaaata

SEQ ID NO: 755354 - DNA, 618 bp, Homo sapiens
tgaccagatttatcatatttctcccaaaactgtttcttctcctctgtttcttttcttaatgtggtcacctcacaaatgtcacctctttgtgaggactagtactccaacagacttggggtggccctcactgtgtacctgtctaaatggtcagcctccctacctccttytccttctctcaaaagaaagataggtcacatattaatctatcctcatctaagtctcttttgcctggaggcttaagtgtttcccaactgattatgataagtccatgcagaaatttgtcctctgttcttcaactctaaggggctcaattaattcaatcacccagacatagagggtatggctgcatctggaactgttacagtccttttgggagaggattgatatttaaactcattttcccctcccaagttctgaatcaactgaagaatgaaaaaaaagagaaagtatatgtgagaacaaaacattgcctgtagaaatgaaagagttgatattagagaatgtggtttatgttcatggacacatatgtttttgtgttctgaatcccagaatttgacactctttctttctgtcactgaaaatattgtctctgggaagacactcaggtcttcccaatga

SEQ ID NO: 755355 - DNA, 618 bp, Homo sapiens
tgaccagatttatcatatttctcccaaaactgtttcttctcctctgtttcttttcttaatgtggtcacctcacaaatgtcacctctttgtgaggactagtactccaacagacttggggtggccctcactgtgtacctgtctaaatggtcagcctccctacctccttctccttctctcaaaagaaagataggtcacatattaatctatcctcatctaagtctcttttgcctggaggcttaagtgtttcccaactgattatgataagtccatgcagaaatttgtcctctgttcttcaactctaaggggctcaattaattcaatcacccagacatagagggtatggctgcatctggaactgttacagtccttttgggagaggattgatatttaaactcattttcccctcccaagttctgaatcaactgaagaatgaaaaaaaaragaaagtatatgtgagaacaaaacattgcctgtagaaatgaaagagttgatattagagaatgtggtttatgttcatggacacatatgtttttgtgttctgaatcccagaatttgacactctttctttctgtcactgaaaatattgtctctgggaagacactcaggtcttcccaatga

SEQ ID NO: 755356 - DNA, 665 bp, Homo sapiens
aatatccccatgtaaaagaataaggttggacccttatcttaacccacatacaaaagttaattcaagtggatcaaagacctaaatgtaagatttaatactacaaaactcttagaagaaagcataggggaaattcttcatgatcttggattaagcaatagattcttagttatgacatcaaaagcatgagcaaaaaaaaagaaaaaagaaagataaattccaccatattagagttaaaaacttttttgcttcaaaggaaactataaagaaagggaagaaacaacctacagaatggaaggaaatatttgcacatagtatatctgatcaaggatgttatccagaatcatttaaacaatctaaattcaatacaaatcccccaattaaaaatgggaagagaatttgaatatgtatttctctaaattagacatacaaatgattaataaatatataaaagatccttgatgtcatctgtcattagaaaaatataattcaaacccagaataatatattrcttcacactccctataaccatgtgaacaacgtagcctcaaaattccttcaccagcatacatcatctaatcttccacaattcacttcagaacttccctaccagggccatgatctgtcagcagtaatagcactttccaccactgtgaggttcataaatt

SEQ ID NO: 755357 - DNA, 580 bp, Homo sapiens
agttctcctccactgattaatcattttcctcatcctttcctccccgtcccatgtgccctaagaacaaagagcttgtaaaccaataaattgggcggagcctgagagctctgggccctgagcaagcctccgacactccggtcccctggacccgcgttttaaacgtttattctgtctccttctaactcctttgtctccgccggactcggggtacccgctgggtggtgtggggctggtttccccaacaggtttgtgcaaagcaggaggtacactgaaagacatacaaagagcatcacatagcctgaagcataatgtgcatgtggtggcgtggcttggcacagattctaagatgtgaaagaaagacctcagagacgtagtagcagcgtctttttaaaaatatggaattaaacttaaccaccagggtaatcattasagatggtaattccttcttagaaagtctactcaaatttttgtatttaatattattttcaaaaaagtgatgcaattaattgcagtattttgcaaataaaaactgatcatcttgctttatacacaggataaatggactttgaaggagacattg

SEQ ID NO: 755358 - DNA, 639 bp, Homo sapiens
attattttcaaaaaagtgatgcaattaattgcagtattttgcaaataaaaactgatcatcttgctttatacacaggataaatggactttgaaggagacattgttaggaaaacggatatgatgcaatagatgcatggtcagtgtaactaggggctaagggtgcagrtatgaaaatagaaaagaaagaaaatatcagaaagatcacagaaagtatgtgatcagagtcaggctttattctggagtaaaagagagatttggttctctagtacattaaattaactgatattttaaagtcaacaaagagaggagatgctgttggaattgagggaatgagggcaaaatagcagtttttgagtgaatttaggagacaagaataaagaagtgaagagaaaaatgattggatgtcacagagttttacaataaaagttatacagatgattattaaccttcttatctctttagcagtgagtaagtgggttgaaaaaaattgatctcgaaagtaaggttcttgttactaaaaatccaaggttaaaattgtgctacaatttgaatatggaaatgctcatctgagaaagtttgggtaatcaaacatatgtgtactttactttgtttctggaccatctgttatttttattagtaa

SEQ ID NO: 755359 - DNA, 639 bp, Homo sapiens
attattttcaaaaaagtgatgcaattaattgcagtattttgcaaataaaaactgatcatcttgctttatacacaggataaatggactttgaaggagacattgttaggaaaacggatatgatgcaatagatgcatggtcagtgtaactaggggctaagggtgcagatatgaaaatagaaaagaaagaaaatatcagaaagatcacagaaagtatgtgatcagagtcaggctttattctggagtaaaagagagatttggttctctagtacattaaattaactgatattttaaagtcaacaaagagaggrgatgctgttggaattgagggaatgagggcaaaatagcagtttttgagtgaatttaggagacaagaataaagaagtgaagagaaaaatgattggatgtcacagagttttacaataaaagttatacagatgattattaaccttcttatctctttagcagtgagtaagtgggttgaaaaaaattgatctcgaaagtaaggttcttgttactaaaaatccaaggttaaaattgtgctacaatttgaatatggaaatgctcatctgagaaagtttgggtaatcaaacatatgtgtactttactttgtttctggaccatctgttatttttattagtaa

SEQ ID NO: 755360 - DNA, 639 bp, Homo sapiens
attattttcaaaaaagtgatgcaattaattgcagtattttgcaaataaaaactgatcatcttgctttatacacaggataaatggactttgaaggagacattgttaggaaaacggatatgatgcaatagatgcatggtcagtgtaactaggggctaagggtgcagatatgaaaatagaaaagaaagaaaatatcagaaagatcacagaaagtatgtgatcagagtcaggctttattctggagtaaaagagagatttggttctctagtacattaaattaactgatattttaaagtcaacaaagagaggagatgctgttggaattgagggaatgagggcaaaatagcagtttttgagtgaatttaggagayaagaataaagaagtgaagagaaaaatgattggatgtcacagagttttacaataaaagttatacagatgattattaaccttcttatctctttagcagtgagtaagtgggttgaaaaaaattgatctcgaaagtaaggttcttgttactaaaaatccaaggttaaaattgtgctacaatttgaatatggaaatgctcatctgagaaagtttgggtaatcaaacatatgtgtactttactttgtttctggaccatctgttatttttattagtaa

SEQ ID NO: 755361 - DNA, 539 bp, Homo sapiens
gacaaagtgccacctaaacattattgcacaaagaactacaatacaaaggttatgaaaaacaatatgcactaccaatggtaataagtataatagtcacaagccttatttttaggaagctcatagtctttaaatcagtattctgcttttagccaataatacaatrgaggtacaaagactttttgctctattattcacaaaagcaaaaagttaaaatctaaatgtttgcttaacattaatccttctagactttctattcatgcttctctctatgaagtgaatactcctgtactttcaaacagcataatggacctgcttaaatttacattttaaatattttatgttttcttgaagattttaactgttttcaccaaaatgcccaatttcattcaccatttctggtgttcttccattacttctcttgccacattttattgcaaatttttattttcagttacgttctcccattggaagaatgtggagaaaaagtgactttatttctaatttactagattcctaccacttattactacgttgggctt

SEQ ID NO: 755362 - DNA, 539 bp, Homo sapiens
gacaaagtgccacctaaacattattgcacaaagaactacaatacaaaggttatgaaaaacaatatgcactaccaatggtaataagtataatagtcacaagccttatttttaggaagctcatagtctttaaatcagtattctgcttttagccaataatacaatggaggtacaaagactttttgctctattattcacaaaagcaaaaagttaaaatctaaatgtttgcttaacattaatccttctagactttctattcatgcttctctctatgaagtgaatactcctgtactttcaaacagcataatggacctgcttaaatttacaktttaaatattttatgttttcttgaagattttaactgttttcaccaaaatgcccaatttcattcaccatttctggtgttcttccattacttctcttgccacattttattgcaaatttttattttcagttacgttctcccattggaagaatgtggagaaaaagtgactttatttctaatttactagattcctaccacttattactacgttgggctt

SEQ ID NO: 755363 - DNA, 605 bp, Homo sapiens
actgctctctctgcttttgaaaatgtttgtgagtgttcatatttagttaataaaaacagcgttcacaaagaatttccccaggaagataacattaaagagccagattggaagaagtgaaagattcaggtgcagtaatagcaattacaagctgttgaaatcattgcatgcctggaaggytctagaaacagtaagaaggtaagtgttgctagagtggaatgagagaaattgagaatattaggagatgtgtaggagccagattgtgtaggtcattgtaagaatttctccatgagtaagatgggaagtcattggagaggttcaggagagaaaagtaatccaatttgaattttagaagcatcactatggctgtgctgcttagacaacagtagagataagcatggaattcctgagactagtcagttggctatttcaaaatgtagaagatggtggcttggggcaaagtgatatcaatggagttagtgagatgtggtcagcccctgaatttgttagcaggtggcatcaataggatttgctgaaggaaaaaatgtgggttgtaatttatgagagaaagaaaagactcatggatgattccaaagtttgggcccatg

SEQ ID NO: 755364 - DNA, 605 bp, Homo sapiens
actgctctctctgcttttgaaaatgtttgtgagtgttcatatttagttaataaaaacagcgttcacaaagaatttccccaggaagataacattaaagagccagattggaagaagtgaaagattcaggtgcagtaatagcaattacaagctgttgaaatcattgcatgcctggaaggttctagaaayagtaagaaggtaagtgttgctagagtggaatgagagaaattgagaatattaggagatgtgtaggagccagattgtgtaggtcattgtaagaatttctccatgagtaagatgggaagtcattggagaggttcaggagagaaaagtaatccaatttgaattttagaagcatcactatggctgtgctgcttagacaacagtagagataagcatggaattcctgagactagtcagttggctatttcaaaatgtagaagatggtggcttggggcaaagtgatatcaatggagttagtgagatgtggtcagcccctgaatttgttagcaggtggcatcaataggatttgctgaaggaaaaaatgtgggttgtaatttatgagagaaagaaaagactcatggatgattccaaagtttgggcccatg

SEQ ID NO: 755365 - DNA, 492 bp, Homo sapiens
atagaagggatgatatttaagtctctcttgatgtctgtagacaagaattgaagctatagagtagtgataggcttatagtaagcatgtagggctttctcttgaaaaaatattttggaaacagcagagtgtttatatttcccaatagtgtttttttataaaggcttcaaagagttctagttctcgattgtttccatttagtcaccagaaacttataaacttggttagtgctttacagtgcccggcagtgaatttgagcagcaaactgtaatcataatccatgacactacatgcatttcttaatctgcaaaagctatattgcaaataatgatataaaatctatagaratgattatcacttgggcattaatgtcacatctgtctgattattaccaagacttaaaaaaattacttatctccttagcatggaaataattgatcttaaaaccaatatttccatttacgaagtgcaaagtgcttacatatatatcatatg

SEQ ID NO: 755366 - DNA, 492 bp, Homo sapiens
atagaagggatgatatttaagtctctcttgatgtctgtagacaagaattgaagctatagagtagtgataggcttatagtaagcatgtagggctttctcttgaaaaaatattttggaaacagcagagtgtttatatttcccaatagtgtttttttataaaggcttcaaagagttctagttctcgattgtttccatttagtcaccagaaacttataaacttggttagtgctttacagtgcccggcagtgaatttgagcagcaaactgtaatcataatccatgacactacatgcatttcttaatctgcaaaagctatattgcaaataatgatataaaatctatagaaatgattatcacttgggcattaatgtcacatctgtctgattattaccaagacttaaaaaaattacttrtctccttagcatggaaataattgatcttaaaaccaatatttccatttacgaagtgcaaagtgcttacatatatatcatatg

SEQ ID NO: 755367 - DNA, 656 bp, Homo sapiens
ttttaagatagaagggatgatatttaagtctctcttgatgtctgtagacaagaattgaagctatagagtagtgataggcttatagtaagcatgtagggctttctcttgaaaaaatattttggaaacagcagagtgtttatatttcccaatagtgtttttttataaaggcttcaaagagttctagttctcgattgtttccatttagtcaccagaaacttataaacttggttagtgctttacagtgcccggcagtgaatttgagcagcaaactgtaatcataatccatgacactacatgcatttcttaatctgcaaaagctatattgcaaataatgatataaaatctatagaaatgattatcacttgggcattaatgtcacatctgtctgattattaccaagacttaaaaaaattacttatctccttagcatggaaataattkatcttaaaaccaatatttccatttacgaagtgcaaagtgcttacatatatatcatatgttttgatgctgatcgcataggacctttgcaaaaacattgttgtccctactttaaaaacgtgaaacttgatattaagaggttcactcacaatgaggactaacctgcacacaactaaaactatgatctagatcaccttactcttaccttacatcacttg

SEQ ID NO: 755368 - DNA, 367 bp, Homo sapiens
attttcttttcatcgttttttattaacgagtgaaaaaatatttccttagttcctctatcaggggagataaacattttacttttctgaattttgaaacgttttaccattgggtaattagctttttaataatcaattattattttgtgttattttacttttgagtttcaaatctgctttttaagattatataaagtatggyggtctcatttaaaatacagtgcttttttcactgtctatcttgacttccggtgatgaattttccgttttgttaaatttgagtcccaactttttttcaatatcagctcataatctggttattaatttaaatcccacagaatattgctggaagctgaccagtgtatgcaca

SEQ ID NO: 755369 - DNA, 608 bp, Homo sapiens
aggctctcttctgaggaaaaggctgtaatgtaaaaaaattctgctcatgcatacagagagacatgagacaaacttgtctgtcttggcctgaattccaagtcagaataatcatcattatccatatctatgggcctgtatgtgctgatgttttggattgagtttttactattcatgacattaggaatcttcagtgaaagatattaatgaaaaaatttgtctgtttatggcaaatcccactggatttcttatcamtagcaaaccatgtctatctctggatagacacaacttgatccaggtcatatgctatttatacagataaagctcagttgaatatgagttcataagtcaaaatcacaaaatataacaaacaggaaaatccatcacgaatgagtcagtagcaaaaaatcacaatatacaaatccacccctcctcccaaacctcacataccagataaattagactctaaattaaatgtttggtattgctaagggtataaagaactcgagtgcatagaaatattagaggctctgaaaagtaaaaagcagctttgaaagagaactatctcaaatttttataaataaaaatcattagtcatttaaaatagacaa

SEQ ID NO: 755370 - DNA, 614 bp, Homo sapiens
gggtttatttctgggttctctattatgcttcattgttacatgtgtctatctctctgcccatgccattccaaataaaccatagaattggtttgtatatttaattaattaattaattaatagtgaaagaaattgcattaaacctatagatcaatttggaaagaattgaaatctttgttgggtcttctaatctagctatgtgatatgtctctccatttatttagtttttaaaagatttaatctgcattttataattttcaagatatagatcctataaaatattttgtcaaatgtatatttaaatattttaatttttggaggaattgcaatggtattgtattttttcatttcagtttcacatgttattgttagtatataaaaatgagatttatttgtgtgtgttgatcttgtatggagtcattgctgaattcacattaattctagaagtaytttttggtacatttcttgaaatttctacataaacaaccatatcctctgcaaacagaaataattttattctttttcaatctttagaattttatttctttttctcaacttattgcaatgactaggacctctagtactatgttgagtaagaatggacagaatgaacatcc

SEQ ID NO: 755371 - DNA, 623 bp, Homo sapiens
agagagctggtcatttcactgatgctttgtcagatcataatggctgctgcaatacgtgagccaggatttttttgtttgagctgaattacatacagtacttagaaaccagatctggggcaaagctctctctttggcaaagttggggtgcagatggagggattgctctccattggctctcatgatgattctttccctgtatctgaggcttcttacagatttatatgccagagccaagtctccaagggaaacccaaggtgttacagccagtgatattgatgatttagtaggtaatgttctttttgtacattttaaatgaaaacagtgggttacgaggaaccatccttcagctgagtcataaaaacmagttcctgccctcttgcagttaaaaattcatgaagcgttttccaaaaggctgtttcgaatcaggcttgattattttctttctctctctacttaaatattatctatatgttaaatacttttagaggtctttacttttgccaacgaattgtaatccggtgtttctggataatcaagtataaatgattatcctacttaccatttagttaagttaaagaaaaatataagcatcatagggaaaccaaacaacaacaaaaaaactg

SEQ ID NO: 755372 - DNA, 657 bp, Homo sapiens
aattcggaaatgagatatcaagctctaaaacaatgccgagaaagcttaaataatattgctaagtgaaagaaatcagtctgaaatggctatatactgtgtaatttcaattatgtgacattctggaaaaggaaaaaactatacaaacgtaaaaactcactggttgccagaggtttaggggaagagacaggaatgaataggtgaaacacagtggatttttggggcagtgaaactgttctgtataatactataatggtgaatacatgacctgatgtgtttgtcaaaacctgtagagctttacaacataaagarcaaaccttcatgtatgcaaattaaaaacatcatttaggaggtcaggggattgagtctagaaaagaaatggccatttctaggactggggaagaaaatatgcaatatgaacctgagcagcctagcaacttgtagtgtcaaaaacaaagaagtgctcaaatttttttttttaaaaaaatgacaaacacattgatgtatgttaaaagaatgcaagagtcaactgaaagaactcttagtagccaaagctggaacaatttgagcaaaaaataaagtagtattggattataatctaaaatataaaatagatattcatgagaccataatgatacacataaacgatttcataaatta

SEQ ID NO: 755373 - DNA, 657 bp, Homo sapiens
aattcggaaatgagatatcaagctctaaaacaatgccgagaaagcttaaataatattgctaagtgaaagaaatcagtctgaaatggctatatactgtgtaatttcaattatgtgacattctggaaaaggaaaaaactatacaaacgtaaaaactcactggttgccagaggtttaggggaagagacaggaatgaataggtgaaacacagtggatttttggggcagtgaaactgttctgtataatactataatggtgaatacatgacctgatgtgtttgtcaaaacctgtagagctttacaacataaagaacaaascttcatgtatgcaaattaaaaacatcatttaggaggtcaggggattgagtctagaaaagaaatggccatttctaggactggggaagaaaatatgcaatatgaacctgagcagcctagcaacttgtagtgtcaaaaacaaagaagtgctcaaatttttttttttaaaaaaatgacaaacacattgatgtatgttaaaagaatgcaagagtcaactgaaagaactcttagtagccaaagctggaacaatttgagcaaaaaataaagtagtattggattataatctaaaatataaaatagatattcatgagaccataatgatacacataaacgatttcataaatta

SEQ ID NO: 755374 - DNA, 507 bp, Homo sapiens
taacataatcagcttgcaattttattttaaatatttttggttaaaattaaaaagtaaagctaaaagtaaaaaatcatagagccgatttggtggtctaaagaagagagtaacaaggcagtgggtaccaaaagtggaagaaaggatagaagggagagaagagacacccaaatatgaatagttcgaacctgggaccattaacgaaaaacatgttttgcctcaggctggccttagaagtcagagaagatatggcagaatcttcttggtaatagtcatatcagctgtttaatttatttgttgcctacccaaagtgtacttgttcyggggaggaagggagagagctcagagaatatataattcttcagcttcaccccagtcaaaagtttttctttctgtattgaaaatagaccactcaggactcatggaagcatccttatttgtgaaccattcaccttacaattactgggggtgtacaaagacacactacaactaaaagttaaggttttcttt

SEQ ID NO: 755375 - DNA, 657 bp, Homo sapiens
aattcggaaatgagatatcaagctctaaaacaatgccgagaaagcttaaataatattgctaagtgaaagaaatcagtctgaaatggctatatactgtgtaatttcaattatgtgacattctggaaaaggaaaaaactatacaaacgtaaaaactcactggttgccagaggtttaggggaagagacaggaatgaataggtgaaacacagtggatttttggggcagtgaaactgttctgtataatactataatggtgaatacatgacctgatgtgtttgtcaaaacctgtagagctttacaacataaagaacaaaccttcatgtatgcaaattaaaaacatcatttaggaggtcaggggattgagtctagaaaagaaatggccatttctaggactggggaagaaaatatgcaatatkaacctgagcagcctagcaacttgtagtgtcaaaaacaaagaagtgctcaaatttttttttttaaaaaaatgacaaacacattgatgtatgttaaaagaatgcaagagtcaactgaaagaactcttagtagccaaagctggaacaatttgagcaaaaaataaagtagtattggattataatctaaaatataaaatagatattcatgagaccataatgatacacataaacgatttcataaatta

SEQ ID NO: 755376 - DNA, 679 bp, Homo sapiens
tttgtcaaaacctgtagagctttacaacataaagaacaaaccttcatgtatgcaaattaaaaacatcatttaggaggtcaggggattgagtctagaaaagaaatggccatttctaggactggggaagaaaatatgcaatatgaacctgagcagcctagcaacttgtagtgtcaaaaacaaagaagtgctcaaatttttttttttaaaaaaatgacaaacacattgatgtatgttaaaagaatgcaagagtcaactgaaagaactcttagtagccaaagctggaacaatttgagcaaaaaataaagtagtattggattataatctaaaatataaaatagatattcatgagaccataatgatacacataaaygatttcataaattaattaatgagagaggacacaagtttctcatacaaaagaatttcaagtaagttatgtagatattccactctacagggaaggaaacgtaactctacactccttaggatgttctgtgcattgcgacttcttgccaaagagcacatgggaaagggggaaaaagggtaacctcatagtggacaaacctgacaaaaactacttcagccaggagatcaaggtcaacatcatcagcgatcaatcttgttgatagtatgtacaatgaaaagggcactttacttctgtaatttttctcccccaaac

SEQ ID NO: 755377 - DNA, 651 bp, Homo sapiens
gggcttcaaactagaatgtgcctatgtctgagtgttctcctgcacagagaattttaaggaaataaatgtttccatcctctttttacaatggttcttctcccatatatagaaaagtattaacttgtcacccatcacaaatcttaacacagaatgcatactggtgtgtaacaacctcagggctcctaacataggmatacaaattgtattttgcttcaggggaagactcctttaaaaattaatcaaagctcctaaaatcttgtcttggcttgtcatacacatatttgtagctagagtgaagttctgcgttagacacagggtatttggcccttgcttaagactgaattgacaaagtcttaagtagaataatgaaagttgttattttaaatgtaactagactatttgttaaggcttccacattttgggttatttgaatataatccacagataaaaatttaaatgatttctactggtgtattttagtcaataaagcagttaaaatttcatgaaaatatatgaaatgtttattcctattacagtaaatccttatcctattttatctcataaatataatgatatataatacttatgtttgtgataatataatttgatataaaatacaatatttttcacctcctaaaaataataaataaa

SEQ ID NO: 755378 - DNA, 680 bp, Homo sapiens
atttaataatctccattctcagctagttagctcttccatgacatcaaccccattttatctctttcaaaatacagttgccctttgaacaacatgggtttgaaccgcactacatggcttttcttccacctctgccacccctgagatggcaagacgaacccttgccctgtctcctcctcctcagcctactcaacatgaagaagacaggatggagggcttcataatgatccacttccacttaatgagtagtaaacgtgttttcttttcttcatgattgtcttaataacattttcttttctctagctaactttattttaagaatacagtgtataggctgggcacggtggctcatgcctgtaatcccagcactttgggaggctgaggcgggaggatcacgaggtcaggagatcaagaccatcctggckaacacgatgaaacctcatctctactaaattagccgtgtgtggtggtgggcgcctgtaacccagctactcgggaggctgaggcaggagaatggtgtgaactcaggaggcagagtttgcagtgagccgagatcccaccactgcactccagcctgggcaaaagagtgagactttgtctccaaaaaaaaaaaaaaaaaaaaaaaaaaaaaaagaatacagtgtgtaatacatataacatataaaatatgtgttaattgactg

SEQ ID NO: 755379 - DNA, 411 bp, Homo sapiens
ttacatttatataaggtggacaaaaggggtttagtttcattaatcattgacttcaaacacagcaataacaaccaccacctcaaaaacaatattaactaacagtttgtgaggacttaacattttgcaatcattgctttaagcatcacacttgcaaacctgtggggtaggtaatatttttaaccttctcagcactggagtatattgatctgttatttttcctgttttacaagtgaggaaactgtagttcaaatacattaagtaatttgtccaatggwtgaaaacaggcagtctgactaaagaatctgtacaattaactcctacactaaactgtccccatagctaatttttgttttttaaatcaaataaagttacaaaaagaagcaaccaaatattttaattagtggctcttat

SEQ ID NO: 755380 - DNA, 587 bp, Homo sapiens
ccttcggccgtacctctgcgtgggggctgcctccccggctcccggtgcagacaccatggtaagtgctctcagccgggtgcggcccgaacctcacccctcctcggccggcctggcagcgagggaactggccgcgcagccggagcttggctcgggggccctgggcgctcactgccggccacgggagcagcctcactccttgccckcgcccagtcaggggaggtgggaacgccgcgagtcgtggcgggggcgatcggtgcctttgcttcccaggcgggtttgccgctccacaccgcagcttcctgagctcgggaaggggaggtgcggcggaggcgtggggtcttcccggctctggccggccccaccagtgtgggaggctgagcgccagcggaagggaaggctccgggttcgcgtccccgcgctgcccccgatgcccagcctctcccggagcggtgacaggtgaggagggtgggaagatagcgtgggggtggggcggatggtgacggggagaatccaccagggattggggggttgcgcccccacgatccgactcctttagtgcatagtacccctaagggagaggagtcagg

SEQ ID NO: 755381 - DNA, 587 bp, Homo sapiens
ccttcggccgtacctctgcgtgggggctgcctccccggctcccggtgcagacaccatggtaagtgctctcagccgggtgcggcccgaacctcacccctcctcggccggcctggcagcgagggaactggccgcgcagccggagcttggctcgggggccctgggcgctcactgccggccacgggagcagcctcactccttgccctcgcccagtcaggggaggtgggaacgccgcgagtcgtggcgggggcgatcggtgcctttgcttcccaggcgggtttgccgctccacaccgcagcttcctgagctcgggaaggggaggtgcggcggaggcgtggggtcttccyggctctggccggccccaccagtgtgggaggctgagcgccagcggaagggaaggctccgggttcgcgtccccgcgctgcccccgatgcccagcctctcccggagcggtgacaggtgaggagggtgggaagatagcgtgggggtggggcggatggtgacggggagaatccaccagggattggggggttgcgcccccacgatccgactcctttagtgcatagtacccctaagggagaggagtcagg

SEQ ID NO: 755382 - DNA, 625 bp, Homo sapiens
ttgcatccatatgttgaataagatagcaattaaaactgatacacagcactttgggaggccgaggtgggtggatcacttgaggccaagagttcgagaccatcctggccaacatggtgaaaccccctctctactaaaaatacaaaaattatccaggtgtggtggtgggttcctgtggtcccagctactcaggaggctgaggcaggagaatggcctgaacccgggaggtggaggttgcagcgagccgagatcctaccagygcactacagcctgggtgacaaagtgagactctgtctcaaaaaactaaaaaaaatgtgatacagaaaatttaagttttaggaaatattaatgattgtttattaagaaaaaagcaggacaccagggtacatgttatatgtaatcaagttattaaatatacatatttatataaagacttttgtatcaaaatattgtcatgtgcattcttgatgattttaaaaatctgtgttttttggaaaaaagaagtagtatatcaaatatatgctttaaaatggtcaaaattaagtacagggtgagtatctcttgtctaaaactcttgagaccagaagtgtttaggctttcagattttttttggattttggaatacttg

SEQ ID NO: 755383 - DNA, 625 bp, Homo sapiens
ttgcatccatatgttgaataagatagcaattaaaactgatacacagcactttgggaggccgaggtgggtggatcacttgaggccaagagttcgagaccatcctggccaacatggtgaaaccccctctctactaaaaatacaaaaattatccaggtgtggtggtgggttcctgtggtcccagctactcaggaggctgaggcaggagaatggcctgaacccgggaggtggaggttgcagcgagccgagatcctaccagtgcactacagcctgggygacaaagtgagactctgtctcaaaaaactaaaaaaaatgtgatacagaaaatttaagttttaggaaatattaatgattgtttattaagaaaaaagcaggacaccagggtacatgttatatgtaatcaagttattaaatatacatatttatataaagacttttgtatcaaaatattgtcatgtgcattcttgatgattttaaaaatctgtgttttttggaaaaaagaagtagtatatcaaatatatgctttaaaatggtcaaaattaagtacagggtgagtatctcttgtctaaaactcttgagaccagaagtgtttaggctttcagattttttttggattttggaatacttg

SEQ ID NO: 755384 - DNA, 625 bp, Homo sapiens
ttgcatccatatgttgaataagatagcaattaaaactgatacacagcactttgggaggccgaggtgggtggatcacttgaggccaagagttcgagaccatcctggccaacatggtgaaaccccctctctactaaaaatacaaaaattatccaggtgtggtggtgggttcctgtggtcccagctactcaggaggctgaggcaggagaatggcctgaacccgggaggtggaggttgcagcgagccgagatcctaccagtgcactacagcctgggtgacaaagtgagactctgtctcaaaaaactaaaaaaaatgtgatacagaaaatttaagttttaggaaatattaatgattgtttattaagaaaaaagcaggacaccagggtacatgttatatgtaatcaagttattaaatatacatatttatataaagacttttgtatcaaaatattgtcatgtgcattcttgatgattttawaaatctgtgttttttggaaaaaagaagtagtatatcaaatatatgctttaaaatggtcaaaattaagtacagggtgagtatctcttgtctaaaactcttgagaccagaagtgtttaggctttcagattttttttggattttggaatacttg

SEQ ID NO: 755385 - DNA, 640 bp, Homo sapiens
gtaagcactaaaacagatggaaaatagctcctgaacaattcttatattgattgtttggtcaaatgaaatctattcttaaaattaaattttaaggccaggcgtggtggctcacacctgtaatcctagcactttgggaggcagaggcaggcggatcacctgacgtcacgattgtgagatcaacctggccaacatagtgacactccaacttcattaaaaatacaaaaattagccgggcatggtggtgcacatctgtagtcccagctacttgggaggctgaggcaagagaaacgcttgaacaagggaggtggaggttgcagtgagccgagattgtaccactgcaccccagcctgggcagtgagccgagatcacaccactgtaccccagcctgggctatagagtaagactccgtctcaaaaaaaaaaaaaaaaaaaactaaattttgcttatttctttctacatttttacargaaaatccaaaattatatatgtgtctcgaactatatttctactggatgtctccatcctggacttttctacaacaaataactgtcactctttataattttaactccctgcataccgttttctgcccaccatctttctgtttacagcttacttgttttaccatcctgacctcagc

SEQ ID NO: 755386 - DNA, 509 bp, Homo sapiens
aactggggagagttaatttctcaaactttaacctagtttgcttaggattgggctcaggggaagggaacccagaagcctgacatgctggctaaagggtaaaagtttttttttttttttttaccagttaggtttttggcctccctctccctgtgcaaactggtaaaaggcctcagaattttttagctgtcctcaaccccacccccattttgttttgatacatgttttctataayctggtttatttctcaccttcaggcaatcaaactccaaacgttcatgcaactggagacttggatgagggccccttttgccagggaccctttgataggcttctgagggagctctgactgccgttttccccaagcagtgccccctgtcagcagaaagcagttcagatgagtctttgtccttatccttattccaacagcagttaggtatacttctttagagggggaaatgatagagacaggaggcagccaagggtcccccagtgaaaccctgccttcaagc

SEQ ID NO: 755387 - DNA, 526 bp, Homo sapiens
ttgagagacaaagcaaaaaaaaaaagacattatttggggagaagttgaaatccctggttttctttgtaaagcatttgatcatgggggtatgatttcttctgagttttattatcagataaatgtatttaaatatcagtgagaaactcagtagatttcagccaaactagcctttcagttttttgtcaaattgcttttgagttcagttcagttcctagttmtttcctggtttgggtctttataatcgctgttctgcattttgttaggtctttctagcacataatgatcaaatctgataactttagctgttgctagtttaagaaacagttattgtccatgtccttctctatttttttcctttccaatattatattgcattttgctctaattgttttcctatttcaagaaattgagattagtacttatatcaatatggagaatattcataagataaaaagatctattgctattcactgtattttttattttgaataaaaatcaaaacatttgttaagcgcagatagattga

SEQ ID NO: 755388 - DNA, 562 bp, Homo sapiens
caaatgaaaagagtaaacagataaggaagggaataagaaaggatcttataagcagagaaaacagtgctttcaaattcttggaagtatgagagaatatagaagagtttggaaactaaaaatagattgatacgttaagatgaaaatattcattgatttattcattcaacaacatatcttaggagagaaggaagaaggccagagtggaagcagaagtccagatcaaaarcatctttatataccatgataagaagtttgaaatctcttctttagggaaaaagttttcaacaggagagctatgatcagagttacattctaataagatcactcaggtagtggatgagagagtttttaagaaggaagagacttgttgtagggaatctatttcagtgaaacaggcaaatgtgatgtctgcctaaaataaaacaatgatgagggttagcagtttgtgtgtgtgctgaagggtagatttgagtatttaggaaatagaatgaacaagtcttagtgatttattattagcagcagaaaagagagagaatatagtctgtcatgactcccaaagttc

SEQ ID NO: 755389 - DNA, 562 bp, Homo sapiens
caaatgaaaagagtaaacagataaggaagggaataagaaaggatcttataagcagagaaaacagtgctttcaaattcttggaagtatgagagaatatagaagagtttggaaactaaaaatagattgatacgttaagatgaaaatattcattgatttattcattcaacaacatatcttaggagagaaggaagaaggccagagtggaagcagaagtccagatcaaaagcatctttatataccatgataagaagtttgaaatctsttctttagggaaaaagttttcaacaggagagctatgatcagagttacattctaataagatcactcaggtagtggatgagagagtttttaagaaggaagagacttgttgtagggaatctatttcagtgaaacaggcaaatgtgatgtctgcctaaaataaaacaatgatgagggttagcagtttgtgtgtgtgctgaagggtagatttgagtatttaggaaatagaatgaacaagtcttagtgatttattattagcagcagaaaagagagagaatatagtctgtcatgactcccaaagttc

SEQ ID NO: 755390 - DNA, 475 bp, Homo sapiens
ctccacccaacaacaacaaaatatacattcttctcatccacacagggtacatactccaatattaactacatgctcgaccataaagcaattctgaccaatatccctgatgaacattgatgcaaaaatccctcagcaaaatactagtaaatcaaattgagcagcacatcaaaaagctaattcacctgattgatatggtttggctgtgtctccacccaaatcttattttgaattgtagcttccataatccccacatgtcacrggagggaccaaatgggaggtaattgaatcatggggatgggcttttccagttctgttcccatgatagtaagtctcatgagatcaaatagttttataaaaggcagttcccctgcacacactctctttcctgccaccatgtaggacatgcctttgctcctccttcaccttctgccatgattgtgagacctccccagccatgtggaactgtgagtccatt

SEQ ID NO: 755391 - DNA, 580 bp, Homo sapiens
agctgaagtacagtggtgcaatcatagctcactgctatcttgaactcctggacttcaatgatcctcctgcctcagcctcccaagtagctgggattacaggtataagccatagtgcctggctctcaacaccatttttgaaagagacaggtttttccactattttgtattcttgacatacttcttgaaaatcagttgaccttatatgcacacataggtttatttccagacccactattccattagtctatatgtctggttcattttgttttattgcattgtattttattttataccagtaccataccagtttaattactgyagctttataatatgttttaaaatcgggtgtgtgacacctctagctttgttcttgctcgaaattgccttggccatttggggcatttttatagttccaagtgaatttaatattttttcctatttttgtaaaaaatactattaaagttaaatctacagattgtcaaatctacaggaaggatagacattttaacaacatttattctttcaatccatgaacttgggatggtcttccatttatttatgtcttttaaatttttttggt

SEQ ID NO: 755392 - DNA, 584 bp, Homo sapiens
ctagatgcccatcaatgatgcactggataaagaaaatgcagtggatatacaccatggaacactatgcagccattaaaaaaagaatgaaatcatgtctttgcagcaacatggagttggagggcatttattctaaggaattaacacaggaacagataatcaaacactgcatgttctcacttataagtgggagctaaacattgagtacacagaaacaaacaaaaaaacgagagacgctggggcctacttgagggtggggcatcagaggagactgaagataaaaaaactacctatcaggtactatgcttaccacmtaggtaacaaaataatttgtataccaaactccaatgacacacaattcacccacgtaataaacctgcaaatgtacccccaaacttaaattaaaaactgaaagggaaaaaaatacaaggaggtggtaagtcgtagttccatatgggcacagggcaaaatcagaggttattcatgcagatgcaggacccacagatttatcaatcaatgaaacttatgcctaacaaaaggagtacaaagttttgatttcacaaatcttgtcaacaaaaatggaattt

SEQ ID NO: 755393 - DNA, 591 bp, Homo sapiens
ttcttcatgcatatcttgcataccccattgtagtattttctctaaaattgtcttaaagtttgtttcaaattaaggcctttattttcacaatgtcctgagaattgtatccatgaaaccaaagagttgaggttctagcaatattttaatacatgtaaaaatgaatctgtagccactaaataaagtacattgtctcggccgggtgccgtggctcatgcctgtaatcccagcactttaggaggccgaggcaggcrgatcacgaggtcaggagatcgagaccatcctggctaacacggtgaaacccagtctctactaaaaatacaaaaacaaaattagcctggcatgggggcgggcgcctgtagtcccagctactttgggaggctgaagcaagagaatggcgtgaaactgggaggtggagcttgcagtcagccgagatggcgccactgcactccagcctgggtgacagagccagcctccgtctcagaaaaaaaaaaatacattgtttcatgtattttatttaatcatcttatattttaccagccaatatgtgtgacatgctgcacgaccgcactagctaagtcaaggtcacaatta

SEQ ID NO: 755394 - DNA, 604 bp, Homo sapiens
aatgttcttgtgaggattttaacactttgtagctagcataaattaagtcttcaataaatgctatctaccattttaaaaaaatctttgaaggctttctactgcctacagaagaaagcctatccttgtcaacatgatatcccttcactgtgttttattactcagagcctcttctctgggatactgccctggttgccctgtgtccagtcctgcaggactggaccctttagattaatggagacttgggtatcaggtgtctttgctcagactctgctgccagcttgggaagtccatctccagctcctccgcttggacacatctgtcttakccaagactcaggtcaaatgtaaccgtttctgtttaaccttatctaatagctagtcagatttatttactccttcccctacattttcacaacattttggttatatcatctctctttccatccatctatccatccatcctttgatcctttcatccatccacccacctattcattggctgtcatacatagtaattaagagggcaagctctggaaccagattttcttagttcaaaagtcagattccaaaaccaaactgagtaaccttgatcaagttacttgatc

SEQ ID NO: 755395 - DNA, 530 bp, Homo sapiens
taattttgtcattttcagaatattctataaatggaatcatatagtaactaaccttttgtgattgacttttatcatcatgcataatttggtatctaggtaatactagcttcataaaatgaattgggatatattctctactcttctattttctggaagagattttgtatagactcagtgtaaattcttctttaaacatatggtagaattctccaatgtaatgatctaggcctggagatttctttttcttggagttttaaaattacaattcaattttcataatagctttatggctattcaaatgatctacttcatattggatattgggtgagttgtgggagtttatgttttttttaagaacrtgtccattttatataaattgtcaaatttatgtgtgtagagttgttcatagagttttcttattatgcttttgatgtctgcaggatctgtagtgatatcccctattttgttcttgatactggtaattggtgtcttctctctctctctctctctgtctctgtctctttttggtc

SEQ ID NO: 755396 - DNA, 646 bp, Homo sapiens
agcataactaagcctactgagttactaagtcataaagaaagtagaaatatagatgtttgggaaagtaagggatagcaggagtgtgtggcatcttaaaaatgccctagtatcaaattattgatgcaaagcagttggctactgtcttaaaaggaagggacatcaaccatctagacaagatcaaatatcaaagycgatgggttttgcaaactgatcatcttgttttcctcttaccaaggtaaagcaaggtgcttcgacacacctgatagattacagactgtatcaatatcactatatgagtaatgttgatctccataggatgtgtcaaccttcaaaaacattttaacaggtttatgtaattgtttgctatctcgttgttgggcagtatggataagaaaaagtgaatatttagctctaaatcctttgagcctcacttccttcaaaatacctgtcagatcatctgcaaaaattcactctaattgatcttaagacttaatggcaacatgttgagaaggagaattgaactgggttcccatgctaaatgtgtttaaagtcacttctctgatttattttctttctttcatggacagcaaattcaaacttaactatttgtacgtatcagtgaataccttttgttatgggtgtaaga

SEQ ID NO: 755397 - DNA, 646 bp, Homo sapiens
agcataactaagcctactgagttactaagtcataaagaaagtagaaatatagatgtttgggaaagtaagggatagcaggagtgtgtggcatcttaaaaatgccctagtatcaaattattgatgcaaagcagttggctactgtcttaaaaggaagggacatcaaccatctagacaagatcaaatatcaaagtcgatgggtttkgcaaactgatcatcttgttttcctcttaccaaggtaaagcaaggtgcttcgacacacctgatagattacagactgtatcaatatcactatatgagtaatgttgatctccataggatgtgtcaaccttcaaaaacattttaacaggtttatgtaattgtttgctatctcgttgttgggcagtatggataagaaaaagtgaatatttagctctaaatcctttgagcctcacttccttcaaaatacctgtcagatcatctgcaaaaattcactctaattgatcttaagacttaatggcaacatgttgagaaggagaattgaactgggttcccatgctaaatgtgtttaaagtcacttctctgatttattttctttctttcatggacagcaaattcaaacttaactatttgtacgtatcagtgaataccttttgttatgggtgtaaga

SEQ ID NO: 755398 - DNA, 542 bp, Homo sapiens
attgccctcaaaatttcaatatgaagatttaataagataatatcaagagagcatggagaagcaccttatttctttacacacttgtactaaaaaatatttgaaatgcaccactgtgttaggtgctatgctaagcactaggaagatagatgaggtcttagtccctatggggcatatarcctagtgtcgttgggagggagacaatatgaataaataaataaaacactaaagaaggtagcaagtatcctcacaactgcaatacagaaataaacatggtgataggctatagagtgggggcgtggaagggtgttttgggtgggttgatccaccctgaggtggtagatatttgatctgagacctgaagtattacactaactctttctacgaatatttatttaaagacctattatgtgccaggcactattctaggcactggagataaagcagggaacaagacagtgtgtgcttgtaactttagtgaggagatacagataaacaagtgtataagtaaatatagggggtgatctattttatggaggaaagtg

SEQ ID NO: 755399 - DNA, 669 bp, Homo sapiens
ccatttgtccaatattgctttgattcccttttattttgaggtcttactcaagaaatmtttgccgagaccgatgtcctgcatcatttcctcaatgttttcttctagtatttctaaagtttcagttcttgcatttgagtttttaattcatttttatttaatttatataaatcttgagagaaaggggtctagtttaattcttgtacacatgaatattgttttcagagcaccacttgttgaagagactttcctttctccaatgtggagattggtcaaaaaactacaaatagaattaccttgtgatccagcaattccactactgggtatgtattcaaaagaaaggaataaatatatcaaacaaatatctgaattcccatacatatcacagcactgttcacaataaccaagatatggaatcaacccagttgtccatcagtggataaatgattaaagaaaaggtagcatatatactcaatagacttttactccactataaaaataatgaaatcctgtcatttgtgacaatatggatggaaccggagcccattatggcccattatgttaagtaagccaggcaccaaaagacaaatgtcacatattctgactcgtatgtgatagcgaaaacacttgatctcatggaggtattgaatagaatggtggttactagaggct

SEQ ID NO: 755400 - DNA, 601 bp, Homo sapiens
cctgatgattactgatgttgaacattttctcatacacctcttggctatgtatatgtcttcttgtaaaaaaaatgtcagttcagagcatttgcctaattttctattgggttattattattactatttgctatccacttttttgagctccttatatgttaaggttactaactgtcagatgaatagttttgcacatattttctcccattctgtacgttgtctcttcactttttttattgtttcccttgcactgcagaagctttttagcttgaagtgatcccatttgtccaatattgctttgattcccttttattttgaggtcttactcaagaaatatttgccgagacckatgtcctgcatcatttcctcaatgttttcttctagtatttctaaagtttcagttcttgcatttgagtttttaattcatttttatttaatttatataaatcttgagagaaaggggtctagtttaattcttgtacacatgaatattgttttcagagcaccacttgttgaagagactttcctttctccaatgtggagattggtcaaaaaactacaaatagaattaccttgtgatccagcaattccactactgggtatg

SEQ ID NO: 755401 - DNA, 669 bp, Homo sapiens
ccatttgtccaatattgctttgattcccttttattttgaggtcttactcaagaaatatttgccgagaccgatgtcctgcatcatttcctcaatgttttcttctagtatttctaaagtttcagttcttgcatttgagtttttaattcatttttatttaatttatataaatcttgagagaarggggtctagtttaattcttgtacacatgaatattgttttcagagcaccacttgttgaagagactttcctttctccaatgtggagattggtcaaaaaactacaaatagaattaccttgtgatccagcaattccactactgggtatgtattcaaaagaaaggaataaatatatcaaacaaatatctgaattcccatacatatcacagcactgttcacaataaccaagatatggaatcaacccagttgtccatcagtggataaatgattaaagaaaaggtagcatatatactcaatagacttttactccactataaaaataatgaaatcctgtcatttgtgacaatatggatggaaccggagcccattatggcccattatgttaagtaagccaggcaccaaaagacaaatgtcacatattctgactcgtatgtgatagcgaaaacacttgatctcatggaggtattgaatagaatggtggttactagaggct

SEQ ID NO: 755402 - DNA, 669 bp, Homo sapiens
ccatttgtccaatattgctttgattcccttttattttgaggtcttactcaagaaatatttgccgagaccgatgtcctgcatcatttcctcaatgttttcttctagtatttctaaagtttcagttcttgcatttgagtttttaattcatttttatttaatttatataaatcttgagagaaaggggtctagtttaattcttgtacacatgaatattgttttcagagcaccacttgttgaagagactttcctttctccaatgtggagattggtcaaaaaactacaaatagaattaccttgtgatccagcaattccactactgggtatgtattcaaaagaaaggaataaatayatcaaacaaatatctgaattcccatacatatcacagcactgttcacaataaccaagatatggaatcaacccagttgtccatcagtggataaatgattaaagaaaaggtagcatatatactcaatagacttttactccactataaaaataatgaaatcctgtcatttgtgacaatatggatggaaccggagcccattatggcccattatgttaagtaagccaggcaccaaaagacaaatgtcacatattctgactcgtatgtgatagcgaaaacacttgatctcatggaggtattgaatagaatggtggttactagaggct

SEQ ID NO: 755403 - DNA, 500 bp, Homo sapiens
tcatcatgataagaaacccaccatagggttctatttaggtgcatgtctgcaacattaggatcagtacttagaataattcattatacgtagtagtagcttaaaaaaataggttataaatgaataaatcttgttggtggtctccacaggaggctaatgaattgtacctctctttgccaggatttctgaacaatttgaatgataacatttaaaaaatgaaagatgaaactgtaacattgtctttattactggaaaaacaaacaaaaacaaaaaagcaagttagaagacctggccttaggccatggctctgtatcatgaagtatctccacattgasgaagaggacctggagattccacaaaacctctttcctaggggcagctcacaaacaaaaaagggagagtaagagggttaagcctcttcaatgggtgtgtgattaaggtaaaatctcccttaaaaaatgggattatcccagcaactgatgaagctgagcatggaaaagcaa

SEQ ID NO: 755404 - DNA, 599 bp, Homo sapiens
tgcataagtaacaaaataaaaaagagatatattggtcttcatcagaattaaaatcttctgtgattcaaagtgcatcatcaaaaagtaaaaagaaaaaccaaagaagggagaaaatttttgctagccacataaggatctaatattcagtatatataaaacaygttttaactcaataataaaaaggcaaatatctaagtaaaatggccaattacttaaatgtacatttctccaaaaatgctataattataaccaagaaagacatgaaggtttgctcaactcctttgttattagggtaatgaatatttaaacaatgatggagttacatttcaccaatctaaaatgtgtattgttaagtgaaaaaagcaagtggaaaaggcaaaatactgtataattccatttacagaacactctggaaaagacaaatgtacaaaggtagtaaaaagattggtggttacaagaggcttgggagagagaaaacatgaatatgaattacagcagttttcttttcttttcttttctttttttttttttttttttgagacggagtcttgctctgtcgcccaggctggagtgcagtggtgtgatctcggctcactgca

SEQ ID NO: 755405 - DNA, 620 bp, Homo sapiens
agatattaatccaactacatcaataatcgttctgaatggcaaatggtgtaactgcataaattaaattagatttgccagagtggatgacaaagaagaccaattatatattttctccaaaaaaatctgcctttaatataaagccacatgtaaattaaaagtaaatagatgtagcaaatagcatagtagataacagtaatcaaagaaagcaagattagccatattaatttcagayagagcagacatcaaaataaggaaagttactaggaacaaaaattgacattacattaagatgaaggggtaagtctccaacaagagataacaacccctaaactgtatccacctaacaatagaacatcaacctacatgaggcaaaatgtgacagaaatggaaggatgaagagacgaattcaatattacacttggaaacttcaagaccctctatgagaaactgccagatccagcaggtagagttgcagtgaggacatagctgaactcaacagcaacatcagtcaactggttagaaatgacatctacagcctacttcatcaaacaaattcagactacacattcttcttaagctcatctggaatacatttaccaagacagaacacaatctggcca

SEQ ID NO: 755406 - DNA, 594 bp, Homo sapiens
tagaagaaactattttgaaattcatatgaaatcacaaaagagcccagacagacaatgcaatcctaagcaaaatgaacaaagccggaagtatcacattgcccgacttcaaactatactacagggctacagtaaaaaaaagagagcattgtactggtacaaaggtgagcacagaccaagtgaacagactagatagcccagaaataagtccacacacctatggctatctgatctttgacaaagcagacaaaaacaagcaatggggaaaagactccctattcaataaatggtgctgggagtactrgttagccatatgcagaagattgaaactggaccccatccttataccatatacaaaaatcaacccaagatggattaaagacttaaatgtaaaacccaaagctataaaaaccctgtaagacaacctaggcaataccattctggacataggaatgggaaaatatttcctgaaaaaaacgccaaaagcaattgcaactgaaggaaatactcacaaaagggatccaaatcaacttaagagctatacaacaaaagaaactatcaacaagtaaacagacaacccacagaatgggagaaaat

SEQ ID NO: 755407 - DNA, 594 bp, Homo sapiens
tagaagaaactattttgaaattcatatgaaatcacaaaagagcccagacagacaatgcaatcctaagcaaaatgaacaaagccggaagtatcacattgcccgacttcaaactatactacagggctacagtaaaaaaaagagagcattgtactggtacaaaggtgagcacagaccaagtgaacagactagatagcccagaaataagtccacacacctatggctatctgatctttgacaaagcagacaaaaacaagcaatggggaaaagactccctattcaataaatggtgctgggagtactggttagccatatgcagaagattgaaactggaccccatccttataccatatacaaaaatcaacccaagatggattaaagacttaaatgtaaaacccaaagctataaaarccctgtaagacaacctaggcaataccattctggacataggaatgggaaaatatttcctgaaaaaaacgccaaaagcaattgcaactgaaggaaatactcacaaaagggatccaaatcaacttaagagctatacaacaaaagaaactatcaacaagtaaacagacaacccacagaatgggagaaaat

SEQ ID NO: 755408 - DNA, 556 bp, Homo sapiens
gttaagcatctttttgggagtttattggacatttctacagctttttggaaaaatgtctattcattcatacaatttacctacttttaattaggctgggtgtctttttaatgttgcatttaagaatgtttcatgtgttcaggtgcggaggctcatgcctgtaatcccagcactttgggaggccaaggcgggtggattacgaggtcacaagattgagaccagcctgaccaacatggtgaaatcctgtctctacttwaaaaaatacaaaaattagctggtcatggtggcgcgagcctataatcccaggtactcgggaggcagaggcaggagaattgcttgaacccaggaagtggaggttgcagtgagccgagaatgctccactgcactccagcctggtgacggagcgagcctcagtctcaaaaaaaaaaaaaaaaaaaaaaaaaagaatgtttcatgtattctggacaatagtctcctaacaactatatgacttggaaatatgttcttccattatttgggttgtcttgatggtgtattttgcatcacaaaatgtgttaat

SEQ ID NO: 755409 - DNA, 556 bp, Homo sapiens
gttaagcatctttttgggagtttattggacatttctacagctttttggaaaaatgtctattcattcatacaatttacctacttttaattaggctgggtgtctttttaatgttgcatttaagaatgtttcatgtgttcaggtgcggaggctcatgcctgtaatcccagcactttgggaggccaaggcgggtggattacgaggtcacaagattgagaccagcctgaccaacatggtgaaatcctgtctctactttaaaaaatacaaaaattagctggtcatggtggcgcgagcctataatcccaggtactcgggaggcagaggcaggagaattgcttgaacccaggaagtggaggttgcagtgagccgagaaygctccactgcactccagcctggtgacggagcgagcctcagtctcaaaaaaaaaaaaaaaaaaaaaaaaaagaatgtttcatgtattctggacaatagtctcctaacaactatatgacttggaaatatgttcttccattatttgggttgtcttgatggtgtattttgcatcacaaaatgtgttaat

SEQ ID NO: 755410 - DNA, 556 bp, Homo sapiens
gttaagcatctttttgggagtttattggacatttctacagctttttggaaaaatgtctattcattcatacaatttacctacttttaattaggctgggtgtctttttaatgttgcatttaagaatgtttcatgtgttcaggtgcggaggctcatgcctgtaatcccagcactttgggaggccaaggcgggtggattacgaggtcacaagattgagaccagcctgaccaacatggtgaaatcctgtctctactttaaaaaatacaaaaattagctggtcatggtggcgcgagcctataatcccaggtactcgggaggcagaggcaggagaattgcttgaacccaggaagtggaggttgcagtgagccgagaatgckccactgcactccagcctggtgacggagcgagcctcagtctcaaaaaaaaaaaaaaaaaaaaaaaaaagaatgtttcatgtattctggacaatagtctcctaacaactatatgacttggaaatatgttcttccattatttgggttgtcttgatggtgtattttgcatcacaaaatgtgttaat

SEQ ID NO: 755411 - DNA, 556 bp, Homo sapiens
gttaagcatctttttgggagtttattggacatttctacagctttttggaaaaatgtctattcattcatacaatttacctacttttaattaggctgggtgtctttttaatgttgcatttaagaatgtttcatgtgttcaggtgcggaggctcatgcctgtaatcccagcactttgggaggccaaggcgggtggattacgaggtcacaagattgagaccagcctgaccaacatggtgaaatcctgtctctactttaaaaaatacaaaaattagctggtcatggtggcgcgagcctataatcccaggtactcgggaggcagaggcaggagaattgcttgaacccaggaagtggaggttgcagtgagccgagaatgctccactgcaytccagcctggtgacggagcgagcctcagtctcaaaaaaaaaaaaaaaaaaaaaaaaaagaatgtttcatgtattctggacaatagtctcctaacaactatatgacttggaaatatgttcttccattatttgggttgtcttgatggtgtattttgcatcacaaaatgtgttaat

SEQ ID NO: 755412 - DNA, 594 bp, Homo sapiens
tcttataaattggctttgatggagcatttttaataaggtatctaagatgtgacttttcaaaaagcctctcaaactcaaccaagtatttgctgtgcctgcaaataactacatgaattgggagaattcttctcatcttgagatcacaagattacttggagttcctaggcctctcaaagtaacttttcctgccacaggtcagaaaacctgcaaagtaactgcatagagaaggtacaaagcccgtctttccaggrggattttattgctctataattcaacctaaattcctcaaagcaatctgcttatagatgaaaatacgctattccaggcaaagccttggcaagataaccagcatctccaattgtgtcccattaaaaaaaagattattatcgattatatgcaaataacttatattgctgtatattaagaatattcagaaatagctttcattttttggagaagtacaggtagagggaaatatgcttcaaatttttctcaagagtattctgtactcaattgttaaaaactgtaaataacttttagaaagtttactctgaaaaacaaaacgaaaagagtcatcaatgtttcaaacaaaaa

SEQ ID NO: 755413 - DNA, 565 bp, Homo sapiens
aacctaatacaaatactaagaaataaaccctggaaggcactaaaattaaatttatgttcaatataaaagtctcaaattttatttaaaattgggctgtataccttggcaaaataaaccaacatagagaaattggtaacccatgtaaagtaattcacaatctaaacaaaatgattggcaagcaaggacataaaggccaaactggcaacaggaccatctaaggccaccatccggataccaaaataacgggaaagacactcctgaattccaagactaaacccacctcttcaraaacagcagtgaaaacagaaattttacaagacatttttttcttaaatcttggacccccccaggctataatacttgaacttggggatcacaggacatatatacactggctatagagatagacaaatatacacatatggacacatttcttttagacaccagatgacaaataagcctccttagatacagcgtaccacactttgatacaaacatctctataaaggactgaggaatattaactagagtctccccagtctctgcttctatatgcactataaat

SEQ ID NO: 755414 - DNA, 667 bp, Homo sapiens
ctttatgcaaaataatggaattgcccaatcgacctcagagagaaggcagggggcaactggtcttgctcctgcagatcccacaacaggctctgagctcagatgcacaggctgtggccccatccttggcagatgtggtccagagaaggagcaggmccaaccatcggagcatctgtgcttccaagggagacacgcagaggtgtctgtgtatgttccttccctgctggctgctgctctcagagtagaaagttcctaaggctccagaaagcagggaagggaaatgaggaggcgagagattgaatgaaattcagcgagaatgtactaaaaaaaaacaaagttggaagtggcatgggaggactgcctaagattcacaagggtgttaaagacataagcaacagttagtagtgttgtaaaattctaaaatatccttatttgcggtacaactgggaatatcagtgtaggtacagggcatggaggttttactcttctttttctttatgacaccataacacagtgtttaagaaaatgggctttgagggaaaaattcttctgttaaatgaactttcttaagaacaagacagtgtggtatgtgcacagagatagaaaaataaatcaatgaaaaaaataagagagttaaaacacacacacacacacacacacacacacacac

SEQ ID NO: 755415 - DNA, 640 bp, Homo sapiens
tattttcctactttctctaataaatctaacctatctctagctacggctgtcttggtaaaaattcttttaccccatgcactgctgtccattgttcctctacattttagtggcccataaggggactctattgtacaggaactctctctcctcacaaggaactccctcccttctctctctttccctttccctattttggaccctcattgaagagtgtctaagcacagagacaattgcaggtttctggccacgactatactctgggactgaatggtgggactgaagggtccccatgtggaagcaactgattgctgctgcctggttcgggtgagtgacctgaatccttttctcttttcagtctttcagtggccatttactagtatctctttgacaattgagggtaactggccagggycactctccggagttgtctgaaggccaaaaagtgaacaaggatagccgctctgcccagaacgagggaaggctctctcctctcttttctggttatagtccctcatccctacatgggagacaactgacagtggaagcttgtttcaggtaactcatacactctctttctcattccaaattctcttgtggacagtcagccagccatcctgttctggacttgccaaatcagatg

SEQ ID NO: 755416 - DNA, 571 bp, Homo sapiens
tgtgtttttagtagagacggggtttcatgttggccaggatggtttcaaactcctggcctcagatgatcgacccacctcggcctcccaaagtgctgggattacaggactgagccaccacgcctggccagaaatgtataacacgaagaatgaacctaaatgtatacaaattaaaaataaaatatgtgctaagttgggggaatcccagggagggacgcagaaaaagaaatataaatatattaacgtgtacgaaataacctcactgaagaaaatggtagcaatcagggctcastgaagacatttaggaaataagtggagattcaaagcctaaaggacaaaggagatgtatgtatatgctatgtttatttgtaaagttgctctccctgagggtatgaattaccagttctgaaaccaatatctatctacagtatttagggatggaaggattaaattaatggagccaactgtctcactgttacagcggaggttacatgcaagtagtgggaatgggtagattgatttatgtggtgctggattagatcctgtggtcctggagacatgagtagcaattcat

SEQ ID NO: 755417 - DNA, 715 bp, Homo sapiens
taaaccaacatgagaagaactgaatgcagccttaggccaacagccagcaaggcgctgaggcccttggtctaatagcctgccccagaagttgcaatatacatttacaaataaaactacattatttcacaagtattgtgagtatcttataataagagaacaatcctaaatcctctgtcctgtagcttgtatcattattcattcatgtcacctatattggagcatatatataaacatacataaaaaagtcaattgttgctattattgttttcaaccagctcttatctgttgaatcaattcacacaaggaaaaataaaagcttttattctctagagaaattactttaamaagtttattgctgatatgctaataaaggataagaatggaatataaaatattcaattgaaatcacacaatgcagaaagagtagaatacaaaaatataaacaaagaacaagaacagcaaatataaaacagtaagaaatatggttggtattaatgcaattgtatcaacaatcactatgaacgtctctggtctaagtgcaccaattaaaagacacaaacggcaaattaaaaaactatgtgttgttgtctacaagacacccacttttaattttaaaaagatacgtataaattaaattaaaagatataagatatacttcacatatattgaaaaagaaaaaatctaaaacaataatctaagtttccatcttaggatc

SEQ ID NO: 755418 - DNA, 673 bp, Homo sapiens
caacaccaagccattcataagggatccaccccatgggtcatttcaccggaccccaactccaacactggggatcacatttcaacattatatttggaagggataaatatccaaactatatcacctaatgactaaaggtattaaacagcttttcttgtgaatttatctattttttgtcagtttttttggtgtcatattctagaaagcattatttaatccaagaccagagaaatttataccaatgttatcctattkgggtttgtagttttagtgcttacatttatgtctatgatccattttgagtcacttaggtatattggcatccaacttgcatgtagctatccatttgtgccagcaacatttgttgaaaaaaatatttttgcaaattgaattgttttggtaacattgtaaaatcttgactacaagtgtaagggttaattttggggctctcaattccattgcattgatctgtatgtctgtctttgtactaagcaatagcacactgtcttgattactatcactttgtagtaagccaaggctggtctcaatctcctggtttcaagtgatcctcccaccttggcctcccaaagtgctggcatatatttcttcttctagattgcttttcacttttttggatctcttgcatttccatacaaattttagaatcagcttgtaa

SEQ ID NO: 755419 - DNA, 640 bp, Homo sapiens
gcctgaaggagtcagaattccaaataatttatatagataatctccccttgaggaggtagagcatatcttatgacttaagtgtgggcttctcatagtgacttccttctaaggagtatagtatggaaatggagaaaaataaatacttttacagtggagaaccctgagaatcattgtccaaaccaggtgttgaaggtcaacatcaacagtgataattcatgttgataacatataccattgataggatgttataaaactggcagtttatcttgatgaaccttctccctcaaaatccatagcaccagtctaataatgagaaaatcataaaatagatcccaattgatggatgttttacaaaatatttgaccagtaattctaaaaagtgtcaaagttatcaaaaacaaggaaagtctaaaaaagccatcacagtctagaggatcctaaggaaacatgatgagtaaatggggtttggaattcagactgagatcctggaagagacaaagcacasattagatggacaccagggaaatttgaataagtgtgcattttagttaataatacaccaatattggttcattcactgtaataaatgtaccatacctatgtaagatgtcagtaagggcaaaactgggtgtcagatact

SEQ ID NO: 755420 - DNA, 588 bp, Homo sapiens
tttaatattaatttatgcattaacttttagacaaaatcaagtatggccaagtagtctacattatacaatagtacacaaggactacatcagaactaagtcaataaacgttgaggactaacttaattattaaggattaaactcccttctattaaactaatcacaacatacagtaagtaaatataagttaagattttctctattttctttcttttttttaaaaggctagtcaagtgaagcagcaggactggagaagaaacaaagtctgtaactggttgtgatyaattagttgtaaacaccactgcactcggaccagccagattttcaaatattggtggatgtctcctctagaagcataatgcaataccaacatgtttatgatggtggtgacatgctattatgcagaggaactcaagtaaacacagagtcggttcaaggttaataatgtggtttatgacctccaacaaagctaattagaattaactaaactctgtaaatatgagattaaactagacttgataaaattagccacaaatgacgagcatttttagaatatgtgaatccaatacttttcttctttttttttttttt

SEQ ID NO: 755421 - DNA, 488 bp, Homo sapiens
ggtgacgctactgcactccagcctgggtgacaagagtgccaaactccatcacaaaagaaaaaaaaaaaagaataaagtgaacctgtcatttcagggaaaacaaatgacagtatttgttgccaatgatacatttcaagttttaaagtgaaaactatgatttcagaaaacttcktatccactaacatgaactccagagcttttcaaggctcttctgagtgatcaccacctgataatatcatcaatgataatatttgtgcacaaaggggtaacatatcaggcctgaggctgctctccttataaagtcttgcttgtactctgggaggccgcagtgggcagatcacacggtcacgagttctagaccaccctggccaatatggtgggcactgtgcctctatcaagctttcctgggaaacaacattttacacacatcatcacaattcagtgctggaagaattaagcatgtcctgtgagactctactgggagggga

SEQ ID NO: 755422 - DNA, 488 bp, Homo sapiens
ggtgacgctactgcactccagcctgggtgacaagagtgccaaactccatcacaaaagaaaaaaaaaaaagaataaagtgaacctgtcatttcagggaaaacaaatgacagtatttgttgccaatgatacatttcaagttttaaagtgaaaactatgatttcagaaaacttcttatccactaacatgaactccagagcttttcaaggctcttctgagtgatcaccacctgataatatcatcaatgataatatttgtgcasaaaggggtaacatatcaggcctgaggctgctctccttataaagtcttgcttgtactctgggaggccgcagtgggcagatcacacggtcacgagttctagaccaccctggccaatatggtgggcactgtgcctctatcaagctttcctgggaaacaacattttacacacatcatcacaattcagtgctggaagaattaagcatgtcctgtgagactctactgggagggga

SEQ ID NO: 755423 - DNA, 516 bp, Homo sapiens
cagtataggccaggtgcggtggctcatgcctgtaatccctgtactttgggaggctgaggcgggtggatcacctcaggtcaggagttcaagaccagcctggccaacatgatgaaaccccgtctctagtaaaactacaaaaaatcagctgggtgtggtggcgggtggctgtaatcccagctactcaggyggctgaggcaggagaattgcttgaactcgggaggctgaggttgcagtgggctgagatcgcgccactgcactccagcctgggcaacaagagcaagactccgtctcaaaacaaccacaaccaagagtacagtatataggccaggcacagtgactcacgcctgtaatcccagcacattgggaggccaaggcagacagatcacctgaggttgggagttttgagaccagcctgaccaacatggagaaaccctgtctctactaaaaataaaaaattagctgggcgtggtggcgcattcctgtaatcctagctacttgggaggctgaggcagaaac

SEQ ID NO: 755424 - DNA, 551 bp, Homo sapiens
acaaatacatgattaagaactgagacctgctgcatagcagaaagtagaagatcagaatacagtgagaacatatataagaaagggagacctgactgggagctatctagcatctaaagtatgaatgagttacttaggagagaaagtggagagggaacagcattacaggcacatgtgaaggcctgcgctggaaaggagcatggtgcatccacaaaacggaaagaatgccagtgtagctggagttcagagagggagaatgatgcaagctaaggttgargagtgggcacatactaaatccttcagggtgtcatacagtactctcggaattttgagttttattttaagtatagtgtgcagaagggtagtgaaagatcttgtgtgaacggtggcctgaggagggtagaggggaagtagggagaccagggagaaactactgtcattcaggtagttcagatgagaggtgctggtggcttggccccagatggcagtggtagagatagaggggaggggacagacacaaacatgatttgggataagaaattgagaggcttgtt

SEQ ID NO: 755425 - DNA, 580 bp, Homo sapiens
cctgtaatcccaatactttggaagactgaggcaggaggatcctttgaggccaggagttcaagaccagcatgggcaacatagcaagacactgtctctacataaaaattaaaacataatttttaaaaacttaaccaggcatagtggcatgtacctggagtcctagctactcaggaggcagaggtaggaggattccttggcccagaaattcaaggttacagtgagctatgatcacaccwctgtactccagcctgagagaccctacctctattgaaaaagataaaaagttgatttgggtaatttgttgatgatctgaaactctcacacacttttggtaggactataaattggtacaactttgcaaaaacagtattaatctgctaaaattttaatctcctaaaatcttagggatacgcccaccaggaatgcaaacatgcatatcaaagctacactggaagttcttaacagtattatttatcctagctataaattgcaagcaaccccaatggagttagaatggataaataatatgtgacatattcatggagcaaaataccattcagcagtaaaagtgaagacacta

SEQ ID NO: 755426 - DNA, 625 bp, Homo sapiens
acgtggaggcctgttggcaggaccacctctttctttgctgagagctttctttttgcctactcctcacccttcagtgtgcctgtgtgcctaatttttcctggttgtgagataagaacccagattttagctgaactaaggagcaaaaattctgtatcattttggtggcctgtttggaactatgagacatggtgagtaaaatgtggacaaaaaaatttctctccctttcatttctgagccttgttggacttcttctgagggtagaggaaactctccaccccgacccccgaccccttgtcgctcttgggggtcaggaatgttggtctcggtccaacccagccttttctatggcattttgcttctttttattcgggactgtaatgtcacctatcttttcttttacaatattgggggtgttccactcccaccccaayggccgcaggtgcacatgtgggacaaatgggtgaacagcggctccctgctccccttccctcctggctgaggtgcatggctgagtccaccgcatgtgcatgccatgtccagtggccatgcagggcagggatgagccaccaccaccgcccagcccaaggtggccttgggggcctgggccttgtgtggccatctggac

SEQ ID NO: 755427 - DNA, 616 bp, Homo sapiens
ttcttgactgctaaattatactgtcatttaggaagacaaccagtaaaaggaaaatcaaggtgccaaatgaagcaaatatgtttagagagtgacgacctagaaaaggccattgaatttcataattacttagagctattcccaaatacaatggaattccttacttagaggtaaaatcctatacaggccagaaagtctggctacagagtccacgtttaagaactattccagtcttcatttccatgatacacacaatatcatttaagattaatggagaggaaattcatgcattgtgcacagcaggaatttttccattccagcagttacatgaaaaagtccgaagattaaaaaagaaatgtgggggaaaaaaargtggcaagagatacaatttcacctaattcattagtagaccacatagagaaggggaagtagctccagtgaaaagtttaatgttttcacttcaaaaaagctaaagaataccacctcccctgactcccacccaatacagagtaggtaaaaaacaaaaacaaaaacaaaaaacaaaaacaaaaacggttacccttgaaaaagagagaagaaattccagcctgtgaacctgcaggagataaaaataaaagtc

SEQ ID NO: 755428 - DNA, 566 bp, Homo sapiens
taatgttttcacttcaaaaaagctaaagaataccacctcccctgactcccacccaatacagagtaggtaaaaaacaaaaacaaaaacaaaaaacaaaaacaaaaacggttacccttgaaaaagagagaagaaattccagcctgtgaacctgcaggagataaaaataaaagtccagagataaaaaatatggctcaaataaataaaatggaagataggagctgcagcagctttgaatgtctccaatactcccagtgactggaagaatgtcaacmgctcaaagtagggagaacaagaggatggtaaaaaaccaatatatttaaagagcatgaacaatagttgaactatattagggcatgttgtggaatcagtaggaaatacattagtgggttcattaaatcaacactgtctagtcacggtgcaaaagaagagaaagtaggacaagaggataagctggggatctagaaggacataatgggttgaaaacaaatataattttagaaggtgaaattttccctctttgaagtatagcatttgattaatactagtgataaagctgacacccaagt

SEQ ID NO: 755429 - DNA, 659 bp, Homo sapiens
aaaataagtaacaaatctaatatgcagaatatcaaaggcaaataggaaaataaaagacaagaaaatggaataatgtttccaaatcattaaaataaacatggattgagaatctgaagtattcttaatactttctgggtccagatctttaggaaattacagtgagtttctaaaatgagttctacggtatgaagtaaatttcacatgcaactgaatagtaaggatagctattaatataattataagaaccatccaaaatcagtcatcctgtcatccctatactcctatattcccaagttattaagattttctgatattacaactagggagatcattaaagtttaaaaatatatagggkgagttacaggagataaagaaatggcataataccctcaggtggtcacagaaagataaatgttaaagatttatctttaaattgtgtaatggtgtaaattaacttcataaaatgccatgaactaagaatttagaagagtctccttttggcaacaattttcataaagaaagaaatatgaaataatcaggatttttctaaaatgaagtagtcagttgaacaaaatgacatactctttatgctttttccttttgacctcacttgatgagtcatcggaatcttcactgctagaggaatcctgtagaaaaga

SEQ ID NO: 755430 - DNA, 615 bp, Homo sapiens
cggcgacgactggttacttatagctcttgctgccctcgcccttggtgcttcaataatgaattgttagctccactccgcaggggatcgcgcgttggtgctgcggaccggggcttccccttcccctccgcgtctgtccccttccccctcccccgcacggactcttgcttaccccgagacgccggagccctaggactgggcggcggagatcccgggcctgggygcgggggaggccgtccacccgagtcggctccctccgccccgccaagcccgccggtaagaaagggggcggcgggcgggtcaggatgtggcggagaggacaggaaccggccgggcggagggcgggcgcggcgcggtgcccaggcggcggcccagcggccgggtgaaggccgggtggctctgtgagtgccggtggcggtgtacgggcctggcgcgcagggggcgtgtgagcggcgagtacaggccggggccgcagaacgcatccttgcgccggcccggcggccctgccccggcctcttcggcttggtgccgaccgggccgcgagaggagacccgcgaatggctagcacttagccggtgcgtgggtcctgccgcgacccgggctcccagcacgtgggga

SEQ ID NO: 755431 - DNA, 636 bp, Homo sapiens
ggggcaggtccgcgagggaggctgattggagcgcgctggatggatgagtgaggatggtttccaaacctctttcgagtgccgctttaaaaacttagcaggagcaaagcaactgctaaaagacagaggattgaagaggtttaataacttagggtagtcattgtggagacgcttgagagracacagcgctgtgtgcgcttggagcttcagaactcagggttgtgaaaagggtctcagaggacttattcggataagggagatggaggggaaaggaagttaaaatgtacagagaaagccattttgagggacgaaaggaaggtgaaaaggaaagaacgaaaaggggagtgaactttttaaaggaagaaacgggaaaggcagtttgttaacatacttagattttttaagacttaattgttcagtaaggcactttgactagggttgagattaatatttaacattaggaataaatgttgagtagaacggttactttttagataacctgttcttgcagagtctactggacagtagtctagagaattaacatcctgatccagatgcagactttgctatcattgagttggtaacaatctgtttccctccctctcttgtggaatggaaataatcgtaggagtgaattct

SEQ ID NO: 755432 - DNA, 644 bp, Homo sapiens
ctttcttgcacaactttccacctgcagccaccaccacccaacccaccacaaacacaagtgctccccactctttccctcaaggtgacagtaactagaccacaggttgctccaccactggttaccaattacttcattttcttacttctttctttttataatatcattatcataaggaggaatttcactgcccaggtcatcaggagggacccacacagagcaatgtcagttatagccagttcttctttggtcaaacaccagctgtggttttagcttatcctgtgcttatccctgtaagaatgtaaacattctgcagttgcctcatccttatctatttttttacwatgtcttggtgaccttacagttccccctgaatgcagtgacttcaaactttcagcttttaataagcgacatcaaataattctattcttcactgtaagatattttccctctgatcaaaacctacccaacaccaagaatttgaacattctgattcttcagatcctttccctaagcacggcccccacccctgcccatccccaaccctccccccagcagaagcagaattaacttctttttctgtctcactgaattctcccttttgaaaaatcctaggtggtatttttttaatgcacatcacagttcag

SEQ ID NO: 755433 - DNA, 631 bp, Homo sapiens
cactttaatgggatttatctctagaaaatccatcaggttctcatgatgaagatgtgagaaacagcccctcctggccctggcaggatgagggaaagcatagcctttgaaacatgcacagagcattctccaaaacaaaggcctcctctccacaagaaatactttaccagagccttatcccacctgatggaaggatgttatcctackccagctccctctagtcctctttactcattagaaggagaaaaaaagctaagaaatacccgtgaagtttgcagcctaggaaaacagacttactaaaagacattatgcataagatttttgacaaaaagaattctgtaaaatatttaaagaagtttattctgagccagtattagtgaccatggcccagggaacggtcttatgagaaactgtgtccaaggcaattcagttacagtttgagtttatatattttagggagacaggaatcatagataaaatcacaaatcagcatatggaaggtatacatttgttcagcctaaagaggaggggtatcttgaagtgaggagggggattgggaggagcacttacagatcgatgttaggtcattcttgaatagctgtaaagaaagatctgagacagggaaatttataaa

SEQ ID NO: 755434 - DNA, 631 bp, Homo sapiens
cactttaatgggatttatctctagaaaatccatcaggttctcatgatgaagatgtgagaaacagcccctcctggccctggcaggatgagggaaagcatagcctttgaaacatgcacagagcattctccaaaacaaaggcctcctctccacaagaaatactttaccagagccttatcccacctgatggaaggatgttatcctacgccagctccctctagtcctctttactcattagaaggagaaaaaaagctaagaaataccygtgaagtttgcagcctaggaaaacagacttactaaaagacattatgcataagatttttgacaaaaagaattctgtaaaatatttaaagaagtttattctgagccagtattagtgaccatggcccagggaacggtcttatgagaaactgtgtccaaggcaattcagttacagtttgagtttatatattttagggagacaggaatcatagataaaatcacaaatcagcatatggaaggtatacatttgttcagcctaaagaggaggggtatcttgaagtgaggagggggattgggaggagcacttacagatcgatgttaggtcattcttgaatagctgtaaagaaagatctgagacagggaaatttataaa

SEQ ID NO: 755435 - DNA, 541 bp, Homo sapiens
  misc_feature 536: n = A,T,C or G
tcctgagaactcacccactattgcaaggacagcaccaagccatgagggatccacccctcagtgacccaaacacctcccaccaggccccacttccaacactggggattacaattcaacatgtgatttggcagggatgtatattcaaactatattattcttccyctggccctccaaatctcatgtccttctcacattgcaaaaacaatcatgctttcccaatagtccctgaaatttattcttaactcaatccagtgttaactcaaaagtccaaagtctcatctgagacaaggcaattcccttccacttctgagcctatgaaatcaaaaacaagttatgtacttccaagatgcaatgggggtgtaggcattgggtaaacattcctgttctaaaagggagaaatcagccaaaagaaaggggctacaggccccatgcaagttcaaaacccatctgtgcagccccagaataatcttttttgactccatgtcccacattcagggcacactgttgcaaggggtgggctcccaaggccttgggcngctcc

SEQ ID NO: 755436 - DNA, 631 bp, Homo sapiens
cacccactctaaactatactgggtcccggaaggctcttctgcctttatttctattctcactgccccaattaggaaagctatatttttttgcactttgggataaacttttcacagaagtgtatttttgcagtcaatttcagagatctgccgctgccggccatgttgtcattctccgcatttctttgctgcctttctccctgtatggtatctactaattgctgcttttggtaactcttaacatgtttttggagtctgtagaaattaggtcttccagtttttctaaaaatggtgatcatgtaacttttgttgttttggttaactgtgtaacatttgcacatcttccaggagaagacaagatgcagtcttagccrtattcttaccagaaatcctcttgactgcactttatcaccaactttccctcactctcctttcatggctcacactttaaatattggaatctcttgcctctcttgttctttcaaccctcccttaaggctttcatataaaatcttcctgtgatgtaccataacctgtgacaaaaaaattttgctattttccaaatacccactttcaaagttggttagttttttcctgctattcttttagcttggaatgcctttttcttccttac

SEQ ID NO: 755437 - DNA, 721 bp, Homo sapiens
tggtcctgggaaaactggctagtcatatgtagaaagctgaacttggatcccttccttgcaccttatacaaaaattgattcaagatagattaaagacttaaatgttagacctaaaagtgtaaaaaccctagaagaaaacctaggcaataccattcaggacataggcaaggggaaggacttcatgtctaaaacaccaaaagcaatggcaacaaaagccaaaattgacaaatgggatctaattaaactaaagagcttctgcacagcataagagactaccatcagagtgaacaggtaacctatagaatgggagaaaatttttgcaacctactcatctgacaaagggctaatatccagaatctacaatgaactcmaacaaatttatgagaaagaagaaaacaaccatatcaaaaagtgcgtgaaggatacgaacagacacttctcaaggcatttatgcagccaaaaaacacatgaaaaaatgctcatcattactggccatcagacaaatgcaaatcaaaatcacaatgagataccatctcacaccagttagaatggcaataattaaaaagtcaggaaacaacaggtgctggagaggatgtggagaaataggaacacttttacactgttggtgggactgcaaactagttcaaccattgtggaagttggtgtgctgattcctcagggatctagaactagaaataccatttgacccagccatcccatta

SEQ ID NO: 755438 - DNA, 593 bp, Homo sapiens
ggagtcaaattgccaggtcatagtgtgtatatatttttgacttaatagataatgtcaacttgttttccaaagtgattataacaatttaccctcctaaactataagaatttccattgcacttcatctcaacaaaacatttgctattgttagacttttaaaaaattgatttgtaggagttctgtatacatctggataagagccctttgttccttataagtgttgcaagcatcttctcctatgtgacttgcatttttgccctcttaatgtagatatgaaaagacgttcttgattttaaggtagtcaaatatatcaatattttccagtgtaattagtgctttttgtgttcaattgaagaaatctttccctgccttaatatcatattcttctatacgttatcttctaaaagcgatgtgattttgcttttcaygtttatatctacatcctacctggaatttgtttttgtgtatagtgtggagtaggtttggaggttcatcttgtttttccatgtggatatttcatggttccaataacatagattgaaaagatattgtatctggcagggtttgatcaggagaaagaaaccacaccagtta

SEQ ID NO: 755439 - DNA, 605 bp, Homo sapiens
aactttaaaaaaataaacagtgtagcttaagagcacagagtttataaagtctatagtaatgcacagtaatgttctaggctttcaaattcactcaccactcactgacacacccagagcaacttccagtcttgcaagctccattcgtgttaagtgccctatacaggtgtaccatttttatcttttatatcatatttttactgtaccttttctatgttcagatacgtttagatatacaaatacttattattgtattaaagctgcctacagtattcagtacggtaacatgttgtacagttgtacaggtttgtagcctaagaggaataggttataccatacagcttargtgtgtaataggctataccatctaggtttgtgtaacaacctgtactccctatccatttgctatcaccttgcacagctttactttttcttcttcccttagtagttattatcctgtaatttccttatgtttattctctgtctgtattgccaagcctgcaccataaaggcaagggttgtctgctttgttcacaaatttatcctaaactcttagaatatagtgcacatagtaggtccctataaatatttgatgaatgaatgtatat

SEQ ID NO: 755440 - DNA, 466 bp, Homo sapiens
aggtgatacttttggatctctaacaaccacactaaaggcagaaggaaatgactagcttataaaaacaaactgaaacattcagaaagttgtctaaaatgggtcagatccatacatgagaaacacttttatgatgtctgctrgtaccagggtaattaaatctcaaagatacagagaaaatacaacaggaaataatgacttccattagaagttagagccttttcctattttagatcttcatttctcaccccaacacacaccaacaattagacagacatgaattctcctgcagtggctatgtcagactgccaaactgaagatctatgtatttctctagcaaagggatatctgaactccagtccagttgcttcacactttccctcacatattttttgcagcagcaattcaagattcttgttccatatataggatttgaatacttccttattattttttacttaagcttttc

SEQ ID NO: 755441 - DNA, 610 bp, Homo sapiens
taaggtcctaagggctctccagccatggcagcagagcataaaattctttgtattggggtctctatttctgccactgaaggaggcagtacagacatttctgcaactggaggaggtggtataggccaatttttatcctccctctcctgtttcttattttcaattggagctgtgggtgggacaacagattctttcakatttttagattcagcctgctgtcctgcagaataataaggagataatggcagaagcatagtacgaactaaactccaagtggagaaaacagaagaatcaactttaagacctttttgatgagcccattttaatccttctgctgttctgtcccagttttccacatcaagagtgcctgcctgtgaaaaccataggttatgcaaaataacctcctgcagcagcttagttagtgtctgagaactaacctgagccccaaactgtctcaacagaactttgagaaactgcagataatgttattcttcaataggcaaattctgccccatgttaccctgattgcaaaaacttcccgtccaggacttctttaaagcactgcttccaatacctctttaggacactgatcagtacctctttagggcactga

SEQ ID NO: 755442 - DNA, 610 bp, Homo sapiens
acacaaaagtcaggctccaaataggatttatgtgctaatgacaactacataaactgtgcattgaaaaagaaaatgaaggatgagcttggaagggtgaggagcagaaaggcagctctcccaatcatggtgaatgttctagtaagggggtggtgcagatgcaaggtttaacttactactgtcatgctttataatatccatactatatgtatacatatattctattgtgtatatcaactatttcataatagttgaaaaaaataaaaggaaatattgacaaatgctaacagtctagtgagatggattagggatggtattaattttcttttattttccaaacttcctgtgacatggctatgcacttttttttctttttttttttttttttttgggkggagacagagtctgctctgtcacccaggctggagtgcaatggcgcgatctcggctcaccgcaccctccacctcccaggttcaagcaattctcgtgcctcagcctcgcgagtagctggagctacaggcatgtgccaccacacccagctaatttttgtatttctagtagaggtggggtttcactatgttggccaggctggtgctgaactcctgacctcaag

SEQ ID NO: 755443 - DNA, 610 bp, Homo sapiens
acacaaaagtcaggctccaaataggatttatgtgctaatgacaactacataaactgtgcattgaaaaagaaaatgaaggatgagcttggaagggtgaggagcagaaaggcagctctcccaatcatggtgaatgttctagtaagggggtggtgcagatgcaaggtttaacttactactgtcatgctttataatatccatactatatgtatacatatattctattgtgtatatcaactatttcataatagttgaaaaaaataaaaggaaatattgacaaatgctaacagtctagtgagatggattagggatggtattaattttcttttattttccaaacttcctgtgacatggctatgcacttttttttctttttttttttttttttttggggggagacagagtctgctctgtcacccaggctggagtgcaatggcgcgatctcggctcacygcaccctccacctcccaggttcaagcaattctcgtgcctcagcctcgcgagtagctggagctacaggcatgtgccaccacacccagctaatttttgtatttctagtagaggtggggtttcactatgttggccaggctggtgctgaactcctgacctcaag

SEQ ID NO: 755444 - DNA, 642 bp, Homo sapiens
agtacccaatagttaccttttctgcttctctccttcctcccaccttccacccttaggtagtagaccccagtgtttgtctgttttgttttgttttgttttgttttttaaatgcaagcttgctctgtcacccaggttggagtgcagtggcaggatcttggctcactgcaacttccacctcctgggttcaagcgattatcccgcctcagcctccagagtagctgggattacaggtgcacgccaccacacccagctaattttttggatttttagtagagatggggtttcatcacrtccaggctggtctcaaactcctgacctcgtgatccacccacctcagcctcccaaagtgctgggattacaggcatgacccattgtgcctagcctgttttttcttttgtgttcttaagttctcatcatttagctcccacttatgggtgggagacatgcggtacttggttttctgttcttgcattagtttgctgagaataatagcctctagctccatccgtgttcctgcaaaagacatggtcttgttcttttttatgactgcaaaattatttaaataattgaatattaaatattgtagcagcaatattttccaaattttagtgataggtgttacttcctatcccagactaaaca

SEQ ID NO: 755445 - DNA, 633 bp, Homo sapiens
aaaaaaaaaagattcttttcttgtttgcttggccaaaccttattcaggcttctgaaccttctcataggccagtctgtgcatgttcttgtaaaatccagttttagtaaaggaaccctgctaagtcaatttagctgaaacccaaattctccaaatctgatcaggttcctcatcctgcaccaccccccaggtgatatctgatcaccccagcctgtcttcagcaagaatcctgttagatcagtttagccagaattcctcttacccctgatgtttcctcttggtaattttctaaccactgacctycacactgctccttggctacaaattcccatttgcccatgctgtactttggacttgtgcccagtctttctcctccactacaagaccccattgcagcggtctctatacctatcctgatggtcctgaacaaagtcatccttacagcaaaaaagtgcacctctcccagctaccaaagcctcttctactgatgtgcctggaggagctgcagtaactataaacccctgcaaatgtggaggaagtaactggagcctgggtccagtcatgactgtctactgaatcatcttagccaatgcccactgaaggctcagggtgctcccagcacagggagaagaactt

SEQ ID NO: 755446 - DNA, 647 bp, Homo sapiens
atcatgtaaaacagagttcctctcctagcttgagattaaataatacatgatagaaagaatatagtgaataattgccttgagtcctctatattttttcccaaagtaaatggaaagatctaataaatctgtttccagaaatgctgaatgtatttatatgtgttttgtttaaaacataaccagcrtagagcaacttctctatgaggtgccaagaaagtctttaaactcctcatttgtctttgttttcaatccacctgttcatttccatttcagaatgtctagaaaagattgacaaaactttttaggctgcaaacctaaatgtccacaattttacatttcaacaattgtttaatatctcagaatttgacataatgacatttagttcaagagtacttagctgtcaactgtaacaattcatatctacgccttcctactttgtaacatagttgcctccctcatttgtgacattaatttatgactcagcccacatttcaaaggaaagtgatatatgttggggaaacaatactactaaaagaaaaagcccacacctctacattactataagtgagaggcgtgtttgcttatattaataaagatattccttcacaaagatcaatatggatcctattgcatccatttgacaaagtagc

SEQ ID NO: 755447 - DNA, 546 bp, Homo sapiens
  misc_feature 435: n = A,T,C or G
gaagagaagtagaatgcaatgctctctgaaaactgcatccttcttaagaaaaatatagagcattccctgctctatgctcttcaaatgaaaaatcaactccagattattcaaagtttgaataatcctcaaatgcgaattctttgctttgtacctccgctccatcccagatctcccagcttgttcatagacccttcatcagaggggcagaagaatctcagggagccacatctctggcaaatattttagttattgacacagctgctgaaaagagctggccyttgaaaataaaaataacttaaggaattgactattacaattaattctttaagttgtatcctcagccgctgagtatgggaagctacatatttcactgagctatttaattattgcctggaatctttggtagacatgaaacagcagttagttcagttggcncaggtttttggttaaaactttgtcctgaggagggcaagataatgagatcaagtatggcatggcccagtcacatattaatgaccacagaaaataccctaatatcaagccaac

SEQ ID NO: 755448 - DNA, 546 bp, Homo sapiens
  misc_feature 435: n = A,T,C or G
gaagagaagtagaatgcaatgctctctgaaaactgcatccttcttaagaaaaatatagagcattccctgctctatgctcttcaaatgaaaaatcaactccagattattcaaagtttgaataatcctcaaatgcgaattctttgctttgtacctccgctccatcccagatctcccagcttgttcatagacccttcatcagaggggcagaagaatctcagggagccacatctctggcaaatattttagttattgacacagctgctgaaaagagctggcctttgaaaataaaaataamttaaggaattgactattacaattaattctttaagttgtatcctcagccgctgagtatgggaagctacatatttcactgagctatttaattattgcctggaatctttggtagacatgaaacagcagttagttcagttggcncaggtttttggttaaaactttgtcctgaggagggcaagataatgagatcaagtatggcatggcccagtcacatattaatgaccacagaaaataccctaatatcaagccaac

SEQ ID NO: 755449 - DNA, 534 bp, Homo sapiens
agatggagaccatcctggctaacacggtgaaaccccgtatctactaaaaataccaaaaaaaatagccaggcttggtggcacatgcctgtagtcccagctactgggaggctgaggcaagagaatcacttgaatcagggaggcggaggttgcagtgagccaagatgatgcctgggagacagagggagactccatctcaaaaaaaaaaaaaaagattctggtctgcaaatgcaaaaggttgcacacaagtaattctgtagttttctgaactgaataactaaccaccataactatagttgagtgatatctgctatatgtcaggtactgtcttaagycctttataggaattaatccacaatctcataaccagatacggaagttattatagctttgagtaactcgcccaaggtaatgtcgtagcaaagatttgagccctccagtctgtcttagagtacacaactatgaggcttaagtttaagtcaatgatagtgaaagggtttcatttaaagactcagcctaaaggaggtacagtaagtc

SEQ ID NO: 755450 - DNA, 534 bp, Homo sapiens
agatggagaccatcctggctaacacggtgaaaccccgtatctactaaaaataccaaaaaaaatagccaggcttggtggcacatgcctgtagtcccagctactgggaggctgaggcaagagaatcacttgaatcagggaggcggaggttgcagtgagccaagatgatgcctgggagacagagggagactccatctcaaaaaaaaaaaaaaagattctggtctgcaaatgcaaaaggttgcacacaagtaattctgtagttttctgaactgaataactaaccaccataactatagttgagtgatatctgctatatgtcaggtactgtcttaagccctttataggaattaatccacaatctcataaccagayacggaagttattatagctttgagtaactcgcccaaggtaatgtcgtagcaaagatttgagccctccagtctgtcttagagtacacaactatgaggcttaagtttaagtcaatgatagtgaaagggtttcatttaaagactcagcctaaaggaggtacagtaagtc

SEQ ID NO: 755451 - DNA, 626 bp, Homo sapiens
aaaataaaatttcagaggtaggttccaacctcctaaattatttagaaacaggaaactcacttaaccaagtactccatttcccaggcaagtcagttaactgaattgttatagtatagtcaatactcaatcaatactcaattacttgcattatagaaggtagcattagtggaaatggaaaaaaatgaataatcaatatagctgtgtttttgatgagattttgctgtctagtgcatggmaacttggtacaaagaatgtggcagcctccctgaggttgtagtagctggggacaaatgccatcttttttaaggagtatctatgtttctcatatttcttctgcctgtcccccaagagataccaggttgcatgacttcttcacatctcaaagcacagcccatgctcttaacctcatctcattgggtttgcatcgagatgtatgtgcacaggcagatgaatatgtgagtgatgagaagagcatctgcaatgattccttctgactacagccaagaagggtatagaaattaccaggtggagttagacccctgttcacataggagagtgttgtgagaggcaagctgccttctgccatattcagaaggtcagacagtctttagaatatcataactcat

SEQ ID NO: 755452 - DNA, 620 bp, Homo sapiens
tcttacagcatgctaactactgagttaggctttgggaagagacagatgagtaagacatactacttatcctcaaagagctcaatatggtagaagagagtgagatgtatatatatacatacacatatatatacacacacatatatacatatatatacacatacatatatatacatacatacattatatatatatatatatatatacacacacacacatacacatacatatatacatgattgcaaattagagtgatggaaatcacttactgctggaggactgtggttagtaataataatagctatcttttttattgcttaatattgccttggcattatcctaaccatttaatacatgttatcctttctcattttctttgttatcctcgttaaagttcatagctcattatttaaataatactctaacttatattcttatctttgcccttcttcaaatgaaatgaaattgtaactctgatgagcccccrtaactggataatctgtatctaagcagccaagtactgctgaagaaaagtttcgacggagcagattcatgatcataaattaatagagaaaccagtgcagcagtttcaacactgcttagatggcctactgtcttttccc

SEQ ID NO: 755453 - DNA, 643 bp, Homo sapiens
accctgagagattcttaaatgtgtctataaaatttagaaggtctgagttttactaacctgcatcatttttctgggatcccaggattcccagaccagagggtggggcagggccctgtgatatgtctaacacacccatgaggcctagagtgcacccaccactggctgcaaagcactgcagctttataggtcctagagcgaaaaatggtttacatttattgaaggcttttaaaagaatgttccaggttctccatatctgttgtttcattgaagtgtcaccatctcattaatggctattgtcctcattttatttacgttatgtttttgttttttttgaggcaggatctcactcttgtcacccaggctaggatgcagtggcacygttacagctcactgcaacctcgacctcccgggctcctcaattctcccacctcagcctcccaagtagctgggaccacaggcatgtgccaccgcacctggctaaatgtttgattttgtatgtaaacaaggtcttgctatgttgcccaggctggtcttgaactcctggccttaagcgatcctcctcccgcttcagcctcccaaggtgctggaattacaggcgtgagccactgcacctggcttggcctcattttatacacgagaaatt

SEQ ID NO: 755454 - DNA, 663 bp, Homo sapiens
aatcaaaagagtgaagcactcatttttacataatggatcataaaaatagtattgattaaaaaatattaacactgtacatattaaaataaaatcctgtttataacatcacaatattgttcttaatttctaaaagaaaccccaagggctgtggcacctgaataatctctaacaatgaacatattgccttaattattaacactagcaattaaaatgtaggagaggcaaattgatcttttttctctaagagctttatctgtttctctaaaggacagttaaaatcatctaagcaccataaaaactggtgaaatcctaaaaggaaattagcaatttctaaggtaaatataaattatyttcttttggactcattttttgatttgttttgttttagacattttctttctattttctagtttaagctgtagctgtaaatacaaaataaagcacaggaaaaatgttccacagtatttgtctccaaaaaagacctaagatatttcagtactttaactccagcttctaatgtcccagtcaaatgttactacagcatttttgcttttgacagatgttagaaaacaagccaaggcagaaaatatcagatacagtgaatacaatggtattgaatacaatagtaatagttaacaaaatgtgtctttatagcagcatgat

SEQ ID NO: 755455 - DNA, 554 bp, Homo sapiens
tctaggtttcattgtgttactcattatacgttagggttaaagaagtacaagagtggctcattcctgtgatcccagcactttgggaggctgaggcgggtggatcacctgaggtcaggagttcgagaccagcctgaccaacatggtgaaaccctgtctctactaaaaatacaaaaattagccgggcatggtggtgcatgcctgtaatcccagttatttgggaggctgaggcaggagaatcacttgaacccaggaggtggaggttgcagtgagccargattgcaccattgcactccagcctgggcaatagaatgagactgtgtctcaaaacaaacaaacaaacaaaaaaaacaagaatagtcattagcttagatgaaatataaatgtcttgagaggtcacatttttagtttgaagcgatagaaattttagaataattggtcttaattcaactagtagtaagttttcctcttacagtaaaacagtgctttgaacttcttggacatgcaacatgttttcaggatctgttgagtcacgtggaattttggtgtttgggcat

SEQ ID NO: 755456 - DNA, 590 bp, Homo sapiens
gcactggcagaaacctccaaaatgtgtttcaaatccatcagcttctctccacatcctagggaagggtccatcctttcttcctggactattgctggtgtctcttaactaatcttgctatggctcccacaatctgctcttcatattgtagccagagtggcagctccacatggctggggagtcctcacaatcgtggcggaaggcaaggrggagcaagtcacatcttatgtggatggcagcaggcaaagagaggttagcaatattcttttttctttctttctttctttttttttttttttttgagacaaagtctcactctgttgctcaggctggagtgcagtggcgtgatctcgccttgctgcaacctctgcctctcgagttcaagcgattttcctgcctcagcctcccaagtagctgggattacaggcccatgccaccacgcccggctaatttttgtatttttagtagagacggggtttcaccgtattggtcaggctgctctcaaactcctgacctctggtgatccacttgccttggcctcccaaagtgctaggattacaggcatgagccactgtgcccaaccagcaatattc

SEQ ID NO: 755457 - DNA, 590 bp, Homo sapiens
gcactggcagaaacctccaaaatgtgtttcaaatccatcagcttctctccacatcctagggaagggtccatcctttcttcctggactattgctggtgtctcttaactaatcttgctatggctcccacaatctgctcttcatattgtagccagagtggcagctccacatggctggggagtcctcacaatcgtggcggaaggcaagggggagcaagtcacatcttatgtggatggcagcaggcaaagagaggttagcaatattcttttttctttctttctttctttttttttttttytttgagacaaagtctcactctgttgctcaggctggagtgcagtggcgtgatctcgccttgctgcaacctctgcctctcgagttcaagcgattttcctgcctcagcctcccaagtagctgggattacaggcccatgccaccacgcccggctaatttttgtatttttagtagagacggggtttcaccgtattggtcaggctgctctcaaactcctgacctctggtgatccacttgccttggcctcccaaagtgctaggattacaggcatgagccactgtgcccaaccagcaatattc

SEQ ID NO: 755458 - DNA, 531 bp, Homo sapiens
atgcattgtcaaattagagaaatacctttccagttttaaaattttatatcattatcctttttttgtttcttagtttttgaagacattacactctgggttttttttggtcagctgttataatccaggtttcacgcttcaagtctttagataatawcatcttattgaaaattttgcagaaggattttcttgttttctcagtggctcagctaaaatcagtgagtggaaaattttctcggattggtttttgaagatacccaataaatcctgtataacctaacagacagctgccttttcttttcttctttagtattttttgaacatgaagtgagggtcgtattgatgagagatcactaaagaaggttaagcctcagcaaaagtcttccaaaaaatgggctgtgctaaaatttcatgtaatactctagcgtttgacacattaaactaaactgagttcataacacattttaagaagagttttctccgttgctcatttgaccattccttgctccttcaggaaacagacaaggttatgta

SEQ ID NO: 755459 - DNA, 602 bp, Homo sapiens
ttttatttttaacttgcatgaacatactcattggctatgtctttgggcagctttttaagaaactgtaagtatgccattggttaatagttatttgatggcttgaaaaagttaatatttttagagctattaacgtacttatgcctggaaaaaagggtataaccagaatcctttttatcacaaattccagcagctacaatattaataacagactccatatctggcatttttttaaagcacttatatccagtgtgacgttgactttagacaactttattatagtaaattttactaaaatctgttaaccaaatagcttttctwtttctaaaggcccctaatccaccatgtgtggtgaatgtgttgattgaatttctgttgttttgcatcgtgccctgaatcaagcggggaatttcggcagtgtcatcacacagatgcgtgtgccacccttgctgcttttctccttatttctaataattttgtcctttcagcttgtgttttggagctgtagctgagttttgtttagttggataagatgttgcagggtttgggaggatgacaggagtgagtgaaacggtaattgctgcttcatgcattagcatagaatc

SEQ ID NO: 755460 - DNA, 665 bp, Homo sapiens
tagagaagggctcattagtgaggttggtttgtgtaaactcttggtgccatctcatctgtgataaaggttgttatccccctcctggtatgggagtgggggtggaggttccgggggcactttcccaagggtgatgtgtgctttttttttttttttttcaggtagatgtggggaggacagagctcattctgtgcctgcattttctcagttgccttaagctgaaaataatcattatgtcagagtggcatagtttggggttatgtgctctgaaccccttcaaatgaaataatgaatttagatggcctaaatcataacatatacacatacacacacaagatagccagaaattatayttccggatggagtatacaatctgcctttggggtggtcttaccaaaaagtcagatatggatcttatttagtctctagatttaactatcaattaacaaaaaatacagaggacagaggtgcatgttggataacagcacaggaaaaaaaacccagactgtgagaactcgacaagacaggtgaatttttttttcaacaaataaattgcaaggaaaaacagatggagaaaaaaatcattagaataaaagagatattagagataaatcaaccaagtgtactatagaagccttatttggatccttctaactgtttaaaaaatt

SEQ ID NO: 755461 - DNA, 647 bp, Homo sapiens
gggtggaggttccgggggcactttcccaagggtgatgtgtgctttttttttttttttttcaggtagatgtggggaggacagagctcattctgtgcctgcattttctcagttgccttaagctgaaaataatcattatgtcagagtggcatagtttggggttatgtgctctgaaccccttcaaatgaaataatgaatttagatggcctaaatcataacatatacacatacacacacaagatagccagaaattatatttcckgatggagtatacaatctgcctttggggtggtcttaccaaaaagtcagatatggatcttatttagtctctagatttaactatcaattaacaaaaaatacagaggacagaggtgcatgttggataacagcacaggaaaaaaaacccagactgtgagaactcgacaagacaggtgaatttttttttcaacaaataaattgcaaggaaaaacagatggagaaaaaaatcattagaataaaagagatattagagataaatcaaccaagtgtactatagaagccttatttggatccttctaactgtttaaaaaattacgatcagctaaatttgatcattgactgggtatttgatgacattaaggaagtaaatgttaacttaggtgtgatgtaaa

SEQ ID NO: 755462 - DNA, 580 bp, Homo sapiens
tcattctgtgcctgcattttctcagttgccttaagctgaaaataatcattatgtcagagtggcatagtttggggttatgtgctctgaaccccttcaaatgaaataatgaatttagatggcctaaatcataacatatacacatacacacacaagatagccagaaattatatttccggatggagtatacaatctgcctttggggtggtcttaccaaaaagtcagatatggatcttatttagtctctagatttaactatcaattaacaaaaaatacagaggacagaggtgcatgttggataacagcacaggaaaaaaawcccagactgtgagaactcgacaagacaggtgaatttttttttcaacaaataaattgcaaggaaaaacagatggagaaaaaaatcattagaataaaagagatattagagataaatcaaccaagtgtactatagaagccttatttggatccttctaactgtttaaaaaattacgatcagctaaatttgatcattgactgggtatttgatgacattaaggaagtaaatgttaacttaggtgtgatgtaaaagagtccttagagatgc

SEQ ID NO: 755463 - DNA, 566 bp, Homo sapiens
gggaggacagagctcattctgtgcctgcattttctcagttgccttaagctgaaaataatcattatgtcagagtggcatagtttggggttatgtgctctgaaccccttcaaatgaaataatgaatttagatggcctaaatcataacatatacacatacacacacaagatagccagaaattatatttccggatggagtatacaatctgcctttggggtggtcttaccaaaaagtcagatatggatcttatttagtctctagatttaactatcaattaacaaaaaatacagaggacagaggtgcatgttggataacagcacaggaaaaaaaacccagactgtgagaactcgacaagacaggtgaatttttttttcaacaaataaattrcaaggaaaaacagatggagaaaaaaatcattagaataaaagagatattagagataaatcaaccaagtgtactatagaagccttatttggatccttctaactgtttaaaaaattacgatcagctaaatttgatcattgactgggtatttgatgacattaaggaagtaaatgttaacttaggt

SEQ ID NO: 755464 - DNA, 567 bp, Homo sapiens
ctgaaactttcccggaggtcatttatcagttttaggagccttttgatagagtctttagggttttctaggtatataatcatatcatcagtgaagaaagataatttgactcattatttttcttttgttttaaatttccataggttattggggaacaggtaatatttgttacatgagtaagctctttagtggtgatttgtgagattttggtgcacccatcacccaggcagtatacactgcaccctatttgtagtcttttatccttcaccccctttccccctttccccctgagtccccaaagtccattgtgtcattcttattcctttgcatcctcatagcttagctcccactataagcgagaacatacgatgtttggttttccattcctgagttacttcacttagaataatagtctccaatctcatccagawcactgcaaatgccattaattcattcctttttatggctgagtagtattccatcgtatatatacatataccacagttttttttatccactcattgactgatgggcatttgggttggttccatgattttgcaattgtgagtt

SEQ ID NO: 755465 - DNA, 640 bp, Homo sapiens
tttactactgctatcccatcttaactttttacctaaaagtatgggtaaagaaaaagtaattttacttttataaaattgtttttaattattaaatattacacactgaacaaacagtaattcacttttctatcagactcagatgctccaaagatttttatgggttgggaccatttggtttcttctgctgtatagtggggaaaaaraatgtaaattattctccagtccaactcatcgttgtttccctaaattgaaaagcaaactgagatagtaaaataaattatttttaagtccacattttcccatttcatcaattttatacaacctgatagagtaactctggaaagaacagcaatagtcacggagtttccatcaataacaagccttaacctcctatttccagtctaatacttttcagatacctaataaatggtatcttataagtaacagaacaaaaatcatttttgctataacaagaatatacagacaagaccctatcagctaaagactaatagtgtatgtagtggctccttaggccactacagcttgttcatttcttccagattaaaggatacaataactgttctatcagcagaggctgtcaagatgagttgatttttctcttcacaagattccaaggaag

SEQ ID NO: 755466 - DNA, 640 bp, Homo sapiens
tttactactgctatcccatcttaactttttacctaaaagtatgggtaaagaaaaagtaattttacttttataaaattgtttttaattattaaatattacacactgaacaaacagtaattcacttttctatcagactcagatgctccaaagatttttatgggttgggaccatttggtttcttctgctgtatagtggggaaaaaaaatgtaaattattctccagtccaactcatcgttgtttccctaaattgaaaagcaaactgagatagtaaaataaattatttttaagtccacattttcccatttcatcaattttatacaacctgatagagtaactctggaaagaacagcaatagtcayggagtttccatcaataacaagccttaacctcctatttccagtctaatacttttcagatacctaataaatggtatcttataagtaacagaacaaaaatcatttttgctataacaagaatatacagacaagaccctatcagctaaagactaatagtgtatgtagtggctccttaggccactacagcttgttcatttcttccagattaaaggatacaataactgttctatcagcagaggctgtcaagatgagttgatttttctcttcacaagattccaaggaag

SEQ ID NO: 755467 - DNA, 640 bp, Homo sapiens
tttactactgctatcccatcttaactttttacctaaaagtatgggtaaagaaaaagtaattttacttttataaaattgtttttaattattaaatattacacactgaacaaacagtaattcacttttctatcagactcagatgctccaaagatttttatgggttgggaccatttggtttcttctgctgtatagtggggaaaaaaaatgtaaattattctccagtccaactcatcgttgtttccctaaattgaaaagcaaactgagatagtaaaataaattatttttaagtccacattttcccatttcatcaattttatacaacctgatagagtaactctggaaagaacagcaatagtcacggagtttccatcaataacaagccttaacctcctatttccagtctaatacttttcagatacctaataaatggtatcttataagtaacagaacaaaaaycatttttgctataacaagaatatacagacaagaccctatcagctaaagactaatagtgtatgtagtggctccttaggccactacagcttgttcatttcttccagattaaaggatacaataactgttctatcagcagaggctgtcaagatgagttgatttttctcttcacaagattccaaggaag

SEQ ID NO: 755468 - DNA, 641 bp, Homo sapiens
aaagcccaggcaggtgaaagccatgcctcttacaccagttagccaagttatgcaaaggaagagttcttgaaagtgttaactccagtgaacatgcaaacaagaaagtgaaacagccttactgctgagatggagaaagtctgagtggtctatatagattaaacaagccacaacattcccttaagccaaagcctaattaattcttcaattctttcttcgaagactgagaggtgaggatgctacagaagaaaagctggaagcaagcagaggttggttcatgaaactatccccattaacgtcagagtgcaagggacaacaacagcaggaagttgtccagatgatctagctaagatcactgaaggcgactacactaaacaactgagtttgtgaagatgaaatggtcttctattagaagagatgtcatctaggacttcatagctggggagaagaagttcartgccagcgagtgtagttggtgcctttaagttgaagtcagagtttatttaccagtccaaaaatcttaaggcccttaagaattatgttaaatctactctgcctatgctctagaagtggaataacaaagcctagatgacagcatatctgtttatagcatggtttattgaatatttaagcctatggttgag

SEQ ID NO: 755469 - DNA, 631 bp, Homo sapiens
tgggtgtggtggcacatgcctgtaatcccagctactcgggtggctgaggcctgagaatagtttggacccgggaggcagaagttgcagtgagccaagtttgcacccactgctctccagcctggacgacagagtgagactgtctccaaaaaaaaaaaagaaagaaagaaaaagaaaaagagtggktaggactagaatctaagtttttctctctccagtttccccatttctaccaaggataaattatagtaccttgctatttcaggaataatgaaaaataaaaaataaaaaaattacaggaccaatttatttgctttagttgcaaaataaattttagtctcactatacttggcctaattatttgcttaaagtgtagcaagaatagttattagtcatataggcttcttttcaattggctttgctggaactttataaggaattttggatttgacattttaaaagccttgagactaaggattccccattagactatgcttgtaatacctatacataggtactatacctgtagaaattcctctcttctttagttcccaaaatatcttggttcctgggcctgtcagaaagtgatattctttacttaccagaggccgggaaccttgtaaggaaccattta

SEQ ID NO: 755470 - DNA, 596 bp, Homo sapiens
tttcctgtgaaaaaacatccgactgaacaaccttcaattctgatggtaatgtgacactaacatgctctgatacacacgtaagatatctgctattctcacataccttgctactctttggtagttttttttttgtttgtttgtttgttttcagaagtaatgagataggaagagggagggaaatttaggcattgattgctttcggggctaattctggcagacaagtcatgaaattgcatggcctacttcagggcctatggtggctgccatgatatgaacaaaacygtcagaaacctgagggtttagcaagagtgaccccaggagaggtgtgaacaccttccccttcctctcggtgtacagcatatgccccctggcactgcaacttcttggtaccacttgagaggagctcttgcttctgatgtcagagacaccaggattcagattgctttaggcctcgaacagccttagagatttccaagcctcagaggctgaggcccaggaaaaccaaaggatgtcctgagggcaacacaaatacagccatagagccagtactggagtttccatttcttgactaccagtctagtttgttttccagtttt

SEQ ID NO: 755471 - DNA, 596 bp, Homo sapiens
tttcctgtgaaaaaacatccgactgaacaaccttcaattctgatggtaatgtgacactaacatgctctgatacacacgtaagatatctgctattctcacataccttgctactctttggtagttttttttttgtttgtttgtttgttttcagaagtaatgagataggaagagggagggaaatttaggcattgattgctttcggggctaattctggcagacaagtcatgaaattgcatggcctacttcagggcctatggtggctgccatgatatgaacaaaactgtcagaaacctgagggtttagcaagagtgaccccaggagaggtgtgamcaccttccccttcctctcggtgtacagcatatgccccctggcactgcaacttcttggtaccacttgagaggagctcttgcttctgatgtcagagacaccaggattcagattgctttaggcctcgaacagccttagagatttccaagcctcagaggctgaggcccaggaaaaccaaaggatgtcctgagggcaacacaaatacagccatagagccagtactggagtttccatttcttgactaccagtctagtttgttttccagtttt

SEQ ID NO: 755472 - DNA, 600 bp, Homo sapiens
gtctctacctttcaattgagctatttagataattataattttcaggtaattactgatacaatagattaatatatactatatttgtaactattttatttgttgcccttattctttatttcagtttttgtctttcactatttttctgtctttggctatttcaattgagcattttatatgatttaattttctttccttagtatatcagttatctttctttaacttgtttatttgttgttcaagaattttcaatatacatttacaatgaactgaatgaagtcaattttcaaataacactgtacttcttaatgggtagcaagagttctttatgataagttatttctaagtctttcatcccttatatcattgttaccattcatttatcttatacrtagtatatacacataatataatacaatacattgtttccattattttcaataatcttatgaataagaataagaaaagtaaaagtttttaatttaccttcacttagtctttctctgatgcatttcctttctttaaacatatattagggaaaggacagcctcttcaataaaccatgctgggcaaactagatagatatccatatgcagaagcata

SEQ ID NO: 755473 - DNA, 600 bp, Homo sapiens
gtctctacctttcaattgagctatttagataattataattttcaggtaattactgatacaatagattaatatatactatatttgtaactattttatttgttgcccttattctttatttcagtttttgtctttcactatttttctgtctttggctatttcaattgagcattttatatgatttaattttctttccttagtatatcagttatctttctttaacttgtttatttgttgttcaagaattttcaatatacatttacaatgaactgaatgaagtcaattttcaaataacactgtacttcttaatgggtagcaagagttctttatgataagttatttctaagtctttcatcccttatatcattgttaccattcatttatcttatacgyagtatatacacataatataatacaatacattgtttccattattttcaataatcttatgaataagaataagaaaagtaaaagtttttaatttaccttcacttagtctttctctgatgcatttcctttctttaaacatatattagggaaaggacagcctcttcaataaaccatgctgggcaaactagatagatatccatatgcagaagcata

SEQ ID NO: 755474 - DNA, 620 bp, Homo sapiens
acaaataacaacaacaaaacataaacaagtccaatttaaaaatgatcaaatgatttggagacctgagtttctagtttaaagcatttttctgctctgaagaacttgttcagggccaggcacagtggctcacgcctgaaatcccagcactttgggaggccgaggtggttggaggtcargagtttcagacacgcctggccagcatggcgaaaccccgcctctactaaaaatacaaaaattagccaggcgtggtggcacacgcctgtaatcccagttactcaggagtctgaggcaggagaattgcttgaatctcagaagggaaaggtcaaagtgggccgagatcacaccactgcactccagaccgggcaacagagtaaaactctgtctcaaaaaaaaaaaaaaaagaaaaagaaaaagaaaaagaaaaaaagaacttgttcaagcatttcttgcaagtcagatctattggcaaaaaataccctctatttttgtttgtctgagaaaggatattctttctgctgcacatgtgaaggataatttcacatttcacagagacagaattctatactagcggggttttctctctcaacactaaaaatacttcactctcttcttgttttatg

SEQ ID NO: 755475 - DNA, 594 bp, Homo sapiens
actctaaacttttccaaatactgtttaaatttggttatatttctggttgactttgatggatgcagtttgtttgctataaaacaactagtgtttgtattgattagtagaaaaggcagcttcaaagatttgcatgaatatgacccaaatatgtattagccagtgtaaaagaactgaataattttatttttagttctttgtttaagcccccacctgaccaattttatttttctgtcaacattgaaaggctgctccatatatagaaaatgaaaaatatattttcattrtacaaacaaaattattttcctagactatattacaaaattgaaacatatctctatatgattatacttcagttcatattttataatttgttttcgaaagtccaaactgtttaattttctccaatataaaattcctaactatttataaaacttctgcgttttctaaacatgtaacagaataaatgaaaaatgtgagcaaatacacagaagatacgtattattatttttcttggaatctatggtaatttattaagatgtttaaagttttcagttttagatactcactgcattctatcttagatatttcaatttc

SEQ ID NO: 755476 - DNA, 701 bp, Homo sapiens
ctcaatatatcccacaatgtttgatggtaattttttctaccgtaatttcttaggatatatttaataaaagccattctattttaataataaacaagctaccaacaaatataagtgaaaattgcatattcacataattaaaatttgcaataagcatagaagctagaagcattaacctattggccataagcaaactccagacatatgtmactgcatctcttttaaaacaattttaggaaccaaagattatgaaaatattttttagacttactttttcactacatgctaaactaaatgctgctgcaggtgtagtatcaatatttaggttagactgaaaattccagagggttaagatgaagtttccccaggtaattggacttctatttcaccattgttttagaatttttaaacttatgttctaaaccataaatgtaatcctaaaataatattttcatattcaccatgtgtttgaaagttgttttctgttcatgttgaattatctagtgatgaaggatttattagtgttgcttgaaactagagttgaggtgatcaaaataattttactgtatagttcattggaagtacaaattaaaagcccatgaaaatacaaagtaactgaaatattttagcaatattttttgtggtgatttatattattttttttagcttgttaaatctaaacaactattttgtatgtattatgt

SEQ ID NO: 755477 - DNA, 701 bp, Homo sapiens
ctcaatatatcccacaatgtttgatggtaattttttctaccgtaatttcttaggatatatttaataaaagccattctattttaataataaacaagctaccaacaaatataagtgaaaattgcatattcacataattaaaatttgcaataagcatagaagctagaagcattaacctattggccataagcaaactccagacatatgtaactgcatctcttttaaaacaattttaggaaccaaagattatgaaaatattttttagacttactttttcactacatgctaaactaaatgctgctgcaggtgtagtatcaatatttaggttagactgaaaattccagagggttaagatgaagtttccccaggtaattggacttctatttcaccattgttttagaatttttaaacttatgttctaaaccataaatgtaatcctaaaataatattttcatattcrccatgtgtttgaaagttgttttctgttcatgttgaattatctagtgatgaaggatttattagtgttgcttgaaactagagttgaggtgatcaaaataattttactgtatagttcattggaagtacaaattaaaagcccatgaaaatacaaagtaactgaaatattttagcaatattttttgtggtgatttatattattttttttagcttgttaaatctaaacaactattttgtatgtattatgt

SEQ ID NO: 755478 - DNA, 645 bp, Homo sapiens
acacacatatttcaatgtgtattttaaatacgtgtatttataatttgtgtgttggaatacacatattattgaatgtgtgtttgaaacatgcatactgattgaaatatatgcatttatgtgtttgaaatatacatgtttcactgattgaaacatacacgtttataataatccatgtttcttgaggatttcaaattatttamcaatattcagatcctaaaatattctatctcttataaattgagaaacatttattattttcaattgcacattaataggtgagtgaataaacaaattatgttcaaagagcatacattgtaggacttgaatacatttcaatagtcagaatacaatctatcttggcaaatgttccatagaaactagcaaagaatgtgttttttggtgccgttagattgagtgttctatgaatgttaattatgtcactgtggttaataatgctatttatgtgttcaatatccttactaatttcctgtctcatggttctatctactattcagagtggtgtcaatatctgcaactataataaagaacttttctagttctccttgcaattctattgctttttccttattttacttgaagttcattatcagatatagaaatgtttcagattgttatggcctcttg

SEQ ID NO: 755479 - DNA, 667 bp, Homo sapiens
acacatcattattagattaatttttctttccactgttcatcaaaatatatatccatataaatgttttattaaccaataatctatccataaaagttatttataccaaaatatgtatgcatacaggtaaaagtatgattcataaaatatttaaagtactgttaaaaaaactaagattatattattaatattatgcaagtaatgagaacttcaaacacaatataatttgtgcaaaaatgtaaatttcagaagtaagtgaaaatataattgaactgagatgattacatacctaagcttctaaggaaacttaaaggcaatttcattaataatggaattccctctgaagtcattcgtacgtgtggagctggcrtcaaagtattaaaatgttctgcgtgtgtatagaaacagtaaaaaattatttttattttgcctgttgctaactcctgcagaagtcagtcagataattctctcaaaaatagacctgcttttgtttcttttaattgtttacagatcaaaagcttttttaagtgagaaacttgagggacttcactgtgttttcagatctatctgaggggattaacaccaagtgttattttggatgatcagttttacccttgctaagctttgtaatttctcatagctctctgagttgttgcacagtacttgacaa

SEQ ID NO: 755480 - DNA, 603 bp, Homo sapiens
cctgtgtgtcatatggtctgtctgtgcttttaatttgtgtctccttgattactgatgacattgagcatcttttcagatccttattggcctttcatatatatcttcttttataaagacaaaatcttttgcccatttttcattgagttgtcttgttactgacttgtaagagttcttcatatattctagttagaagtcctttgttggatatatatttgaatagtttctccaaatttatggcttatctgtttattttcttaatactattttgaggaacagagcttcatcttgttgaagtccagcttcttatgcttacactttttgtgtcctaagaaatcttcgcctaatcaagatcatggatattttctcctgttttattctaggcaatttgtagttttaatttttatctttcagcctrtaatcaatcaatctttgtgtatggtatgaggtaagggttcagggtttttgttttgttttgttttgtttttttgcatgtggatttacggttgtttcagtatcatttgttgaaagtatcccttctttttggttgtgtgggtccaggagctggaggaagacagggaggaaacctgtgggtgtggtggatgt

SEQ ID NO: 755481 - DNA, 654 bp, Homo sapiens
ctgcatttctaatgagctcctgggtgatggtggtgactgctggtctgcagaccacattttgagtaataaggtgctagcacactacctggtgtccagtagacctaccacaaaatgactaaatgggatagaaatgggttaaaacagaatatgggtcaaggtgtcaatgactgaaccagccttagctttaaggccacattggaacgtgcattatctttaattgtttaattaagaccaagtaactttcctcctatggctggcccctggggactctcatggcacagggtgctggactggacctaataaggtcttaggtggccatggcatattggactgatgtcyttttgctttgatcctcgattgtgtacacattatgggccaagagctatgctagatcctgggagaaatacaaagatgaaccagattccatttctgtctcagggagcctaaaattcagtcaggcacatgcttagattgtgccctcagacagaacaggcaagagaaatgcattcattcatgcatgcattcattcaagcccaagtatttattgaacgattatgatgtaccaagtatcgtatatactggtgaataagagccataattcctgctttcaggcaattaaaaatcaaatataggtggagagggaggcagggaggg

SEQ ID NO: 755482 - DNA, 602 bp, Homo sapiens
gtgagccgtgactgcaccactatactccagcctgggtgacagagagactttgtcacaaaacaaatctacctcaaaaggttgttgaaaggattaaataaattaatatttttgaggcacttaaaacagtacttggcacagattatgtcgtgtgtgtgtgtgtaatccatatcttctatcatgttagaagtttctgtctactcttccctggtgaattctagcaaataaactgattccttttgataaatatagaatgtttaactttttaaatttaatgaaaaatggttaccatatttcctaatgctgaacaacaattcaatctacgcttttattttctatactggctaggtttatatatcttttgggactatttttaaatatcagttttttaatatttctgcccctcacttcacttatttcatttgtttctgctcttaaaactttcttctactttctccaarttaccttttgtttttatgagtttaatgcttagctaattaattttcagtctttcttcttaactaaatatcctctctaatattttatctgcatatgaaacacgtttatccctaatgtttcatatgtggtaatttcattattcagtt

SEQ ID NO: 755483 - DNA, 666 bp, Homo sapiens
aagatagaagcttagataactgatttttatccttttctaacattaaaactgcaaattttcccctaatatgtctttcattgcatctcacaaacgttgttatgttgtgctttttatcatttactaaaatattttctaatttacctaatgattttttctttgaagtgtaggttatttagaaatgtagtctttaatttccaaatattgggacattttctagatatcttaattattattgatttctaatttatttatttsttttagggagagggtcttgcttgttgctcaggctggagtgcaggtggcatgatcatggttcactgcagcctccaactcttgggctcaagcaacctcttgcctcagccttgcaagtaactgggactacaggcacacaccattacacctggctaattttaaacattttttctgtagagatggggtctcattttgtgttccaggctggtcttgagctcctgggctcaagcatttctcctgccttggcctccccaagtgttgggattatagttgtgagccactgtgccaagcctgatttctaatttaatacatttggccagagaatatattttgcatgatttaaattcttaaattaattaagatttatttatagccctggttatggtctatctaagtgaatgttccatgtgtacc

SEQ ID NO: 755484 - DNA, 535 bp, Homo sapiens
tgtcaaactcctggcctcaagcaatcctcctgccttagcctcccaaagcactgagattacaagcaagagtcactgtacctggctttcttatgacatttaataagtcaagacctttttcttttttttttttctgagatagggtctggctctgtcacccaggctggagtgcagtggtgtgatctcagctcactacaamctccgcttcctgggttcaagtgatcctcccacctcggcctcccaactagctgggactacaggtgtgtgcaaccacactcagataatttttgtatttttagtaaggacaggttttcaccatgttggccaggctggtcttcaactcctgacctcaagcgatctgcctaccttgacttcccaaagtgctgggatgacaggtgtaagccaccatatccagcccaagaccttttgcttttagttactataaatctattaaacttgtcaatttacctctctaaattaaaagaagtagataatcttataaatgtatttaacgaggaatttgacaaagagaaaatcc

SEQ ID NO: 755485 - DNA, 535 bp, Homo sapiens
tgtcaaactcctggcctcaagcaatcctcctgccttagcctcccaaagcactgagattacaagcaagagtcactgtacctggctttcttatgacatttaataagtcaagacctttttcttttttttttttctgagatagggtctggctctgtcacccaggctggagtgcagtggtgtgatctcagctcactacaaactccgcttcctgggttcaagtgatcctcccacctcrgcctcccaactagctgggactacaggtgtgtgcaaccacactcagataatttttgtatttttagtaaggacaggttttcaccatgttggccaggctggtcttcaactcctgacctcaagcgatctgcctaccttgacttcccaaagtgctgggatgacaggtgtaagccaccatatccagcccaagaccttttgcttttagttactataaatctattaaacttgtcaatttacctctctaaattaaaagaagtagataatcttataaatgtatttaacgaggaatttgacaaagagaaaatcc

SEQ ID NO: 755486 - DNA, 535 bp, Homo sapiens
tgtcaaactcctggcctcaagcaatcctcctgccttagcctcccaaagcactgagattacaagcaagagtcactgtacctggctttcttatgacatttaataagtcaagacctttttcttttttttttttctgagatagggtctggctctgtcacccaggctggagtgcagtggtgtgatctcagctcactacaaactccgcttcctgggttcaagtgatcctcccacctcggcctcccaastagctgggactacaggtgtgtgcaaccacactcagataatttttgtatttttagtaaggacaggttttcaccatgttggccaggctggtcttcaactcctgacctcaagcgatctgcctaccttgacttcccaaagtgctgggatgacaggtgtaagccaccatatccagcccaagaccttttgcttttagttactataaatctattaaacttgtcaatttacctctctaaattaaaagaagtagataatcttataaatgtatttaacgaggaatttgacaaagagaaaatcc

SEQ ID NO: 755487 - DNA, 616 bp, Homo sapiens
atagactcatgttacattgctggtactctcatagaataattttcttctttcctaagtgagaagaaaccaattacaaaccttgatttactttttcattatttcatgcagaaacaaacaaacaaaaaaaactggacaaaaacaaacaaaaaatacgactctaatcatggaaaaaccttaaaaaaaaaaactccattaacacacacagacacacaagaagctactcatgcaattctcctcgactgttcctcactctgattcagcagaaaggtgaggaggttgttaaatccaacaaagaaaatcacagtgggagacccttttcacatctgatcatgagttaactctgtgcggcattttccgtggtggttactgcagtgactgaggggaccaggagttgagggcagtatgatgtggggaacccacaggcctggtcctgttttctgagtctcctgggcaatggatcacctctctccagscttcactttcctgtctctaaaatggtggtgtgaactccacaatcttgagggtcatttccatctttaacagtttgctatctcatagttctaatattgatcatgtaggaacattagtcattattttcaaaagagcaaacttctga

SEQ ID NO: 755488 - DNA, 615 bp, Homo sapiens
aaatcttcccacccagatgattatatgcccaactaaaatctctaatggaaaaaaaaaggtatatttatttaaaaagattactccacagctctcaaaaaggggagaggacttgataattgacaaggcaaagttgatgctgcagaaataattcttctgttatttttaaagtttcttttgttttggttttatttgtcttgtaagaatcactcaattatgtgtaatgagtcagagaggcaatcaggctgatacaaaaggtttggcaagaaaaaaatgttaaacaaagtggttttcttttttttttttttttttcaaaattttgatgaaacattattaaagtattagtcaaagaaaactagtcacaattttgtatcttatgccaattttctgatgtaaaaaattggtattatgcttcttacattatgttaaraactttttttggtcaaaattctttaaaagttttatcttttatatacctattaaattttatttatggagtacagggtgatgttttgatataggtatacatcatggaatgattcttaatttaggtaaaagattttctaaaaaaggagaaaaggaatgtaggtagcactttaataacataactatacttaa

SEQ ID NO: 755489 - DNA, 510 bp, Homo sapiens
acggtgaaaccccgtctctactaaaaaacacaaaaaaagttagccgggcgtggtggccggcgcctgtagtcccagctactccaggggctgaggcaggaaaagggcgtgaacccaggaggcggagcttgcagtgagccgagttcgcgccactgcactccagcctgggtgacagagcgagactccgtctcaaaaaaaaaaaaaagacagacaatggaacagaatagagtsaagaaatagacctacataaatatagccaactgatctttgacaaagaagcaaaggcagtacaatgaagcaaagataatctttccaacaaatggtgcaggaaaaactggatgtccaaatccctccccccgccaaaaaaaagaatccagtgggactgctctgaaaagggagcacttttactgctggtgggaatgtaaattagtacaaccactatggaaaacagtatggtgattccttaaagaactaaaagtagaactaccatctgatccagcaatcccactacta

SEQ ID NO: 755490 - DNA, 573 bp, Homo sapiens
cctttagtaggtaaatctgtaagatctggtgattgattgggtgtggtggatgaataaggagaaatctagaatgacttacaagcctctggcttcagtaattggttagatacagtgtaggcaatttagagaaaaggcattgttaggaggaacagtaaaaatgttctatgttaagcatgttgactttgatttggctgtaaatcactgaggaaccaaggaggatatgtctaaaagatcattctatttggagttcaggcaggaggtctgggatgttgacaattttgcactgtcatttctgtataaagcaataaaaactagatgatgagatggtacaggtcctcagactggtgacgggaaataaaaatttaaagatwaacagaataaaaagagataacatcagagagtgagaagaagtgaacaaggaggttagaaggagagcaaaatagaatggtagtgatcatcaaagctgaagagagttcaagatccaaaattccacagcgaaattaagataaggactaagaataatgcattagataatacatcaaggaggttattgttgactttataaagggcaat

SEQ ID NO: 755491 - DNA, 592 bp, Homo sapiens
ttattttatcttattgggtgtttgtgcaattctgcatactgcacacagctcatctcaggcctcttgtctctggctcacactgacatcctccttaggcactcatttcctgtctaatgtactccctacactcagttttgaccccattccactagctcctcacttttcccattctatcttccacattgctgctcatgattttgttctaaaacacagctcaggccacttctttgattaaaatcctttatagttccttcttggcttcaggataaatcaagataatatcacaaggcatacaaatccctttattccttgacccttgcctccttccttgttctcattttccctttsttcctattcatctttccgccatcccaaatttatacggatatatagtagaaatgcaacaggaaaagataaagcaagaaatagtgaatataaatgttaaggggctgaaatgttaagcgtccatgaaactcttcattgaaaaagtgatgttttactacataggtgaaggaagtgagggaatgagttgttcagccatctgggggaatagaagcagagacaaacagtgcaaaggccctgaagtgggagc

SEQ ID NO: 755492 - DNA, 460 bp, Homo sapiens
tgtctctctctgccttttagtctctcttcctatttctctccctactcttcctctcaggctcctctgtctctctccccctctctcttcctctctctctctctcactcccttctccccatctctttctgtctccttcttctccacttctgtctccctcctcctctccctctctgcagctgttgaggcaggactcctaggccacctttcagggtacctgcaggcaagcaggaccttggcccccatctcccagcaccctcaaggtcaggggtgtgcrcctttccatgctctcctgggtgggcaccccacactccaggaagcagaagctgcaggtcactgctgactagagtggcacaccgacggggtgcttccacttgtaattgtgacttccatcttgtgatctgctgaggtcaaagcagaggacacatgctcaggccggaccctgcaccagggtgggggtaggg

SEQ ID NO: 755493 - DNA, 540 bp, Homo sapiens
aagggatcagactgtcctaaagccctcaggaatctgggctgggaccagcctacttaaagataggatgggcagctgggtgtggtggctcacgcctgtaatcccagcacttcgggaggccgaagtgggcggatcacctgaggtcaggagttcgaggccagcctgaccaacatggagaaacactgtctctactaaaaatacaaaattagctgggtgtagtggcgcatgcctgtaatcccagctactcgggaggctgaggcaggggaatcgcttgaacctgggaggtrgagggtgccgtgagccacgatcgcgccattgcactccagcctgggcaacaagagcgaaactctcaaaaaacaaaaaaaaggatgggttccatatgggtggtgtcaagtgcccacctcctagcaagtcagcaggggccagaggcccttgtaagtggtgtctcggggggatcaactgagatggcttaggatttacctggatgcctgctctgctctccccatctcttccagggatccacaaatgctaaagagctgtctt

SEQ ID NO: 755494 - DNA, 646 bp, Homo sapiens
tatgcatgagttcattgacctactacaaaaacaggaaaaaaaaagatttgtgaaggaggaaagctctttgttaacagaatatcagctaagatgtaggaagaaaatagacttagaaaattatcaagggttcttaaaatccacttatacaggttctaagcatcatcctacatattatttatatgataccaaaggaaaatttttcctttccaatagagggatctaacagatgacaccagataaaatgatcaaacttagcatcactaataaggaccagatggtatcgtatgcctcataatgtttttcaatgcaaaatcacccatgtagttttttgacagacacaaaaaatgtttaattcaattctacttgacaaagaaagaattggaaaaattcatattacactaycttgcacataatatttggtttgcagtcttataaaatatctcatgctctacatcccaccttgcttgaaggaccctctagcatttttgtgactatccattatggcttcaaaataattgtttactcattgtgagaaaaaatgctttgaagtttaggctatctgaatatttctctactatctatcttcgttttcagttacagagacttcacaacaactattgccattagcctgaatgtgtgaattata

SEQ ID NO: 755495 - DNA, 622 bp, Homo sapiens
ttactcaaaatacttgggaaaacttatgtcacagccaagaagtttgaagcatattcaacacattgaacactagaggtttgcagactccacttactcacttattggggttgactttccttctaaaatgactgtgttttgtatactaatgaatgcattaatcagaacatatttgcatataacatcaataagcaatttttttttttttttgagacaggttctcactctttcacccaggttagagtgtagtagtgtgctcatagctcactgtcatactgaagtcctggactcctgggctcaagtagtcctcctgtctcagcctcccaagtagttgagactacaggcatgagctagcatgcctggctaattaaatttttttttaraaatgtcttgctgtgttgcccaggctagtcttgaactcttggccttgggtgatccacctgcctcggactcccaaagcattagtattacaggtgtgagccacagtgcccagccataataaacaaaaaactaaatgtcaacaaatacacaaatcagaaataaccatcaaatatctcatcaaacaaaggaattatgcaggtaatataactgcagggttatctaggtcatctaatcatagcccatg

SEQ ID NO: 755496 - DNA, 658 bp, Homo sapiens
aaaagtaaatcatatctgcaaactataactagtgcaaccacaaaagaaaattgtccttagcttgggctgctataacaaaatgtcatatactgggtgactaaaacaacaacatttgtttctcatagtatagagcctggggagcccaagaaggacaggctgattcagttcctggtgagagccctcttcctggagcttgcagatagctgtcttctgtgtcctgacatagtggaaagagagcaagttctggtcttccaccttcttcctacagagaagatcccagcatggagtcactgcccttatgatctaactgaaatctaattacctcccaaaggcctcacttccaaataccctcacattggggaacacggattcaacatataaatttggggaggatacaaactttcagcccataatgagaatctttagacaaacttaatctaattatatggtgttcttttactggaaaagctgagytgctcaaagataagacagaaatcatataaactaggatttcattatttttcctggaaaattgtaaattaacaaaaaacatatgccctatgccactgaccatattctaaatctagcagtttaatatttgcattagtgagaatttccagatcagatttctcagatgaattaaaatcctgacttgtaa

SEQ ID NO: 755497 - DNA, 565 bp, Homo sapiens
gctgtttgtgcaaggactaagttctcttcaattaacaagtaatggatcctgccaggactgaatccttcctttcaaggcagctggttcccctctggcctaggttgtttctagaaatgtgaaatgggaatgagagcctgcaacaggggcctcatgactctaaccagtgccctatcctgctgtggttgaactggtatcaatgatacatgatagagtcctcctctgtcttccctttgctctcctcaagtggaaggaaggggtctcttttggagctgcaagctgtgcagcctggagttagggaaggcgtgatgccatcccagctggtgtctcagtaggtcacatggcccaccccaccaattcactkcctgtttacccagttcagcactaggacacacctaagaatttcagtccttatggcatagactgctttcaagtttacttagcaacccagagtgctttgtcccttggtggcaaggtttgcagaaactgaagtttgggcaactggcactggtgactcccctctggctaggactggtttaaatgctccctctgtgggtgggcatcagcc

SEQ ID NO: 755498 - DNA, 623 bp, Homo sapiens
gactaacccaaataagccagtattcacaaaaactaaagactggcttcaaatctgctcaatcccagactggattataacaatctgcccctatcttgacttccaaaagcagaaagaagtaaatgctctaaggggaaaatagcatcatccagaggctcaaattctctcttcagtttttcatacacaatgcctgacattcaataaaaagttacaaaaacaagaccaggtgtggtggcgctcaygtctgtaataccagcagtttgggaggcgaggcgggcagatcacgaggccaggagatcaagaccatcctggataacgtggtgaaaccccgtctctactaaaaatacaaaaaaaaaaaaaattagccaggagtggtggcatgtgcctgtaggcccagatacttgggaggctgaggcaggaaaatcgcttgaatgcaggaggtggaggttgcagtgagccaagagatcacgccactgcactccagcctgggcaacagagtgagactccatctcaaaaaaaaaaaacaaactttttttaaataaatgaattatgaagcatattgggagatgtgcaaggccagaaaccaagagaaaaaatagacatagaaagaaaaagctctaaggaga

SEQ ID NO: 755499 - DNA, 642 bp, Homo sapiens
tctgagctgaagaaccaagggctggtgaggttgagggacagaaggcttcctagaaataaaacgccgcaccaggaataattgtatgaagaccgtgaatggtttgtgctgggacaggaggggctggaaattctgggcttggcagagcttgcctttctcccatgagaaatgagaaaactctyaccctgtctctgacccatgtgtatgagatcaatatcaattgggccaaatggtacaaaggatcatgtgactagaggagtggcccaggatggtggagttgggctgggaggagggtttaccctgttagaaaaatatttctcaactctttcccattgttgttaacccgggcctggaagatgagcaggatgcagcagtgaggggaacaggggcttcagagttgggaagagcggaatcttaatcccagctcagccccttcttgccaaaccactttaactcaagaaacgcgtttccccaactgtgccagagggttaatgtgagggtgaaaagtgcctaacaaatggctcatgtctgtaacgccagcactttgggaggctgaggccagaggatcacttgagcctaggagttcaagaccagcctgggcaacatagggacactccatctctacaaaaaataaaaagttaactg

SEQ ID NO: 755500 - DNA, 642 bp, Homo sapiens
tctgagctgaagaaccaagggctggtgaggttgagggacagaaggcttcctagaaataaaacgccgcaccaggaataattgtatgaagaccgtgaatggtttgtgctgggacaggaggggctggaaattctgggcttggcagagcttgcctttctcccatgagaaatgagaaaactctcaccctgtctctgacccatgtgtatgagatcaatatcaattgggccaaatggtacaaaggatcatgtgactagaggagtggcccaggatggtggagttgggctgggaggagggtttaccctgttagaaaaatatttctcaactctttcccattgttgttaacccgggcctggaagatgagcaggatgcagcagtgakgggaacaggggcttcagagttgggaagagcggaatcttaatcccagctcagccccttcttgccaaaccactttaactcaagaaacgcgtttccccaactgtgccagagggttaatgtgagggtgaaaagtgcctaacaaatggctcatgtctgtaacgccagcactttgggaggctgaggccagaggatcacttgagcctaggagttcaagaccagcctgggcaacatagggacactccatctctacaaaaaataaaaagttaactg

SEQ ID NO: 755501 - DNA, 642 bp, Homo sapiens
tctgagctgaagaaccaagggctggtgaggttgagggacagaaggcttcctagaaataaaacgccgcaccaggaataattgtatgaagaccgtgaatggtttgtgctgggacaggaggggctggaaattctgggcttggcagagcttgcctttctcccatgagaaatgagaaaactctcaccctgtctctgacccatgtgtatgagatcaatatcaattgggccaaatggtacaaaggatcatgtgactagaggagtggcccaggatggtggagttgggctgggaggagggtttaccctgttagaaaaatatttctcaactctttcccattgttgttaacccgggcctggaagatgagcaggatgcagcagtgagggkaacaggggcttcagagttgggaagagcggaatcttaatcccagctcagccccttcttgccaaaccactttaactcaagaaacgcgtttccccaactgtgccagagggttaatgtgagggtgaaaagtgcctaacaaatggctcatgtctgtaacgccagcactttgggaggctgaggccagaggatcacttgagcctaggagttcaagaccagcctgggcaacatagggacactccatctctacaaaaaataaaaagttaactg

SEQ ID NO: 755502 - DNA, 463 bp, Homo sapiens
cagcatttattgagctctatcatgcctaaggccttgggaccatggcagtaatatttgctgacaggtaggtcttagcacattgctgcttcctatccccaatatagcaaagtgaagacctcttagcatgtcccacaacaccattgatcagcctcttaccattctcatggctcagcattcttttctctgccttacaatctttttgcattctatatgctatttgctattaaagtggcaagaaggactctaggataaagattgagtaaaattgtgctttggagatttaatagtgaggtaascttgggtaaatcacttaggctctctgttttcttacttgtaaaggttgagaattataaagcataccttaaacatccagtgtaaaaatcaatgagatacggcatgtaaattgattagcatggcatcctatatcagttaggtgtgtatttggtgataagtaacagaaaat

SEQ ID NO: 755503 - DNA, 514 bp, Homo sapiens
acacaaatgtaaccatatggaaacctgaagcaaaccaaaatgtgatatcctacaatggaactgggttaaactcctctaaaatattatggtcatgcaatggaacagaacagagagcctgggaataaaactgcacacctacaaccatctgatctttgacaaagtcaacaaaaataagcaatgaggaaaggattccctgtttaataaatggtgctcggataactggctagtcatatgcagaagaatgaaacaaccactgcctttcaccataaacaaaaattaactcaagatggatcaaagatttaaatgtaagacttaaaactataagaatcctagaagaaaatctaggaaatactattctgsacattggccttggcaaagaatttatggctgagatctcaaaggcaatcgcaacaaaatcagaaatcgacaagtgggacctaattaaattaaagagcttctgcacagcaaaagaaaatatcaacagagtaaacaggcactctatggaatgggagaa

SEQ ID NO: 755504 - DNA, 536 bp, Homo sapiens
gtaagttgtgtcttctctctctcttttgaggggaagggaagaaagtctgaaaaggttgatcaatttaagcaacccttttaaagaactgacttttgatttcattgatttttctctattttgtttttagttttattggtttctattcttttcattatttattttgctgtgcttttttctaatttcttatatyataatcttagatgattggtttgagatcttttctcttttcaacttcaagcatttaatgttataaatttccctgcactgctttaatggcatctcacaaattttgatatgttgtttttcatttttatttaactaaaaatatttttaactgcccttgagacttcctttgtgagccatgggttatttacatttttaatatttgagtacattgtgacaattttccagatatccttgttattgatttctacttcaattccgttttgatcaggttacatattttgtatgatttcagctcaactaaatatgttacattttgttatacggcccagaatatggtctatgttatatgt

SEQ ID NO: 755505 - DNA, 608 bp, Homo sapiens
tagacagtaagcacgaggaccatgtcttatatctctttgaatccatactagatattaataaatatttagtcatgacaatggcatttgattggaaggggatagaaaaatatatgactgtggaccctacggaaagggtaaaataggggaagagataagcatcatgacattgggaaggcatcgatttttcctattgggcctgtgtcattgcagcaattttagtttgatgtattatacaaacaaactttataagagtgcctaaaacataccctagataccaagcatgaagaggccttacasagatgacatacttaaggaaaatgctttcgatgaggaaaatgcctaaccagcagtgtaggagaggcagcttggcatagctatggaaggtagagatgtcactctgtgcaaccctgcaccacgccatcaatggagatacggtgttgtgtgaaaattagttgctcagtattgtggaagagaaaaccacatgatggcaggggagatgggcagaaatatggtttttattttttaaaattattagtcacaagatatttttaaattgtatgcttttcttatgcctgaggtaaccttgtttaggagaaaattgatttact

SEQ ID NO: 755506 - DNA, 425 bp, Homo sapiens
ttctagaatctggactattcaggggtgtgtgtatgtgttatgtgtgtttctatgattatattttatcagtatggttttctttaaaaagctcattgtctgttttcatgttataaaaaacatttaatgcaataaacaaattcaaacagtcagagttactgaaactgaccgaattttcactgagcaaaaacatgaaaacttccattacctaaaattataaaatttaaatcctgaagaattcctttccaagccccacatrggttttttcttaaagtttggtctgtggaccacaaacatcaaaatgatctagagcactcactgaaaatgtaaatgcacagaccaatatccctcagacctactgcatacaaatttttgggatgggcctgagaactagaattttaataggatccccagagtgattctgaatg

SEQ ID NO: 755507 - DNA, 543 bp, Homo sapiens
aaggaaaaggtgaagtgacatgtactcccagataatgagatttctataaatttatagtatttatgaaagaatagaattaatgtagtaccttactataaagtaaaatagtaaattaaatagaacagagagttcatctatagacaaacatcatataaatgtgatttctggcagacactgtattgcagattgtctggaaaagaatcaacatttatttaaatagtgacataattgttatacacaagcacaaaaatgcaccaaattcaaacagcaaatgttttaaatcaaaacayagaaatataactatttcaaacttgtactatatgagaagaaataagaaaattattttaattccccttgtgaggggagaatctcttaagccagacataaaagtacaaactgtaaagaaaactttaataaatcaactatattaaaattaagaatatttatagcaacctaattcataatagccctaaactggaagctatctacataatagatgatgatgttcaatatttgcgttattaaacaaactgtggtacatcc

SEQ ID NO: 755508 - DNA, 626 bp, Homo sapiens
gaagtgtgattgaatatcagatctttcacagactgatgggacttcatggagcattattgttgactcagataaaatgtatttattaagtgtgtattatatgaggatgctatgtggcagaaaataagtttcacatttagttatagttatgtactatgcacagcaatatgacactcgatgacygaattattaattcagaccaaataagcaaactagcagcccaggcaacaaatgcttttaagataaataagatattctgaatttagcattttgtttacatattaaatcattagaaaagtgtattaacacaaaagggttaaagaagagtatatataaaatattttgtttggtgacatactgtatactttagagaatatataatctgtgggttgctttaagggtaagaaaaatagaagaactagttattttttagcagccacattctgaaaatgactgaaagtttttatttttaatattacgtttaaaatcatgttttaaaataaataccaaaaaggaatgtcattttaggtgcattttataaacagtcttctggtgtgttaaataacttatacaaggaattggattaaataaatcccaaactaatcattattttctaattgaaaaaaagc

SEQ ID NO: 755509 - DNA, 648 bp, Homo sapiens
aatgaacattgtttcaaacacatgggcatttttcagaatgatttcacgtgaatacaaagacttcagaagctatcattgagttgagagaatgagaaggttgcagattcttttaaaatggttccacagagaatctcagaaattaaaataatcatgctgttaacaacagaatctgaaatggattctaaaaagaatgaagggtaagcataaaaatgcaaaagagagtctgatagttggtagctgtatgtaaaggaaatattatcttcatctgtctctgacatacagaaaacaagtgccagttttaargttattcttcagtttctgccaatatagataagcttattggagaaggcaagaattagcaagttgcaggacaggtaggaaagcagaatagaccaatttgtcactttcagggatggagtgagaggatgcatggcaaagccctttaagcatgtgttcatactattctcttttttaaataacccataaataccagaatgacattgcatagaaatcctttaaaaatactttatgcatttttacagtattagctctttttattgaccagtctgaacagtaaaagtgtgtatatatacacatatatatgaatacatatatgtgtacatacatatagatgtctaacagatatat

SEQ ID NO: 755510 - DNA, 635 bp, Homo sapiens
ctgaaaagactatcctttccccagtacgtttccttggcccctttgtcaaaaattagttgactgtagatacgtggattaatttctgggttctctgtactgttccattagtctatgagtctgtatgtcagtaacatgctgttttggtaactcaaattttgtagtatagtttaagtaaggtagtgtgatgcgtccagctttgttctttttactcaagattgcttttgctattgatggttttttgtggttctatataaattttagaattgtttttctatttctgagaagaatgtcactggttattttgatagggattacattgaatctgtaagtcaatttgggtagtatgaatattttaatgacattaattcttccaatttataracacaaaagatatattttcatttatttgtgtaatcttcaatttctttcatcagcattgcatggttttcattgtggagaaatttcatctccttggctatatttattcctacatgtcttttttgtaaccattataaatggaatttttttcttgatttctttttcagatagctcactattattttaaagaaattctactaattctgtatgtcgattctgtaccctgcaactttatggatttttttttattatttcta

SEQ ID NO: 755511 - DNA, 579 bp, Homo sapiens
gttttatacaaacatgctgttttgattactacagttttgtagtatattttaaagtcaggtagtgttatacatccagcttttttgtgtgtgcaagattattttggcacttctgagttgttgtgtattcatacaaattttaggaatttttaaatatttctattaaaaagtcactaraattttgacagggattgcactgaatctgtacattgctataggtaaaattgacattttaacaacatcaattcttccaattcatgaaaaggggttgtctttttattaatgtgtgctttttattcagtttctgtcatcagtattttatagatttcattatacaggtcttttgcctctttggttaaatttattcctacatggtttttgtttttgtagttattgtaaatggattttttttctttttcagagtttatggttaaaggaattctactaattttagtatgttgatttttcatcctgtaccattgctgaatttgtttgacaattctaatagttttttggcagaatatttacagttttctattgaaaaagatcatgacatctgcaataggaacaatttaacttctt

SEQ ID NO: 755512 - DNA, 579 bp, Homo sapiens
gttttatacaaacatgctgttttgattactacagttttgtagtatattttaaagtcaggtagtgttatacatccagcttttttgtgtgtgcaagattattttggcacttctgagttgttgtgtattcatacaaattttaggaatttttaaatatttctattaaaaagtcactaaaattttgacagggattgcaytgaatctgtacattgctataggtaaaattgacattttaacaacatcaattcttccaattcatgaaaaggggttgtctttttattaatgtgtgctttttattcagtttctgtcatcagtattttatagatttcattatacaggtcttttgcctctttggttaaatttattcctacatggtttttgtttttgtagttattgtaaatggattttttttctttttcagagtttatggttaaaggaattctactaattttagtatgttgatttttcatcctgtaccattgctgaatttgtttgacaattctaatagttttttggcagaatatttacagttttctattgaaaaagatcatgacatctgcaataggaacaatttaacttctt

SEQ ID NO: 755513 - DNA, 579 bp, Homo sapiens
gttttatacaaacatgctgttttgattactacagttttgtagtatattttaaagtcaggtagtgttatacatccagcttttttgtgtgtgcaagattattttggcacttctgagttgttgtgtattcatacaaattttaggaatttttaaatatttctattaaaaagtcactaaaattttgacagggattgcactgaatctgtacattgctataggtaaaattgacattttaacaacatcaattcttccaattcatgaaaaggrgttgtctttttattaatgtgtgctttttattcagtttctgtcatcagtattttatagatttcattatacaggtcttttgcctctttggttaaatttattcctacatggtttttgtttttgtagttattgtaaatggattttttttctttttcagagtttatggttaaaggaattctactaattttagtatgttgatttttcatcctgtaccattgctgaatttgtttgacaattctaatagttttttggcagaatatttacagttttctattgaaaaagatcatgacatctgcaataggaacaatttaacttctt

SEQ ID NO: 755514 - DNA, 551 bp, Homo sapiens
ttaatacatcattttacttgatgctatggtagttactgtgggatgtaacaataaataggagcatggtacacaaagagtttacagtgttatggctagagttgggtaataaaattacaacttaaatattatgtagagaaacagtgtgttataatggaaagaatcctgaactagatcatgaaggaagtcagagataattccaacatcaccatttcccactaggaccctgttattgattaaattatgttcatcaaaattgatgggttgaaaccctaaccctaatatgactgcatttggagatagaggttttaaamagaggtaattaagattaaatgaggtcataaaggtggggtcctaatccaatatgatgagtgcccttataagaagaggaagaggcaccaggaatgtgtgtgcacagaaaaaaaggccatgtgtggacacaagaacatgggcatcttgcaagccaaagagagaggcctctggagaaaccaaccctgctggcactttgattttggacttccaacctccagaactgtgagaaaataaatttcttt

SEQ ID NO: 755515 - DNA, 575 bp, Homo sapiens
caatgctgtatggaataccatgacagtgggtaaggcattccttgagttcacaaatggtagtcttggcagaagcactgggtgcaggataatcaaacccatagccgtagtaagtgtgtattccagtgaggacaaacctctgccctttccatgatgaaagatgtccaatataatcaacttaacaccaggtagctggctgatcaccctgaggaatggtgctatatcgcgggctcagtgttggtctctgctgctggcaaactgggcactcagcagtggccatagccaggtcagccttggtgagtggaagtctatgttgctgagcccatgtgtaacctccatccctactaccatggccactttgttcatagrcccattgggcgatgacaagggtggctggggaaagaggctgagtgttgtccacagaacgggtcatcctatccacttgattattaaaatcctcctctgctaaggttgcccgttggtgagcactcatgtgggatacaaatatcttcatggtttttgaccactcagagaagtccatccacaaacctcttccccaaatttctttgtcaccaatt

SEQ ID NO: 755516 - DNA, 553 bp, Homo sapiens
tttttttttttgagacggagtctcactctgtcaccaggctggagtgcagtggtgtgaccttggctcgctgcaacctctgcctcctggttcaagcaattttcctgcctcagcctcctgagtagctgggactacaggcacacaccaccacacccagctaattattgtatttttagtagagacggggtttcaccatgttggcyaggatggccttgatctcttgaccttgtgatccacctgcctaggcctcccaaagttctaggattacaggtgtgaggcattgcgcccagcctccacttacttaatttttaaaatgagcctgttaggtaacaatattaagcacaccactatatgtgtgtaatataatatttttatattgtaatatattatttgacttttacttgtaatcgttagcaaccatttgtaaaatacctaatttgatgctagcactatagtaagcaatttacatgcattagctactcaatctttaccataaccctatgagatatatgttataccattttacagatgagaaaagtgagtctattgcaaccca

SEQ ID NO: 755517 - DNA, 553 bp, Homo sapiens
tttttttttttgagacggagtctcactctgtcaccaggctggagtgcagtggtgtgaccttggctcgctgcaacctctgcctcctggttcaagcaattttcctgcctcagcctcctgagtagctgggactacaggcacacaccaccacacccagctaattattgtatttttagtagagacggggtttcaccatgttggccaggatggccttgatctcttgaccttgtgatccacctgcctaggcctcccaaagttctaggattacaggtgtgaggcattgcrcccagcctccacttacttaatttttaaaatgagcctgttaggtaacaatattaagcacaccactatatgtgtgtaatataatatttttatattgtaatatattatttgacttttacttgtaatcgttagcaaccatttgtaaaatacctaatttgatgctagcactatagtaagcaatttacatgcattagctactcaatctttaccataaccctatgagatatatgttataccattttacagatgagaaaagtgagtctattgcaaccca

SEQ ID NO: 755518 - DNA, 441 bp, Homo sapiens
acagaaccagggatggcagaacaatgaaacatagaatctgctatagtaatttttactactgtgtgatccctgaaaattttttcaagttttttaagcctcacaacagcctcaagaacaagcattttaatatttaaccacttctctttttttgtaatgtatgcacacttactttctyataattagggagtaaagttagttttaacattaatgaattcactctgtattagctctgatgataccacctggatgaaagaatggacaatatttatgattaaagaattcattcaaagatagaaatttaaaaccttggcattaagagacaagaattaaggcccgtttcataatttaaatgcattatgccacatctattacaaaatgttggctgaatgtatttgctgttgaatttcactatttctcagagctctttgagctacattaaaa

SEQ ID NO: 755519 - DNA, 623 bp, Homo sapiens
gaaacttctttctgatgtgtgcattcaactcacagtgttgaacctttcttttgatagagcagttttgaaacactctttttccagaatctgcaagtggatatttggagtgctttgaggcctatggtggaaaaggaaatatcttcaggyaaaaagtagacagaagcattctcagaaacttctttctaatgtgtgcattgaactcacagagttgaacctttcttttgatagagccgttttgaaaatctctttttttagaatctgcaagtggatatttggtgctcttttagacctatagtggaaaaggaaatatcttcacataaaaactagatagacgcattctcagaaactactttgtgatgtgtgcattcaactcacagagttgaacctttcttttattgagcagttttgaaacactcttttgaagtgactgcaagtgtatattcggagtgctttgaggcatgtactggaaaaggaaatatcttcacatcataagaactagacagaatcattcgcagaaacttctttgtgatgagtgccttcaactgccagaggtgaaccttgagcagttttgaaacattctttttgtagtatctgcaagtggatatttggagcacattgaggcc

SEQ ID NO: 755520 - DNA, 583 bp, Homo sapiens
aatctgcaaagggatatttttgagggatttgaggactacagtgaataaggaaatatcttctaagaaaaactacacagaagctttcagggaaaattgtttgtgatgtgtgcattcaactcaaggaattaaaatttttatttgattgagcagttaggaaacagtcttttggtagaacatgcaaattgatatttgggagtcctttgagggcctatggtgaaaaaggaaatatgttcacataaatactagacacaagctttcagagaagcttctttttgatgtgtgcattcaactcacagagttgaaccttactttcgattgagcagttttgaaagtctttttgtagaatctgcaaagggatatttgggatacctttgaggaccatggtgaaaaagggaatatcttcacaaaaaaactagacagaagctttctgggaaacgtctttgtgaygtgtctattcatctcactgagttgaacctttcttttgtttgagcagttgggaaacagtcttcttgtaaattctgcaaagggatatttggagccctttgaggcctacggtgaaaaagcaaatatcttcacgtaaaaa

SEQ ID NO: 755521 - DNA, 583 bp, Homo sapiens
aatctgcaaagggatatttttgagggatttgaggactacagtgaataaggaaatatcttctaagaaaaactacacagaagctttcagggaaaattgtttgtgatgtgtgcattcaactcaaggaattaaaatttttatttgattgagcagttaggaaacagtcttttggtagaacatgcaaattgatatttgggagtcctttgagggcctatggtgaaaaaggaaatatgttcacataaatactagacacaagctttcagagaagcttctttttgatgtgtgcattcaactcacagagttgaaccttactttcgattgagcagttttgaaagtctttttgtagaatctgcaaagggatatttgggatacctttgaggaccatggtgaaaaagggaatatcttcacaaaaaaactagacagaagctttctgggaaacgtctttgtgacgtgtctattcatctcactgagttgaacctttcttttgtttgagcagttgggaaacagtcttyttgtaaattctgcaaagggatatttggagccctttgaggcctacggtgaaaaagcaaatatcttcacgtaaaaa

SEQ ID NO: 755522 - DNA, 568 bp, Homo sapiens
taatgtgaagataattcctttttcaaagtaggcctcaaagggctccgaaatatccttttgcagattctacaaaaagactatttccaaactgtgcaatcaaaagtaagttacaactctgagtgaattcacacatctgaaagcagkttttcagaaagcttctgtctagtttttatgtgaagatatttccttttccaccatgggcctcaaaatgccctaaaatatcactttgcagattctacaaaaagaacgtttccaagcggctcaatcaaaagataggttcaacttggtgagatgaatgcacacatcacaaagaagtttctcagaatgcttctgtctagttattatatgaagatatttcctttttcaccttaggccacaagccactcagaaatatccttttgcagattctgcaaaaagattccttcaaaactgctcaaaagaaagtttcaatgctttgagatacatgcacgcacagaaagatgtttctgagaaagcttctgtctggtttttatatgtagttattccctttttcaccatgggcctcaaagggatccaaaatatccctttg

SEQ ID NO: 755523 - DNA, 686 bp, Homo sapiens
aacatctgcaaagtgatatttgggatccctttgattcctaaggtgaaaaaggaaatatcttcacataaaaactgcacagaacttttctgaggaacttctttgtgatgtgtgcattcatctcacagagtagtaacttacttttgattgarcagcttggaaagagtctttttgtagaatctgcaaagtgatatttgagagacctttgaggccaatggtgaaaaagaaaatatcttcaattaaaaactagataggggctttctaagaaccttctttgtgatgcctgcattcatctcacagagttaaaacttccttttgattgagcagtttggaaacagcctttttgtagaatctgcaaagtgatattttggagtctttgaggcctatggtgaaaaaggaaatatcttcacataaaccctagacagaagcttcctgagaaactcctttgtaatgagtgcattcatctcacagggttcaacctttcttttcattgagccatctagagtctgcaaagggatatttcagagtggtttgaggcttatggtgaaaaatggaatatcttcaaataaaaactatacagaagctttctgagaaacttgtttgtgatgtgtgcattaatctcacagaattgaaactttcttttgattgagcagtttggaaacattctttttgtagaatctgcaaagaga

SEQ ID NO: 755524 - DNA, 686 bp, Homo sapiens
aacatctgcaaagtgatatttgggatccctttgattcctaaggtgaaaaaggaaatatcttcacataaaaactgcacagaacttttctgaggaacttctttgtgatgtgtgcattcatctcacagagtagtaacttacttttgattgaacagcttggaaagagtctttttgtagaatctgcaaagtgatatttgagagacctttgaggccaatggtgaaaaagaaaatatcttcaattaaaaactagataggggctttctaagaaccttctttgtgatgyctgcattcatctcacagagttaaaacttccttttgattgagcagtttggaaacagcctttttgtagaatctgcaaagtgatattttggagtctttgaggcctatggtgaaaaaggaaatatcttcacataaaccctagacagaagcttcctgagaaactcctttgtaatgagtgcattcatctcacagggttcaacctttcttttcattgagccatctagagtctgcaaagggatatttcagagtggtttgaggcttatggtgaaaaatggaatatcttcaaataaaaactatacagaagctttctgagaaacttgtttgtgatgtgtgcattaatctcacagaattgaaactttcttttgattgagcagtttggaaacattctttttgtagaatctgcaaagaga

SEQ ID NO: 755525 - DNA, 565 bp, Homo sapiens
ccttcttaagggtcccttggcaattcagcctacttccaagtaacatcctgcccaccctgtacagctctccttccacgacacgtaagcataaacggacagggaagagaccaaggcacacgacaatttgggacactctgaatagaggaataattratggggggggggtctttcacccttctcagagtagggcttgtttccttgggaacatggcagtatgtcactgtgtgatgttcttctgttgccataacgacaggaggatgtgtcaccaggtggtgtggatttgttgtcatggtaattaaaaagacccctctcacatgatctcccctgactgaggctgttgtcttgtccttatgcaggggaggagaatcagggagacccacaggttatcaggttgggggaaaaccatgtgacagatccccatggtaaccaagggaacgggggacactggttgccatagtgactatgagagacctgtgcagtcacatgtctactgttgctatggtgactgtccgggctggagtggatcccaaagagggggtaggagaggggaggatctttcttctcc

SEQ ID NO: 755526 - DNA, 597 bp, Homo sapiens
catattagctcttcgtgggtgggaacagcctagaaaatcaggaaatgggagccatgaggcagactgtggggggaatcccagcccatctgaggcccattgtctgtcccctcaaagctgggttaaggcagcctctcttagacctgggccctggggccacccatactatggcctcctcagccctacggagtacttagccaacatttattcctccaacaaatatttaggaaacacccaccacagagagggcccartggtaaaaaatgaacaaagccaaatacagtccctgtccttgcagagataagggtctggtgggaaagacaggagtgcagtcaaccttggtaatgatgaatgtatgtttagaaagctgagataaggaaggggccgtggtcctaggagcacctgtaagacggaatctgggatcacctggggctccaaggaaaactcccttaagaaatttatgcctaagctgacagctgaagggtgaggaagtattaatcatcagagaagggagaggagggcttttccagcagaggagagcttgtctctgtggctggggcatggaaaatgaaagggagtgctgtgagaacgggagggtga

SEQ ID NO: 755527 - DNA, 597 bp, Homo sapiens
catattagctcttcgtgggtgggaacagcctagaaaatcaggaaatgggagccatgaggcagactgtggggggaatcccagcccatctgaggcccattgtctgtcccctcaaagctgggttaaggcagcctctcttagacctgggccctggggccacccatactatggcctcctcagccctacggagtacttagccaacatttattcctccaacaaatatttaggaaacacccaccacagagagggcccaatggtaaaaaatgaacaaagccaaatacagtccctgtccttgcagagataagggtctggtgggaaagacaggagtgcagtcaaccttggtaatgatgaatgtatgtttagaaagctgagataaggaaggggccrtggtcctaggagcacctgtaagacggaatctgggatcacctggggctccaaggaaaactcccttaagaaatttatgcctaagctgacagctgaagggtgaggaagtattaatcatcagagaagggagaggagggcttttccagcagaggagagcttgtctctgtggctggggcatggaaaatgaaagggagtgctgtgagaacgggagggtga

SEQ ID NO: 755528 - DNA, 552 bp, Homo sapiens
  misc_feature 506: n = A,T,C or G
gaccttagggcacagattatttgacaagaatatttattgtctacttgaattcagagattttggcactgtgcaaggcacacatggggagtctatagatatgtgaataaatagcatcccaccagacagctaaggacagaatcattgcctggaattctttcctccgggtattgtcaatgcgatgtaagaatataaaacaaataatgagagaattctaaagcgagaggaaatagaaaacgctaacccaaggggtttggccgctttacctcatcctgactctagatggcagcatccgctcacttcccccagctgggagactagctccagaagcagcctgaatccgagcgaaattggaagttttccatgtaggagaatcagccgggcacgggcatctgctcaagccccacktgcagttaggaggattctccccacttgaacgaactcacagaagcagatatctgaccccactttggtccgtttactccatacatacaagccaaggcatttgnttcttttttttttcttttttttttttttttttttgtggtggagggg

SEQ ID NO: 755529 - DNA, 546 bp, Homo sapiens
tccttctgtccctggcttacttcactcagcataatgtcccctagtttcatccatgttgtcacaaataatagaatttccttatcttttaagggtgaatggtattccattgtgtgtgtgtttgtgtgtgtgtgtgtggtgtgtgtcacattttytttatccattcatccttcagtggacacttcatttgattccttatcttgtctactgtgaataatgcttcaataacaaggaagtgcagatatgtctttgacatactggttttacctcccttggacatatgcccagaaatagaattattgggtcatatttaaaaaaacaacaacaacaaaaaaaaaccctacattttaaaacaaagatatatataaggaaaactacaaaactctgatgaaaaaaagcggttctaaaaaattgagaaatattccatgttcacggatagaagactcaatatcatcaagatattagttcttcccaatgtaatatatagattcaatacaaacccaatcaaaatcccaacaagttacttgtggatatgaacaaactgatctc

SEQ ID NO: 755530 - DNA, 546 bp, Homo sapiens
tccttctgtccctggcttacttcactcagcataatgtcccctagtttcatccatgttgtcacaaataatagaatttccttatcttttaagggtgaatggtattccattgtgtgtgtgtttgtgtgtgtgtgtgtggtgtgtgtcacattttctttatccattcatccttcagtggacacttcatttgattccttatcttgtctactgtgaataatgcttcaataacaaggaagtgcagatatgtctttgacatactggttttacctcccttggacatatgcccagaaatagaattattgggtcatatttaaaaaaacaacaacaacaaaaaaaamccctacattttaaaacaaagatatatataaggaaaactacaaaactctgatgaaaaaaagcggttctaaaaaattgagaaatattccatgttcacggatagaagactcaatatcatcaagatattagttcttcccaatgtaatatatagattcaatacaaacccaatcaaaatcccaacaagttacttgtggatatgaacaaactgatctc

SEQ ID NO: 755531 - DNA, 526 bp, Homo sapiens
cctgcttcacctttcaccatgatggtaagcttccttaggtcctcaccagaagccaagatgttgtcatgcttgtacatcctgcagaaccattagcaaattaaaacttttatctttataaattacctagtctcagatatagctttatagtgacataaaaatggactaacactgatgccagtacttcccaaattgatctacagactcaaggcaatawctattagagtcctagggagcttctttatagaaattaacaagccagtgttaaaattcatgtggaatttcatgggtgggtcccagaatggcaaaaacactcttgcaaaagaagaacaaaatagaacaatgtatacttctcaattccaaaacttagaataaagcaacagtaatcaagacagtgtagtattagcatgataatagacatgtagatcagtgaaatagaattcagagtctagaataaacccatacacctatggttaaccgatttttgatgagggtgccaaggccattcaattgggaagcaatagtcttt

SEQ ID NO: 755532 - DNA, 624 bp, Homo sapiens
agcaatagtcttttcaacaaatgcactgagtcatttgtatagccacctgcagaacaaacttggagatttactttatataatatgcaaaacgtaacttaaaatggctcaaagacctaaatgtaagagccaaacctataaaactcttaaaagaaaatagggaaaaatcttcatgacattgaatttggcaataattttttggatatgactctacaagcacaggcaacaaaatataaaatagataaaytggacttcatcaaaatggaaaacttattacctgaaaggataccatcaaaaaaataaaaagacaattcacaaaatgagagaaaatatttccaaaccatatatctgatcagggaattgtatctggagtatatacaggattcaaaagaacaactcaacaataaaaatattattaaataatctaagatatactcatataaatacttttaaaaatctataataaaaagaaaaaaacagatttaaaatgggcaaaggacctggatatacatttcttcaaggaagatgcacaaatagccaataagcatataaaaagatgttcaacatcattagtcatcatggaaacgcaagtcaaaaccacagtaaggtatcacttcaactagcact

SEQ ID NO: 755533 - DNA, 558 bp, Homo sapiens
ggtaattttatattatattttaaataaatttgtgcatgaaacaaagtttgtgtacactgaagcaccaaaaagcaaaagtgtcactatctcagccacccaggtagacaatctgtggttgctgggcatcaccatcattccggactcggaatttacatgctattaatasgcaatcattgtcttacacttgttcacacaaatacttaacagtaaaaaatatgacgtatcaatacagtgaaaaacaatgagttctggggaactaagcagcacagtagcatcgccagaatacctgcatcaactgttaaacagcagctacaacaaacagctacaagctttcaacctccaactacgatgctgtgttttgattaaaaggctattgtacactgtattttatttttttaggtgagaagaaacatcagaagcatttgaggggccagaagtgggtcctctagtaatgaggaggcattctgctagatggctttgtaaaatgtttcctccctagtcaactgcctcattaacaatggtttttgtcttaggagtctctcttcagttttataaact

SEQ ID NO: 755534 - DNA, 656 bp, Homo sapiens
atcatcatcactgaatagtcacaggccagaggttatgccaagcaggcatgactgtgtcttagtcactgttggccaagtgctggcaacagcatgtatgacatccttcatgctaaacgccttctgaaaaccttccacacccacacctctgttcactgctgctagcatgatgttcaagacagtgtttttatatttacccttcactgatctaaggatatcctggtcacatggctgaattaatgaagtcgcatttgggtgaaagtacatggcataaacattattttttatgagaatttcggttgcagcataagcagaacagttatcaatggataacaaaatctttcactcttctttcagtccagcttccctgcaataagcataaggcactggtacraaatgtttatgaaaccaatcagaaaaggtatcccgagtgatccaggccttttgattagtataataatggactggtaagacattcacttcttgaaaacaggaaggatgcaagcttttgcctcctatagatttatacctatacgggcctactgcattaatacatcccgtcacagtttttctgctcttggcatccttaaatcttgcaggggctgtctcatcagctgtagtgtctttctggggtaatcatgccaaaacagtgatgtttc

SEQ ID NO: 755535 - DNA, 645 bp, Homo sapiens
acttggatgtaaaaactcatctcaaactttgcataacttaaattcaactcttgtttctgtcccagtaaaacctattctccccatttctataaacagcaaatccatcttttcagttgcagaaaccaaaagcctaagagtcattgagtcacttattggttttatatcctatgtccaatccaccccccaatcctgttgtctcctccttgaagatatgtcccaagtccaatcgcctctcatcactctgctccaggtcactgtcaagtctctcttgcaatggcccccccgtttctgctctcaccccattcagtctattcactagacggccatcagagtgggcctttcaaaatgtacaatagattatgacacgctactactcaaacccatcaagggctctccatctcatatagaggaaaaacttcataatctcttgarcttgggttctctctctctctctctcacctggctccagccacatgggcctccttgttgtttctggaacatgcagagtattctcccactctctgcccaaatggctctcccttcagatatctgcatggctcattccctccatttcttcaggtccatggtcagatgacccttatcaggcctcacctgaccacccctataaaacagcaacccacaacc

SEQ ID NO: 755536 - DNA, 587 bp, Homo sapiens
ttaaatgagaattcatgtaactgcttaaaaacagcgtctgacatttagtaagtacttacaaatgttagctattgtgttggacgcatagctatggagatgctttgatctcaaaaagggcaggctcttctccctaaaggtgaaattcaragttattgtttggcaaagctggctctgagtcatggctgaagaaccttgtgctgtgtgtcacaactagttgtctcattccccttggctagcaattggtctgggaatggccctgatccctagttctggctaatgggatataaatgaacactttcttgcttttctgacccctataggagaaaaacacaaaagaaaaagaaaggtccctttgacctgtaagctggttacgacactcggagatacaccaaccattttgtgaccttgaggtcacagcctaaggacaaaggtcaatgtgctaaaggaggtaaaaagaaagaacccacgtctctaaggctatgttcgagtaactttaccacatagcctacctccagacctcttattaagtgatgaaaattaacatctacttttttaaaccactgtaaccacattttccatcatttgca

SEQ ID NO: 755537 - DNA, 570 bp, Homo sapiens
atatatgtatgtgtgtgtgtgtgtgtttttttttttttttttttttttgagacagagtttcactctgccgtccagactggagtgcggtggtgcaatctcagctgcctgcaacctgtgcctcccaggttccagcaattctcytgcatcagcctcctgagtagctgggattacaggcacgcaccaccatgcccagctaatttttgcatttttagtagagacagggtttcaccttgttggccaggctggtcttgaagtcctgacctcaagtgatccaccttccttggcctccaaaagtgctgggattacaggcatgagccaccgtgcccagcccattttcccttatattttaagtctatatcattagactagaatttctgtagctttctcatgaatgcttttactaattactagtaatgcttttttatccacaccaatgcattttgtcttaaaatcaatttcatctaataaaaatttcactactcaaattttctttgttttgtttttcctggtacatatttttgtcgacttctttttcaaacttttgagccatgatgtctgaaatcaatattt

SEQ ID NO: 755538 - DNA, 570 bp, Homo sapiens
atatatgtatgtgtgtgtgtgtgtgtttttttttttttttttttttttgagacagagtttcactctgccgtccagactggagtgcggtggtgcaatctcagctgcctgcaacctgtgcctcccaggttccagcaattctcctgcatcagcctcctgagtagctgggattacaggcacgcaccaccatgcccagctaatttttgcatttttagtagagacagggtttcaccttgttggccaggctggtcttgaagtcctgacctcaagtgatccaccttccttggcctccraaagtgctgggattacaggcatgagccaccgtgcccagcccattttcccttatattttaagtctatatcattagactagaatttctgtagctttctcatgaatgcttttactaattactagtaatgcttttttatccacaccaatgcattttgtcttaaaatcaatttcatctaataaaaatttcactactcaaattttctttgttttgtttttcctggtacatatttttgtcgacttctttttcaaacttttgagccatgatgtctgaaatcaatattt

SEQ ID NO: 755539 - DNA, 566 bp, Homo sapiens
ttgagtcatgaattactccatataaattagctgtggccattggttagtgtcagtgttatgtacagtggttactttcaagataatcatataaatgtatataattactaaaaaatgggcatggatataaaaaagtattttcccagtacagtgttaatatgtttaggaaactgtggttataagtaagaagctgttattactacatattaggggatgaagtatgggaaacttcataaataagttgtacctatagcttaaagtcttaagccatgagtatgtgcttgctagataaataaaagtggggggtagaaaactactccaggaaaatggagcagttggagcaaaggacttgccagtgaaagagcctggtgatttaagggtgtggtgcatggctatgtgggatttatatctgtgatggtaraaaaatgactgaagagggggttctgtatgaaacacaaattggaggggcagccagtcgccagagaatagatgtgttccatagattagctacaaatgtttaaaggaaataaatttttctacaattaaaaattttcatggaagtctgatat

SEQ ID NO: 755540 - DNA, 633 bp, Homo sapiens
acagagaaatgtgggaaagtttggaacttcctagagacttgttgaatggctttggccaaagtgctgatagcaatacagacaatgaaatccaggctgagatggtctcagatggagatgaggaacttgttgggaattggagtaaaggtgacttaytatttttcttttttttttttttctttgagacagagtctcactctgtcatctaggctggagacacacagaggcacaatctcagctcactacaacctctgcctcctgggttcaagctattctcctgcgtcagcctcccaagtagctgggattacagatgtgtgtcaccatgcccagcaaatttttgaatttttagtagagatggggtttcaccatgttggccacggtggtctcaaactcctgacctcaggtgatccacctgcctcggcctcccaaagtgctgggattacagctgtgagccaccacgcccagccgactcttgctatattttagcaaagagactggtggcatttgccccatcctagagatctgtggaactttgaacttgggagagatgattaagggtatttctaagcagtgaagcattcaagaggtgacttgggtgctgttaaagccattcagttttaaaagggaaacagagca

SEQ ID NO: 755541 - DNA, 633 bp, Homo sapiens
acagagaaatgtgggaaagtttggaacttcctagagacttgttgaatggctttggccaaagtgctgatagcaatacagacaatgaaatccaggctgagatggtctcagatggagatgaggaacttgttgggaattggagtaaaggtgacttattatttttcttttttttttttttctttgagacagagtctcactctgtcatctaggctggagacacacagaggcacaatctcagctcactacaacctctgcctcctgggttcaagctattctcctgcgtcagcctcccaagtagctgggattacagatgtgtgtcaccatgcccagcaaatttttgaatttttagtagagatggggtttcaccatgttggccacgstggtctcaaactcctgacctcaggtgatccacctgcctcggcctcccaaagtgctgggattacagctgtgagccaccacgcccagccgactcttgctatattttagcaaagagactggtggcatttgccccatcctagagatctgtggaactttgaacttgggagagatgattaagggtatttctaagcagtgaagcattcaagaggtgacttgggtgctgttaaagccattcagttttaaaagggaaacagagca

SEQ ID NO: 755542 - DNA, 633 bp, Homo sapiens
acagagaaatgtgggaaagtttggaacttcctagagacttgttgaatggctttggccaaagtgctgatagcaatacagacaatgaaatccaggctgagatggtctcagatggagatgaggaacttgttgggaattggagtaaaggtgacttattatttttcttttttttttttttctttgagacagagtctcactctgtcatctaggctggagacacacagaggcacaatctcagctcactacaacctctgcctcctgggttcaagctattctcctgcgtcagcctcccaagtagctgggattacagatgtgtgtcaccatgcccagcaaatttttgaatttttagtagagatggggtttcaccatgttggccacggtggtctcaaactcctgaccycaggtgatccacctgcctcggcctcccaaagtgctgggattacagctgtgagccaccacgcccagccgactcttgctatattttagcaaagagactggtggcatttgccccatcctagagatctgtggaactttgaacttgggagagatgattaagggtatttctaagcagtgaagcattcaagaggtgacttgggtgctgttaaagccattcagttttaaaagggaaacagagca

SEQ ID NO: 755543 - DNA, 634 bp, Homo sapiens
ttttttttttttttttgagacagagtcttgccctgtcgtccaggctggagtgcagtggctgaatctcagctcactgcaacctctacctcctggattcaagcgattcacatgccttagcctcccgagcagttgagattacaggcacacaccaccacacccagctaatttttgtatttttagtagagatggggtttcaccatgttggcaaggctagtctcgaactcctggcatcaggtgatctgcccgcctcagcctcccaaactgctgggatgacaggtgtgagccactgygcctggccttttttttttgtttttttgagacagggtctccctctgtcgcccaggctagagtgcagtggcatgacttggctcactgcaacctctgcctcctgggttcaagtaattcatgtgcctcagcctctcaggtagttgggattataggcatgagccaccatgcccagctaatttttgtattgttagtggagccagtgttttgccatgttggccacactggtcttgaactcctgacctcaagtgacctgcccacctcggccttccaaagtgctgggattacaggagtgagccactgtgcctggcccaacggttattctaacatttctataaaatgtcaaagg

SEQ ID NO: 755544 - DNA, 574 bp, Homo sapiens
tgaactgttttaaataataacatatactttcttagtctccttttgagatcatttattttgctcacaaaacccagtccaaaaaaaaagaataccaaacaaacaaaaagacttcatttaagctgaattcttttctctgtcttagaacaccatatagacttctaccattcagacctggggccttttatgaatacatgggcttctgtcctataacactgtcacacccagtctactttcgttttcttcatcttcagcttccaccactgactctgaccctagtattgcctctcttctagagcacagtcctgcctatggagtgggatatcatcttcctgactcctcatacctcctaccaaatgctatccctgaagataaaggcacctgggtcccgtttrctttattatgatagtgaatatctgtcaagcacttaactatatgccaaatactactaagtgtttacctccattaatacatttaacttcacaacaaccctgtgaaatagatattaatatttatgcccattttttcagatgaggaaattaaggttaagagaaactgactgggtctgctctgtctg

SEQ ID NO: 755545 - DNA, 630 bp, Homo sapiens
tgtaatcctaacactctgggaggccaaggtaggaggatcacttgagcctagaagcttgagactgcagtgagctgtgattgcaccactgcactccagcctgggcaagagagaaagaccctgtctctaaaacaaacaaacaaacaaaaacaggttgaactaaacagtgtattatttatagaaatacacatcagagataaaagatatgaagaagaagcagatgattatcacaaaattcaggagagctggggggaagccaggcatgtgattaggaaagggtgcaaatgggactttgaggaaggatgggtgagtactgctctatttcctaacctcagaaatataacatataatatttatattatatttatatttatatttatattatccttgaaaatgaacatatcttttcatacactcttttgtgtgtttgttacattatatagtaaaaagaaattttaaggaataaatytaaagttttataccatggtccaaaccactgccccctccaaaaaaaaaaaaaccagaataatctaatcaatacaaagtgcagaaaagacaggggatttaatgggtggtgtaagtcagagtcaggtgtctaggctacatttggagaattgtctctaccctattcct

SEQ ID NO: 755546 - DNA, 575 bp, Homo sapiens
tatgtttcttttagtctctatgcatgaactaaagtttcctaaaattcagaagatgtgggccataagtcagaaaaattaactgtgttttatcaattttttccaatacatttaagtgaataaatctcttgtgtacttgttcaatgtaagactttactaggtggattagtcaggatggggtaggttacagcgctgtaacaacaaacyctccaaatttctatagtttgacacacacaagtttatatctcactcatactacgtatacaacatagatcaatttagatctctgtaccatcagtgactcaagacacaggatgataaagaacttatcatctggaatattgttgatagcttttacagaggaagaaagagtctgaatcatgcatgagttttgtactgcctcaattcaaaagtttcatgtagggattgctattaaggtgttctggtgctactaaattctaaaattctatatttcaaaaaacgttgttcaatgggaagcgttttttaaactacacatttatattcaagttctatgcccaaaccaaaactaagttagaaatcaaattagccaatgctgt

SEQ ID NO: 755547 - DNA, 614 bp, Homo sapiens
ttctacccataatgagtaggtaaatagtattgagttacaaagatacatatggaaaccaataggtctgtgtagctcctacaaattatccaacagcagcaagggtgctgatacctcttacagatattctgtggcctagaaaagtgccttccccagggaatattcagccaagaacaaagggacatggtttggtttgtgggtagtgtaaaggtttcaaccgttcctctgctcagttaggcacctttgtgcagcaagcaactcaatgaggacatggagcagccatagttacgttcacgacctakagctgacgtgccttcatttgaatccccagctctatcccatgtaaacgtgtaaccttagtcaagttatttcatttctctctggttcactttttccgtctgtaaagtaggaagaatgttaatatgaacagcacaggattgttataagaatctaaaaagcaaaaggcatataaattgcctacaatagtacctagtgcatattaagtattcaataagaattacctgatctatatgtgtgtgtgcgtgcgtattctttaaaacataagaataagagtaagccatatttgcagagttccttatgtctctatatgagtgtca

SEQ ID NO: 755548 - DNA, 528 bp, Homo sapiens
aaaaaacaagaatttaaaacaaataaaaacaggccgggtggggtggctcactcctacaatcccagcactttgggatgtcaagacgggcagatcacgaggtcaggagttcaagaccagcctgaccaacatggtgaaaccccatctttaataaaaatacaaaaatcagccgggtgtggtggtgggcgcctgtaatcccagctactytggaggctgaggaaggagaattgcttgaactggggaggtagaggttgcagtgagccgagattgtgccactatactctagcctgggtgacagagcaagacttcatctcggaaaaaaaaaaaaaaaaaaaaaaaggagcagggcgctcaaaaacaaatacttattatttgcatgaggagtatttttttttaatcttagcaatccctaaaataaatttgcgctatcccatatgcctataaccgggattaaaaatgcaatatttgtgagatcttaataaacacactttactaaaagagttgaaccttcataaagcactttggaaaaat

SEQ ID NO: 755549 - DNA, 484 bp, Homo sapiens
tttatatgtaaatcgtgactcactcaacatatttcattgcccaacaatgaagaccagcccattgtttaaacactctgatctaacttttctaaacccttgccctttttctaggactggttcatttacatctcatttagccattcatttatttaatttttaaaaagtattaattccctataggaaaccaggcacttctctacgcactgggaataaaataataatgagcacaccaaagaaattcctgccctcataaagtttgcagtgtccasccccccaaaacagcagatcatccatgcccgtctcttcttaatggatttacctatttcacccatttcattgtgatatcatactactttactctcctcatcttttaatgtgagttccatctacacaaatagactgtgacatctttcaagagatgaatctgattatacatatatgcactctgtatctttacttactaaaggaatagggtaaggcaaag

SEQ ID NO: 755550 - DNA, 484 bp, Homo sapiens
tttatatgtaaatcgtgactcactcaacatatttcattgcccaacaatgaagaccagcccattgtttaaacactctgatctaacttttctaaacccttgccctttttctaggactggttcatttacatctcatttagccattcatttatttaatttttaaaaagtattaattccctataggaaaccaggcacttctctacgcactgggaataaaataataatgagcacaccaaagaaattcctgccctcataaagtttgcagtgtccacccccccaaaacagcagatcatccatgcccgtctcttcttaatggatttacctatttcacccatttcattgtkatatcatactactttactctcctcatcttttaatgtgagttccatctacacaaatagactgtgacatctttcaagagatgaatctgattatacatatatgcactctgtatctttacttactaaaggaatagggtaaggcaaag

SEQ ID NO: 755551 - DNA, 567 bp, Homo sapiens
aaatacataatctgtatttatatgggtcaccctgaccctcagaaacccagttgaacttaacctaaaccttgtgtctacggtcctatgggactccagaagccagatagcatgtttgctgtctttgagactgcaccttacttcttcgtacttgttttcagccttttgctttgcatcaccttgactcaaatctcaatgccttcactggtttctacaagaaacccattcacagaaaatagttgtgttttctaaaagtctatgttgaagacttaggtgggcaggggtagaggcaatggctgtattackggatgtgaaaaattatggagaaggttacaaattgtaatatgatgttctgctatctcctggctccactgtcaccttctcttccttcttcctttcttttctgtccctcacccctcactttaaaaaaaagaaaaggcggggcacggtggctcacgcctgtaatcccagcactttgggaggctgaggtggggggatcacgaggtcaggagatcgggaccatcctggctaccacggtgaaaccccgtctctactaaaaaatacaaaaaa

SEQ ID NO: 755552 - DNA, 567 bp, Homo sapiens
aaatacataatctgtatttatatgggtcaccctgaccctcagaaacccagttgaacttaacctaaaccttgtgtctacggtcctatgggactccagaagccagatagcatgtttgctgtctttgagactgcaccttacttcttcgtacttgttttcagccttttgctttgcatcaccttgactcaaatctcaatgccttcactggtttctacaagaaacccattcacagaaaatagttgtgttttctaaaagtctatgttgaagacttaggtgggcaggggtagaggcaatggctgtattactggatgtgaaaaattatrgagaaggttacaaattgtaatatgatgttctgctatctcctggctccactgtcaccttctcttccttcttcctttcttttctgtccctcacccctcactttaaaaaaaagaaaaggcggggcacggtggctcacgcctgtaatcccagcactttgggaggctgaggtggggggatcacgaggtcaggagatcgggaccatcctggctaccacggtgaaaccccgtctctactaaaaaatacaaaaaa

SEQ ID NO: 755553 - DNA, 590 bp, Homo sapiens
aaagcttcagctgatttgaatagtgttagaaaccacagaaggggctttctttagaacattaaatggggactgcctttcttgaatccaaccttcttgaatatcacaactgtttctatcctgtttctagagaaaaagttccattttcacatctgtctcttgcaaagacataacatgtgcatagaagtaaactctgttatgcgccactgaaggattcagtatctggagtctgagggcatttttctttatgtctacaatgagagaaattggactagctgagcctacagtgcttctactgcaaaaatgctgtgagtatagaattatgaccaaaaatcccaataggttttttcttttyatttatttttgttgttgttttcttgagacagagtctcgcactgtcgcccaggctggagtgcagcggcatgatctcggctcactgcaacctccgcctcccagcttcaagcgattctcctgcctcagcctcccaagtagctgggattacaggcacctgccaccaggcccggctaattttttgtatttttagtagagacggggtttcgccgtgttagccaggatggtcttgaacgcctgac

SEQ ID NO: 755554 - DNA, 641 bp, Homo sapiens
gatttaattaaaaatgtatctgctaccatcactaatatgcagtcatgtgtcttgggcaatacttaggtggcaaactcctcaccccagtgtttgttaaaatagctagttgtgttagaatggttgtgacttttctgcaaagaattatctgttagaaatctgctcctctgaagtattttatctacccctccgtaaaggctatactcattctgyttttttctaaagttttgaatggaagttctattacctaccacttagcctggtactgttgactacaagatatctgagttttaatcttggcacatatataattgtaaggcaggccttctgtatagtctaagttcattttaatcagagttacaggttccattcagttcctcggtgaaaaagagaatagtcaaagtcagaaaggaattaggagctttttaaaaaggtgctttaaacagctcatgttccccaagccctcaaagaaagttacaaatcaagagagcacaattggcagctacattatcaaagaccttctgataatgctaccattaacattgaataatattgtttaatgggctttttaaaagcagccatcctttggatctgacacttcagcatgattattttccattcccatttaaagctacaacaatccc

SEQ ID NO: 755555 - DNA, 529 bp, Homo sapiens
aacaagagagtctgcccatcctttgaagctttaaagctgggcattgacttctcttctggaggcatttccttccaatagaagactggttcatctacattgaaaatctattgcttagtgtgaccatattcatcaatgaccttagctasatcttccgagtaacttgatgtcacttctccagcagcacttgatgcttcatcccgcacttttatgttatgcagagtttctttccttaaacctcataaagcatcctctactagcttcaaacttttcttctgcagcttcctcacctctcagcctccatagcattgaagagagttgggccttgctctggattaggttttggcttacaggaacgttttggctggtttgatattctattcagaccactaaaactttctccatattagcaataaggctgttttgctttcttatcatttgtattatgttgattaaagtagtacttttaatttccttcaaaaacttttcctttgaattcaaaatttggctgtctggagcaagaggcctagct

SEQ ID NO: 755556 - DNA, 466 bp, Homo sapiens
gtttctaatataaataagcaataagggaaagttaggattatctgaaacaattggaagtatcaaagagaactctttttaaaagcaaccatgtatttatttatcttcctaaaaagttctggtaatcttgacaaaaagattgattttactggctaggtcagcacccttattaaaattaaacawtctatcatacaacagaaactatgctgagatacaagatagatcacaacatgttgagaaatatgtgaatatacttttatgcccccataaatatttattaacagcacacatgtttgataaatatattctgaagaataactcaaatatgtcatatttaaagcatttcagagaggtatatgacttcttctgattaactcattgaaagtaggattgaaatttctagggtcaaaatcattactgctgttcctgactttgccactaatgactgggctctagctattataatttg

SEQ ID NO: 755557 - DNA, 607 bp, Homo sapiens
ttagcagctggcagaatccctacagtggctctttgaccagtagggtaagggctattaaaggagccattacaactgcctgtacctagaaaaataataaatcaaaaacaatgtcgcatccctggaggggttgcagagattagtkccaccatcaaggacttgaaagaggcagaagtggtgattcccaccacatccccattcaactctccagtttggcccatgcagaagacagatgtgtcttggagaatgacggtggattatcgtaagcttaaccaagtggtgactccaattgcagctgctctaccagatgtggtttcattgcttgagcaaattaacatatctcctggtacctggtatggtacgcagccattgatttggcaaatgccttttcctccattcctggccataaggcccaccgggagcaatttgccttcaactggaaaagccagcaatatacctttactgtcctacctcgggggtgtatcaaccctccggctttgtgccataatcttgtttggagagaacttgatcacttttcccttccacaagatatcatactggtcaattacactgatgacattatgctgattggacccagtgaatgagatgt

SEQ ID NO: 755558 - DNA, 607 bp, Homo sapiens
ttagcagctggcagaatccctacagtggctctttgaccagtagggtaagggctattaaaggagccattacaactgcctgtacctagaaaaataataaatcaaaaacaatgtcgcatccctggaggggttgcagagattagttccaccatcaaggacttgaaagaggcagaagtggtgattcccaccacatccccattcaactctccagtttggcccatgcagaagacagatgtgtcttggagaatgacggtggattatcgtaagcttaaccaagtggtgactccaattgcagctgctctaccagatgtggtttcattgcttgagcaaattaacatatctcctggtacctggtatggtacgcagccattgatttggcaaatgccttttcytccattcctggccataaggcccaccgggagcaatttgccttcaactggaaaagccagcaatatacctttactgtcctacctcgggggtgtatcaaccctccggctttgtgccataatcttgtttggagagaacttgatcacttttcccttccacaagatatcatactggtcaattacactgatgacattatgctgattggacccagtgaatgagatgt

SEQ ID NO: 755559 - DNA, 568 bp, Homo sapiens
ccttggaagccaagtgtgcaagagacagcaagttctctgaatgactacagccaagaggaaggccccactgactgttcagctgacactgtctcagctatctcaaagtttggccattttttaatagcagtaagtagttctgtgactaatatattgggtttctgtcaygtgaaacaaatcctaagaacatagggattgttaagaacattttgacaccaagaatggcataagaatggtatacatgcattgacaaaaatgatttgggaagacattactcactactcagaaagcagctcctccacagagcagaaggcttgctccactgggtagggcaggtgcaacaaaagaagccagcatgtctgatatcctcacctctgcctgacaccacatcccagcccatccacaggtgaagaaaaaaaggtgaatctggtccttctctctttaagttgcccaactttgctgctggagaaactccactcactggggtaccgtacttagtttagactgtcattttctaagtggccagggtaacctgacagtgttcccataaggttcaaattttatttaattt

SEQ ID NO: 755560 - DNA, 568 bp, Homo sapiens
ccttggaagccaagtgtgcaagagacagcaagttctctgaatgactacagccaagaggaaggccccactgactgttcagctgacactgtctcagctatctcaaagtttggccattttttaatagcagtaagtagttctgtgactaatatattgggtttctgtcacgtgaaacaaatcctaagaacatagggattgttaagaacattttgacaccaagaatggcataagaatggtatacatgcattgacaaaaatgatttgggargacattactcactactcagaaagcagctcctccacagagcagaaggcttgctccactgggtagggcaggtgcaacaaaagaagccagcatgtctgatatcctcacctctgcctgacaccacatcccagcccatccacaggtgaagaaaaaaaggtgaatctggtccttctctctttaagttgcccaactttgctgctggagaaactccactcactggggtaccgtacttagtttagactgtcattttctaagtggccagggtaacctgacagtgttcccataaggttcaaattttatttaattt

SEQ ID NO: 755561 - DNA, 588 bp, Homo sapiens
ctgtattctctcctgaatttcactttgtctcccaactcagggtatcatctgggctccttctgggttcctgctctctacactatggcctggaaactctcttttggcagtcagctggatctgtcagagagcccaattcattcattcctggtctctcaaaaaactcttcctttgttgcctgatgtctagttttttaaaaaactgttttaaatatatttttctgtactttaacttactttttcattgtttccggtgagaaaatacatcccgttcctgcaactctatcttggccaacagtggaagttatatcacagagatgacacttaggctgagacctcaatrtcagaaggtgtaagagctacaggaagctaaagtgaactctaggctctgaaaggcaagaaggccctattcctagcttaggaagttttaacttgtcagaagaaagatccttggtgggaacaagtttgatatgctttagaaacagaccaaaaggctagagcggctgaatctcagtgttggggagaagataagataggaaaagtgagtggagtaaggtcacatagaggtttataactgaagcaaggcacttgg

SEQ ID NO: 755562 - DNA, 580 bp, Homo sapiens
gtactgatgcttcaagtcaaagtttccgtaacatactctaaagccacatctttacaagctaaacagtgaaagccatttcattgttgatagtgtcatgttgcaaatatacacaaataaaaagaagtgttctccttggatctctcaacaagaagaaatggcctttcctgatggcctcctgatgaatgttctattttatgttacctttgttttgaaactgtaatgttttaggttttctctctccagaacgagaacccacagtgttttctgcattttagtggcactttaacatttcaggtttatctgaccaaaataggctaaaagttctatttgataaatcattggcccctaaacatctcaaacgtttttcaycactagatagtgaatcctcttcattggttaggtaaaatgattaccgaagtaagtactagactagtaggaagttgacatattcacagattacaactggggagtgtaaaacacaggattttaaaaaaccgtatcactttatggatgggtaacaattgtgaaatggtttaaaaggaaacgtcttgtttggtaagttatatattgttccgtgact

SEQ ID NO: 755563 - DNA, 630 bp, Homo sapiens
agtctaatcatgagattgcagtaattcagtcacatctccaggcaggctccaattctaattctagttctcttgccaccatatttgcaattatttcttctagtgaagtctcaaactcctctaagtcattcatggattattaaaattcacttcttccaaactcttattaatgttaatatcttgacctcatccaggtatcataaatgttctcaatggcatctgtaatggccaaactgttgcagaatgttttcaatttagtttgcccatatccatcagacaaattactatcaatggcaactatagccttatgaaatctatttcttaaataaaaaaacttgaaagtaaaaattctcctggctccatggggtgcagaatggatattgtgttagcaagaatgaaaataaaatcaatttctttctacatttccatcagagccccttgggtgaccaggtgtattgtcaatgagaagcaatattttgaagaaatcttcttttragctgttagtctcaacagaggcttaaaatattcattcaaccattctgtgaacagacagtagaacaaaactttcaaagtgttcacacaatacagctatgagtttggaattgtaagaaaaagacatttaaagacacgtgt

SEQ ID NO: 755564 - DNA, 493 bp, Homo sapiens
caagatcgcaccactgcactccagcctgggcaacagagcgagactcggtctcaaaaaaaaaaaaagtactcttgaaacaagtattaaaacaaagtatcagaaaaaagtataaaataaagaaaaaaacaaatgagcattttagaacagacacacacaatgacttayagaaaaatatttaaaagaataataactgaaaacttcccaagtttgtcaaaagacataagctaacaaattcaaaaggctgagcaaatcttaaacggatatatccaaagaattctatgactggacacattgcttaaaattgatcagaactaaagaaaaaaaatctccacagcaaccagaaacaacaacaaaaaagacttctcagaggagtacagtacagattgctcatcagaggccatgaaggttagaagaagtggcaaagcatttttgttgttgtaagaaaattactatatgttagtccaaactgcatcattttgtaagctctccccac

SEQ ID NO: 755565 - DNA, 632 bp, Homo sapiens
taataatacaaaatctttaaaagtccacataatcagttgaataagctaataccaagaattatactagatgaaacatatagctacttaaaatgatatttaaatataatcatagctctacaaagataataaccagctgacaattatgtagccattaagaaatagatcatggaccttcataccaagcatgaaaaaataaatttcctagaaatggagaaaatatttaagccaaaagtgctgaagattacaaaaaaacaaaaacaaaacaaaaccaaaacgtggtagttttggaggtctgtttaaagaarttcacatagaagtagggcaatgtcaaactaatttaagagaagtcacatacatttagaaatgaagccatctcaatgactatttatattctctagaacatgagaattttgcaattttatcttctgaatagagttaaggcattgattaaaatatctagaaataaaaaatttaaaacagcggaatttctgtgaacagacttgtgatttcagatttacatctttgtaaaacaaacattagtaatttaacattctaaaaacctatgaaggtgacaaaacatgtaatttagttttgaagatgttaccaatttgtaaccttatcagttaagacat

SEQ ID NO: 755566 - DNA, 642 bp, Homo sapiens
atggctgatatatgactatttattttgtatcaggtactatcttaggtgctttatgtgtattgaataatgtaatcctcaaagcaatcttaaaagtcatgactgattttctttttcaaattattttaaaataagaaaatgggtgcacgcgaaaagttaaataagtaatccatcatcatacatctattaattaacagagcaacctcattgaggagcctgtgtacttgcaccactgccaactgttccctctcattctccatgactacctacagatcaacctaactgatttcaagttcagtttctcacaaaacagagattgaaagtcaacaatcagtttcttttattttttggttttagcataacaaacaatatcaaatccagttttatatcaatgacatgtaagtgttaaggggtgaagtcagcatgcataaatttaaatctcagccctataatatactggatattaaaattgggcaagttatctaaactcctaaagcctataaatggggaattttcacagtatctaactcaagtagctattgtgagtatttaatcaaataattgattgycatctagcactattcatgagatgtggttattattatttgaaatacttttcaagcaaaatgaaattctttctgggtg

SEQ ID NO: 755567 - DNA, 498 bp, Homo sapiens
actgtagaaaaagcgtggcctgaggtcaaaaacacagattggattttagagcaagcacctggggtctctgtcctcatgctccctgtagttgaagatctacaaggtgtgttctcatggtcacaaatgctcttcctctgtgaagtgatccacttatattttatctcctcttttggacactgcacttctttaaaggagcatcaagtcttgtttatctttgtatctatagaacctagccyatgctagataaaatgttttctaagtgaatagcttttatctaatataatcaccaagacacaatcccatcctctacttcttattgtgtctcaagagcattagtgtgaatgtgtgtgtgtgcatgtagatgcgcacatagaaattgaaaacacagtttccgaaattagagaggtagttttctcttgctcttgacaaatgatctcaggcaattttcttaatccaaataatattttcttttccaccttcaaaactgggttaatggtt

SEQ ID NO: 755568 - DNA, 598 bp, Homo sapiens
tttgagtgaggagggaaggcaacccatcctttagctttggaaggaccacatttagattaaactttttttttagtgcaaactcataagcttatttagaaagagctctttaatggtcttatttagcgtatcagaacttagaccatcggaagttctttttgaagtctgacctaaaagctgaacttcttccttcactcatttcagcccacctttatctcccattcrgtagaaacgctacaaactctactcatcatccattctaaatcttcacatttggaaaaacagactctgcaagtgaaaaccagtaatgcttgtattttcaatgtcatcttttctttaaaatgatgttaaatgattctaggagtgcagatttgtgttttaggtatatggatggttccggatatctgttaggtatactctctgggttttcatgggatgagagatagtaagaaaagtatagcaagaaagctttggaaagagccatttccctaggtattgtgtttgcaagcatcgtaacctcattcctgagggcacaggcactgtatctgaaagctttgctgtgcagacatccattcagcaaacatttaatggcaatgtccag

SEQ ID NO: 755569 - DNA, 598 bp, Homo sapiens
tttgagtgaggagggaaggcaacccatcctttagctttggaaggaccacatttagattaaactttttttttagtgcaaactcataagcttatttagaaagagctctttaatggtcttatttagcgtatcagaacttagaccatcggaagttctttttgaagtctgacctaaaagctgaacttcttccttcactcatttcagcccacctttatctcccattcggtagaaacgctacaaactctactcatcatccattctaaatcttcacatttggaaaaacagactctgcaagtgaaaaccagtaatgcttgtattttcaatgtcatcttttctttaaaatgatgttaaatgattctaggagtgcagatttgtgttttaggtrtatggatggttccggatatctgttaggtatactctctgggttttcatgggatgagagatagtaagaaaagtatagcaagaaagctttggaaagagccatttccctaggtattgtgtttgcaagcatcgtaacctcattcctgagggcacaggcactgtatctgaaagctttgctgtgcagacatccattcagcaaacatttaatggcaatgtccag

SEQ ID NO: 755570 - DNA, 645 bp, Homo sapiens
aggttgaagggaattctcttggccgagttacaaagagaataaaatgctgtcataaggagagtagctttagattttcactttatcttcaaaataaaagattagggacacaattctggttgagatggttaagtaggtgcctgtataattgaatttcatgctcattatttctctctgaagtggtgtacacaagcagtcattggaaagcaggtttagcaaatatattggtcagggctttgctgaactttccagctttccaaaatgtccaagttccttcagtcttcttcatgtgccgtgcgagatgtacaagacgacactgatggagccggtgagccaggcagtttcaagacaagcttctcttccattagcaaacttgtcataggattggaaagttttctttttttccacaagattagacatggtccaaagaatactttatgccgctttggatcagcaatctgcctgcacctttgacatctcataattgaggtatatgtcagrgtccaaagtaagaatacatgaaagctctgtgtatgatactatcatggtgggttcatgtggttatacccttgtccaaacccataagatgaacagcactaagagtgagccctaatgttaactatggactttgggcaataatgatgtgtc

SEQ ID NO: 755571 - DNA, 555 bp, Homo sapiens
tctctataatagctgccgcattatttatgttaagtccggttttgcacattgaacagttttgttttcaaagtgaaggccaagatcctcgatttctaaaccagaatgctacactgaccccagagacatttgctttcttaacacacccagccttcactgactcgacggttgaatttgggcagaagaacaccacacacactgtttgcttgcagttgtttgactttattttatttacaaatcataagcacatttgggctgctgagcacttctctcactgaaggctcttgccagcccagagcagatggagacacaaatcaggccctgtctcccttcctctgcacatggccacacagagggttttgtgtctcgggtccctttgtgtcctgtagatatttgctcccttcccgaatgtgcatgasgcttcagagggaccaacatcctccacttcggggccagaagtagagtaactcatggccatggaggaattcgtgccagatgtggcttctcttccctttagctcctcgattattcctggaatatcagcccattcaagtgtca

SEQ ID NO: 755572 - DNA, 520 bp, Homo sapiens
atatatacatacatatacactcacatatatactttatatatacattatatattatacaatatatatacatacacagaattttctttatccactcatcagttggatgggcatttaggttgattccatatttttatgactgtgaattgtgctgtgataaatatacgcatgcaagtgaccttttgayataatgacttattttcctttggttaggtattcagtagtgggattgctggattgaatggtagatctacttttagttctttgagaaatccccatactgttttccatagaggttgtactaatttacattcccactagcagtgagtaagtgttttttttccaatccatctgtgccaacatctactgtttttgacttttaatcatggccaccctgcctagagggaggtggtatctcattgtggttttaatttgcatttccctgatgattagtgatgagcatttttccctatatccgctagctatttgtatatcttcttttgagaaatgtctgctaatgtca

SEQ ID NO: 755573 - DNA, 573 bp, Homo sapiens
taaatgctttcagtgtatgaactcatttaatactctaaacaatcttacaatgaaaaaaaaaatcccatctcttaaataacaagaagataaatgccctaagaagcagtgtgatgcagtgtaggagagactaagagccccagctacccagattggytcctgtgggacctggagcaagttaacctatttgtctctctgtttccacatctgtaaactgagaatgtcagtgtacttatttcatcatgttgctgtaaaatgaaatgagttaacacatgtaaagtctaagaacaaaacactatacaagtgttggttaccattattgttaaaaataaacctagcaagaaatgtactttgcctagatgaagaaaaatttagaattttaccaagagctataaaaactttgtccttcccttttattcaatacactttaaaaaatttttatttatttctttcaacccttgccaagcactgatctttttactgcccccatagttttgccttttccagaatattatgtaaggagaatcatacaatatatagtctttttcagattggcttcttttatttagtaatatg

SEQ ID NO: 755574 - DNA, 646 bp, Homo sapiens
agttttcaaaattgatttggaaatataaatttataattacatataattttgcatatttcatggttataaacataaactatatcagagtcttgaggttgaacagatgaacaaagtaaagttgaagaattaaaacataagttagcatargagaaaaacacaaaaactttaaaaaaagttttcggtaacatttacatttctatggaataattattgattccacaaatgactgattttggtaacatggtgaattaaaagtagcttccttcttaaaataacccttctatattaccctctttattttgtctttaatacacacactcgaaagcataatttataaagaaaagtaaataataattatacattcgtttgcaccaaataacaggacagctaaatacatgaagcaaaatcatgcagaaatcaaggatggttgagataaaatgcaactactttgaaatacttgtctctatgactggtacagacctatgtgaaaagtttaattttagataaatttagtatttcaatcaacacattttgtgttataaattcacacatacccataaaattgagattctcttattgggacatcttttgctactagttaggtttggtatcataagatttgacaggtagtaaaacccaaaagtca

SEQ ID NO: 755575 - DNA, 646 bp, Homo sapiens
agttttcaaaattgatttggaaatataaatttataattacatataattttgcatatttcatggttataaacataaactatatcagagtcttgaggttgaacagatgaacaaagtaaagttgaagaattaaaacataagttagcataggagaaaaacacaaaaactttaaaaaaagttttckgtaacatttacatttctatggaataattattgattccacaaatgactgattttggtaacatggtgaattaaaagtagcttccttcttaaaataacccttctatattaccctctttattttgtctttaatacacacactcgaaagcataatttataaagaaaagtaaataataattatacattcgtttgcaccaaataacaggacagctaaatacatgaagcaaaatcatgcagaaatcaaggatggttgagataaaatgcaactactttgaaatacttgtctctatgactggtacagacctatgtgaaaagtttaattttagataaatttagtatttcaatcaacacattttgtgttataaattcacacatacccataaaattgagattctcttattgggacatcttttgctactagttaggtttggtatcataagatttgacaggtagtaaaacccaaaagtca

SEQ ID NO: 755576 - DNA, 648 bp, Homo sapiens
actgattatatataaactatcgaataaaataggacttaatgatttcatactgatatgattctataaacgagtaagttgaaactttgatgagaaacaagacatttacataatttccctgagccttcccacaaaatacttgttaattacaaaagaaaaaaagtgtaactttacagaggagaagcctggcagacagaaactatattatgtgatctaaggagatctcatcagtaaataaaaaattgaatctgtgccamctgatagggtaaaataagagcaccttcttgtcaaaaatgtataacccgaatctaaatatgaggaaccaccagacaaattcaaattgaggaacatttacaaaataactggccaataaatgttcaactgccaaggcaatttagtcagacaaaatctaaaaacctatttatattgatggactataaatgcagctaaatataacgtatgattttgaactagattcttgctataaaagatattgttggtacaattggagacaattgaaaagggtcttgagattaggtgttagtaacgtatcaataataattttttgattctgagggttgaatggtaattatgtaagattatatactagttttaggaaatatacattgaagaaaccaagggtgatacagc

SEQ ID NO: 755577 - DNA, 648 bp, Homo sapiens
actgattatatataaactatcgaataaaataggacttaatgatttcatactgatatgattctataaacgagtaagttgaaactttgatgagaaacaagacatttacataatttccctgagccttcccacaaaatacttgttaattacaaaagaaaaaaagtgtaactttacagaggagaagcctggcagacagaaactatattatgtgatctaaggagatctcatcagtaaataaaaaattgaatctgtgccaactgatagggtaaaataagagcaccttcttgtcaaaaatgtataacccgaatctaaatatgaggaaccaccagacaaattcaaattgaggaacatttacaaaataactggccaataaatgttcaactgccaaggcaatttagtcagacaaaatctaaaaacctatttataytgatggactataaatgcagctaaatataacgtatgattttgaactagattcttgctataaaagatattgttggtacaattggagacaattgaaaagggtcttgagattaggtgttagtaacgtatcaataataattttttgattctgagggttgaatggtaattatgtaagattatatactagttttaggaaatatacattgaagaaaccaagggtgatacagc

SEQ ID NO: 755578 - DNA, 648 bp, Homo sapiens
actgattatatataaactatcgaataaaataggacttaatgatttcatactgatatgattctataaacgagtaagttgaaactttgatgagaaacaagacatttacataatttccctgagccttcccacaaaatacttgttaattacaaaagaaaaaaagtgtaactttacagaggagaagcctggcagacagaaactatattatgtgatctaaggagatctcatcagtaaataaaaaattgaatctgtgccaactgatagggtaaaataagagcaccttcttgtcaaaaatgtataacccgaatctaaatatgaggaaccaccagacaaattcaaattgaggaacatttacaaaataactggccaataaatgttcaactgccaaggcaatttagtcagacaaaatctaaaaacctatttatattgatggactataaatgcagctaaatrtaacgtatgattttgaactagattcttgctataaaagatattgttggtacaattggagacaattgaaaagggtcttgagattaggtgttagtaacgtatcaataataattttttgattctgagggttgaatggtaattatgtaagattatatactagttttaggaaatatacattgaagaaaccaagggtgatacagc

SEQ ID NO: 755579 - DNA, 648 bp, Homo sapiens
actgattatatataaactatcgaataaaataggacttaatgatttcatactgatatgattctataaacgagtaagttgaaactttgatgagaaacaagacatttacataatttccctgagccttcccacaaaatacttgttaattacaaaagaaaaaaagtgtaactttacagaggagaagcctggcagacagaaactatattatgtgatctaaggagatctcatcagtaaataaaaaattgaatctgtgccaactgatagggtaaaataagagcaccttcttgtcaaaaatgtataacccgaatctaaatatgaggaaccaccagacaaattcaaattgaggaacatttacaaaataactggccaataaatgttcaactgccaaggcaatttagtcagacaaaatctaaaaacctatttatattgatggactataaatgcagctaaatataacgtatgattttgaactagattcttgctataaaagayattgttggtacaattggagacaattgaaaagggtcttgagattaggtgttagtaacgtatcaataataattttttgattctgagggttgaatggtaattatgtaagattatatactagttttaggaaatatacattgaagaaaccaagggtgatacagc

SEQ ID NO: 755580 - DNA, 587 bp, Homo sapiens
gccccacccacatcctgctgattggtccattttacagaaagctggttgctccattttacagagagctgattggtctgttttacagagagctgattggtccattttgacagggtgctgattggtgtgtttacaatccctgagctagacacagaatgctgattggtgcatttacaatcatctagctagacataaaagttctccaagtccccactagattagttagacacggagcactgattggtgcatttacaaaccttaagctagacacagagtgctgattggtgggtttacaatccctgagctagacacagagtgctgattggtgcatttacaatcctccagatagacacaaaagttttccaactccccactacattagctagacacagagtgctgcttggtgcatttacaatccctgwgctagacacagagtgctgattggtgcatttacaatcctctagctagacataaaagttctccaagtccccacctgactcaggagcccagctggtttcgcctagtggaacccttgcctagtggatcccgcaccagggctgtgggcagagctgcctgccggtcctgcactg

SEQ ID NO: 755581 - DNA, 630 bp, Homo sapiens
ggatgcatccccaaactaggaaaggtttaatttccccaaaccttaaaatctttggcataaaaatgaactgggaagaaattacagatctaacagagcaaatctcttgaggatggacaacttttacagtaggcgaataaactctttgtctgctccccctttacaggacgccagggtcaagagggctccatagctcaagagaagggaacccagaactctgacatgcaagtaaaaggacaaatgtttcttttttaatagttagacttctggcctccctctccctccctgtgcaaacctgtagaatgawtggtaaaaatcagtttatattctctgtgtaaaattttgattaacggaaaaaggatttgtaaggttagtcttaagctatagcaaatctgttgtactagaaatttgtctttttatatctttctatcagaaagagggctatcttaggatagaatgctggcctaggaccccataagcccactgtttaagccatcacagaaaactggtcagtagcaaactttgctacaggtttctgaagaaaaaaaaaaaaaagaattgtaaaacaaaactggatgaggtctccattttgttttatctctttgggaccttgacctttagccatgtggcagt

SEQ ID NO: 755582 - DNA, 431 bp, Homo sapiens
attttttagaaatttgaatcaaatgaccatttttcatagcatttatatgtaaggctatttttgccatcagctttaattcttgcattgatcttcacacctgcctacagttgctccgtccctgtgttataccatcaatattcaatagtcagatgggtgtggaaaacagttttaagaaactaaatgaaaatctgctctcagagctaatacctttgtaccttgtacaggcatgaaggtattatcaataggcaagckagattgctgttagtgattccaccactagccattttataaattctataaatcttcatttcatattcattctgacatttaattttctgttctatggattttttggttagcacaggtctacataaccatttgaatcatcaaatacaactgaggcaacttgcctctgttattctttatagcca

SEQ ID NO: 755583 - DNA, 502 bp, Homo sapiens
ccacacaaaagtttcatcctttatctcactcagcaatttagtcctacttcatcccccataccagcttatctacacatgaggttaaacaaagatctccccatccacaggagcccactcttcttagaaaagggaaggaagtggatagaagtatatagattaatacagtgttgtatgggagccagtttatcccaactgkaagccaactgctaaattttcaggaattttgcaagtggttcttaaacatgaccattattaaaaactgaattacagccttggagcagtgggtcatgcttgtaaccccagcacttcggcaggcagaggcaggcggatcacccaaggtcaggagttcgagaccagcctggccaacatggcgaaaccctgtctctactgaaaatacaaaaattagccagacctggtggcgtgcaactgtaatcccagctacttgggaggctgagacagaagaatcgcttgaacccgagaggcagaggttacagtgaaccag

SEQ ID NO: 755584 - DNA, 638 bp, Homo sapiens
atgagcctgggagaactgaacaacctggcataataggagccttcagatggctgctaaggaacacagatatctggggtggaacattcttgggatgagtacgttaagtatagttatgctaactctaccatgaaaataatgtaattaataagtatgctagttctgattttttgrccgatattatactcttgtcagggtttaactgtaataagatcttctatgctgtctctggcaagtcaaaaacttctttaaacttcagtttcttagagtaattggtcttagattatctccaaacttttacctaatagtaaaattctattacggcctagagacagtaatatcagatattaattgaggcttaaaatgtctttaattcattaatatttcatttggaatgttataactagaattgattgactccattataaatgcctggcactgggaaaagaactttacatccattatcatgtgtatttatcatagtaactatattattcagatgaaaaatctgaggcttagaaaggttaaacaactttcccaaggttaccaaactatttagtagatttctaaatagtacatcagctctctcatctttaagatagatatttaattatcctagtaatagcttaacaattttgtac

SEQ ID NO: 755585 - DNA, 603 bp, Homo sapiens
aatgtaggtatagccattcctactggattttggtttctgtttacatgaaatatctttcccatcccaacattttcagtctgtatatttctttacaagtaagataattttcttgtaggcagcatctagttaggttttttttgttttgttttgttttgttttgttttttaatggagtctccctctgtcacccaggctggagttcagtggcaccatcttggctcactgcaacctctgcctcccgggttcaagcgattattctgcctcagcctcccaagtagctggtactacaggcacacaccaccacgtccggctaatttttgtgtttttagtagagacagagtttcamcatattggccagaatggtctcgaactcctgaccttgtgatccacccaccttggcctcccaaagtgctgggattacaggtgtgagccaccgcgcctggccagggtattttgtttttaatccattcagccaggctgtatgttttaagtggaaagtttaactcattgacattaacagtaattattgacatgtgagggcttattcctgtcattttattaattgatttctggtgttttatacatcctttatttctttttttct

SEQ ID NO: 755586 - DNA, 605 bp, Homo sapiens
ttgcctgatgccatgtaagatgtgactttgctcctcatttgccttccaccatgattgtcaggcctccgagccatgtggaattgtgagtcagttaaacctctttcctttataaattacccagtcttgggtatgtctttattaacagcctgagaaaggactaatacagcaaactggtaccaggtagtggggcactgtgtaaagatacccaaaaatgtggaagcaactttggaactggataatagatagaggttggaacaggttggagggctcagaagaagacaggaaaatgtgggaaagtttggaacttcctagagacgtggaggagtcacaagataggcagatgtaggaaggtttggaacttcctagagrcttgttgaatggctttgaccaaaatgttaatagtgatatagacaataaggtccaggctgaggtggtctcagatagagatgaggaacttgctgggaactggagtaaaggtcactcttgttatgcaaagacactgatggcattttgcccctgccctagagaactgtggaacattgaacttgagagacatgatttagggtatctgatggaagaaatttctaagtggcaaagcattcaag

SEQ ID NO: 755587 - DNA, 480 bp, Homo sapiens
cattttaaccaggttaaaatgacatctcactatggttttgattcacacttccctgatgattagtaatgttgagtattttttcatatacctgttgaccttttgtatgtcttttctgaatgtctattcagatcatttgtccctttttaattagattattacttttatattttggacccttaagttgatttccttacatattctggatattaatcccttgtcatattgtttataaatattttctcccattctgtaggttgtcttttcactttgctggttctttcgtttgttttccaggagcttttaagcttgttgtakttccatttgtctatttttgctcttgtttaccatgcttctgaagtcctacctaaaaaaaaatatatatttgcccagaccagtattctgaagtattattccagcattttaaaaggacttacatttaagtctttaatccattttgagttgacttttgtatatggtgag

SEQ ID NO: 755588 - DNA, 580 bp, Homo sapiens
atctgaaaaagccacagacacacaatggcagcccatgaaagcagctgagaggggtcctgtgccctgcaaagccacaggggcagagctgcccaagacaatgggaacccatctcttgtaccaacgtgacctggatgtgagatatggagtcaaaggagatcagtttagaactttaagatttgactgcctgatgggtttcagacttgcgtggggcatgtagcctgtttgtttggataatttctcccatttggacccaatgtctgtacccactgtatctaggaagtaactaacttgcttttgattttacaggctcattggtggaagggaagtgtcttgtctcagasaagactttggactatggacctttgggttaatctttaaataaagactttgagggattgttgagaaggcatattggtttagacatgtgaggacatgagatctggaaggggctggggaagaatgatatggtttggctgtgtccctacctaaatttcatctggaattcctgcttgttttgggagggacctgatgggttcatgtcctttgcaagaatatggatgaagctgggaaccatcattca

SEQ ID NO: 755589 - DNA, 537 bp, Homo sapiens
tattcccccttggccttctgccatgattaaaatctccctcaggtctccccaggagctgaacagatgccagcaccatgcttcctataaagcccacagaaccatgagccaatcaaacctctttttcttataaattacccagtctcaggyattgctttatagcaatgtaagaattgcctaatacagaaaattggtaccaaggagtgggacattgctataaagatacctggaaatgttgaagcagctttggaactgggtaacaggcagaggttgggaaggtttggaaacctcagaataagaaagggagataaaggaaagtttgtaaattcttagagactgggtaaatagttgtgacaaaaatgctaatggtgatataaacaatgaagaccaggctgatggggtctcagatggaaatgagaaacttcttgggaattggagcaaaggtcatgtgtgttatgccttagtgaagagcttggctgcatctttccccttccctagggatctgtggaactttgaacttcagaataatgagttgggtat

SEQ ID NO: 755590 - DNA, 537 bp, Homo sapiens
tattcccccttggccttctgccatgattaaaatctccctcaggtctccccaggagctgaacagatgccagcaccatgcttcctataaagcccacagaaccatgagccaatcaaacctctttttcttataaattacccagtctcaggtattgctttatagcaatgtaagaattgcctaatacagaaaattggtaccaaggagtgggacattgctataaagatacctggaaatgttgaagcagctttggaactgggtaacaggcagaggttgggaaggtttggaaacctcagaataagaaagggagataaaggaaagyttgtaaattcttagagactgggtaaatagttgtgacaaaaatgctaatggtgatataaacaatgaagaccaggctgatggggtctcagatggaaatgagaaacttcttgggaattggagcaaaggtcatgtgtgttatgccttagtgaagagcttggctgcatctttccccttccctagggatctgtggaactttgaacttcagaataatgagttgggtat

SEQ ID NO: 755591 - DNA, 537 bp, Homo sapiens
tattcccccttggccttctgccatgattaaaatctccctcaggtctccccaggagctgaacagatgccagcaccatgcttcctataaagcccacagaaccatgagccaatcaaacctctttttcttataaattacccagtctcaggtattgctttatagcaatgtaagaattgcctaatacagaaaattggtaccaaggagtgggacattgctataaagatacctggaaatgttgaagcagctttggaactgggtaacaggcagaggttgggaaggtttggaaacctcagaataagaaagggagataaaggaaagtttgtaamttcttagagactgggtaaatagttgtgacaaaaatgctaatggtgatataaacaatgaagaccaggctgatggggtctcagatggaaatgagaaacttcttgggaattggagcaaaggtcatgtgtgttatgccttagtgaagagcttggctgcatctttccccttccctagggatctgtggaactttgaacttcagaataatgagttgggtat

SEQ ID NO: 755592 - DNA, 578 bp, Homo sapiens
ctgttaaacaaaagcaaaattgagattgaatgacgctcgagggcaatgggaagggaagacttgcagggcatttggagagcagactcgtcaaggcgggtgcattcgtgagagtcggaggtgcaaggaagactaagagagggtggacttgcagtggactacaatttcgtgcctggctacatatgagtagggtagaatctcaggactagctgagcccacatgctcagtgtaattttcccagattgcttaatgtcaggctgtgcattttaagagttgagaaccgtttcctaacctctgcctctttgctacctcacattactattcctggcttctgctgccagcctgagacctgccgcatgtcaaagctctgctatctgacacttttagattggtctccycctcgtggagaacacagctttgtttttactcacctgtttcttgatggtcttactctaagactttcagcactagagcaaccattatggagatagaataattgtgtaggaaaatttctatgtggagtgtttgctgttatttatgttgttttcttggtgtttgcagattttgagtcacacaggtga

SEQ ID NO: 755593 - DNA, 537 bp, Homo sapiens
taaataacaatatgcaatgctagtgagtcatttcagtaactcaatgatggcaacattatttgccacaactgtttgggaaagtcattagaatagggccataaaaaatcagttgtaatattaaacctagtaatacatttacagaaatctctattatgagcataatttctaagcagaaaaaggtgaatgtttaaagatgttcattgcagcattatttacactacagaaatccaaacaacaacaaaaaaaaaatagggagagactcataaatgccagtgatgaaatgtcatatctttcaatagtcacagattgtatagatttctgtgtatttatttatattttcagtattgtaagcatactatgcagttgacaacagcwtcctgtggttaagccctgactatagtcagcaggttaaaaaaaatcctttatttaacctttcagcatcccttggttttaattattttcatttatgcaatgatatgtctctgaacaagagtcagagacgcagcagaaaaatgattgagaacaagaaaaatcgag

SEQ ID NO: 755594 - DNA, 613 bp, Homo sapiens
aaattattcccctctataaaagtctttgccctatcaagactacataagtgagatgctcaaattctacagtaataaaacaattggcactataagtgaggtatttcctgctgataaaattagtatgacttaaacatgacatacctacactgaatagaataygtgatagatgctggggtacgataacatgaaaaaagatttttttacccagttttaagtagtctgtggcaaaacagtcacctgaatacactgtttataagaagtgtaaaataatacagtcctttggaaagcaatgtgacaatatgtatgaagaaatttaaaatagccggggcagtggctcatgcctgtaatcccagcactttgggaggcagaagcagacagatcagctgaggtcaggcattcaagaccagcctggccaacatggtgaaaccctgtctctactaaaaatacaaaaaattagccatgtgtgggggtgcatgcctgtaatcccaactgcttgagaggctgaggcagaagaatcgcttgaacccaggaggcagaggttgcagtgagccaagatcatgccaccgcactccagcctgggcgacagagtgagattccgtctcaaaaaaaaaaa

SEQ ID NO: 755595 - DNA, 685 bp, Homo sapiens
atgattaaaggactgatgatgaaagtttcaaggaattgggattacttagcctgaagaagagaaatttgaggggtgatttaatggcaatcttcaagtacagtatgaggagggttattataagtatggtagccagctgttccccagctgcaccgaaggttagaaaggggaaatcgagctagaatttcagcagagaggtttaagttggaccagtgatagtggttctcaaagtagctcaagggatagaaaaccatcgtggaagaccatgacatattcttttaaatttaaatatactttttcctaatcagataccaacttataacatgtactagtaaggtaaaaattatgaaatacarctcaggacttagaaaatgttgactggggagatgggtgggggtgttaagacataccttctccactgggaccccacaatgtggaagcccagtttgaataccaatgagctatgaagagaggcggtacctgtggactttcaatgagcacgacaaccagatggtgggagcccatgaggatctgtgttcaggaaaggactcactcccatctgaatcctggcaaccctcttttttcctttgaccctgtttcataccacctggaaaaggagggagaggcccaagccatacaagtacttttgaggactgcatgtctaggagacagggcaaggtgcccattt

SEQ ID NO: 755596 - DNA, 645 bp, Homo sapiens
cctggatatgaatctgtaaggatacaagagttaacgtaaagaggatagtggcctcattttacctatggtcatgtaacaattcagtagaggttgtggtggactcttcattggcagttttgaaagagccagggtactgcagctgcatttgctgccaaactggaattcagacacactctacttctgccagactaccaraacatcagctaagtccttccaacttccacagaaatggagatgggacagaatgagccaaagagaagggactggtatccatcctaatctgatgctaaaacttccatctctcagtcccttagaagagccctgttattcctcaattccctttgggaggagaaaccctagattccccacaccttggagttattctctctccaacctagttctctccccatttctatcaggggtaaaagacttacctacaccaccgttttgaaagtgcaatttttatttttagtcacctgtcttactttaagcctggcaacacatgctatttatttcccatcttcactaagaaagtgaaatgaaattgctccaaagagaaatttgaaatatatataaataagaatgtcctgacttgttggatgctagaacaggttattgagaggaattgtagaatgttctttcaga

SEQ ID NO: 755597 - DNA, 598 bp, Homo sapiens
tgactcccatgcatgtctttccaccataagtcacattttcttactatctgaagtttgagctcaaatggctgcatctgtttgagtactgtaccatcattgaataatgaggattattttagaccatagcatgcaccataatgcaaaatcacttggcaaatgttccttccataaaacaagccatatcaactgtttctatattcatagattcaatcttttgttttctgaggatgaaatatgttttaagctaccaaatctgttcaggctcagagtggtttaaattcttctctaagttttagtattaggttattgcacagcgccattgtagatctaatgtgaaaatgtgaagcgagttcagatatctatttaggtgtaatctttccaaaagatatatgtgatcacacagttcattccaggaaagtcttgcttcaygtgtcagcattataaaggcattctccatcttctgagagggaaattctgtgggatgtgagggggaaagaggcagggaaggagaatgattcagctggaaaagaaaagagaaaatggggaaggagggccgaaccagttctttgggaactatgctgactaaggagtgggtact

SEQ ID NO: 755598 - DNA, 659 bp, Homo sapiens
ttaaaaattatttcaacctttggataagtagttattcccggaaaaaaatttttgagttcatttttaattaaggcatttaagtactgatccttgataaacattttttaatcccagatacccatttaacatggatttggctttatattgccttggtttcaagtatatgggaattagcactatgaatcacaatatgaaatacctaagagttcacttggaatatatcaatgttaccgaagttttcctgaaatttttaggtgaagattmaatatttagggcaatatatatatgctcaattaacattatctttaattgttagaatataatttgtcttgtgtttgtgtctgcaacctagaaaggtaaaacaaaagagaaattgtgttcctctagttgacctcctttcacaactaatttgagagtattgtttctgtggagataagtctccatggttactgattacagactttttaaaggttttaacgaggttggaaggatccatagaactgttgctttgcatttcagcaaataagggcattagtcctttgagactgcacctttgaaacaataaattcacgttagatgaagtgcactgtaatatctataacatatcagcagcttataaatgtgtatatatggatgatgatttaattaaatactttgta

SEQ ID NO: 755599 - DNA, 659 bp, Homo sapiens
ttaaaaattatttcaacctttggataagtagttattcccggaaaaaaatttttgagttcatttttaattaaggcatttaagtactgatccttgataaacattttttaatcccagatacccatttaacatggatttggctttatattgccttggtttcaagtatatgggaattagcactatgaatcacaatatgaaatacctaagagttcacttggaatatatcaatgttaccgaagttttcctgaaatttttaggtgaagattaaatatttagggcaatatatatatgctcaattaacattatctttaattgttagaatataatttgtcttgtgtttgtgtctgcaacctagaaaggtaaaacaaaagagaaattgtgttcctctagttgacctcctttcacaactaatttgagagtattgtttctgtggagataagtctccatggttactgrttacagactttttaaaggttttaacgaggttggaaggatccatagaactgttgctttgcatttcagcaaataagggcattagtcctttgagactgcacctttgaaacaataaattcacgttagatgaagtgcactgtaatatctataacatatcagcagcttataaatgtgtatatatggatgatgatttaattaaatactttgta

SEQ ID NO: 755600 - DNA, 574 bp, Homo sapiens
aagaagtaatttttttccaattggaactataaattcaaggtcatgtcagtcaaaaatctcagccactagttgtagatattcacagatagacttaatgttaacataaaaaggcaaaaaaaaaaaaaaacttgagtaactggaataagtctacaaaaaagagagagagagaagaacagagttagagaattggaagattcatactacctaaatagaattactataaatctaaagtaattaaagtactgtattagcaaagaataaacccatagatgaatggaacagaatagaaagcacaggaatagatgtacacaaacatagtaaactaatttttgaccatggtgagatgataattaaatagaaaagaaataatctttttaataacatttcctgaaatatttgaaagcccrtatgtaaaaaatgttaacttctaaacagcctcatattttatacaaaagtttactcaaaatgctcacagattacttgtaaattttaacactataacaaatccagaataaaacaaaggagaaaatctgtatgaccttgggtttggtgatgagttttcagattcaacatc

SEQ ID NO: 755601 - DNA, 548 bp, Homo sapiens
tgctttgtgaaagacactagtggaataaaaagtcaagccacaaaataatagaaattaagtgcaaaacatgtatctgagaaggaattatatctaaatgatacacacaaaacccttaaggctcaaaagtaagaaattaactcaattaaaattaaaattttagcaaataatataaacagataactcactcaaaaagatgcacaagggaaatataagcatctgaaaagataatcaacatctgtctttgtcaagaaaggctgctatatcaaaataatacagactgggtggcctgaacaacagaaatttatttctcacacttctggaggctgtgaagtacaagatcaaggtgattgccagttttctgttgaggagtctyttcctggcttgcagacagctgccttctcattgtgttctgacatgatggaaaaagagagagagcaagctttctgatgtttcttcttagaaggacataatcccatcattagggccacaccctcatgaccttatttaatactaattacctcccaaaggctacatttccaaataccatc

SEQ ID NO: 755602 - DNA, 638 bp, Homo sapiens
ataccttgatgcagctgttttgtactaagtgtaaattagtttcagataacatattctttcaagaaatgtcatcttacgtgccaaagacaaacactgtgcaaaataatttaccttctctaggtaaatggtagtatctccataagtatcagaattaactkccatgaagagttcaatgatgatgacagtattagtaataatatttatagctaagattagttttgatgctattggatgctactttgtgtttcggtttttgttacagtacattctcacaacagttttatggtttattaatatttcccttttgtaaaaggaaatatgagctacggagggttaaagctctcagggtttcacacattgtcaatgtgtacccaaaacattaatctaggctttcttattcacacttgaataatttctaaactagtttcctgaacttggttcttaaatacctatttcaaactaactaaactttgaacataaagtaatgcctccacttacagtgttaaatctcttgatttatttttacactgttaattcatttcatacagatgtctattttttcctttaaatatatatatatattccatatcattcagaatgttctggggtctctgcttattgattttgtaattagtttt

SEQ ID NO: 755603 - DNA, 616 bp, Homo sapiens
aagtaataagcaacaccaaaaattccaaacccatattctcacataaaaaaatcagtgacttaaaaaaaatcttttcatgtctttttatttacagactaatttgcaaggggatcaatttaaattttaaatactaatatacatataactgccaattcaaactttagacatatatctcttacagaataaatgctatatacataagtgtatttggtaaaggccctagctaaaaccatgagaaatgtcctaatgtcaatgcagcaaagaaagaactcagatttttctcaagaagatgttctrgaagtgattatcattcgtttaatgcagaatttcaaagggttcagagatctgccacagggtatgtaggtagatggggcaaattcttaacctatgccaatgtctcttgtattagcctaatacagtcttgagactggcaccattaataaaaccaattttcttagtattcagtagttttgggtgttttggctcccttacttgaacaacttctcatttctatcaacggtctttcttagcttcctgtggccattcagaaaatggaaaacagaatgtgcagtaagttaatgctggttgattaaataaaaccaaaatataccagagt

SEQ ID NO: 755604 - DNA, 697 bp, Homo sapiens
atatcccctagtaatttaaaatgtgttcactaaaaattatctacttaacaacctatctaattttaaatatcttttgattttgcagaacaaaactatcatttcagtcagattgcctgatagagctttaaatgaataagtaccagtaaacaaggtttgctttgttatccactgttcatgcttgtcaatggagaattgccagttctctggaaaaaagcagtcccctttcagaatttgatactggaacagaacatgttcatacgcaaagttctttgtaactgtgcatcacgctgtaccagccatggcaaagcatytgaatagcagcagagtaatgttctattctccttgaccaattcagacaagcattgtgaaaaattagctttctgttcatttttacttctgaccatagtttaagcatattcagcaagcccatgatgatagatagcaaaaaaaaaaaaaaaaaaaaaaaaagaaattgtgtctttctatcaaagtctctgagatcaatgggaacattaaaatggaagagagataagaggaaaaagcaaatacaagaggtagatcaaacccatagatttcagtctgtcagttcaataatttgcagtgctaaaggcagcaattgtaaagatgtagtcattatcttgaaaaggtaggatccaacaagtgatattgatgaagatttttgaattcttaaacttgt

SEQ ID NO: 755605 - DNA, 506 bp, Homo sapiens
tcaaagcactgtgccagccgaggcccagagagtcataggagcagtgcgggccgcagccgaggcaaggaagcaacctccttaggggggactagggtgggggggtatccctttccagctgggccgggggtcaccccgaacttgggatgagggcactcattctgtgagcttcttcaccccgcttaacgccccacaagcgccctgaaccctctgtgcaagtctgtaagctgcacaggcgagcagagactctgggagctgggagaggtggagggtccccagaaggagackgaaaaggggaaagagagggaaagaacaatgtcacagccagcgagagggccagagcagggcagacacagctgtggggggcaccgaagcagtatccacataacaaaggaggcagggccagaggcgaagacagggccgagaggcagagtggcttgggcacaggtgccagacttgccccatcctcccacaccaggaacacggcgccggcctccgggacttcgccg

SEQ ID NO: 755606 - DNA, 456 bp, Homo sapiens
tcccattggtcccccactgcatcacagccacgtgcccacccacaggagagtctggccggcagtgcatcctcctccctggctctggagctgtgaccctgcctgcccagttccggccagcctcacggggaaggagcccacatcccrgtcagcaggagaagatgaatgcttttaattcagagagctcttcacgagccaatgagaaggtgtaaatcgtccttccaggccctggagcccagagctggcacccagtcacagcaggaagtgcagccagcagggccaagatgcggctgggcaggtcatctggatgacaggtggacctggagacatagtcacctggcatgcaggcatccatagcaagctcttcctcctctggggtgggcacagccctgcctgatgcctgtgtatctgtggtctccctgtgtcggggtggggggggccctgtgtttgtggggaggg

SEQ ID NO: 755607 - DNA, 456 bp, Homo sapiens
tcccattggtcccccactgcatcacagccacgtgcccacccacaggagagtctggccggcagtgcatcctcctccctggctctggagctgtgaccctgcctgcccagttccggccagcctcacggggaaggagcccacatcccggtcagcaggagaagatgaatgcttttaattcagagagctcttcacgagccaatgagaaggtgtaaatcgtccttccaggccctggagcccagagcyggcacccagtcacagcaggaagtgcagccagcagggccaagatgcggctgggcaggtcatctggatgacaggtggacctggagacatagtcacctggcatgcaggcatccatagcaagctcttcctcctctggggtgggcacagccctgcctgatgcctgtgtatctgtggtctccctgtgtcggggtggggggggccctgtgtttgtggggaggg

SEQ ID NO: 755608 - DNA, 634 bp, Homo sapiens
ccatcacttagtttccactgagttccggtgcacagtaatgttggccagagattctgagtatcctgtatagactccttatttgtgaatggaaaaaaaacaaaaaaacaaaaaagcaaaaacaaaactgtgagctaggagttgccttcaagttactagtttggaacttctggtatagttaggaaaatctgtaaatstgtgaagcagatttgttgcccgagcaaacaacaatattatccttgattccaagaagatagcaattggtcaggttttctttgtttctgttttcttcaaaaatcctcaatttaatcaaaatgatttaaatcagcgttcagttgtgcagtgaaattgatggtaaagcaaagaaaaaatagtgtgttagtccatttttgtgttgctgtaaataaatacctgaaactgggtaatttataaataaaagaggtttaattggctcatgggtctgcaagctgtacacaaagcatagtgccagcatttgcttctggtgagggcctcaggaagcttccactcatgacagaaggcgaaggggagctggcatgtctcatggtgagagtgggagcaagacagagagaagcgagaggttccacattcttttaaacaacctgatctcacatggact

SEQ ID NO: 755609 - DNA, 575 bp, Homo sapiens
ctattttacaagagaataatagagcaggatgtaggggagatccgtggttttggagtcaagtaatttttgttgtaatttcaattttctaatctatcaatggatataatagcaataatactcatatcacaacactgagatagtagataaaaacaatgtcttagatatattaattgcttagtaaaaaggtatatgattattcaagatcttctactccttttaaacaatttacgtgattcttttagttaactgaagaagtgaaatgcattatatcatgcactcaaaacaggcaatagataaccctaaaccttcaaatccattatctcctcccctacttraaacatgttttctcatctgagatccaggtcctagtgtttcccaagacccagttcaaatagcgtcacttctactttccctcctagtcctctctctcagtcaaaattatctttccctgtctctgaattctcttagcatttgaactaaacctttcttataggacttaacatattttatgtgtctctcctactgtcatatttgagtactttttctaaattatctatatattgagtggtagctca

SEQ ID NO: 755610 - DNA, 567 bp, Homo sapiens
tgtccagccccatgttttatttatatttattaactttttctcttaatcccttttctgttccaggatcccatccaagataccacattgcatttagttgtcatgtctccttaagctcttcttggctgttagctttctcagactttttttgttttttgatacctcattcgttttgaggagtaaaggtcaggcatcttgtataatgtcctttagttggcatttgtcatatatttttctcatgattagaatacgctcrtatgtttttgggaagatgaatgcagaagaaaagtaccatttacatcccatcatgtcaaggacacatcttatcaacatgacttcactgttgatgttgaccttgacttcctgtctggggtagtgtttgccatgctactccactgtaaagtcattcttttttatcctccctttccatagtgctccctgtggaaggaagtccctatgtgcagtccacatttaaggaatggggagcaatgttccatctctgtgaggttaggaaatccacattatcagaaagtctgcaaaatcagatacctacagaaattattcggaatt

SEQ ID NO: 755611 - DNA, 567 bp, Homo sapiens
tgtccagccccatgttttatttatatttattaactttttctcttaatcccttttctgttccaggatcccatccaagataccacattgcatttagttgtcatgtctccttaagctcttcttggctgttagctttctcagactttttttgttttttgatacctcattcgttttgaggagtaaaggtcaggcatcttgtataatgtcctttagttggcatttgtcatatatttttctcatgattagaatacgctcgtatgtttttgggaagatgaatgcagaagaaaagtaccatttacatcccatcatgtcaaggacacatcttatcaacatgacwtcactgttgatgttgaccttgacttcctgtctggggtagtgtttgccatgctactccactgtaaagtcattcttttttatcctccctttccatagtgctccctgtggaaggaagtccctatgtgcagtccacatttaaggaatggggagcaatgttccatctctgtgaggttaggaaatccacattatcagaaagtctgcaaaatcagatacctacagaaattattcggaatt

SEQ ID NO: 755612 - DNA, 597 bp, Homo sapiens
gcaaataatatttgatgaaaactatcatatgaacattctattgtgctgtgtctaaaaggctatctcagaaggcttcttgagggagacagctttgtgttgcatcgtaaaaaacattcttcaatgcttaattttagctaaatcctcttaaattattttcttataagccttaattcatacatgcttagacatttcctcaaaggaccctgtaaaatccctgaggtgaagtgctgacaagaccctgtgcctgaataccatcaaatttttccttggcttggatatctggatactgatatctcaacccttcaaccctttcttattttcagtagatctcttggcctctgacagtttgattaatcattaggaattttacttttctctgctttctggaatctgtgtctctggtgtggattcatttacccacctgycaacactgatgctttttgtgtgtatcttaattcctacttcccatgtgattgtgacgtattggttttatttttctattatagcttactaatctaaatatcctaaatgtaaatatcttcttccatgttctttatcaggcttactgaatttctacctggcttaatatagaggttt

SEQ ID NO: 755613 - DNA, 550 bp, Homo sapiens
catgtagcttcttgtttcttattttccttgcttacagtatttagtctgcttatccaattcaacccttttgcattaatattttatttcttgcttccccagttagattgtggtctagactatgcctcatatgctttttttgccctttaaggctcagcttagctattaccttctctagaayccttgccttactatccttttctccgaccctgaacatgtatatatatatgtacatatatacatacacatgtatatatatacatgtgtatatgtacatgtatatatgtatctatacacatatatatgtatctatacatatatgtatctgtatagatacatatatgtatatatgtatctgtatagatacatgtgtacttatatatgtacatatatatatatatatatatatatatatatatatatatatatatacacacctccatttttgtgcccctacagcactgagtccaggatatcctaactgattacttagactattttatagtaatctggtttcttcttttcgtctctcactattgcattatttccattt

SEQ ID NO: 755614 - DNA, 540 bp, Homo sapiens
tatacacaaaactaaaactttggaagcttttagagaaaagcagaaaagattatcttcatgatggggttagacaaatggtttttttcataggaatagagaataaccataagaaaaaactgacaaatcagacattatttaacattctaatatcttctgctcattaaaattattactaagaaaatgaatatgcaagccacagattgggagggatatttgcaaaagaaatctgacaggccaggcgtggtggctcacgcctgtaatcccagcacttcgggaggccgaggcgggcagatcacgaggtcaggaratcgagaccatcttggctaacacagtgaaaccccgtctctactaaaaatacaaaaaattagcagggcatggtggcgggtgcctgtagtcccagctactcgggaggctgaggcaggagaatggcgtgaacctgggaggcggagcttgcagtgagccgagatcacaccactgcactccagcctgggcgacagagcaagactccatctcaaaaaaaaaaaaaaagaaatctgacaa

SEQ ID NO: 755615 - DNA, 620 bp, Homo sapiens
cccttgagcctcactgctttgccattttaggatgtatgcccactagtttcacagaaacaataaataagaaaaatgtttgtttccatagcatcctatacttccctatcagagtttcacactttgttgtaaatagttatttgtccattactcccacaaaattaactttagtaggaaatatgaccaatccccaacgtttagtatagtaactggcaaatactacacgttcagtaactagttaccaaaagaataaatatgaaaataattaattatgtattacataatctcaatttcaaacccagcattgaagactgtctggtactaccaacaccctctgaaattgccagcagtttcactcagcagttcactgacccctcactctctcacagaatgtttagyatctgctacacagtaacactgcagcctaagttctgcaaataccaagtaagttaggaaataatactgttcctgtctgtcaataacattattgcctaagtagaaaatcccaaagaatctacacacaaacacaatccaagaatagatgagagttcaacaaggtcacagtacccaagatcaacacaaacatacaaacacacatatgcacacatattttcaaataagac

SEQ ID NO: 755616 - DNA, 621 bp, Homo sapiens
cctcaaaaaaaagcacgtctcgtgtccagctccgtgacaagatttacccactattttggctcaccttaatacaatctagacaaatatatcattaatattgacaagtacgtttctcatccctactcagtatctgcacttttaattttctgtctgccacttatttttatgatatggggggagggggttcaactctgcacaaacacactgttaaagatagcattgctaaaactaaacagctggttggtaggcagcacaccatgttgcagcctgaaatgtctgccatcaggagwtaataaaaagttctaatttggtctataaaaggcagtttaaaggtgtcaattacaccatgaaatacatgctgcccacgagtcaaacacatgagagatgagacccaccatacttgagagcactctataaaaaaatagggaggcacaatataaaaaagtattgttatggtgatgattttcaagaaggttgaaagtatcaccacctaagactggaatatttccacagaaataagattccgcagaaatcactaagacctggcttgacattttaatgaatatcctataggcagtaaaaatttaaaatatccaagtttataaatattacatgtatcgc

SEQ ID NO: 755617 - DNA, 504 bp, Homo sapiens
ggggttcaactctgcacaaacacactgttaaagatagcattgctaaaactaaacagctggttggtaggcagcacaccatgttgcagcctgaaatgtctgccatcaggagataataaaaagttctaatttggtctataaaaggcagtttaaaggtgtcaattacaccatgaaatacatgctgcccacgagtcaaacacatgagagatgagacccaccatacttgagagcactctataaaaaaatagggaggcrcaatataaaaaagtattgttatggtgatgattttcaagaaggttgaaagtatcaccacctaagactggaatatttccacagaaataagattccgcagaaatcactaagacctggcttgacattttaatgaatatcctataggcagtaaaaatttaaaatatccaagtttataaatattacatgtatcgcatttgagctcttctgagttatgaaaagttaactccactttcataagatggacagagatcttaa

SEQ ID NO: 755618 - DNA, 647 bp, Homo sapiens
gaaatatgaaggtattactattttccactgaggtttatattttatttctgaactccagtaggcaggaaatagaaatagcttttaatttttatatactttcttcgttcaaactcaagtctaaacttatctattttcttcacaaattgggttagagtctttggaatatgctctaatttttagaagaagcaatactacaaatttaagttaaactgtgtccaaaaatctttcaaaagtatttcataaacaacttactgaatactgccaaacaaaattcaccaatgtcaaccctgggaactatttatacatttcaatcytgggaaccattataaaggctcggtcataagtaactgactaaaatgaaatatgagttgaattaaaataaactgctgtctccgtacttggaagaacaaaggatgctaactcagtcctctggctgccactcatccagtctgcctgccccacttttgccgtctaattattccttagggtcctaactactttagactactctactttgtatcaccagcagggacacagttgctcatggaattacaggaaactgaagttaaattcagaagtcttaatgcctgattatgggacaaatttcttgtgttggaaacttatctgagtcaagaatatagagcaaa

SEQ ID NO: 755619 - DNA, 590 bp, Homo sapiens
tgttacaggtggatagttttaaactgaattatattcaaacgcttagggtctattgattactaatagttttcactaatcaaagcaagaattgtttctactactattactaaggttagtattaacccaaagcaagcaactgtcagatatttactgggagcatttgaatgaactaaaaagaatgaaaagatcaaggagtctactcctgaaaatcagtttcaggtgtatttaacacacagayacatttccataaatctaaaggccccatcgcttgcctcatgtaagtcagaatcacttctacactgttaacgagtaactacaatttccttgcaatcacaaatcctgctgatagaaagccaccactgtgacatcacatagctgtgcggtcccaggttttcaaaactgagttggtacaacaagctcactcagcaagcacacgtcaacttctacatgtacatgtggtgccagtacaaaaacaggatggctgctggcctcaggaaggcaacaggccacacccctaggaaacaggagacagaggcactggaaaggaaatgtgatctgatgctagggaagagagaacaaggtcctgagca

SEQ ID NO: 755620 - DNA, 556 bp, Homo sapiens
ttttaaaaaagccacagcacatgtaacattaaacattaataaaaaaaaaaaaattaagtcccaagagacagttaaggatagtaagtgctacagaagagaggaatggaccaaactaggacaaaatgagtagataggacatcacagagctatgccttgggttgggctgggaagagtaggatccagaaaggaaaccgagtaacaaagctgcaagaaaaaaaacactgaccagaacaagtttaggggaggyggcagagtcaagtccagctggggttaagggtgggcatgggctttattagagacccgtgacctggagtgcacagcccagctcttactagctgtgagatcttgggcatgtgacatctctcagtggcagtttcctcatctgtaagcccagaatgataaaatacctattctcagggtcataattaaatgacatttaagtattagcagagtgtcccatgtatagtaaagattcaataaaaaagagaggggaaggttatttcacttaatcctcaaaacaatactgtaaggtaggttctattataatcacttttag

SEQ ID NO: 755621 - DNA, 598 bp, Homo sapiens
aaacaaagaaggtcattatacaatgataaaggagtcaattctgcaagagtatatagaaattgtaaacatatttgctcccaacactggagtacccagatatataaaacaatattatcagagacagagagagatacctcaatagaataatagctggagacttcaacaccccactttgagcattagacagatctttctgacaggaaatcaacaaagaaatgttgaacataatctgcactatagagcaaatgaacctaagagatatttacagaacatttcacccaacagctgcagaatatagatgcttttccccagcacatagatcattctcaaagataagctgtgttaggtcacaaaacaagtctcttgtatgttgtgtgtacaacatacacaaaattgaaataatatcaagcaacttttctgaccacagtggaataaaactacaaataaataagargaattttgcaaactatacaaatcatggaaattaattgcttctgaatgactggttggtcaatgaagaaattaagaaggaaatttaaaattttcttgaaacaagtgataatggaaacccaacattccaaaacctaggggatacagc

SEQ ID NO: 755622 - DNA, 611 bp, Homo sapiens
ttttcagatataaaattaatcccaagtctctcagtagttttaagtgaatttgagaagacagatgaagcaagcatcacttagcagatatgaaagagaaaaggggaattaaaaatcaaaagttagattttgaataggtagaaagaaaataaattctggacaagaataataaaagttataaattcaggagatagtaaattgtattctctttttttttttttttaatcaatgttgaccaggttggcgycgaacatgtagccttccctccccgagtgccagggcaactggcctgagccacggcggctcccagtaaattgtattctttattaaatagctacactgctttggggtaatggtttttgtcattattatttcataatcatcattaatacacatctacattaatgtaaattgaagagtaggcaaattatctttattaggttactttttggtctctcttactaaatttatttttaacagggttgtatacctgccatttttctgtcttcctgtgacccttcttcatctggaatagagaaaatcaggtaattgaaataccaaactttcagcttactgtcttctccttactctgaagtctgaaaagccaccctaaa

SEQ ID NO: 755623 - DNA, 631 bp, Homo sapiens
ttgtgtgatggaagactggtgggcacctcttagcatcttgctgtctggaaagggcagctctagagaaaagataatccttaacactaaactgaaagctctgtgatgaaaataccatatctcccttgttcatcaccgcattccctttggcaagcactggacacattcaataggtattttctgactacaatgctatctcttttttaaccaaccatattaaccatgtgtcttctactttaaacagtcatttaatccactctttgtctataaatgaagtttagaggatcaaagtgaatcacagagataaagtatttttgatcactgtaaacactatttacatatagcatcacgggatgctgcaactggtagtgttcttgaagattatatggttgaaattatttatgcaatagtcaaaattgaagctacttgaacaaggtcacacagcctattattgttaagytacatacaattagaatctaggtctcataatttctagctcaatgcccttgatactatgattattattcctatttaatatgggttttagaatatttattaagtaataaatctagtggtagggttaaatcatatttactattagtatagtcgaggctaagttggagaaaataactta

SEQ ID NO: 755624 - DNA, 644 bp, Homo sapiens
taattgttttgttttattatttgtttttgttgttaatcttactgtatctaatatataagttaaactttatcataggtacgtatgtataaaagcagacattatgcgtatagggttaactactatccatggttttgacatccacccaggtcgtgaaacatatcccccaaacataaggggatgcctactgtattacagttttggtcatggttactgtgaaagaccagaatgtcctattccaaaatatgcttcgtaagcataaggattattttgagctgattgagaaacaccagccacaggagaagctctaaaaacagagtagaatgtacctttttttataagggaaatttatgtttataaaggaataatctccatttgtaaggttctctctctctctctctctttctctctctttcaggaaaataaggatattctaaatcactacaaactactatgaatrgagaaggcatcaatttaaatctgtataataaatcttattcttgtttactccactttctctggatatctctctagaaccaacctgcctaatctatctttgtttcaccaaatgatgacatttaagcttattcaaagccaccttttctcatttttctgtagatattcccacgtatacatgaggtatacat

SEQ ID NO: 755625 - DNA, 621 bp, Homo sapiens
aactacttaacagaacctgattcatataggaattaagtaaatgtttgttgaatgaaattcagtgtccccaacctttttggcacccagggactggttttgttgaagacagtttttccatggatgatggtaggggatggtttcaggatgattcaagtgcattacctttattgtgcactctatttctattattattacactgtaattaatgaaatgatggtaaaactcacaataatgtagaaatcagtgggagctctgagcttgttttcctacaactagatggtcctctctgggggtgatgggagacagtgacagatcaccaggcattacattctcataaggagtgtgcaacctaatatagattcctcgcaygcacagaccacaatagggttcgtgcttctaggagactctaatgccaccactgatctgacagggggtggagctcatgtggtaatgtgagccatgaggagtggctgtaaatacagataacacttcgctcactcacttgccagtcacctccttctgtgtggcctggttcctaatgggccatggactggtactggttcatgtagctttgctaaatttttctgcatttaaaatatattttattgagatatttctgga

SEQ ID NO: 755626 - DNA, 555 bp, Homo sapiens
tccatcgtagagggaaacactcttaaaaacattttttttagcaaaccgaattcaataatataaaaaatgaatcaccaccgagtagttgtattgcagggattcaatgatgatttaacatttgaaaatcagtcagtgcatttcaccacattaggaaattgaaaacgaaaaaaaaaaccccacctatcatctcaacaaacacagaaaaagtatttgacaaaactcatcacgtattcctgataaaaactctcagaaaactaggaatagagaaaaagtttcytgatctgacagaaggcagttaggaaaaaactctgtagttaatgttcctacttcaggctgacagaccgaatccttcccattatgatcagaaacagaacaaggtgtctgtctttaccttttctagtcaacagatactgggtgttcctgtcagggcaattaggcaagaaagagaaaaaagtcactgagagtggaaaggaagaattaaagttatttttactcacagatggcataatagtccatgaagatgtgatggattccacaaaacctcgtagaagacat

SEQ ID NO: 755627 - DNA, 469 bp, Homo sapiens
ttttaatttccaatgtttttgcaacactgcaaatgaagattcaaaccatataatttgaagaccaggcactctagtctggaggttcttcacgcccactgttccagaaacattctcttattgtagttccttaaaatccttctttttagtgactcttaggactctcttgctttctccctttcctcctttcttcttttcattcactcaacaaataattactgagtgcctgctgtatgccagacactattytaggtgctggggaatacagcagtaagtaaaacaggcaaagcccaagttcttattgagttgatgttttaatggggtagggggagacaataaaaaaaatgaacagtaaaacacataagacatcaggtgggataaatgctatgaggagaaataaagcaggataagtagagagtgagcagatggggactgagttttacacagggtgctcaggaaggaccacctgtgg

SEQ ID NO: 755628 - DNA, 598 bp, Homo sapiens
aacttacaggctggttgttgccagtgatgaccaaattttcatttcgccttcctcctactgtgcttttataaagagggtggatcactcccatgtcagatacttgcttaaatcgaagcaggccactttcatgaaactccatactatcacagccatttggtccaatgcgaatcacggcccaaataacaagtgttatctgaaaaagaacacaagtccrctgttggtaggccgcatacatttaatgtaattggaaaacaaatagaaaatattatcaccaaaatgttaaagacctcctaaaatgttttatcagtgaggtaaatatatcaattaattttccacttataaacaaaacgaattttatttttattaaggtattacatgcaaatagctaaaagtcaaaatgtgctaaaggtctataatttaaaatgaatagtttcttattttttctaccctctccacatctcattcccaggaacaatcactttcaacaaatttagctatttcatctagaatttatctccttatttctaaatatatgtatttcttctaaacatatatttctaaaatatctaacaaatatttcttctaaatatgttatttc

SEQ ID NO: 755629 - DNA, 636 bp, Homo sapiens
aaatattagagtaaatataaagcacaaattataacattgtcctgtggggtgtataaaatatatagatgtttgacacctttagtgtaaagaatggcaggggagtaatggaattcctatacatttgcaaagtttctacattttatgtgaagtggcatattaacttaggtagaatgaaaagttaaggatgcatattttaactctcagagcaactaattaaaaaaaggaaacccaagagataaacccaactasaacttctaaaacatatccaaatgacctgaagaaggcaagaaaaagggaacacaggaacgaaaaaccaggagagacagattgaaaataaataataaaataatagacctaaatctaataatatcaataattacattaaatattaatgggccaaacactccaattatgagacatagatgaacagaatcaataaatagcagggcctaactatatgctatttacaagaaattcactttaagtataaagacatagactgaaagtgaatggatggagaaaatataaatgatgcaaacaataatcataagaagattagagtggctatattaatattaggtaaagtagataatcaaggcaaatggtattaacagagacaaagagggatgttccgca

SEQ ID NO: 755630 - DNA, 593 bp, Homo sapiens
cattagagcaaagcctgtaggatgaatatatctccaggaacagaagacaaaagaagatattctagacagagagaattacttatatattggcacagcttggggtattctccaaaatagtgggaaattttgtatggctggtgcttagcctatgctcatgacacaaaagtagcagaatattggcttggatatataagttattgtaaaattccatttacaaaatgctaaagaatggagactttgtctgtagttgaaggaaaacattaagagaattygggagagttgcaagataagaattatgttttagataaacacctagaggcaaaatagaggatgctctgaaaagtaagatgaaatcttactgttagattgtcaaattatatagtataaaggcaaaataaattattttaagtttcatttcagaatcaaatggtgatcctccatctcaagatcagcaagagctttaagacttatagacaatcatgaataccaacacattacagcattgggggggatatagtggtaaataagagcatctactctagattagatatatttctagatatactcctacttctattacttgtgaaagtgaa

SEQ ID NO: 755631 - DNA, 609 bp, Homo sapiens
atgctaaaaactctcaataaactgggtattgatggaacatatctcaaaataataagagctatttatgacaaacccacagccaatatcttactgaatgggcaaaaactggaagcattccctttgaaaactggtacaagacagggatggcctctctcaccactcgtattcagcgtagtgttggaagttctggccagggcaatcaggcaggagaaagaaataaagggtattcaattaggaaaagaggaagtcaaattgtccctgttagcagrtgacatgattgtatatttagaaaaccccatggtctcagcccaaaatctccttaagctgataagcaatttcagcaaagtctcaggatacaaaatcaatgagcaaaaatcaccagcattcttatacaccaataacagacaaacagcaaaatcatgagtgaactcccattcacaattgcttcaaagagaataaaatacctgggaatccaacttacaagggttgtgaaggacctgttcaaggagaactacaaaacactgctcaaataaataagagaggacacaaacaaatggaataacattccatgctcagggataggaagaatcaacattgtgaaaatggcca

SEQ ID NO: 755632 - DNA, 590 bp, Homo sapiens
agtcaccgggtgtcaccattccaagttcatcatttttgttttatgaggaatcagacccatatagtttaatgtgagggaacttaacacatgagtttctcttcttgcgtgagaggcaaccctggcaaatgactatagcctagaatatgtctggatgcagagttacagcacaggcctcagtggccgggaagacacagagttggaaataaattgaaaaaactggaacactgttaaaaaaaaatcaaggagtcaccaataactgtaacctcacttttgagttctaaacattgatgttgatttttataactccttgcagaaatgcagctcaatcattactcctggcagaaaagtgatgctcattcatagatggacycagatccttactggtctcagaaatcctgaagaatctccttttttttttctttaaaatcttttttctatcctcatcatgaaaagaatctcaattcattttcatttgcaaactaaatacatgctataccatatgatgctacttaacaaaaatcaatattgtgaaacataattacaaatatccatgtcctggctttctggtctctttcattattaataaactg

SEQ ID NO: 755633 - DNA, 588 bp, Homo sapiens
ccttaatcaaacaaatatcctattatttacagaattagaaaatatctgtaaaaaaattttaacatatgcttttgaggcattttgtagtaagttactatggtggccatccagttaatgaacatcaaatgtactcaatgctctccattgttctaaatacaagtgttgaatgtgtaggcaagccaatgaagtatatgtatktgtgtgtgcatatgtatctgtgtctgtgtatgtgtgcatgttataaaagaggttttcaagatatatatagtcaaaatatagacagaaaaaatagtaaaaatgctatttaattttccaatctgattattcaataatagcatggcaatcaagaaaaaccagcttttgactaaaaaaaaaaaaaaaaaaggctagtttcaggctggagtgtattgtcaagaccaagttataaacttctgaaaaacaggaatgataatggaattgctgctacaaccttaaatataacggtgtgaatggctctgctattatttactatggtaacgtaataaaagacagcactgtttgggccattatactcactgctcttttttcagtataaatcattatatttat

SEQ ID NO: 755634 - DNA, 393 bp, Homo sapiens
ctgtgtcttataaggaactgctaaagtgttttgcaaagtgtctatatcattttgctttcataccagccacatgtgagacttcttgaattttatcttcaatatttgtgggtgttagctattttgatttatatttagtggtatctcattgtggttttactttgcatttctctaatgaatagtaagcatcctttttgaaatctgcttatttyttaatcttacattcttttctaagtttttgcagatttttcttttaaattgagttgtttatattctccttgttgagttcaatgtctcatatattctggacaggagtccttctgaagaatatattcataagagttatatctgatagtctgatgcttgtcttttgtattgtagtttgttattttttta

SEQ ID NO: 755635 - DNA, 393 bp, Homo sapiens
ctgtgtcttataaggaactgctaaagtgttttgcaaagtgtctatatcattttgctttcataccagccacatgtgagacttcttgaattttatcttcaatatttgtgggtgttagctattttgatttatatttagtggtatctcattgtggttttactttgcatttctctaatgaatagtaagcatcctttttgaaatctgcttatttcttaatcttacattcttttctaagtttttgcagatttttyttttaaattgagttgtttatattctccttgttgagttcaatgtctcatatattctggacaggagtccttctgaagaatatattcataagagttatatctgatagtctgatgcttgtcttttgtattgtagtttgttattttttta

SEQ ID NO: 755636 - DNA, 590 bp, Homo sapiens
cttttgtatctgtttttaatttttaatttttgtgggtacataataggtgtacatatttatggggtacattagctgctttgatacaggcatgcaatgtgaaataatcacatcctggagaatggggcatccatcccctcaagcatttatccttctattctttatctttaattaacccacttagtaaaatgcatgccatgctagagaattaggaaagtatgaaaagcaacyagagtgggcccaaagaactaaacagagtgtattctagaatcttagaaaacttaagcagtgtctatatttatggattaaaatacagaattgaggtgattattagggtaacaaataggaaatttcctcttaagaaacacttggatagctaaacatttttgatagctttaatttttcattatagtctataaacaaagtcttaaaataattgtaaatatctccattaaatttagtgagtattatttgacttctattttaagtgtaactgtaataaggattgaagataggtcctatctccaggtcctatagctgaatcctgtattcaatcctcttgataacatatattcatgatgcgtttaacttac

SEQ ID NO: 755637 - DNA, 397 bp, Homo sapiens
gaacttacaagttatttatattaaaatttgataaaagctagagtagagatgttaatagaatatgatgtaagctcatgtaagagagcaaataactctacttggagagataaagagggagtgttttttataaaaggtaacattcaaattccaaatgttwttgactctggaatatactattttttaccttctacattgatattttcatcattctagagatcatcaaatgttgactggcatggtttggctgtatccccacccaaatctcaccttgaattgtagcttccataatttgtatataacatgggagggacccagggagataattgaatcatggggcaaatctttcccatgctgttcttgtgttagtgaataagtctcaggagacctgatggtttat

SEQ ID NO: 755638 - DNA, 643 bp, Homo sapiens
ctctccctcctcttgccccccactccctgacaggccccagtgtgttatgttcccttccctgtgtccatgtgttctcattgttcaactcccacttacgagtgagaccatgcagtgtttggttttctgtttttgtgttactttgctgagactgatggcttctagcttcatccatgtccctgcaaaggacgtgaactcattcttttttatggctgcatagtattccatggtgtatatgtgccacattttctttatccagtctatcattaatgggcatttgggttggttccaagtctgttctattgtaaatagggctgcaataaatatacctgtgcttgtatctttatagtagaatgatttacaatcctttgggtatttacccagtaatgggattgctgggtcaaatggtaattcttgttcaagatccttgaggaatcaccacactgtcttccacaayggttgaactaatctacactcccagcaacagtgtaaaagtgttcctatttctccacagcctcaccagcatctgtttcctatttaataattgccattctaactggcatgagatggcatctcattgtggttttgatttgcatttctctaatgactagtgatgatgagcttttttccatatgttttaggccac

SEQ ID NO: 755639 - DNA, 665 bp, Homo sapiens
gcattatgttatttttttctttactacatatgtagacatcacaagggggtaaatggttattaagagcaaaatttaccacatgtaatgagcacctgctaggactgtgggtcagtgtttctgatgagacattgagcagctacttattataattagcgtcattaggccttttaactgctgctcccataagaagaaagacattttcttaacctactttgtaagtatttataatgcctgctgattttcagctgtgaaggcatcattcattatattcacaggtttttatggacaaagaggctgaatgaggttttctactaacatcattttccatttgattatatcattctacacctagtgcatacagagaatttgaattcattcagttgaaaatgcctccctgaargtcctatgcaagttttgtgagccatctaggtgcctacatttttatatccagataggaaataaatggaagcaatgagaaatagtgtgaaagccgtgaaaggcaatggctgctcctaagtgttaaataaatagccagcagtattttatatgtacgtagtacttggctctctagttgcttaacttttattaaatccatttgtttaattccctgaggcattactgttcctaatatttgcctcattataaattttagaagcctagaggtt

SEQ ID NO: 755640 - DNA, 628 bp, Homo sapiens
ttttaattatttcagtttctttgttaaatgtatctaatagaattctgaattctctttgttatcttaaatttctctgagcttcctcaatacagtttgaagaattttgaattatctttctgaaatttcacacattcctgcttctccacaattggtctctggtgaattatttagtttatttggtgaggtcattttttcctgaatggtgttgatactagtcgatgttctttaaagtctggtcattaaatatttagatatttattgtagtcttcactgtctgggttatttgtagccattctttttgagaaggctttccagatattttaaaggatttggatattgtgatctaagctatatctgttttagagggcaccccaagccccagtaatgctgtggttcttgyagactattagaggtaccaccttgatgatctcggataagatcggggagaattatctggattaccaggcagagacttttgtaatcttcccttagattctcccaaacaaccacagtctttctctctgttttgagccacctaaagctggggttgaagtgacacaagcatccctgtggccaccaccactgggactgtgctgggtccgacctgaagccagcacagcactgggtc

SEQ ID NO: 755641 - DNA, 642 bp, Homo sapiens
gtctgagggatccaaagccagacaacaggcacaatgtaaatgagcaggacaaattcctgccaactgaaccccaccacatggaaggaggccatgcttcatggcataaacaggctcagggaactcaagatttgcttagcagggagaaagggaagmatgggtgagggtggttgattcctattctccagattttccctgcttcatgggtacatactgcattggtacctatggctggcacctgccaaggtcaccggggctcacggacaagaggtagaaggtgaagggaggatgctcgctttctctctccatcacatcctgagtttttcactgaaagaaggaagggagtgagggacacgtctattccctgtctttcagaatgggccaccagttctcttcaccaccctcagcttacactcctctggagtgtatcctgaactattaggactgctttgaccctccgaatctgaaggaaaagcacctcatagccctctgcacaaagatttggccaaattatgatttactggaagaactggcttgccctcaggaaagaaccatccattttgatatcatccagcaattggaacttttctgtagacatgaagacagatggtctgaggcccatatgtgcaggctttctataccttg

SEQ ID NO: 755642 - DNA, 642 bp, Homo sapiens
gtctgagggatccaaagccagacaacaggcacaatgtaaatgagcaggacaaattcctgccaactgaaccccaccacatggaaggaggccatgcttcatggcataaacaggctcagggaactcaagatttgcttagcagggagaaagggaagcatgggtgagggtggttgattcctattctccagattttccctgcttcatgggtayatactgcattggtacctatggctggcacctgccaaggtcaccggggctcacggacaagaggtagaaggtgaagggaggatgctcgctttctctctccatcacatcctgagtttttcactgaaagaaggaagggagtgagggacacgtctattccctgtctttcagaatgggccaccagttctcttcaccaccctcagcttacactcctctggagtgtatcctgaactattaggactgctttgaccctccgaatctgaaggaaaagcacctcatagccctctgcacaaagatttggccaaattatgatttactggaagaactggcttgccctcaggaaagaaccatccattttgatatcatccagcaattggaacttttctgtagacatgaagacagatggtctgaggcccatatgtgcaggctttctataccttg

SEQ ID NO: 755643 - DNA, 642 bp, Homo sapiens
gtctgagggatccaaagccagacaacaggcacaatgtaaatgagcaggacaaattcctgccaactgaaccccaccacatggaaggaggccatgcttcatggcataaacaggctcagggaactcaagatttgcttagcagggagaaagggaagcatgggtgagggtggttgattcctattctccagattttccctgcttcatgggtacatactgcattggtacctatggctggcacctgccaaggtcaccggggctcacggacaagaggtagaaggtgaagggaggatgctcgctttctctctccatcacatcctgagtttttcactgaaagaaggaagggagtgagggacacgtctattccctgtctttcagaatgggccaccagttctcttcaccaccckcagcttacactcctctggagtgtatcctgaactattaggactgctttgaccctccgaatctgaaggaaaagcacctcatagccctctgcacaaagatttggccaaattatgatttactggaagaactggcttgccctcaggaaagaaccatccattttgatatcatccagcaattggaacttttctgtagacatgaagacagatggtctgaggcccatatgtgcaggctttctataccttg

SEQ ID NO: 755644 - DNA, 501 bp, Homo sapiens
aatttatatcagcttacatgcttatttaggaatactttctaattctcatagtgaaaattcacatacacacacctacagcagatttgttttaattattaaagcctcagagtagtatggtaaagaataaaagatacaaatttttataaaatcttcaattcaragcctcatacctgagattctgcattcaaatgagccattgaaaaataaattggctcttaggtgtcaagaagaacattagaaattacctttatgtgccattttagagttccacctgctcactaggaaacaaaatgtcaggaaataatgaatcaacattatacatattgaagttgaaagataggaaataggattcagatcaaaggtctctgagggacaaaacttacaaataaatgaatttttgacaggactcttccctgtggcatgtcaaacaacggtccgctaaagacggttgtgttctaatctctgggacatatgaatctgttaaattacatggataaaagg

SEQ ID NO: 755645 - DNA, 501 bp, Homo sapiens
aatttatatcagcttacatgcttatttaggaatactttctaattctcatagtgaaaattcacatacacacacctacagcagatttgttttaattattaaagcctcagagtagtatggtaaagaataaaagatacaaatttttataaaatcttcaattcagagcctcatacctgagattctgcattcaaatgagccattgaaaaataaattggctcttaggtgtcaagaagaacattagaaattacctttatgtgccattttagagttccacctgctcactaggaaacaaaatgtcaggaaataatgaatcaacattatacataytgaagttgaaagataggaaataggattcagatcaaaggtctctgagggacaaaacttacaaataaatgaatttttgacaggactcttccctgtggcatgtcaaacaacggtccgctaaagacggttgtgttctaatctctgggacatatgaatctgttaaattacatggataaaagg

SEQ ID NO: 755646 - DNA, 596 bp, Homo sapiens
tggatgctccaactgcaatgatatgatcaaaagtctataggagcaacataaaaggaatcaggaaatctgccccaaaagttgtggatgattcagagtgaatgtcatataaattgaggcagaataggagcaaaagccatttaagacagaaaacagtattacccaaggcatgaaagaattataaataggtgctttaaacactgtttagggaaatggctgaaagtttatagatttctttcatgaattagctggtttatgtttatttgtggtatgtactagaccagacattgattcattatacaattatgataatatctattttatgatcaacagggtatctaaggtacttgcatctctttaaaagagaaataagaagyatatatacagtacagggaggggaaaataagcttgtgtttctgaactgtttcagttcaataattaaaggcaatctcaatacctgtctttggagaactaacctctctagaaaaaaagactattgtttcctgtaccattgaaataaaatttccagttttcaggaaactcaattgaaataactgtagattctatgcttggctaatcaagaaatgtcatactgaaac

SEQ ID NO: 755647 - DNA, 577 bp, Homo sapiens
aaataagtctcgaagtcaggtagtgtgaattctctatatttggttttctcttcttttttatttcaacttttattttagattcagggagtacatgtgcagatttgttacatgggtatattgcattgtgtggaggtttggggtacaagtgatcccrtcacccaggtagtgagctacccaataggtagtttttcaactcttgttctctccttccctccctccccactctagtggtcctcaatgtctatagttcccatctttatgtccatgtgtacccagtgtttcgctcccacttataatagtgagaacacaccatattaggttttatgtttctgtgttaatttgcttagaataatggcatccatgttgctgcaaaggacatgatttctttctttttcatggttgtgtagtattccgtggtgtatatgaaccacagtttctttatccaatccaccattaatgggcacctaggttgattccatgtctttgctattgtgaatagtgctgtgataaaacatacaagtgcatgtgtttgtggtaaatgatttatcttcctttgggtaatatacccagtaattgg

SEQ ID NO: 755648 - DNA, 613 bp, Homo sapiens
gggctttgagagatatggtcacacaccctgggagcacgcagctcagctgggaaggcaagactgcctcagaggccaggtcagagggcagctgagagctgagttggcagggtctggtggagggagctacacacactgcaggtgctagggctacaacgtcctttgggaaggcacagcgtggcctcagaccttctgacagctgccaagcctgagacctcatgtctacacagaacgccaggaaaatcagcttgtggggaaggtcccctcgtgcaaggccacccaggcacaccctggtaatatctggtgggagcccaggtggccccacataggaaaggaggctataaaacaggaagccagtgcgaggcctgcagagcgggggacacagctcttcccgggaatgcccactgtttgtttgccagctgggcccacrtgcctgacttcccctattaaggatttggtcccttctctttttttgccccacccttctagatttttctaaactcaaaatgtctgggcttccccagctgggaagagattgtgacatactaaggcttgcttcagtggccttaacctgtctactcctcacagtgtccccatcctcagaagactctccctg

SEQ ID NO: 755649 - DNA, 600 bp, Homo sapiens
aaagccaagagccccagccagaagttaggttgctaaataatgcacccaggagaaggtgcccgaggtggctggtggaggcgtcactggtcataggacctgatgtggctcctggcaactggcccatgaggacaggtgctgatgtgtgtcccctccccaatgccaggatggggttctgctgggagccgtcggtgcctatgactggaatggagctgtgctaaaggagacgagtgccgggaaggtcattcctctccgcgagtcctacctgaaagagttccccgaggagctcaagaaccatggtgcatacctgggtaagagcgcagagtgaggggaggctggcgggtcgtgggccgggagggcacccaggggctgcacaacccccagcccacacacgagtgaggggcctgcygtgtatattctgggctgattcaagcacccaactctgaagagcatccccgggggcatttcctctccaccctggtatccaccgcgcccagcaccatgcccagcgtataacaggctctccataaataggtagaataaaggacaagcagttccccactcccttcaatgtgtttcatttggtgcttctagactctgggt

SEQ ID NO: 755650 - DNA, 552 bp, Homo sapiens
ccaaatctaattaaaagtatcaatgcagattcaagaagctttggaaaccctatgcagaacaaatacaacaaaactacatttagatacatcatagtcaaactgctgacattaaaggcaaataagaaagcaaccacaagaaaatgacatattacattcaaaagaatgataaaactgatggttgacatctcaacagaaactgtaaagccaatagacaatggaatgacattttaaagtgctaaaagaaaaactagataagaaatacttcaaaaattaaggtgagattaagatcttttcagacaaacgaacaaaaacaaacagaaaacccaactcccaaggctgaaagaactcttgttagcagacttataccacaagaaatactaagtagagttctttggctgwaagaaaattatctcaaatgagagcacagaattatataaaagagacgaagaacaccagaaagggtagctatgtggataagtagacataaatattaacaacttaaagcaacaataacaataatgtcttgtggaatttataacatgtgcaaaggta

SEQ ID NO: 755651 - DNA, 649 bp, Homo sapiens
agatttaattttttactacaatccctagaaaattataaatgaattaatttattcaacagagagatggtaagcacttagaaaagaatgtagtttctacagaacaagcaaagttagcctcatgtttaataagattactggacaagaaaataaggaaagtactgtaatataatgcatcctgatcacagcaaaaacaacaaaaaaatgatggtggcmtaacaatatttagataagtctatctatcaatcttagtagtaaacacagaatctaattctggatattttttaaagaaaaaaatgtaaaggataactttaaaaagagcctattaaaaggaaaccactttttctaacaggctaggtcatatatcaaaattacagggaaggattgtgcatcaggttggaggttcaggtgccagacatctagcccaaagccaaaggacagatatattcttctgaggatcatctcaccagcaatactgatcatatgacagagttctcggtgttttagttagggaatacaatattgccaagtgcctaaaaatatgagcagtgagatgagagagttcaggcttcccatcttctttgtagttatgttattttgtagtttatgttaccttgggtaaattctggtttccttgtgtgtttcacataag

SEQ ID NO: 755652 - DNA, 625 bp, Homo sapiens
cttttttaacattcaattaaaaattagagtacatttcattttgatcatagaaacagtacatacttagagaatttgtgaaatacaaagaaattggaagaagaggagaaaactgaaattcttattatataaataaaattactgattatattttgctatatttcctttcagatggatattaaataatattttaataaatgtaaatgtagtatagttttttataattaggagaacatataaatacataaataagaatacattccaaagtaattactatagatttttagtaatttgtctttcaacattttggtttatagtcctttttcttttatttatgtagttttaatcttatagtctatgaaattttatattctgaattttaggtattataattatygtggaaatttttttaattgctatataatattatattatatggataaagcatcattagcacatctattccctcatacttgatacttcgttttttcttactctttaaaaaatgttataattattatctttgtatatataaagtgtttccatgaatttttgtttgtttgcttttgtttgttttgtttttttttccttaaaataaactgtggaataataaatagtggaattttta

SEQ ID NO: 755653 - DNA, 578 bp, Homo sapiens
ttctcacagtcagttatgtattgtgttagtatgcagtgtaaataattgtttgggtatgtaaagcacttagtgctgagaggtagtaagccttcaatatatgttagttatgacagttagtcctttaataataaacttgtatatcatttaacaaatcaaattctatctgaatttgattctttgaatttacattctatttgaatttcacttccagcatcttcacttttcttcatcttcctccttctttttgctacacttctatcttttttggtcatttctctctttcaattttccattttccataaaacgtagcatagatttaccactgggagacagggaggcaacacagtgctacactttgctgcctggttgtggacctgttaatagatgctccgaaatcaattgccaacacattttgaaamaagtgtcatggttggtgactgatcatgatgtacatcaaacattaacttactgagttgtggaccagtccccaaaaacacagtttaatttaaattgccacattttagttaaataacaacagtcctccaacaacacagtttaaatttcagttttcatgatat

SEQ ID NO: 755654 - DNA, 613 bp, Homo sapiens
aacagaaatttattccctcccatctttggaggctacatgtccaaattcaaggaattggcaaggctgtgcttcctctgaagcctcaagtagaaagtctttcttccagcttctggtagcactagatgtcccttggtttgtggtagcttaactacaatttattcctccattcttacatggtctgtgtgtttctgtgtyttcatgtgacattctgctctatgtgtgtgtgtctctttccttttcttgtgaggacagcactaatattggattaagagcccaccttactccagtatgaccccatcttaattattaacatcggcagtgacactacagtgatgtttcatttagtgatagggatacattcttagaaatacagtattaggtgatttttgtcattgtgtgaacatgttaagttcagtatacagtaacagcattagatagggtagttaaagaaggcttctctaagaaagtagcacttaaattgaatacttgaataatgatgacaagacatccatgaaaaagaatgattgtgggtatgggggagaatgattcactcaagagaacagcataaacaaacagaatcaaatactccaatatgtgaaagatgagcagtgtg

SEQ ID NO: 755655 - DNA, 613 bp, Homo sapiens
aacagaaatttattccctcccatctttggaggctacatgtccaaattcaaggaattggcaaggctgtgcttcctctgaagcctcaagtagaaagtctttcttccagcttctggtagcactagatgtcccttggtttgtggtagcttaactacaatttattcctccattcttacatggtctgtgtgtttctgtgtcttcatgtgacattctgctctatgtgtgtgtgtctctttccttttcttgtgaggacagcactaatattggattaagagcccaccttactccagtatgaccccatcttaattattaacatcggcagtgacactacagtgatgtttcatttagtgatagggatacattcttagaaatacagtattaggtgatttttgtcattgtgtgaacatgttaagttcagtatacrgtaacagcattagatagggtagttaaagaaggcttctctaagaaagtagcacttaaattgaatacttgaataatgatgacaagacatccatgaaaaagaatgattgtgggtatgggggagaatgattcactcaagagaacagcataaacaaacagaatcaaatactccaatatgtgaaagatgagcagtgtg

SEQ ID NO: 755656 - DNA, 596 bp, Homo sapiens
aaacatcaatcacattatagcaatttttatttttattaacacaaacaacctccaaaagaaatggactattatgcagcagaattatttaaaatactctaattgattatttaataaccattaaaagcaaaagctattatagtaatcatttcttgtagtgctttctaaagtaaacgttggtgaaatagtgcccattttcacctcatgacagacaaacacctaataaacgtatctggtcagagattcagtcacatgaataatattttagcaaaarctctgaggatgaggaaaagtagcttaagtaatatttattagaagatttgtttattttgtttatgtaaataggcatcttatttaagtgatattacagaagtcattgtccttaaattcagtaaaatataaaactgttacaccaattttgcaaatctctgttttgttcttctcacctctctcccacaggatctgaattttattttaagggattaacaagtagcacatatgatcagcaatgatagccttgttcttttaaaccttagtgaatcaagttcggtaaaggtgaagtagtggaattatcagtacaagtggctatgtcatcagag

SEQ ID NO: 755657 - DNA, 596 bp, Homo sapiens
aaacatcaatcacattatagcaatttttatttttattaacacaaacaacctccaaaagaaatggactattatgcagcagaattatttaaaatactctaattgattatttaataaccattaaaagcaaaagctattatagtaatcatttcttgtagtgctttctaaagtaaacgttggtgaaatagtgcccattttcacctcatgacagacaaacacctaataaacgtatctggtcagagattcagtcacatgaataatattttagcaaaaactctgaggatgaggaaaagtagcttaagtaatatttattagaagatttgtttattttgtttatgtaaataggcatcttatttaagtgatattacagaagtcaytgtccttaaattcagtaaaatataaaactgttacaccaattttgcaaatctctgttttgttcttctcacctctctcccacaggatctgaattttattttaagggattaacaagtagcacatatgatcagcaatgatagccttgttcttttaaaccttagtgaatcaagttcggtaaaggtgaagtagtggaattatcagtacaagtggctatgtcatcagag

SEQ ID NO: 755658 - DNA, 475 bp, Homo sapiens
acatattccatttagataatcaaaactgtaatttttatctaaaagattcccttagatccatgtaattcctagcagtaaaatttatcaaaagcacttagtttgcaaacaatgagactgccattatctatagccttatttcttcatccatatactttaattgaaaagtacaaactattaagcataaaagaataatagtactgtttatytcatagtatttgtttgatctgaaaatggggattgtaatgaaaatgccttcaatcttaagggaaccttttttatcctactcagaataattatcttgtaagattaaaatcactgaatcataccgaattaagatttataatttagcatcattgaggtatattatttaaaagaaagagtttacaatcttcaatttgaaattgaaagggaaaagaaatgaacagatgaaaaataaaaaagctctttttggcacaacaatatactatattgccac

SEQ ID NO: 755659 - DNA, 610 bp, Homo sapiens
agagtatttgaaatatcccattagcttactgttagtagttgtcttaggaacttcttactaacggtgaatagtaaccgctatttgttgagcatttactaagcactgtgtgtgtgtgtgtgtgtgtgtgtgtgtgtgwgagagagagagagagagagagagagagagagaaagagagagacagtctgtgggttattcccatttgacagattggaatattaaggcaaaaagatactaagtattttgtccaatacctcatagccattgacagagatgggaataaaaattggcctatgtaacatcaccaaagcccacgcagtgcctgtgggaaaaatgaatttcagatttagcttaatgtcacacacacacagcccacaaggaaatgcctgacaattacgctccatgttctgaaactgacgtgtcatcatcaccacagaattgccactttatgcctcagtttacccaacttcaaagtagagaaacatttcatcatttaattttacttgctaggataatgtatgaattagttaatgcttataaagaagtgatttgatgaggggaaagctctatctaaatgctaagtattatttattattcatgtaagcatattact

SEQ ID NO: 755660 - DNA, 616 bp, Homo sapiens
cctagagtgctctttgtcctagatgggctagaaagaggggtgttagattccttttgatagaaataagaacttcccaattgggagttcatgctacaaatgaatttcccccatggaatagaaattcccagaggagaatacctgtaactatgtatctatatctatttgtatgtgtttgtatatacatgttttatatatatatatatttatacacacacacacatatatgtgtatgtataaatacactcacagatacacacacacacacctcatttcatagtagataacttgtaggccagtagtacccagattatgatttcatgtttctatttaaaaatttttcccaaatctgcaaactggcataggagtgccacaatttcarttttgtcaagtcattatatgaaaatgaaaatgaccacttactagcatcaccatttcagaaaataaaaggaaaatttagccccatgaaacagtaagctcataatctataataaagtcagattcttcacatttactgaaatttagctttataaaaaaggattacattttttcttttagttttaaaagactttgttctttagttacagttcagagacatattttgggtaccactggtagg

SEQ ID NO: 755661 - DNA, 614 bp, Homo sapiens
acatagctaaacaatatgcccttgattctaatatataataaagacaactaataatacttgctttccttttctttatatctagatttttagggcagaggcaggtttttatttatttggctgttcagataactgaatattatcaatatgtttgttaagccttatatattgttatatattgttaagccaatatatttgttaactcctatattacttmagtattttcctggatttgcttcctttcttatttgaatacttcttccaagagtagttttaataagaatgttttttatagcagaatttctgaggcctcacatggtcaagaattgaatatgtgtgtgtgtgtgtgtgtgtgtgtgtgtgtgtgtgtgcttaaacagaaagagagagataaggaatctatatcttatgatttatgtatccagatttcaggatatcccaacactgagtgatatagtctgaatgttgtctaagcaataacatcaaaataatgataatgttcaaaaaatgtacgagttaaaaatttaactcagtattaattagagagccaggaagatgttacaacaagatcaaaggaaaaatcaaagaagcatacttttatttgtagtagtaaaaga

SEQ ID NO: 755662 - DNA, 635 bp, Homo sapiens
gtgagcatccttgtctcattctaggtctcaaggggaatggtttcaacttttgcccatgcagtatgatgttggctgtgtgtttgtcatagatggctcttattattttgaagtctattcctttgatccctagtctgcttagggattttatcatgaagggatgttggattttatcaaaagctgtttctgtgtctattgagatgatcatatgatttttgcttttaattctgttcatgtggtgaatcacatttattgatttgcatatgttaaaacagctttgaatcccaggaataaagtctacttgtttgtggtgtattaactttttgatgtgcttctagattctgttcactaggattttgttaaggattttttgcatctatgttcatcagggatattggcctgaagttttcttttttmattgtgtctctgccagatattggtgtcagggtgatactagcttagtattcaatagaatgagttatgaaggaaaccttcctctttgatattttggaatagttttagtagaactggtaccagctctttgtatatctggtagaatttgactgtgaatccatctggtccagggctttttttttttgtagtttttttatattatttattcaatttcagaacttgtt

SEQ ID NO: 755663 - DNA, 506 bp, Homo sapiens
tctagaatattgaaaatgcctgatagaaaatacttctttcataatagcagcaaagcaggtaatatatttaggaataaatttaataagaaatgctaaaaacccatatgatggacacttttatgtttttaaaaaatcttctggaagacacaaaaataggcttggaaaaaatttcttaaatggaatgactcaacataataaagatgatttttctctctaagttaatttataattttaatacatgccaataaaaawttcttaaatgggatgactcaacatgataaagattttttttctctctaggttaatttataattttaacacatgcctatgaaaatactgacaagtttataataaagcttatatgcataaatagacgtctaagaataactaccaaaaatgttgaaaaaagaatagctatgaggagtactatactgcccaaatatttaatgtaaacactctataattaaaagaacgtggtactggcacatgaatagctgtcagaccag

SEQ ID NO: 755664 - DNA, 606 bp, Homo sapiens
ttcatcatttgtattttgctttcaagaattctcagattatgccctttgcccatttttttacttaagtatatttgtatttgaatatatttctatgtaaagattcattaatatattattggcatatattcctattaagtatatcaactatagttctattcaaatattatcaactttctatcttctrtatacattattgatatgtcttcccagtttgtttgcctttccattttgttggtagtatttttacaaggagagaaggtttacattgttatgtagtctttcaatatttgcctttttttctttctgttctttattattctctgaaacactttccacatgccaagataatgaattcagctaattatataaacttcagtttacatgtcccttgtttttttattttgttttagaccttgatacttgtgtctttataacactgtacatatattcatttcaggggacccttatggtggaaaagcaagaagaagatgaatctctcatccccatgtttctcacagaactaatgttgacagtccagtcactgctctttgagccttctctggaagactttctggtgtgtgtttttcatgtattatccacatgcaa

SEQ ID NO: 755665 - DNA, 595 bp, Homo sapiens
gaaaaaatgtaaagactccacaaaaaaactattagtactgataaccaaattcagtaaagttgcaggatacaaaaatcaacatacaaaaatcagtagaatttctatatgccaacagtgaacaatctgaaaaagaaattaaaaagtaatctcatttataatagccacaaataaattaattccctaggaattaaccaaaccactgaaagatttctataatgaaaagtatgaaacactgatgaaagaagttgaagaggacaccaaaaaatggaaaaatattccatgttcatggattggaagaatcaatattgttaaaatatctatactacctaaagtaagctacagtttcaatggaatccctatcaaattatcaatgacatkcttcacagaaatagaaaagacaatcctaaaatttatctggaaccataaaaagacccagagtagccaaagctatcctgagcaaaaagagcaaaacttgaggaatcacattacctgacttcagtttatactacagagctatagtaaccataacagcatggtactggcataaaaacaaacacatagacgatggaacagaatagagaacccagaaacaaat

SEQ ID NO: 755666 - DNA, 627 bp, Homo sapiens
cctttaagtaatactatttataatgccgaaaataatggtatagaatttcttactaaatgtctagacttgtataatcgcagaatcattcatttaaggtttaatctaaaacattccaataatttgattggttacatctatcagatctatcatctctaaccacgcaataaaatatgygcttgtgtgctgaagtgtttagggatatatcagccatagtataaaatgagctccggtaaattaataataaaataacataatttcaaaatgatatgaatagtgataattctagttaaataaaagtgtctcttttttgtctcattaattatgaagatctttagtcatggtaacgctatatttaaagaatttaagattcaagactgtgccacagccttcaactattcttttaataatttaaacatttttacttgttaaactcaaagcctgataaatatttgtaaagcttcatttacaccacagcgatcataaaatgcaagtgtttagttcatcattgtctattaactttcaataaagtaactgaattttgtttcgatttgagtacataactgtaatattaaaaaaattcagacttctgaatcacattttaaagttaaagtaattgtataataattt

SEQ ID NO: 755667 - DNA, 511 bp, Homo sapiens
agaagagaaaacatagaccctattcttcaatagtcttcaagacatttcttccaaatatctttggaagaatggtctgccatattaagttctattggtatattttaatagtattatgatgattaaacccattaccagctttttttttaattgagagaaaaatactaataagtggtttttctttaaaattgtatctgtaccttggtaggcctggagaacattgatattctgctttggtgtatatgttgactgcwaccataattagttcacttttaacatggctgtgattttcccaccaacatggttggtggcttgggctactatcatatatttctatccctttgcaaaattgtaacaacacagataggtaaataaatataacagccaacataatacagataattagttttactataaagtaatgacttataaatattgcaaagacaaagatgatttatgtttaatttggatacatgattgctttcagaggagttttgggatcagaacagacagg

SEQ ID NO: 755668 - DNA, 587 bp, Homo sapiens
gaggaactactgaagaattttaaacattatcatcatcttctagtgcctgagagaaaacaagcaagtgaaaaaaagagatggcctataacaaggcactaaaagtctctaatgtgattaaatttagttactcttgcttcttggaaaaaagaagtgtttctttgtatttatcttaatcaacaaaaaaagarcatctgatggcatatttttaatattctgcactgaaaacagatccaaaccattgctttacacatttacattaaccagccttgccagcctttgaattatactggttcaactttaccattgcatgcttgggtatgatatgttgaatcacagaagcacgttctctttttctcaatacagtgttttagttcttagtaattaactgtctgaatccggcagaactaatagaccaagttattgttcattgtcttctgcagacttattaatctctgctcctcaaatgtaactccagtgcagctctctggtttgttagccttgatgatctcgttcctgtgaaggacagtccaagttaaatgttctccaggttgggaggaaaaacaaacctcttggctttcaagaacctt

SEQ ID NO: 755669 - DNA, 620 bp, Homo sapiens
atctggccttgtcgcaggttcaggcaaaaggggaaatgtatgaggacttgtcctcagtaaacaagcgagaccacagcaagacttatgggaggcatgaagaagagtggacaaggagccttttctaagccatatggggaagagctgtagtttacaatgagccatttcccagcacaaaagtgtgggaagattttgggaaaaakagattggtgggttttataacttttattgttctctgaaagaacagaactcaagtaaacttcagcattgtcacagcttataaatatttgcagtgagatagtttctgagagttgtacataatgttgttaattatttattactctatcttattttattttttacaaaattaatgaattatttaaatatattagcaatttttttccaaaacattttttcatagaaattccttctttggtcctaatctgttgggttcctttgatttcttgcctcagcatgcttttaaattatagtaatatatcattactcccaacagatgtgagctcatttttagggttagaaatgtgacttcaaaatgtgctaatatcatgaaaaatagacttgatgcttttgtttaatttcattagtaagcaagattcttttcc

SEQ ID NO: 755670 - DNA, 592 bp, Homo sapiens
ccagcttgccactcaattcccattccagctgcagaggtcactttgccagaagtcctgcaactcaggctgtcagaaggtgttaaagcaaatgtgttttcaacaataaacatggcataaaataagaccctggaacaaaagttgagaaaaggaaaaaaaattaatgttgttatctgaaaacctaatgattttacggataataaaaatggcaaaaataacacatttttatctctaagtgcttgagcaataygttaagtatcccaaagtattttaggatagacatttgactaagtacttgcctgttatctttcagaaaaaattaaatatgattttatttgtttccctaattatactgttacagttttttttttaaactgtttttagtttcttaactgttagtttttttcccaaaactaactttactgttttttggagccatctatttaatggaaaatgcaaacctattaatgtaatccaatggaataagacagattacatgccaggaaatggaaagaatcatattgtctagaaagcgattactcctgaaagtttttcactttttgttggaagatggaagagtactagtcatttgaaa

SEQ ID NO: 755671 - DNA, 516 bp, Homo sapiens
ttttattaagtgggagtggcttgaattagatggtgatatctggataaagaaactaaaattcttaagcatcctgatttcaaataaaagtacagataagatcatcttttagagatatgttgtcaaattgaactaacataatgaataacaaattgtaagaaagacaatatgagcaataattacacgcagaatttttcccagtgtgggagttaaatatgattttttttctagaaaatgaaagctattatctaagcagttttaaaatgtggttkataaaaagacatggaatgttaattttgatggtaaatatttgaggcatacaagacattttgaaagatcttcaaaatttttagataaatcatgcaacaatttagtgaagcagtaaagacaagatcaagaaatgctcagaaaaatacacttttttaaaactgtaaaataacatttaaaatatagatgcattataagttacataggtatgtgagcataaagagatataacattcaatatttgagtatattc

SEQ ID NO: 755672 - DNA, 576 bp, Homo sapiens
tttattgaaatgattgaaataatgggaggaaacaggaaatgcataacagagacaagtagaagtgatgatgatgatgatgatattaacagctaacacaagtcaattacctttctaagaaccacacatttcatcttaatctacatagcaatagaaatagcaaggtattatcatccacattttatggattggtaaacaggctcagagaagctaagcaacttgtccagggatgaagctgtgtttacaactcaggactgtttgcttccaaagactatttttgcccactactctacacatcaggatgaaactagctggtattgttctggaaacattttgtggtcaactacttgtatctgagtattgggtacttcctctactatttttctttctctaaactcttcaaatgtagttacagacmtataagttatggtccaatggctctggggagtcgtgtttcaattagcaaatctgaagccagtgtgatctgctctctggattctgacatactgactctctcctttttcttttttttggtgtggtttaaaatgtgctgatagagaatcggactgctgacagtgg

SEQ ID NO: 755673 - DNA, 629 bp, Homo sapiens
tttgttttttacttactgattatagttagtatttttttcctatagagaatttattttcaaatataacaaaaaatctaaaatgggaaaagttctataatttattaattcagtagtttaatggttccttttatcttcctgctttacaaacctcagcatttctcctcaagagtatttcctattagtggctattatgagtgtttggtacatcataccaaacgtgcatacacatccatgcatacacaaggcccagcagaacactgaaggaccactaattccttgtgtcacttgaccttttttctgtaaaatatttcagacatatccaataatatatgtttcatatgcttaaataatgtttgatatgtttcatagggtttaaataatgtaacaaacatgtgtgaaccccactgcccagcttcaagaagtagacatagctaatgtcttygaagctccctgcacgccccttcccagtggcactcctcatctccccaggataattatctcatctcttggattttgctttttttattcctttgctttcaaaaaacagttttatcatactaaagcaatattcttaaataagatattgtttagttgtgcatattttcaaaatttcataaatggattaagta

SEQ ID NO: 755674 - DNA, 513 bp, Homo sapiens
atcagcaaggtctttatgacctgtatcttgtgctgacctcctatttcatccggtgacttagaatgctttaaccatctgggaatgcagcccaatacatctcagcctcattttacccagctcctatttaagatgaagttgctctggttcacacttctctgacaaaactgccagaaaatgaaattttttaggggtttacttagtatcttgaatgataaaacacaccaaaatgaatttagacctcattctcctttcttattctaatattctaaagcrtcttccttgtgattcaactgataaatgttttgaacttcaaaaatcaaaagatgagttctttggcaataaagcggaacttgctaatttatagctgatatgtcttaatgaataaaactctgatttatgaaatttgaaaatatgtttaaagataattattgtaatttttatagttttttattaaattagtatattatgttatactgtaaaatagaatatataaaagtctactcttattatttg

SEQ ID NO: 755675 - DNA, 597 bp, Homo sapiens
gtgctgttcaaatccaatgtttccttctttatttgctgactgaatgatttgtccattgttaaaagtgaggtattgaagtcctctactattattgtattataatctatctctcccttcagatatattactatttgttttatatatttaggtgttggatattgagtatgtgtatatatacacatacacaaacacgtatgtatttacaagtattatatccttttgatgagtcaayttctttgtcataatataatgttcttatttgcctctttttacatttctgacataaagtctgttttgtctgatgtaagtatagctacctctgttctttttttgtttcaatttgcatagagtatcttttgtcatctcttcactttcagtctatatgcatccttaaaagtaaggtgagtctcttgatgtttcttgtaggtagcaagtagtgggtcttattttttaatccattcactcattctatgtctttactgaagaatttaaaccatttacattcaaattaattattgattgctaagacttattattgccatgtcgttaactgttttctaggtagttttgtagatacgtttttttctctctcttgtc

SEQ ID NO: 755676 - DNA, 597 bp, Homo sapiens
gtgctgttcaaatccaatgtttccttctttatttgctgactgaatgatttgtccattgttaaaagtgaggtattgaagtcctctactattattgtattataatctatctctcccttcagatatattactatttgttttatatatttaggtgttggatattgagtatgtgtatatatacacatacacaaacacgtatgtatttacaagtattatatccttttgatgagtcaatttctttgtcataatataatgttcttatttgcctctttttacatttytgacataaagtctgttttgtctgatgtaagtatagctacctctgttctttttttgtttcaatttgcatagagtatcttttgtcatctcttcactttcagtctatatgcatccttaaaagtaaggtgagtctcttgatgtttcttgtaggtagcaagtagtgggtcttattttttaatccattcactcattctatgtctttactgaagaatttaaaccatttacattcaaattaattattgattgctaagacttattattgccatgtcgttaactgttttctaggtagttttgtagatacgtttttttctctctcttgtc

SEQ ID NO: 755677 - DNA, 586 bp, Homo sapiens
aaaacccacaggcatttaactccaaccgatgagaccagctacctgggctgcgcccagcaaggccatggaaatacggctgcccaaaaccttgggtgcccccttctaccagtgtgcccatgatggggacatgaagtcaaagattactttagagctttaagacttaatgtctaacccttctaggtttcagacttgtatggggcattttaccactttctrtaggccaatatcttcttttttgaatggaaacatttacccaatgcctatacaaccattgtatcttcccagtaaatcatttgtttttgagactcacagttttaaggaacttacttgccttgagtcttgggcgagactttggacttttgagtctatgctgaaacaatttaagactttgtgggactattaggtttaaatgattatattttgtatgtgagaaggatataagatttgagagatcagggcagatttctatagtctggatgtttgttccccttaacttcatgtcagaatttgatccgcaatgttggaggtgaggcctaatgggacctatgtgagtcatggggtggatccctcacaaatcttcatggta

SEQ ID NO: 755678 - DNA, 621 bp, Homo sapiens
tttttggtaatagctatcctaacaggtgtgatgtgatatctcattgtagttttgatatttatttccctgatgattagtgatgttgagtacctattcatgtacctgttgatcatttgtatttcttctttggaaaaacatctattcaacttctttgcccatttttaattsagttgtttggctttttcgttattaagctgcatgcgtttcttatgttttggatgttaaccccttatcagatatatggtctgcaaatatttttcccattagtaggttggaatttcatttagttgattgtttccttcactatgctaaaacttttaaatttgatacaagtcccacttgtttattttgctttggttgcctgtactttgggatgtcatatacaaaagtaattgctaaaatcaatgtcatggagtttttctcctttgtttaaatctagttttacagtttaagacattaattttaaatgtttaatgcattttagtttattttgtatgtggtgtaagagaaggacccagttttattttttgcatgcagatatccagttttcccaacaccatttattgaagaggctatcctttattttattgtgtattattggtgcctttcttgaggattagt

SEQ ID NO: 755679 - DNA, 621 bp, Homo sapiens
tttttggtaatagctatcctaacaggtgtgatgtgatatctcattgtagttttgatatttatttccctgatgattagtgatgttgagtacctattcatgtacctgttgatcatttgtatttcttctttggaaaaacatctattcaacttctttgcccatttttaattgagttgtttggctttttcgttmttaagctgcatgcgtttcttatgttttggatgttaaccccttatcagatatatggtctgcaaatatttttcccattagtaggttggaatttcatttagttgattgtttccttcactatgctaaaacttttaaatttgatacaagtcccacttgtttattttgctttggttgcctgtactttgggatgtcatatacaaaagtaattgctaaaatcaatgtcatggagtttttctcctttgtttaaatctagttttacagtttaagacattaattttaaatgtttaatgcattttagtttattttgtatgtggtgtaagagaaggacccagttttattttttgcatgcagatatccagttttcccaacaccatttattgaagaggctatcctttattttattgtgtattattggtgcctttcttgaggattagt

SEQ ID NO: 755680 - DNA, 621 bp, Homo sapiens
tttttggtaatagctatcctaacaggtgtgatgtgatatctcattgtagttttgatatttatttccctgatgattagtgatgttgagtacctattcatgtacctgttgatcatttgtatttcttctttggaaaaacatctattcaacttctttgcccatttttaattgagttgtttggctttttcgttattaagctgcatgcgtttcttatgttttggatgttaaccccttatcagatatatggtytgcaaatatttttcccattagtaggttggaatttcatttagttgattgtttccttcactatgctaaaacttttaaatttgatacaagtcccacttgtttattttgctttggttgcctgtactttgggatgtcatatacaaaagtaattgctaaaatcaatgtcatggagtttttctcctttgtttaaatctagttttacagtttaagacattaattttaaatgtttaatgcattttagtttattttgtatgtggtgtaagagaaggacccagttttattttttgcatgcagatatccagttttcccaacaccatttattgaagaggctatcctttattttattgtgtattattggtgcctttcttgaggattagt

SEQ ID NO: 755681 - DNA, 612 bp, Homo sapiens
actcagcttactaaagtggctacaaaggtgtacattaaccgagatcaggaggcaaagaaggaagctaattggaagcttaaggaaaggcagatttactagcagcagccctcacgggaagggaagctgactttgcaaggaggcgtgggtgcagtcatgaaagaggccagtctggacagggatttaagagctggccaaggctagaaaaagattaatgtgaatggtgcaaaaggaaaggacactgaaaggatgaatgtcaagagaataaggaaaatggtcaggaccatggtataagaaagccactggccaagggctactgcacccgggaaaaacccaaaaccttctgcacctgctgtggaaggcaggatataaagtgtcaggtaaaaaaggctcaaatctgctttaaaagtgtccagtatttaggcttctgtataagccaagggaaaagatggctcggtggtgaatgaaagyaggctgtttgtgcgtttcctactccaaccacccggtgccagataagaaagttcctagaggcagcagggttcttcgcatttggaccctaaatttcttgctcatggctaagccattatatgaagccacaaaaagggggaaaaggaa

SEQ ID NO: 755682 - DNA, 626 bp, Homo sapiens
ctggaactgggaagggggcttccaagtcacaggtacttgagagacaaatagctgcattcttttgagcttctcattagccttaggagatggtgcaggaagaaggtaatttttccctgaagcccagccatctctggccaggctcccctccaaaactgcaccatctgaagttagccatccttatccatagtctccaatgttcagttacctctctgctcactgctcagtcacttttatccccgacattcagcagtttgtatccctgargctcagctgcttgtgttgctgtagctttcttctgccagctgggctggtttttatgggcacaggatagggggcagggtgggtcaaaaaggcaatcatttggaaaaatggggtcagttgctttcacttaaggcctaggtcccaggcttgagcgtggagtgtagccaggagcccagcccttctgtatcagggtcagctgttttcacttagggctgaggttccaggtttgagggtggagtttggcaaggagccctgccttctgtatcaatggagggaggaaaacttgccttccttgttggaaacaagtaaaactcaaaaaacaaacaaacaaaaaagagttgtacagcaaaataaacattagatct

SEQ ID NO: 755683 - DNA, 626 bp, Homo sapiens
ctggaactgggaagggggcttccaagtcacaggtacttgagagacaaatagctgcattcttttgagcttctcattagccttaggagatggtgcaggaagaaggtaatttttccctgaagcccagccatctctggccaggctcccctccaaaactgcaccatctgaagttagccatccttatccatagtctccaatgttcagttacctctctgctcactgctcagtcacttttatccccgacattcagcagtttgtatccctgaggctcagctgcttgtgttgctgtagctttcttctgccagctgggctggtttttatgggcacaggatagggggcagggtgggtcaaaaaggcaatcatttggaaaaatggggtcagttgctttcacttaargcctaggtcccaggcttgagcgtggagtgtagccaggagcccagcccttctgtatcagggtcagctgttttcacttagggctgaggttccaggtttgagggtggagtttggcaaggagccctgccttctgtatcaatggagggaggaaaacttgccttccttgttggaaacaagtaaaactcaaaaaacaaacaaacaaaaaagagttgtacagcaaaataaacattagatct

SEQ ID NO: 755684 - DNA, 626 bp, Homo sapiens
ctggaactgggaagggggcttccaagtcacaggtacttgagagacaaatagctgcattcttttgagcttctcattagccttaggagatggtgcaggaagaaggtaatttttccctgaagcccagccatctctggccaggctcccctccaaaactgcaccatctgaagttagccatccttatccatagtctccaatgttcagttacctctctgctcactgctcagtcacttttatccccgacattcagcagtttgtatccctgaggctcagctgcttgtgttgctgtagctttcttctgccagctgggctggtttttatgggcacaggatagggggcagggtgggtcaaaaaggcaatcatttggaaaaatggggtcagttgctttcacttaaggcctargtcccaggcttgagcgtggagtgtagccaggagcccagcccttctgtatcagggtcagctgttttcacttagggctgaggttccaggtttgagggtggagtttggcaaggagccctgccttctgtatcaatggagggaggaaaacttgccttccttgttggaaacaagtaaaactcaaaaaacaaacaaacaaaaaagagttgtacagcaaaataaacattagatct

SEQ ID NO: 755685 - DNA, 626 bp, Homo sapiens
ctggaactgggaagggggcttccaagtcacaggtacttgagagacaaatagctgcattcttttgagcttctcattagccttaggagatggtgcaggaagaaggtaatttttccctgaagcccagccatctctggccaggctcccctccaaaactgcaccatctgaagttagccatccttatccatagtctccaatgttcagttacctctctgctcactgctcagtcacttttatccccgacattcagcagtttgtatccctgaggctcagctgcttgtgttgctgtagctttcttctgccagctgggctggtttttatgggcacaggatagggggcagggtgggtcaaaaaggcaatcatttggaaaaatggggtcagttgctttcacttaaggcctaggtcccaggcttgagcgtggagtgtagccaggagcccagcccttctgtatcagggtcagctgttttcacttagggctgargttccaggtttgagggtggagtttggcaaggagccctgccttctgtatcaatggagggaggaaaacttgccttccttgttggaaacaagtaaaactcaaaaaacaaacaaacaaaaaagagttgtacagcaaaataaacattagatct

SEQ ID NO: 755686 - DNA, 554 bp, Homo sapiens
gaaggtggaatgatcaatttatgcacattgattcacaaagcgttacgcgactccacaaaatgttaagggttaagaatttgctcatgatcactctactattggagaagtgtttttggaacagtttttttttttttttttagatgaggttactgaagaaagcagggtgtggtggtggaggatgttgaaactacaatgtctttgggaagcagtcggggaaggcacaaaggctgggtggcttctggcaggttcctaatgagactttccttaatcttttcatatcttcaaaatcttgttccagatatcttggctttggcaaagtgtggtttgctyttaaattttcagctctcctggctttgaaaggaagcattttttgtcggggaaggagatgtttctgatccccttacacttacctcatcaaagcgggtttttactctgcctatttgatgtctgagaggcctcattaggagctcactttattagccctgttaaaagaatttctttcctgtagaaacaggaagttacattttgtagcgtgtaaccccctgagagtctct

SEQ ID NO: 755687 - DNA, 554 bp, Homo sapiens
gaaggtggaatgatcaatttatgcacattgattcacaaagcgttacgcgactccacaaaatgttaagggttaagaatttgctcatgatcactctactattggagaagtgtttttggaacagtttttttttttttttttagatgaggttactgaagaaagcagggtgtggtggtggaggatgttgaaactacaatgtctttgggaagcagtcggggaaggcacaaaggctgggtggcttctggcaggttcctaatgagactttccttaatcttttcatatcttcaaaatcttgttccagatatcttggctttggcaaagtgtggtttgctcttaaattttcagctytcctggctttgaaaggaagcattttttgtcggggaaggagatgtttctgatccccttacacttacctcatcaaagcgggtttttactctgcctatttgatgtctgagaggcctcattaggagctcactttattagccctgttaaaagaatttctttcctgtagaaacaggaagttacattttgtagcgtgtaaccccctgagagtctct

SEQ ID NO: 755688 - DNA, 554 bp, Homo sapiens
gaaggtggaatgatcaatttatgcacattgattcacaaagcgttacgcgactccacaaaatgttaagggttaagaatttgctcatgatcactctactattggagaagtgtttttggaacagtttttttttttttttttagatgaggttactgaagaaagcagggtgtggtggtggaggatgttgaaactacaatgtctttgggaagcagtcggggaaggcacaaaggctgggtggcttctggcaggttcctaatgagactttccttaatcttttcatatcttcaaaatcttgttccagatatcttggctttggcaaagtgtggtttgctcttaaattttcagctctcctggctttgaaaggaagcattttttgtcggggaaggagatgtttytgatccccttacacttacctcatcaaagcgggtttttactctgcctatttgatgtctgagaggcctcattaggagctcactttattagccctgttaaaagaatttctttcctgtagaaacaggaagttacattttgtagcgtgtaaccccctgagagtctct

SEQ ID NO: 755689 - DNA, 606 bp, Homo sapiens
gggtagaaggaaaagtaaaggagaataataaagaatagaaagggagtttaaaaatgagttttaagtatgtatttttgacatcagttgttgatatctaataagacattaaaagtcactctaaagagagaggtctgattgtagctttatgtgtgtgaactgagaagtggagtttaaaactatgagattggataagattaccaagggaatgtacagtgagaaaatccaaggacagaattctgaggagtgccatcatttaagctgtgggtagaggaaaaggaatggcagaagaaagtgaggggtggctagaaaggtaggtgggaagttggatgaaagcagggtcccaaaatccagaggaaggagactccaaccagatgattgtgttagtttcccagggctgccrtaagttatcacagacttaaaaaccacagaaatttattctttaagaattctggagacttgaagttcaaaatcaagttatgggcggggtcagcctccctctacaggctctaggaaagactccttccttgtcttttcctagctttgctggtggcctccgggaacccttggtgcttcttacagctgcatctctacaatctttgtctctgt

SEQ ID NO: 755690 - DNA, 630 bp, Homo sapiens
tagaaaatcccatcaggctaaaacaactttcctatgaacatcaataatgtgtcagtccatggacacaggaaggggaacatcacacaccggggactgttgtggggtagggggagaggggagggatagcatcaggagatatacctaatgctaaatgacgcgttaatgggtgcagcacaccaacatggcacatgtatacatatgtaacaaacttgcacattgtgcacatgcaccctaaaacttaaagtataataataataaaatttaaaaaaagaataccataaaaatagatttgaaaaaaaaataatgtttcagycattaacactctcctatattttatagagaagccttagaataaaggcatctcaaaatgaaagttgaagggaaactataaagctggaaaatacattcaggatgggagacacagtgaaggtcagctttgctgatttcatagttctgtgtgaatccagcactggttacctgtatacattgacaataatcatatgcttaccctaatatctagaatggagaaaagactatttagggggctgggaaacccactgtttgtcaaactaaagaatgtttgattatctttcatgactcctcataccatctggtgagtaataatgagct

SEQ ID NO: 755691 - DNA, 653 bp, Homo sapiens
tattgttgctttctgtttttcttttagtagtcaggtccctcttctgtagggctgctgtggtttgcttggggtccactccagcccttattcaccctggtctctcgttcctgaagatatcaccagtggaggctgcagaccagcaaagatggcagcctgccccttcctctgggagctctgtcccagaggggtactggcctgatgccagccggaatgctcctgtatgaggtgtctggagactcctgttgggaggtctcagtcagggggagcagggtcagagacctgcttaaataagtagtctgtctgccccttgggagggcaggtgtgctgtgctggggggagtcccccttgtctgggctgccctgactctccagaggagcaggcagaaaagactaagatcactgatccaggatactgcagccacccctcctcctaggakttcctctggtggttatcagtgttctgtccataaactcctggctggagatgatggtgagattcccacagggaggccccgcccaccgaggaggactggatccgggtcctgccccatctaagggaaagtggcgactggagccgcagtgatggtggccgcctattccctggggaactccgtcttcttaggcagtttgtagtccactgtgctgacagacagt

SEQ ID NO: 755692 - DNA, 653 bp, Homo sapiens
tattgttgctttctgtttttcttttagtagtcaggtccctcttctgtagggctgctgtggtttgcttggggtccactccagcccttattcaccctggtctctcgttcctgaagatatcaccagtggaggctgcagaccagcaaagatggcagcctgccccttcctctgggagctctgtcccagaggggtactggcctgatgccagccggaatgctcctgtatgaggtgtctggagactcctgttgggaggtctcagtcagggggagcagggtcagagacctgcttaaataagtagtctgtctgccccttgggagggcaggtgtgctgtgctggggggagtcccccttgtctgggctgccctgactctccagaggagcaggcagaaaagactaagatcactgatccaggatactgcagccacccctcctcctaggatytcctctggtggttatcagtgttctgtccataaactcctggctggagatgatggtgagattcccacagggaggccccgcccaccgaggaggactggatccgggtcctgccccatctaagggaaagtggcgactggagccgcagtgatggtggccgcctattccctggggaactccgtcttcttaggcagtttgtagtccactgtgctgacagacagt

SEQ ID NO: 755693 - DNA, 511 bp, Homo sapiens
ggaactttattcattatcaacaaaaatgtattgaaccctagatgtattgaaccctagcgtgctgaggggactgggctagctactgtagaggatgtcatataccattctccccttcttcagtatgctccaaccatatttacagtctttcagttccatatctctgcaaggtatttcttgcctcaaatccacatacacgctgttcactctgcctgtgtgcacrtcccctccttgtttattcccacaaatagacatttgttattcccagctgactcttccttatccttaaggcctcagattaaatgtaccttcttcagagaggtggtctctcatcaccaaatataagttcttcttcctggcacccactgcctttattgtacatcataatctgtgattattcatttaattgttttcttgtttaatttctctctcccacaaaactataagcttcacaagggcaaggaccaagtctgttctgttaaccactgtgcaaccagggtttctagtgcagggt

SEQ ID NO: 755694 - DNA, 589 bp, Homo sapiens
cagccccagcgtctttcccagaatagagaaataataatccaggccgaatgtacactcctgagattcagtccctagagctttgttcttttaggagtacagtgtttattagaggagagagggtaaaagtgtcatttatctccacatatgtgggaatgttattgaattgtcatcaacaagtagtccagccctyatgaatggaacaatcttttctcccctgatggatgatggcgtttctggaaatcagtcagacctttatgctaacagggcctgcgtctggattctataaggtggagggtagtttactcagtggagtccttcagtcctacaattacgtcctccccatagacccaccctcccgtcaactttttcactcataaatccaacactgctttgtctgaaatatggcagatttgctttcatttttatttgaatttgaagtgggaggttggaagggtaaggtctgggctccaagagtaagcataagttataattatatttcttcacattgtgcctttgattatgttttgatttgatggattgcatatcccctactgtacacaccaggatccttctgacaaaactaaataga

SEQ ID NO: 755695 - DNA, 589 bp, Homo sapiens
cagccccagcgtctttcccagaatagagaaataataatccaggccgaatgtacactcctgagattcagtccctagagctttgttcttttaggagtacagtgtttattagaggagagagggtaaaagtgtcatttatctccacatatgtgggaatgttattgaattgtcatcaacaagtagtccagccctcatgaatggaacaatcttttctcccctgatggatgayggcgtttctggaaatcagtcagacctttatgctaacagggcctgcgtctggattctataaggtggagggtagtttactcagtggagtccttcagtcctacaattacgtcctccccatagacccaccctcccgtcaactttttcactcataaatccaacactgctttgtctgaaatatggcagatttgctttcatttttatttgaatttgaagtgggaggttggaagggtaaggtctgggctccaagagtaagcataagttataattatatttcttcacattgtgcctttgattatgttttgatttgatggattgcatatcccctactgtacacaccaggatccttctgacaaaactaaataga

SEQ ID NO: 755696 - DNA, 644 bp, Homo sapiens
tacaagtgtgagccactgcacctggcctatgaacagggacttttgttcactacagtatccccagtgcctaagacaactctgagcatatagctggagctcactaaatattgaatggatgaatgaattcctggttctaatgccctgtatcctcagctggaacttgccccataaggctttaggtggtgatggggatgccaataaaaagaaactattgagatggtcaaggctttttagagaagaagtgaacgtaggagaagtattatttaaaaactaaaggaaaagaaaataagcagaaagtgatcctggatagcrctcacccattcattcactgaaccgaagccaggccagatctgttctctgcagttgctgaaatctggttcttgtcacaaactgacctagacatctattttgatacacatattatatgtctcttggcatgcagagtactcatatcatttactagatttattgaaatgatggaaagtggtgtgaaatgcctcctgccatatgggaaaagaggtgaaaatgctgacatttggcttttagccaatttcacaaaagtttagagtttcagactttttttctcctcctgggtgtggtgactctgtcttatcaaacttctattctctgagtagccataaaga

SEQ ID NO: 755697 - DNA, 594 bp, Homo sapiens
aaggaggctaggaaaatgaagacggctagggaggaagcatgagagtggatccctatagctctgtggcttcagaaaaaggaaatgaatcacttggatttgactacagatattgtatataaggtgacaaattctgagagtttcctgaatgcagggccatttgattctcattctgggctcagcctcatctcccccatgggaaccccagccccagcagcctgtcaccaacccagaggctctgaagacagtggccctgggagagacaggacttctcttttcaaagtaaacactgacaaaaaccacttaagatgtccatggtcaggagatgacactaagagtaattaaaatcaaattctgaaycctcttctagcactcacatcacaaatcatggtgccaggaagggaaatagaccaagtaaacaggcaatgtcagggaaaggcctgaaagtaggctctgaagacaatgtcagtctttagagtgatccagtcaggaggcaggacagtggggatatttatacccctgcaacagtaggtccttagttgaggacacttcccagcaaaatgtaaacttccaggtatgttcctactctgctaacat

SEQ ID NO: 755698 - DNA, 589 bp, Homo sapiens
cgccacagtgacccactggactaccatcttccttcccttctgactgtcctttccctcagtctggataactttccctagtccagggtaagggatggtgtcagagggaagggaaaataattctaacgaattacatagttatgcaaatattttatttgtcttaggcctaggcttctggacgggagatgccaagagtttgattctcttgtcatccatgcttgggtagcagtatcccttcctgggggtgatagagacgaaattcccaggtgttcaaattgttgctgaggtgggggtgagtgtgggggagcagggagcaactaccccaaggttgttactgcacrgttgccccactacatgggcatggatgcctcattctaaaattgtttcaccctgaatggtaaaaccaacacaatgctcagcaggctgtgatgctggcactgggatgcctgcacatcgatggtgaagggcccagatgccctctaggacagtaggatggtgctgatgacaggcgtttgaggcaagagccccaagcaaagagtggaacatattctcgcatgaattctggaatcctgctcaaagcaaattttccagt

SEQ ID NO: 755699 - DNA, 619 bp, Homo sapiens
  misc_feature 411, 413: n = A,T,C or G
aaagggccgggcagacagtcagcagtaaccatgtgctggcttttctttccccatttctcccttcccctttcccagactcttaccttgataaaaacagccttctccccaagccatacatatgatctgccttatgaaggaacagttggaaggcagactaatttttctttattataaaatttccttaatcccagagagcctcagtatcttcagataacttggcgtgactaaaaaaaaattcttattgggttcatccagagwctgagtggccttaggcgggtgctattatgtaggggaaggttcatgaaactgccatgaaggaactaaggcattgacttataaatatcctaacatgtgagcagatgagaaagagactttaaacctgcttgggagttggaagttgactaccacatntntctccaacacatcataaccaggagaaatatggaaacgtatttaaaaatctaaatctcatttcctcccattgccctcaatggtacgttaataaagaaaataaattccctggtgagtaatattttttatattatgagaaacattaatattgacaacaaaaaaatgtagcttccttaccctgacaattgaaatccaggttaacttagcc

SEQ ID NO: 755700 - DNA, 619 bp, Homo sapiens
  misc_feature 411, 413: n = A,T,C or G
aaagggccgggcagacagtcagcagtaaccatgtgctggcttttctttccccatttctcccttcccctttcccagactcttaccttgataaaaacagccttctccccaagccatacatatgatctgccttatgaaggaacagttggaaggcagactaatttttctttattataaaatttccttaatcccagagagcctcagtatcttcagataacttggcgtgactaaaaaaaaattcttattgggttcatccagagtctgagtggccwtaggcgggtgctattatgtaggggaaggttcatgaaactgccatgaaggaactaaggcattgacttataaatatcctaacatgtgagcagatgagaaagagactttaaacctgcttgggagttggaagttgactaccacatntntctccaacacatcataaccaggagaaatatggaaacgtatttaaaaatctaaatctcatttcctcccattgccctcaatggtacgttaataaagaaaataaattccctggtgagtaatattttttatattatgagaaacattaatattgacaacaaaaaaatgtagcttccttaccctgacaattgaaatccaggttaacttagcc

SEQ ID NO: 755701 - DNA, 629 bp, Homo sapiens
atatatgcaactttaacagagagacagcagagtttcacaggaagttaaaatcacatataggaccaggtttagagactttctcaaaggcttagataaattacagattaggaaattaaaaatgtaagataaataatttaacaargcattccaaaattgttagcaatttcaacagtctaatcaatgtcatatttacttacagcagtagtatcatgaggaaatacagtttcagatgcttcttcatttctgactgtaagataaaaatttatgtgtattgtatattatcactagaatgcaaaaacttattttttgtcagacatcaaaaagcacatctactatttgattacatgacacatttgaaacaaaatgaattgattcaagtacttaagtatagtaattagaaaggtcaatcaacacagtgaataaactatacttacttccttagtactactcacaaggtggtaagatatggcttggtgatcattactttatggtaatactgtccacaatgagttggaaagtcagatgatgctgtgaggttatgacttaaaagctaaagcttggagactttagcattcatttagacaacactacagcctaaaggcatactatatattaaatacatattttca

SEQ ID NO: 755702 - DNA, 658 bp, Homo sapiens
acacacagcttctaacttcatgtcagtagaccagcgggttcattaccaagaccgacaggtcagccatggcccacagctgcggccaccattcagcctgacttcctctcccacctacccagatatgcaggtagcatgaggaaggcagaagggaggctctttctcyaccctctacctgcctggcacctggcaacccaccagttgagatgctggtgagacataaagagaaaagagttgtatgggatggtgatttccaggtggaaaaggagtacagtgaagtcagactagcctttgaacctacctgtgttcaaatcccagttctggccacttactagcctgctaggcctgcagacagtccttaagttctccaagcctcagtgtcctccatcatacaatggaagtgaaaacagtgtctatgagttttatctttcaaagactacttatgagagctcacatggagaaacacctcaagccatgcatctagcaagccgtcagcacaggctggctgctcccatttggctgctcttccctatggtcattggcatgttctttgtggccctggccccgccacagagactggatcctctggtgacagtccagaagtgactgactgcccaccacagagagttctgcagccctgcctgcacaccatgagccacct

SEQ ID NO: 755703 - DNA, 571 bp, Homo sapiens
aagtagtttttgggaccctggccataaatttctttcaaagtttggaagacaaacacctgtaagcctctgatgtggagactacacagcttcaggtgtttactattctcaagaaaactttacatctaaaggtttctaaaaccaaactttctgttctgaaatacaatgtcatataaaatagtcacacagggagagtcttaagtctatatagccgcagaatttccagtgcgaagactttttggacaacatcaaatatgactgaaacgtttagtatgcagtttaggaagtaaacatttgctactatgggatttacttttcagaagtgtgaaatgaagcaagtgctgagtaaattacaaggtcttgtgtgaagaaaacggytttttattgctttccaaaacgaggttataatccaaggaggtcatcaaatcagttcaagtaaaatcttttctgttcaataaaggcagaggaaacttttcgactccagcttggtggctgggggaatttcattgtcaatgaattcctcccactcagctctcagggcacaaaacagtgtttttcttgggagatggccaac

SEQ ID NO: 755704 - DNA, 625 bp, Homo sapiens
tcaaaaagttaactcctttgcagtgagttgagagtggccttattaattccttactatccttccttggttatagatcaattctagcaggttatgattaaagaattaaccatttgaccttaggtatatctttcaagattcagcaaaaactgctttatggagctttttctgaccaaccagagatggctgctcacttttcatgcacttggtacatgctcttataacatatcacactagtgtatttatttttatggaagcaaccaagatgtgcttacaagacgtgcttacgagactgagtacttagaggtcaaaggacatcttattcatatttgtatccttaatgccgagcaggttgccagacacaagtaagcastaagtatttgcagaatggatgactcccttatccatttctatgactgttactactgtgttctgcatatgctttgccctgtcatttgttcctttttttgaatcctccatatctagactactgcaaggtcctatagttttatgttccatatttactttcactgttattactgtaattcaggcacttgtctctatcacctagaccattacacatcccctaactgatcttcctacctccagttttctctttctataggga

SEQ ID NO: 755705 - DNA, 589 bp, Homo sapiens
actccattcctccagctgtttgggctaaactctctcccattccacgtgtcattggtaagccctgtcagctctagctctgaactatttccagaatatgcccacaactaatcatatcccttgctagtaccctagcccaagccagcatcgcctggtgactgcactgttgccacagccatctctctagtcttcctgcttctacctctgcccatctgcagtctattctgcacatagcagccagaatgatcctttaaaaaaattatttttattgtggtaaaacatatataacataaaatttaccattttaaagtacacaattcattggcattaagtrcattcacaatgctgtataaccaccacaacggaacttttgttatagagcttttcttcatcgctatgaaggagtaatccttttaaacataagtcacagcatgtcactaccctgcccgcaaacattcagtggcttcccatcttgctcagcaagggacaaagtcctgccgtggcccacagagcttttggctgtcctctctgaacgctctcttcactcatttcacccggtcattggcttccttgctgtccctttgacaaagtg

SEQ ID NO: 755706 - DNA, 570 bp, Homo sapiens
cacagaaacctttattttatgatatttttcagagagatcatgattcagttgtttctacaaatcatagcaaatcatctttcaggcaagttgaaaaaaataaatcatcagaaaaatatgttttcagcagtccagaaaattattaaaatctagtagttgcatctgtagcaactactaggatttaaaaaaaatcctaggttaggctctcttctatagaatactcctagaatattactgccaatgattcagtagccatatgctagtaaagcaagctatatttgttggtccatgtaaaatatgagtagaaagacggcataaatgagattgttacatgtttctccctgtgttcctgggggataggtgttggtgacagaattacaactctactactttttcctgctcactatagaattaayttccaaatttgaaggatgacaacctaattataggttatggagaattagagctctcacttttttctgatttttctctttggttgattacagagaattggttgaagctcacagttttgatgccaacttccaaagagataatacttacctccagcttcac

SEQ ID NO: 755707 - DNA, 614 bp, Homo sapiens
ctctctaccacacttctccttggcttcatgctctgttccctccttgacttgggagactgttctctgagcctgttgaacctgttgccctgcttctcaaatgccctcttaaaactgtaaaatgcccccagggaaaagcagccccaatgctgagctcacctgttgggatctccatctttacacaatcctggctttactttattctctatttttagttttctgatgcccttagactgatgatttgatattttattctgctttcatagtgtcctcagcaagaattttgcttcaaataaccgaattcatcattaccagaagcagaagtatggtgagacagtttttattttttatttttattttttttagaaaaaaggtctctgtcacccargctggaatgcagtggtgtgatcatagctcactgcagcctggaactcctgggatcctcccatttcagcctcctgcgtagctggaactacaggtgcatcccaccatgcctggataattttttaattttttttttgtagagatagggtctcgctatgttttccaggctagtcttgaactcctggcctccagcaagagtgattcagttttaaataaaattttcaatatctttg

SEQ ID NO: 755708 - DNA, 639 bp, Homo sapiens
ttgcagtttttggtgcatctcatcgatttgctgagcagacttcccagatttaatggtttcaccaggattcagaaagctgtagtggatcagactggcagccgacccaccaaacaatgaccatgacgtttttttggtgcaagtttgactttgggaagtgccttggagcttcttcttggtccaaccacagagctggtcattgctggtcattgtgtaaaatccattttttgttgcacgtcacaatccaaccaaaaaatggttcattgttgcatagaataaggggagacaacactttaaaacaatgattttttaaatttttgcttatcaagctttgtcacttccaatttgctgctaatgctgaacaactgtagaatggttgatgttgagttcttcggcaacttctcatgtagctgtaggaggatcagctttgatggttgctctcaactggccsttgtcaactgccaatggccggccactatgctcctcagcttcaaggttctcgtctcctttgcaaaactttttgaaccaccactgcactgtacattcattagtagttcctgagccaaatgcattgttgacgttgcaagttgtctctgctgctttatgatccattttgaactcaaaaaagaaaatcactcgaat

SEQ ID NO: 755709 - DNA, 434 bp, Homo sapiens
agagagcttcctgattttttggtgtgggtgctgtgctatctccaaggtctgttgaaaaagagtggaggtggctgagcagcagagatgtttgttatgcagctcagcttcctcatgaggtcatctctgagggcaggtgtggtctgcttcatcagratatctcaggtctgaaagaaaccattggctccaaccagagaagatctgagagtgacaaacctgaagtcaattatgacaagctgacatcatggcttctgtctcaggtaacagcagccatgcacgtcattatgatgatctgacttggttttctgagtttgccctggggcagggtgagggttgggcaaggagccagaatccaggcatgctccctgggcaccttgccattattcagttcctaatgaagcttagaagcattacctctccctgaatcaaagcatggg

SEQ ID NO: 755710 - DNA, 536 bp, Homo sapiens
ctgccaagctctctgagaaatgatccttcaggtatggtgtggtctgtctgttgattccccaaagcctgaaactcaagaagtgggggtttgtttacctgatgctattgaacatttgtatcaaggaaaatttcagtgtaaacaaacaaacaacaaaagcaaatataaaacggagcccagctytccatcctagtaaggtccactggacgtgtgccagcacacagagcctttaggggcctgggcctcctctcctctcctcctagacctggccagcacagaccagctcagcatgtttacacacccttcctccaaaccctcttttcctcaagttccagcttcttccagtggagagaattgaaaatccattgacatgaaaaagttcgcccctcagagctggactcacctgtaaggacacagccttgtatttttccacagaataattacagtgttccatcttgaatttgagtcgatcctccaatggtggggcagccccctgtgggtgatacatggtcacattgaatcctccctgggtctccaaa

SEQ ID NO: 755711 - DNA, 536 bp, Homo sapiens
ctgccaagctctctgagaaatgatccttcaggtatggtgtggtctgtctgttgattccccaaagcctgaaactcaagaagtgggggtttgtttacctgatgctattgaacatttgtatcaaggaaaatttcagtgtaaacaaacaaacaacaaaagcaaatataaaacggagcccagctctccatcctagtaaggtccactggacgtgtgccagcacacagagcctttaggggcctgggcctcctytcctctcctcctagacctggccagcacagaccagctcagcatgtttacacacccttcctccaaaccctcttttcctcaagttccagcttcttccagtggagagaattgaaaatccattgacatgaaaaagttcgcccctcagagctggactcacctgtaaggacacagccttgtatttttccacagaataattacagtgttccatcttgaatttgagtcgatcctccaatggtggggcagccccctgtgggtgatacatggtcacattgaatcctccctgggtctccaaa

SEQ ID NO: 755712 - DNA, 536 bp, Homo sapiens
ctgccaagctctctgagaaatgatccttcaggtatggtgtggtctgtctgttgattccccaaagcctgaaactcaagaagtgggggtttgtttacctgatgctattgaacatttgtatcaaggaaaatttcagtgtaaacaaacaaacaacaaaagcaaatataaaacggagcccagctctccatcctagtaaggtccactggacgtgtgccagcacacagagcctttaggggcctgggcctcctctcctytcctcctagacctggccagcacagaccagctcagcatgtttacacacccttcctccaaaccctcttttcctcaagttccagcttcttccagtggagagaattgaaaatccattgacatgaaaaagttcgcccctcagagctggactcacctgtaaggacacagccttgtatttttccacagaataattacagtgttccatcttgaatttgagtcgatcctccaatggtggggcagccccctgtgggtgatacatggtcacattgaatcctccctgggtctccaaa

SEQ ID NO: 755713 - DNA, 536 bp, Homo sapiens
ctgccaagctctctgagaaatgatccttcaggtatggtgtggtctgtctgttgattccccaaagcctgaaactcaagaagtgggggtttgtttacctgatgctattgaacatttgtatcaaggaaaatttcagtgtaaacaaacaaacaacaaaagcaaatataaaacggagcccagctctccatcctagtaaggtccactggacgtgtgccagcacacagagcctttaggggcctgggcctcctctcctctcctcctagacctggccagcacagaccagctcagcatgtttacacacccttcctccaaaccctyttttcctcaagttccagcttcttccagtggagagaattgaaaatccattgacatgaaaaagttcgcccctcagagctggactcacctgtaaggacacagccttgtatttttccacagaataattacagtgttccatcttgaatttgagtcgatcctccaatggtggggcagccccctgtgggtgatacatggtcacattgaatcctccctgggtctccaaa

SEQ ID NO: 755714 - DNA, 621 bp, Homo sapiens
atactctttgttgtaacatctgtggcattaatatgcctcttgttaacactcacctacattttacctgttgtaaatccactgtcataattattgaaaatatttctccagagctttttaattctatggttatttattwattgtagtatagaacttttatgatttcttccatcagggtgcattctgaatcatgcttagtgagagatggtttttaactccactttaacagttagcatctatgttttacatcagtgtcaatgtcacttttgtattatatacgacaccaacattttattatctgagtgatgagaatgtttatttttgtggaaatggagatctcatgagactttaagcagattgctggccttctcctcgatttccttgattgattcctgaagtggaactgcagtgctaagtggaattccctgggaagcttgctcaagtaagtaagcatgagaaatgctgaatgaaataaagtgcagcaagcagggataaatatcatgggcatcttcagagcctttgtgcaggtaacatgcacagagattctctgagagagtcagtctcagccagtggtcctacacttccatgaccctgcagtgcgtttgttcttagagtggctttcag

SEQ ID NO: 755715 - DNA, 621 bp, Homo sapiens
atactctttgttgtaacatctgtggcattaatatgcctcttgttaacactcacctacattttacctgttgtaaatccactgtcataattattgaaaatatttctccagagctttttaattctatggttatttatttattgtagtatagaacttttatgatttcttccatcagggtgcattctgaatcatgcttagtgagagatggtttttaactccactttaacagttagcatctatgttttacatcagtgtcaatgtcacttttgtattatatacgacaccaacattttattatctgagtgatgagaatgtttatttttgtggaaatggagatctcatgagactttaagcagattgctggccttctcctcgatttccttgattgattyctgaagtggaactgcagtgctaagtggaattccctgggaagcttgctcaagtaagtaagcatgagaaatgctgaatgaaataaagtgcagcaagcagggataaatatcatgggcatcttcagagcctttgtgcaggtaacatgcacagagattctctgagagagtcagtctcagccagtggtcctacacttccatgaccctgcagtgcgtttgttcttagagtggctttcag

SEQ ID NO: 755716 - DNA, 621 bp, Homo sapiens
atactctttgttgtaacatctgtggcattaatatgcctcttgttaacactcacctacattttacctgttgtaaatccactgtcataattattgaaaatatttctccagagctttttaattctatggttatttatttattgtagtatagaacttttatgatttcttccatcagggtgcattctgaatcatgcttagtgagagatggtttttaactccactttaacagttagcatctatgttttacatcagtgtcaatgtcacttttgtattatatacgacaccaacattttattatctgagtgatgagaatgtttatttttgtggaaatggagatctcatgagactttaagcagattgctggccttctcctcgatttccttgattgattcctgaagtggaactgcagtgctaagtggaattccctgggaagcttgctcaagtaagtaagcatgagaaatgctgratgaaataaagtgcagcaagcagggataaatatcatgggcatcttcagagcctttgtgcaggtaacatgcacagagattctctgagagagtcagtctcagccagtggtcctacacttccatgaccctgcagtgcgtttgttcttagagtggctttcag

SEQ ID NO: 755717 - DNA, 534 bp, Homo sapiens
aaaaacctaaaaatctcccacatgcacataataatttaagtgatattggattgtcgtttactacttatacatgcatttctgcctatacatattctatccagtgtgtacacatgtgtatgtaaatatgtagcatgatctggaagtgtaagcaccaaattaagaacagcagctttggggggaggggaatagaattggtttagagaaaaaggtgaaattaacatttttattctgcctacttcagtgtgcctgcagtatttacaaygatcaggagtgtgtacttttttcaatttagaaaaatgataataataaggtttgcttggggggaaagggtaagtaggatgagaccaggaagagaagtaacttagaaacacatcatgcatcatgactgctggcaccattctgtcctccaatgaagagcgaggctttgagaggttcagcagctcacccaaaggtgtacagccatggtctcaaacatgcttgcaccctgctgtcactcaggtcctgaagcccaggccacctccaaggacactgggg

SEQ ID NO: 755718 - DNA, 521 bp, Homo sapiens
ttctataaaatgagaacttgtttttcatgaagctgtcattttcacaagtttggggtgcaggtgcagattgcctactgttgtgtttctgaacacttccctcgcgaggctcctaaccccaccccagtaaactcatcaacatgactccttccagcttctacagctctggagagggttcctttttatcttgcgtttccagggatgtttcacggccttttgtggagtgggccctggctgascttctggcccttcttgagtgtggaggatgtcacagactgcagtgggaaattaaaaagctgcttgcttcacagagtaagggaatgttagtagatgcttgaaaagtaccctgagggagctggtcagaggtgctctgtaaagttgcatctgttgctagcaccatgagcagctgtctgaccaggaggcctgggaacagggacagagagagctggcacccttctttcctctgccctacacattggcctttccgccattaagaccatctctgcttgactttttcagtctcc

SEQ ID NO: 755719 - DNA, 588 bp, Homo sapiens
tgtgatatacaaacatatattttaaaataagtatcacagccaattttgattgtgtgtgtatatatgtgcgcatgtatatacttgtgaatgtatacatatgtgtgtatgtttgtgtgtgtatacatacatgtatgtgtatctaatttacacacacacacatgcacaaaaacaaatcgaagggacagattggaaagcaagcatttcttttttctttctttctttttttttttttttttttgaggcagagtttcactcttgttgcccaggctggagtgcaatggtgtgatcttggctggctgcaacctcttcctcccaggttcaagtgattctcctgcctcagcctcctaagtagttgggactacaggtgtatgccaccacacccagctaattttttgtatttttagkggagacgaggttttaccatgttggccaggatggtcttgaactccagacctcaggtgatccacctaccttggcctcccaaagtgctgggattataggcatgagccacggcacccggccggaaagcacgcatgtctgtgtatatttttgtctatatttttaacccttgaatcataaaaattacct

SEQ ID NO: 755720 - DNA, 630 bp, Homo sapiens
gtatacatatcattatgtgtgtgtatcattatgtatgtgtatgtgtgtacacacatatataaatgaatccaggaattgcctttctgatatagatgcactgagagttttatgcatgttaaaacaattggaaagtgaatcaggacttttatctgattaccaatataggaaaagattattgctcatttatgttttctcatgaggttcctgtttacaggatacgattcactggaaaataaagccaaaggttataaaagcaattcaccgtggagtgttgttctttgtctgtgcacagaatgcgtagctcttgcatactaagttttcagggtcagaaggaaacaggaagcctttaatggagagcattgatcactcatcarggaagtcctgccgcactgggagaaggtgaatcactgcgctgccttcaactggctgcatgactgcatatttaaggtgagcattaactatattaacacactgggcgtcactgtacaattctttttagaacccttcccaaagttagcagccttccttggtagacttagggatcttgggttttattgctgtacccagacaactaaatgggagaatgttacgtcagatctcaggcttgttgaaatgtgcagggacccggtg

SEQ ID NO: 755721 - DNA, 601 bp, Homo sapiens
gacaatctggtgcttatctgttctaatggccccacagtgagaaaatgaagcaggactggctcactcgatatggcttctgcccataggagaatgcttcccacatcaacactccaaagctccagacatcgcttttgctggagaacttgtagtagttgatgcattccggagcgtaccacttgacaggccactttccatgggtctgggcctaaaagcaaagcagwgggagaaattccattaagaataaaattgtgggccgggcacattggttcatgcctgtaatcccagcactttgggaggctgaggagagcagatcacttgagatcgggagcttgagaccagcctggccaagaggaaaccccatctctattaaaaatacaaaaattagccaggtgtggtggcgggtgcctgtaattccagctacttgggaggctgaggcaggagaattgcttgaacccagaaggcagaggttgcagtgatctcagatcacaccactgcactgcagcctgggtgacacaacgagagactccatctcaaaaaaaaaaaaaaaagaaagaaagaaaagcataaaattgtgtacattcatgttcatagcagcattatt

SEQ ID NO: 755722 - DNA, 625 bp, Homo sapiens
ggtccctgcacatttcaacaagcctgagatctgacgtaacattctcccatttagttgtctgggtacagcaataaaacccaagatccctaagtctaccaaggaaggctgctaactttgggaagggttctaaaaagaattgtacagtgacgcccagtgtgttaatatagttaatgctcaccttaaatatgcagtcatgcagccagttgaaggcagcgcagtgattcaccttctcccagtgcggcaggacttccytgatgagtgatcaatgctctccattaaaggcttcctgtttccttctgaccctgaaaacttagtatgcaagagctacgcattctgtgcacagacaaagaacaacactccacggtgaattgcttttataacctttggctttattttccagtgaatcgtatcctgtaaacaggaacctcatgagaaaacataaatgagcaataatcttttcctatattggtaatcagataaaagtcctgattcactttccaattgttttaacatgcataaaactctcagtgcatctatatcagaaaggcaattcctggattcatttatatatgtgtgtacacacatacacatacataatgatacacacacataatgatatgtatac

SEQ ID NO: 755723 - DNA, 494 bp, Homo sapiens
tcatggttcggttattgctaaaaatgtttatacatacagtcatatctttttattatggtaaaatatatataacatacaattttccatttaaatcattttcaagcatgtaattaattcagtggcagtaagtaaattcacattgttatgcaaccatcaccaccatccatctctaagaatcttttcatctcgcaaaacccaaactccatrctcatgaaacaacaactgtccttcttccattcccttagcccctggcaactcccattcttatttctctctgtgaatttgactgctatatgtacccgctataagtgaattcatacagtatttgtcttttttgactggcttatttcacttagcataatgtcctcaaggttcatccgtgttgtagcatgtgttagagttttcttcccatttaaggctgaataatatttctgttgccatagtgcattcttgcattgctataaagaaatcccggagacttcataatttataag

SEQ ID NO: 755724 - DNA, 636 bp, Homo sapiens
gagatggctagaaacctcctctaacatctggacacaagaaccactatctgaaatcaattttaaggagtggattcctcatatatgacctgactgtattaaagaattatttgttacctggaagcaaaggtgagaaccatcctaacctgtcctttctgagcttgtgcctgacaactagtacagcacccagcattgcctttggcagtattaagcatgtgtgtgatgggccagcctcctttctttgtgtctgtcttcctgccatggggagtcttctcagatctcccgccagaattgttttctaagggcattttatccataccttggttaaagracatttcaacacccatcctgcctcataactgtataccattttatcaactgtagaataacaaggttcatacatttggaaaggagagctttatttcccacaaaggattgcagcctgcaggccattgtgacatgctgagaagcacagcctcctgccagaagccagaaacaggaacttagaaggtggaaagaatgaaagggatttttgctgaacaggatggccaaacatacatattcaacaggttatgggaggagatatgaatattcatgaaggggaaccatgggcaggctactgtaggctagcatgcaggc

SEQ ID NO: 755725 - DNA, 620 bp, Homo sapiens
gcagcgcccggaggccgcaggccgtctgcccgcctcaggcccgtaggctgcggctcccctccctgggccctgtcccctgcagggccagagaggccgcggcctctgcccagtggtactgggggaaaaaggaagccgcgaagcgggtcctggggaagagctcacctgctcytgagggaagtggcgacaagatggcgctttcaggtggagctggacgccgactcactctgctccttgggtctccgcctttctaaggccacctcctgctggcaccactccgggcctacttcccgcacagactgcgggtcaaagggagcgggatgctggccggcggcacctggctttttggaaagagcaggaaggagcgtgattcccaggcagctgctcatcccaacagctttaggctttggttgtgattgtttttacacctatgacaaatgatatggccagacacaccacaatgtctgaacaaattagagaggagcaggaccctgcggacaggctgtggcccaaacagtggctgccaagcagacggagcctgcaccaatgaaaatatgaccaggcaaggaagtgagtgctccctcaggcactgaccgaactcataagtacccactccatttggc

SEQ ID NO: 755726 - DNA, 634 bp, Homo sapiens
actttcaaaggaggacaaaaaagcctctctactgagagtagaaaatgagaccatgtaccatttgggtaagatgctgtctgcatagccaatcacccctgccattttggtctacattcaccagttattttgttcaattatgttcaatttcatgcagcatccaactggctgtgtatttagataagatcataatcaaagtctcatcagaagagcttgctgaaggaagtcccattgcataagattttggaggcagaaatatccctatatgagttagatagaggaaagatattttaatttcctgttaataaaagcaccagctaaggtgggaaaggtgaggcaaaggtaggtggttttaatgaggtcccagggtgcatccaaggctggagcagcatccaggcrgagagtgaattctagatattggaacttgttgccatggtgattggttggaggaaggggggaccatttttaagaaaaagaattctagatcatctgaatgaaaagagacttacttagcctccacatcgtctaactctatggggaaacataattagatggcatttgaaattatgtacatcatatctactttattatgcagtatcaagaaaaaaacatgaatgcagttagcagccatggaaac

SEQ ID NO: 755727 - DNA, 614 bp, Homo sapiens
cccggaggccgcaggccgtctgcccgcctcaggcccgtaggctgcggctcccctccctgggccctgtcccctgcagggccagagaggccgcggcctctgcccagtggtactgggggaaaaaggaagccgcgaagcgggtcctggggaagagctcacctgctcytgagggaagtggcgacaagatggcgctttcaggtggagctggacgccgactcactctgctccttgggtctccgcctttctaaggccacctcctgctggcaccactccgggcctacttcccgcacagactgcgggtcaaagggagcgggatgctggccggcggcacctggctttttggaaagagcaggaaggagcgtgattcccaggcagctgctcatcccaacagctttaggctttggttgtgattgtttttacacctatgacaaatgatatggccagacacaccacaatgtctgaacaaattagagaggagcaggaccctgcggacaggctgtggcccaaacagtggctgccaagcagacggagcctgcaccaatgaaaatatgaccaggcaaggaagtgagtgctccctcaggcactgaccgaactcataagtacccactccatttggc

SEQ ID NO: 755728 - DNA, 634 bp, Homo sapiens
gtttccatggctgctaactgcattcatgtttttttcttgatactgcataataaagtagatatgatgtacataatttcaaatgccatctaattatgtttccccatagagttagacgatgtggaggctaagtaagtctcttttcattcagatgatctagaattctttttcttaaaaatggtccccccttcctccaaccaatcaccatggcaacaagttccaatatctagaattcactctcygcctggatgctgctccagccttggatgcaccctgggacctcattaaaaccacctacctttgcctcacctttcccaccttagctggtgcttttattaacaggaaattaaaatatctttcctctatctaactcatatagggatatttctgcctccaaaatcttatgcaatgggacttccttcagcaagctcttctgatgagactttgattatgatcttatctaaatacacagccagttggatgctgcatgaaattgaacataattgaacaaaataactggtgaatgtagaccaaaatggcaggggtgattggctatgcagacagcatcttacccaaatggtacatggtctcattttctactctcagtagagaggcttttttgtcctcctttgaaagt

SEQ ID NO: 755729 - DNA, 589 bp, Homo sapiens
taattgcctaaaccctacctcccgctgcctccaccatcttgaaacaaaccgcacattcatttttgtccacaagtatatcccgtattaatagaatcaaaggctgagagctttagcattatttacacataagagatatgcttagaacagtactcaaaaaaatgtcatttgagggaattcagggctactatttaccatttgtataaaattttaaatcaaccaccaaagggtaaagcaattacatgaattgaagtccaactcagttgygaccctatgcttcagaactcccctgggtctcccaggccgttcttaatgaggcaaagggacgtggtgagcagcagaaatgtcggtcagcggcagcttctcaattccggtggtatctcgggaaacgctgagttagctgaacattaacatgtacatcaagtctgggaggttcaaaatcagtttgctctgcaattcaattttatagaatcattaatggtgaagggcaaaaaaacccttcatcttacattttaaaaaatttatcaagatttggggatattttaataatagctcaatattacagggaaaggactaaagaaatgtaacagtg

SEQ ID NO: 755730 - DNA, 594 bp, Homo sapiens
aaactcacacaactgcaaggtcccacagtaggccacctgcaagctgaggagcaaggaagccagtccgaatcccaaagctgaagaatttgaagtctgatgttcgagggcaggaagcatccagcacaggagaaagatgtaggctgggaggctaagccagtctagtcttttcatgttttctgcctgctttataccctggccacactggcagctgattagatggtgcccaccaagattaagggtaggtctgcctttcccagytcactggctcaaatgttaatctcctttggcaacaccctcacagacacacccaggatcaatactttgcatgcttcaatccaatcaagttgacactctgtattaaccatcacaagtccaacccttgtcaacttgaacccatacgaatctcctgagatcatacataatcttcaaataaagacaataataaggtcataattacacctaatgtaatacaactatcttttgtacaaccagaaatgcaccaatctcccaacccaagtgctattatgtaaagttaagaacacttaaatgctgatatgaagtcaataaattttatgtcacatgataaaggaaaaa

SEQ ID NO: 755731 - DNA, 594 bp, Homo sapiens
aaactcacacaactgcaaggtcccacagtaggccacctgcaagctgaggagcaaggaagccagtccgaatcccaaagctgaagaatttgaagtctgatgttcgagggcaggaagcatccagcacaggagaaagatgtaggctgggaggctaagccagtctagtcttttcatgttttctgcctgctttataccctggccacactggcagctgattagatggtgcccaccaagattaagggtaggtctgcctttcccagctcactggctcaaatgttaatctcctttggcaacaccctcacagacacacccaggatcaatactttgcatgcttcaatccaatcaagttgacactcwgtattaaccatcacaagtccaacccttgtcaacttgaacccatacgaatctcctgagatcatacataatcttcaaataaagacaataataaggtcataattacacctaatgtaatacaactatcttttgtacaaccagaaatgcaccaatctcccaacccaagtgctattatgtaaagttaagaacacttaaatgctgatatgaagtcaataaattttatgtcacatgataaaggaaaaa

SEQ ID NO: 755732 - DNA, 609 bp, Homo sapiens
ctgtggcttcattgtttcttattaacattttagtgaaatattgctagaaggagactgaaaatgaagtatgaaaagttaaatgggatttctgttccaagttagtccttttcagatgagaggaactaagaagttacagggaagaaacaataatatctgctgagcaagatttttgcagggcaggccaaggaattaccaaggagaaaaaggaaatgtcagcttcaccttgcatctgctcccgagccaggtcctgagcaccccctgytggcgctgatcgtcccctggtgtctgatctcctctggttccctcagcttccctggtggtgtctgagccgctctactggtgtctgagcccctctgcctgccctcagctccccctcgtggtctgagccaccctggtggtgtctgaaccccgcttgtgatgtcctgagcccctctattagtgtctgagccctactggtgggtcctgagcccctttggtggtgtctgagccccctggttttgagcccccccttctgcatcctgagccctcctggtagtgtctgagtgttattttcaccatacactcaaataagattgagcagtgattctttcatctgtggtggtcattcca

SEQ ID NO: 755733 - DNA, 578 bp, Homo sapiens
atttatataaactggttattcccccatgtttttttctgtcatacttaattacaataagaaaaatgttatgtttttatgaagcaaaattgtgtacctaatagctttatttggaggggacatgtagctttagaatgaaagyttttggggggataactgtttaatataccatacaattcacccatttaaagtgtccaattcagtggctgtttttagtatattcccagagttgtgcaaccattaccacagtccgttttagaacaatttcatcagttgaggaaaaaaacccctgtatcctttagctatttctgcctctaacaccctaccccacctccccgccactttcttgtctctcttcccccggcttctccagccctaggcaaccttgaatctactttctgtctctgcagatttgtctctgctggatcttttctgtaaatggaattttagaatatgtgggcttttgtgattagcttctttcacttagcataacgtttccaaggttcatccatgtgaaatcaaagctttttaaaagaaatttgatacttgggcgattatattagtgtatgacaaaaataaat

SEQ ID NO: 755734 - DNA, 578 bp, Homo sapiens
atttatataaactggttattcccccatgtttttttctgtcatacttaattacaataagaaaaatgttatgtttttatgaagcaaaattgtgtacctaatagctttatttggaggggacatgtagctttagaatgaaagtttttggggggataactgtttaatataccatacaattcacccatttaaagtgtccaattcagtggctgtttttagtatattcccagagttgtgcaaccattaccacagtccgttttagaacaatttcatcarttgaggaaaaaaacccctgtatcctttagctatttctgcctctaacaccctaccccacctccccgccactttcttgtctctcttcccccggcttctccagccctaggcaaccttgaatctactttctgtctctgcagatttgtctctgctggatcttttctgtaaatggaattttagaatatgtgggcttttgtgattagcttctttcacttagcataacgtttccaaggttcatccatgtgaaatcaaagctttttaaaagaaatttgatacttgggcgattatattagtgtatgacaaaaataaat

SEQ ID NO: 755735 - DNA, 596 bp, Homo sapiens
gtgcattttcaatatccttgttcaagattaattgattttataggcataggtttttttttctaggctctctactttgttctgtaggttttcgtgttcatttttatgcacatgctgtcttgtttttattactatagtattgaatataatttaaaatcagaaactataggggcgggtgcggtggctcacacacctgtaatcccagtactttgggaggccgaggtgggtggatcatgaggtcaggagttagagaccagcctgaccaacatggtgaaatctcgtctctactaaaaatataaaaattagccgggcatggtggcgagcacctgtawtcccagctactcaggagactgatgtaggaaaatcacttgaacctgggaggcagaggttgcagtgagctgagatcgtaccattgcactccaacctgggtgacagagtgagactccatctcaaaaaaaaaaaaaaaaaagatcagaaactataatatccttagctttcttcttcctcaagattgctttagctattcaaagtctgttgtaatttcacataaattttaagcttgtattttctattactgtgaaacaagttattggaatttt

SEQ ID NO: 755736 - DNA, 527 bp, Homo sapiens
tcctttacaaacaagcaaatcctgagggaatttgtcaccctcaggcctgccttgtaagagctcctgaaagaagcactgaaaattgaaagaaaaaattgttaccagccactacaaaaacacactgaaatacacagaccagggacactrtgaagcaaccacatgcacaattctgcaaaatgaccagctagcatcatgatgacaggatcaaattcacacataacaatactaactttaaatgtaaatgggcttaatgcctcaattaaaagacacagaaaggcaagctggataaaaggccaagacccatcactatgctgccttgaaaagagccatctgacgtgcaaatacacacataggctcaaaataaagggaaggaggaaaatttaccaagcaaatagaaatcaaagaaggggttgcaatcctagtttctgacaaaacagactttaaaccaaaaagatcagaaaagacaagggcattacataatggtgaagggttcaattaagcaaaaagagctaactctattaatctac

SEQ ID NO: 755737 - DNA, 527 bp, Homo sapiens
tcctttacaaacaagcaaatcctgagggaatttgtcaccctcaggcctgccttgtaagagctcctgaaagaagcactgaaaattgaaagaaaaaattgttaccagccactacaaaaacacactgaaatacacagaccagggacactatgaagcaaccacatgcacaattctgcaaaatgaccagctagcatcatgatgacaggatcaaattcacacataacaatactaactttaaatgtaaatgggcttaatgcctcaattaaaagacacagaaaggcaagctggataaarggccaagacccatcactatgctgccttgaaaagagccatctgacgtgcaaatacacacataggctcaaaataaagggaaggaggaaaatttaccaagcaaatagaaatcaaagaaggggttgcaatcctagtttctgacaaaacagactttaaaccaaaaagatcagaaaagacaagggcattacataatggtgaagggttcaattaagcaaaaagagctaactctattaatctac

SEQ ID NO: 755738 - DNA, 527 bp, Homo sapiens
tcctttacaaacaagcaaatcctgagggaatttgtcaccctcaggcctgccttgtaagagctcctgaaagaagcactgaaaattgaaagaaaaaattgttaccagccactacaaaaacacactgaaatacacagaccagggacactatgaagcaaccacatgcacaattctgcaaaatgaccagctagcatcatgatgacaggatcaaattcacacataacaatactaactttaaatgtaaatgggcttaatgcctcaattaaaagacacagaaaggcaagctggataaaaggccaagacccatcactatgctgycttgaaaagagccatctgacgtgcaaatacacacataggctcaaaataaagggaaggaggaaaatttaccaagcaaatagaaatcaaagaaggggttgcaatcctagtttctgacaaaacagactttaaaccaaaaagatcagaaaagacaagggcattacataatggtgaagggttcaattaagcaaaaagagctaactctattaatctac

SEQ ID NO: 755739 - DNA, 567 bp, Homo sapiens
gatggttggatggatggatggatggatgaatgggtatgtgaagggatggatgtattagagtgggtagttaggcaggcctgagctgatagtcaagtgattgttaaactgcctctctaaaataataattggtctcggctggacatggtggctyacgcctgtaataccaacactttgggaggctggggcgggtggatcacaaggtcaagagatcgaaaccatcctggccaacatggcgaaaccctgtctttactaaaaatacaaaaattagctgggcgtggtggcgtgcatctatagttccagctactcgggaggctgaggcaggagaattgcttgaacctgggaggcagaggctgcagtgagctgagattgcgccaccacactccagcctggtggtagagcaaagccctgtctcaaataataataataataataaataataataattgatctcagcgggcaccaagaaaaggcagtctcccaatagatagaaaacacccgaaactggtcatcagcagcttcccgataagatctcaggagttggatgagtgggctcaagcatatgcacta

SEQ ID NO: 755740 - DNA, 534 bp, Homo sapiens
cagtctcccaatagatagaaaacacccgaaactggtcatcagcagcttcccgataagatctcaggagttggatgagtgggctcaagcatatgcactaagaggcaaagtggcagagtttaactggcacataatcttcctctaggaacactctaaaagtaagagaaaaacacctcaaatgagcatgtgcacatttcattaaacccattgtgtacgcggcccctccgaagcactggcaggccactgtacatgtggacatcccaccccaarggaaaaatcaagggagaagaaatacaaatcccagaaccatgccaatgtataaaaccccaagtcaagggccaggcagagcacttagatctctcaagtcacccacttagccatcttccaagtgtactttacttcctttcgttcccactctaaaactttaataaacatttactcctgctctaaaacttgcttgggtctctcactcttctgcatgccccttggccaaattctttcctccaaggaggcgagaatcaagttgctgcagacctg

SEQ ID NO: 755741 - DNA, 650 bp, Homo sapiens
ctagacacagagcctacagtaaagtggccatgctagaaatgcttctttatttctctcctcttcctctcccttttataggaataaaactcagacgaaaaaggacctctgctatctcagatataaatctgactaactgactaaagattgaagagtttcacaaagtcataccctccttgttttcagaaataatcccattacaccttgaggacctaaatcccaacttgctggtactggcagcttcctaggttcaccttgcccaactttttcctcctctctgaacctaaccctctttttaaaggcaattccctccttgaacacctccatgatgattctgttacagtaggtagctagtcagaggtgagcagggcaggagagggccactctcagcccccaccaccaggaatgtcaggcaataatcaggtgatggtcaggcagttgttgcattgyctctaaaaaataattggtcacagccagcaccagcgaaagcaacctcccaatagatagaaacacccaaacctagtaattagcagcttcccaataagatctcaggattaggcaagtaggctcaagaatgcaccctaagagacaaaatggcagacaaccttcctctaggaacactggactggtaagggaaaaacacctcatatgag

SEQ ID NO: 755742 - DNA, 579 bp, Homo sapiens
ctactttctgcagccagggtgtcttgatgagtgttcagctcctagcagagagggtagctcctctctgctaggcaattcatcctgacaagtgttcaggtatcagcagagagagtagcttttgtctgcaggcaggtcatcccaacatctgctcagctctggctgaacccagggcttttatgggcctcagaggggaggaggtgagcactgattgttccatgggcagccatggatgggcctggaaaagacaccacaagtttccactgcagtctatgggagcagcagcctggcccccagccttcaggccctccctggcctgaaggtggggcctcasgtgggacccactcccttccccccaggaacctgtctgcctcctgctgccattcatggcacccaggctgtacgtgccaaggggcacctgcaggccagtgccaaactgcccttatcaccccctcagcttccctcctgtgctctttggcacccaaggtccagaggcgggctgaagtggcagggggctggtgtgtcaacacttccctgagcatgtacacacctggctgggctgtgacagagctcaggcttgac

SEQ ID NO: 755743 - DNA, 535 bp, Homo sapiens
tttctttagaaatgattcaaaatatttatcagattcttaaagaggtccgtaatctaagaaagtttacaaaacaataaagaatatttgtttccttcaagctctaacattctgagactgtttttaaaaaatccatcaatcaatggagcagaacagaaagcccagaaatagacctaacacttatatagtcatttgatttttgacaaaagtgcaaaagccataaagaagggaaaaaaagtcttttaacaattttttttttttttttttcctgagacaggctctgtttctgtcactaagcaatcctcctacctcagcctcttgagtagctgggaccacagctgcatgycaccatgcccagctaattttttgtttttcatagagcatgggtcttgctatgttgtccagactcgtcttaaacccctggcttcaagcagtcctcctgcttcagcctcccaaaattctggatgacaggcatgagccaccacactggcaacaatttttactgaaaacaactggatatttatatggaaaaaaaatt

SEQ ID NO: 755744 - DNA, 562 bp, Homo sapiens
ggtttcaatctatcttggctgggaggatacgcacagatttgtggcagtgcctgaaagtccttgctcaacctttttaatatctgaacaaagcaatcaaacccgataagatctagcgaaggcaagatcaatcttctgtccccgggatggaagcttattagtctgtggcccacatcatcagagttattgtgccatgttaaatttattggtactatctcacctcattaaatacttaaatagacctgacaggacagaaaaacgggctttttaatttttttcctctctccaaagggagytggtgtttcccatgtcccagttcacctctgctgcagctgttggcaaagaagtgagaaagcctggccctgcgcagaaggttcgggccggctgcgtggcggctcccagggtcctcctgactctgacctgccttgggccagaagtgaagaaagcaccttggagtgtgtgtccatgagaaggaggtgaagaagaggcagagggcaaccatggcatttattctctttgccaagttacccaaatctgtgtgactttttacattttctaagagaaa

SEQ ID NO: 755745 - DNA, 584 bp, Homo sapiens
  misc_feature 35, 297, 322: n = A,T,C or G
ccatttcttccttctttgccactcaatttgcagcnctacattctctctgcaaaatatcttttgctcctaaatacagacggctcccaaatccatatctcctacctggactttttctgaatgacatctccagaacatatatttgttggaaaaacatttctttggtataccatgtaccaataacagtctatgtgctttataagtattgaccctaatttactctttttttttctttttttctttttttctctgaggtggagtcttgctctgtcacccaggctggagtacagtggcgcaatncctgctcactgcaagctccacctcntgggttctcaccattttcctgcctcagtctcccaagtakctgggactacaggcgcctgccaccacatctggctaatattttgtatttttagtagaggcggggtttcaccgtgttagccagggtggtctcgatctcctgaccttgtgatctaccctccacagcttcccaaagtgctgggattacaagcgtgagccaccgcgtccagccctcatttactcgtaacaacataacaactccatgaggtgggtgccattattatcct

SEQ ID NO: 755746 - DNA, 590 bp, Homo sapiens
ttggtatttgaagctgctgtcttttggatggggctttttgcttttctattatttgatgctcttgaggttttgactatggtataaattgggtttcatggattggtttcaattctgaatgcttttctggagccaaagctcacctcagcactcttgggctgcatgctgtaatcctgggggatgggggattagtcctgtggctttgctctctggccccttgagattaagcacctgctgtgctggaggtgctgaggtgttcccagttcacttgcaacaacactctggcaggggctgctggcaaaattgctccagtggggcagtgggagtctccacacacatgtgcaccaatggaggaggctgcaggcgagtacrcatcagtagggggaggctgagggtgggtgtgcactggcagggaaagactatgggcaggtatgcactgacagggggaggatgcaagcaggtacgtgctggcaggggaggtcatggttggagtgtgccagcagggggagacaatgggtggatgcataatggtaggggtccaccaggtcgttttcttactccaagtttcagttttgttaacctgtactataaaa

SEQ ID NO: 755747 - DNA, 598 bp, Homo sapiens
actcttgtccataattccatgattagttcacctttgggctgagatgtcccagcacaggtcatctgctagtagtgtgggcaagtttctaattcagtgagacccccaaattgcggtgttgtgatgatcattctcctagtgaactagatatggtgaagtaatagcatctatgctctatcattctagggtgatctgaccaagatttcttggtatacgatttagagaatattgctactctaatccacastgttcaaagaaagaactcatctcctcatacatccagtgtgcctctctttgatttcttatagggaacacccagacagcatgtaggttagttagttattttccttgtcgtacaggagatcagaaatgacagtggctcaacttgccagagaaacaagtatcctggaccacaaaaacatcgttaacctagaccttatagcctgttggtgttagtaccttcagcaggaggacgtactagacaatggaagaggttgtgaatatgcccagtacaaacctcgagggcagttcacattttgtgatagaagtgtctaattccttacccaatttcaattcctttttcttccttacccacgaacct

SEQ ID NO: 755748 - DNA, 598 bp, Homo sapiens
actcttgtccataattccatgattagttcacctttgggctgagatgtcccagcacaggtcatctgctagtagtgtgggcaagtttctaattcagtgagacccccaaattgcggtgttgtgatgatcattctcctagtgaactagatatggtgaagtaatagcatctatgctctatcattctagggtgatctgaccaagatttcttggtatacgatttagagaatattgctactctaatccacactgttsaaagaaagaactcatctcctcatacatccagtgtgcctctctttgatttcttatagggaacacccagacagcatgtaggttagttagttattttccttgtcgtacaggagatcagaaatgacagtggctcaacttgccagagaaacaagtatcctggaccacaaaaacatcgttaacctagaccttatagcctgttggtgttagtaccttcagcaggaggacgtactagacaatggaagaggttgtgaatatgcccagtacaaacctcgagggcagttcacattttgtgatagaagtgtctaattccttacccaatttcaattcctttttcttccttacccacgaacct

SEQ ID NO: 755749 - DNA, 598 bp, Homo sapiens
actcttgtccataattccatgattagttcacctttgggctgagatgtcccagcacaggtcatctgctagtagtgtgggcaagtttctaattcagtgagacccccaaattgcggtgttgtgatgatcattctcctagtgaactagatatggtgaagtaatagcatctatgctctatcattctagggtgatctgaccaagatttcttggtatacgatttagagaatattgctactctaatccacactgttcaaagaaagaactcatctcctcatacatccagtgtgcctctctttgatttcttatagggaacacccagacagcatgtaggttagttagttaytttccttgtcgtacaggagatcagaaatgacagtggctcaacttgccagagaaacaagtatcctggaccacaaaaacatcgttaacctagaccttatagcctgttggtgttagtaccttcagcaggaggacgtactagacaatggaagaggttgtgaatatgcccagtacaaacctcgagggcagttcacattttgtgatagaagtgtctaattccttacccaatttcaattcctttttcttccttacccacgaacct

SEQ ID NO: 755750 - DNA, 601 bp, Homo sapiens
gtaatattccactgtatggatataccacagtttgtttatccattccccagttaaaggaatctggataactttcagcttttgtgatcatgaataaagcaactatagacgtttacatgcagggtttcttttttgtttkttttttgttttttgttttttgtggttttttttgagatggagtctcgctctatcgcccaggctggagggcagtggcgtgatctcggctcactgcaagttctgcctcccaggttcacgccattctcctgcctcagcctgccgagtagctgggaccacaggcacccaccaccacgcccggctaatttttttttgtatttttggtagagacggagtttcaccatgttagccaggatggtctcgatctcctgacctcatgatccagccgtctcggcctctcaaagtgctgggattacaggtgtgagccaccgcgcctggccgcatgcaggtttttgtgtgagtataacttttcatttcttttgggtaatactcaggagtaggatagatgggcagtgatatggtatggatatttgcctcctccaaatctcatactgaatgtgatccccaatgctggaggtagggcctagtg

SEQ ID NO: 755751 - DNA, 602 bp, Homo sapiens
gttaatagttagagtaaagctgaaccagaagaggagggtcaacagcttttctttaaaattgtttgtttacattctgaatagtccttatttagaaaaggtcaaaactaagcttcaaatattacatttatcctcagtctgataaattaatcagaagaggtaagagtttagtggggaaaatcttattagcttggcctgatgagaaagtacaaggaacatatttgaagargaaacattaaagcattatgagaaatagaaatggtactaatggatcttgattcagtgtctggaccccaaagagaccaaaatcacttcacagatcatcttaaacacaacagaacagatgtccactaaactgtaacaacaacaaagaaaccatattgctgtatgtgatggcaaatagcaaagtaacatgggatctgctcaactgggctcaataactctatgcttggactttatataaaacaatgagatgaactgtgctccaagaagctaagggtgaaaaaaaaaaaaagagtccccagaggtgtttataaaagaaatataaatgctgtgatacaggatactttcagaaatcacaaaatatttacttcagcaaaaagaga

SEQ ID NO: 755752 - DNA, 463 bp, Homo sapiens
ttagagaccttaatgacagcccctctcatcacaggcccagaggcctaggaagacagaatggttttgtaggccagccccagggtccttctgccctatgcagccttgagacactgctccctacatcctggctattcccattctatccacggctcacagaagcccaggtacagctcgggctgctactttggagaatgcaagacataagccttggcggcttccaagtgatgttaacccwgtatgtgtgcagaatgtaagaattaagaacacttggcagcctctgcctagatttcagaggatatatgagaaagcctggttgtccagaaagaagcctttgtaagggcagagccctcatagatggctgcgtactagggcagtgccaaggggaaatgggaggttggagctcccacacagagtccccagtgggccactacctagtggagctgtaggaatgggactgctgccc

SEQ ID NO: 755753 - DNA, 565 bp, Homo sapiens
ggggttgtttgtttttttcttgtcaatttgtttaagttccttatagatactggatattagacctttgtcagatgcatagcttgcaaaaattttctcccatctgtaagttggcggttcactttgttgatagttttctttgctgtaaagaagctccttggtttaattaggtcccagatcccatttctaaatttttgatattgttgcaattgcttttggcatctgctcatgaaatttttgccagttcacgtgtccagaatggaatactatatagccataaaaaagaacaagactatatcctttgcaggaacatggatggagccagagaccattatmtttaacaaactaacacaggaacagaaaaccaaataccccatgttctcgcttactagtgggagctaaatgatgagaatacatgaacgcatggaggagaacaacacacactggtgtctatcagagtgtggaggttgaaaggtgagagaggatcaggaaaaataactaatgggtactaggcttaatacctgggtaagcgaatactttgtataacaaacccccatgacacaagttt

SEQ ID NO: 755754 - DNA, 565 bp, Homo sapiens
ggggttgtttgtttttttcttgtcaatttgtttaagttccttatagatactggatattagacctttgtcagatgcatagcttgcaaaaattttctcccatctgtaagttggcggttcactttgttgatagttttctttgctgtaaagaagctccttggtttaattaggtcccagatcccatttctaaatttttgatattgttgcaattgcttttggcatctgctcatgaaatttttgccagttcacgtgtccagaatggaatactatatagccataaaaaagaacaagactatatcctttgcaggaacatggatggagccagagaccattatatttarcaaactaacacaggaacagaaaaccaaataccccatgttctcgcttactagtgggagctaaatgatgagaatacatgaacgcatggaggagaacaacacacactggtgtctatcagagtgtggaggttgaaaggtgagagaggatcaggaaaaataactaatgggtactaggcttaatacctgggtaagcgaatactttgtataacaaacccccatgacacaagttt

SEQ ID NO: 755755 - DNA, 606 bp, Homo sapiens
  misc_feature 309: n = A,T,C or G
atcaattattatattagaccaaagataatttttctatctaaccttctttttaaggaaggagaatgtactaacttaagtggattaaaatgtagcatgtacttggtgaatttagaatttgtgagggagataggtaactccattctgaaggagcagcatttaacttttggcatgaactttggactgcttgcttgctagaattacattggcagatgattcatgtgatatttccagcagtagaatctgcaaagtatcctacccaatgtggttgcctaaacagttaaatcctgtgcaatcagagaactcccactngaccagtgattatctgtatgatatattctaatgtactgagcaactgtgtaaagatcatgtggattgattgttcattttactaacttcttaaagggattgagtggaaaaattatacattgcactgttcattgtactaamtctgctttttgataaaagcagaatgtggaatttagaaatgtaattttaattacttgttggaacagattttcttattaggagagaacacctttgaaatcagagagtgaatctaattctctaaaaaagtttaattttacagtcttttggaaatatattgga

SEQ ID NO: 755756 - DNA, 571 bp, Homo sapiens
tattgagaatttgtaaacttcaaaatgccaagcttctttatcttatataaatatatatgtatagagaatatataaatctggaatatgttatacttgtttataatgatgatcttaaaacaattctgaagtacatggtgatgaatatacttaaaataacttgtgaatatattttacaagtttattgaggaataagtggcatacaataaaatgcatatatttcaagtataaaatwtaataattttttatacaggcatataactatgagtccagaactacatctaaaaaatgaacatacctatcacttccaaatttccttctgctgtaccatctctctctccttctcctcccatccccaagcatacactaatctgctttcttgacactacagattacttagaattttatctaaataaaatttgtacattttgtctattttcttttacttgaaataattatattaaggtttatccatgttgtatcaatagttcattacatttattaattttttattacttttattgctgagtagtattgcattatatgacttgtttatcccctcacttgttggcat

SEQ ID NO: 755757 - DNA, 483 bp, Homo sapiens
ctctgtgcccagcccctccctcccaagcctgccctctgtacccagcccctccctccccggcctgcctctgagtccagcccgctctgtaagatgggaactgccatctttcatcacatactgggacccctggatccatgagatcctttcttaaaaagcaatgcatcccatcatttaaaagcggagtaggcagggcgtggcggctcacacctgtaataccagcactttgggaggccaagtcaggcggatcacctgaggtcaggagttcaagaccagcctgaccaacatggtgaaaccccatctccmcattaaaaaaaaaaaaaaaaaaaaaaagcaaaaaattagccaggtgtggtggtgggcacctgtagtcccagctactcgggaagccggggcacgagaattgtttgaacccgggaggcggaagttgcagtgagctgagatcacgccactgcactccagcctgggtgacagagcgagactctg

SEQ ID NO: 755758 - DNA, 590 bp, Homo sapiens
gtagggacacagactcctgggcggggatggcccctgtggcctcagcaagcagggagcaggtgtccctgaggcctgtgaagcctggcagtgtctttgagcaggtgtggtgaccgggagggaggatggtccagtgtggggtttgtgcgttttttttgtttttgtttttgttttttttcagagattgggtttttaggttaagtctctgctcattggggcattttagggcagaactctaakcattcattgtaaagtattttgataaaattaaggaaatcatacttgtcaccttagaaagtttaacacactttttcaaacaaggtgtcactattttgttgtctggtttaagaaaaaaacctgatacaggttgagtctcccatatccaaactgcttggaaacagaagtgttttggatttctgggtttttttggattttggaatatttgcacgtatacatgacgagatgtcttggggatgggacgtgagtaaacgcggaatccatttgtgttgcacatgcactgtgtacgcacaggcccaggacccggaggagctcagattcttgatagtcaccggcagcccactccatccccgagg

SEQ ID NO: 755759 - DNA, 590 bp, Homo sapiens
gtagggacacagactcctgggcggggatggcccctgtggcctcagcaagcagggagcaggtgtccctgaggcctgtgaagcctggcagtgtctttgagcaggtgtggtgaccgggagggaggatggtccagtgtggggtttgtgcgttttttttgtttttgtttttgttttttttcagagattgggtttttaggttaagtctctgctcattggggcattttagggcagaactctaatcattcattgtaaagtattttgataaaattaaggaaatcatacttgtcaccttagaaagtttaacacactttttcaaacaaggtgtcactattttgttgtctggtttaagaaaaaaacctgatacaggttgagtctcccatatccaaactgcttggaaacagaagtgttttggatttctggrtttttttggattttggaatatttgcacgtatacatgacgagatgtcttggggatgggacgtgagtaaacgcggaatccatttgtgttgcacatgcactgtgtacgcacaggcccaggacccggaggagctcagattcttgatagtcaccggcagcccactccatccccgagg

SEQ ID NO: 755760 - DNA, 620 bp, Homo sapiens
gccaccccgcgggactcaccccgccccgggaagccagacgagagggacatctggccccctgcccaggcccccaccagcagccaagagctggcaggcgctcctgagccccagggatcctgtgcgcagggtggccgggtggcaccgggacagcggcctgcccagggtgccacgggcactgacctggactttgacttatccagcgacagcgagagcagcagtgagtccgagggcacgaagtcctcctcctccgcctctgatggcgaaagcgaggggaaaagaggccggcagaagccraaggctgccccagagggagccggggcgctggcacagggcagttccctggagccggggcggcctgcagcaccgagtctccccggagaggccgagcctggcgcgcatgccccggacaaggagcctgagctgggtgggcaggaggagggcgagcgggatggcctctgcggcctgggcaacggctgtgccgacaggaaggaggcggagaccgagtcacagaacagcgagctgtcgggggtcactgcgggtgagtccctggaccagagcatggaggaggaggaggaggaggacacggatgaggatgaccacctcatctacctggaggagat

SEQ ID NO: 755761 - DNA, 614 bp, Homo sapiens
tgggtccataaaaatatctttcctgtccttttctgctgtttgctgacgaaatgcctcttcataaaaaatagctttaacgcctgagagttacagaagctcccctcagcgaggagtctcagaaaccacggaggttttaccaagtccctgtcggtgaacatcaacttgactgacggggcgcaagcttcaggagatgaagtgtcaataaggattaatacgaaggtagatcaatcacgctgtcatttcatagggcttcartttctttctgtaaaaacccgtcagatgtgattttccctctaaaattagaatcgtttttattcctttttccagttactaaaattacctgtatcgtctgggggaaaatacagaaggacagaaaaaagaaagtaaaaatcacctgacctgaccgtgcactgtcagcctgtctgtggccttccttccggaagtttctttatgcgtctgcccatggacggcaggtgggagcgcggacacctgtcgccctctcggccgctctgggacctgccctttctttgaaacgctgtgtccagggcatgacccccatagagacgtgggcctgggtggaggctgcagcttaagaggaagctctcggcgtcggg

SEQ ID NO: 755762 - DNA, 609 bp, Homo sapiens
atattcttaaaactcttagacatacagacatgtaggaatacttaaagacatgacatgcgtgcgtgtgcatgtgcatatgtgtgcacactgcgtcattgcatgtctgcctgtgtcagtgtgtgcatgagtctgtgtgtgcaggtgtgtgtgtgtcttagtgtgcatgtgtctgcatgtatcagtgtgtgcatgtttgggtgcatctgtgtgcaagtgtgtggtgtgtgtgcaaatgtgtgtctgtgtgtgcatgaatgtgtgcatatgtgtctacatgagtctgtgtagtgtaacgtgtttatgcatgtctgtgtgtgcatctgtgtgtctatctgtgtgcatgtctgtgtgcatgtgtctgcatgtgggtgtgtgsatgtgtgtaacgtgtctataatgtgttcatgtgtctgtgtgtatgtctgtgtgtgcctgtgtgtgcatgtctatgtgtgcgtgtgtccgtctacaggaatttgcgtgtgtgtaacatgtccatgatgtgtgcatgtgtctgtgtgtgggtgtctatgtgtgcgtgtgtgtaacgtgtctgtgtgtgcatgtgtctgtgtgtgggtgtctatgtgtgcgtgtgtgtaacatgtc

SEQ ID NO: 755763 - DNA, 609 bp, Homo sapiens
atattcttaaaactcttagacatacagacatgtaggaatacttaaagacatgacatgcgtgcgtgtgcatgtgcatatgtgtgcacactgcgtcattgcatgtctgcctgtgtcagtgtgtgcatgagtctgtgtgtgcaggtgtgtgtgtgtcttagtgtgcatgtgtctgcatgtatcagtgtgtgcatgtttgggtgcatctgtgtgcaagtgtgtggtgtgtgtgcaaatgtgtgtctgtgtgtgcatgaatgtgtgcatatgtgtctacatgagtctgtgtagtgtaacgtgtttatgcatgtctgtgtgtgcatctgtgtgtctatctgtgtgcatgtctgtgtgcatgtgtctgcatgtgggtgtgtgcatgtgtgtaacgtgtctatratgtgttcatgtgtctgtgtgtatgtctgtgtgtgcctgtgtgtgcatgtctatgtgtgcgtgtgtccgtctacaggaatttgcgtgtgtgtaacatgtccatgatgtgtgcatgtgtctgtgtgtgggtgtctatgtgtgcgtgtgtgtaacgtgtctgtgtgtgcatgtgtctgtgtgtgggtgtctatgtgtgcgtgtgtgtaacatgtc

SEQ ID NO: 755764 - DNA, 608 bp, Homo sapiens
tccttacatagatcaaacctgcttgtctcagcttctgtgacgatcaagcatccgacacctgccactgtggtttgccgttttcctgcctctccctagtggtgttctgtgatctttattattcaagttatctatcattttatctggggaattagttgagatctaagttgtgttcctttagaaaggatgtgtgctcacttctgcyggccactgaggacgcccccgtcaaccccattatccacttgaggtttctcagattatgcacatggcataaatctcggcttaggaaccagcttgttgtcactaattctcagaggacttttccccttcctttgcccaagctgaggccaaaacaggcaatttcccttactcatgtccttggcgtgaagggcctcgtccttgttcagtcttgcaccgagaggagagctctctgagctcgtggccagcaggtttcctgctggaagccttacctggatgctgggcaaagctgtcagaataaagttcaaggtggtcagggctctgcagggtccctcaagggagcttccctcatctaaaaacatgattcaacacagtgagcgattttcagttgtggggttcctagcagtgtctaa

SEQ ID NO: 755765 - DNA, 608 bp, Homo sapiens
tccttacatagatcaaacctgcttgtctcagcttctgtgacgatcaagcatccgacacctgccactgtggtttgccgttttcctgcctctccctagtggtgttctgtgatctttattattcaagttatctatcattttatctggggaattagttgagatctaagttgtgttcctttagaaaggatgtgtgctcacttctgctggccactgaggacgcccccgtcaaccccattatccacttgaggtttctcagattatgcacatggcataaatctcggcttaggaaccagcttgttgtcactaattctcagaggacttttccccttcctttgcccaagctgaggccaaaacaggcaatttcccttactcatgtccttggcgtgaagsgcctcgtccttgttcagtcttgcaccgagaggagagctctctgagctcgtggccagcaggtttcctgctggaagccttacctggatgctgggcaaagctgtcagaataaagttcaaggtggtcagggctctgcagggtccctcaagggagcttccctcatctaaaaacatgattcaacacagtgagcgattttcagttgtggggttcctagcagtgtctaa

SEQ ID NO: 755766 - DNA, 534 bp, Homo sapiens
gggaattggctcatatgattatggaggctgtgaaatcccacaatatgccatctgtaagctaaagaatcaggaaaacaagcggcataattcagttcacatctgaaggcttgagaaacaggtgtgggctaatgagggactgatgatatataagtcctagagtctgaagggccaaaataaaggagctctgatgcctgmgggcaagagaatttggatctcccagctcaagaagagaaagagtatttgcccttcctctgcctttttgttctattcaggtgctcaagagattggatgatgtcttcccacattggtgaagatggatcttttttactcagtctactgattcaaatgctaatctcttctagaaactccttcagtgatatatccaaaataatgtctttcctgctatctaggcatcccttagcccagtcaagctgacacataaaattaaccatcacagccagtggtagaactggaactaagtccattctgtttatccccaatgtttatacttttaactagtatacactcattaat

SEQ ID NO: 755767 - DNA, 494 bp, Homo sapiens
tcaacatcattgatcatcagaaaaatgcaaataaaaactataatgagatatcatcttaccctagaaaaacaaatgttggcgaggatgcagagaaaagggaaccttcgcacactgttggtgggaatgtaaattagtacagccagtatgaagaatcatttgcatgttcctcaaaaaactaaatattgagctaccatatgatccagcaatcccactgctgggtacatacccaaaagaaaggagatcagtacatccaagagatakctgcacttctatgcttgttgcagcattatttgcaatatccaagatttgaaatcaacctaagtgtctatcaacagacaaatgcaaaaagaaaatgtggtacatatacacaatgtagtactgtcatttgcaacaacagggatggaactacagaacattaagtaaaataagctaggcacataaagacaaactttacatgttttcattcacatgtgagatctaaaaatcaacacaat

SEQ ID NO: 755768 - DNA, 654 bp, Homo sapiens
atgaaattggacccttaacttacaccacacacaaaaaaatcaactaaaaatgaattaaagacttaagtgtaaaacctcaaattagaaatctacaagaagaaaacagtgaaaaagcatcatgacattaatcttagcaatgattttatgcacatgaaaccaaaagcgtaggcaaaaaaagcaaaataaacaattgrgatatcattaaactaaaagcttctgcattgcagaggaaattatcaacagattgaaaaggcaacctaaagaataggaaaaaaaaatttgcaaacaatatatctgataagggtttaatttccaaaacatataaggaactcctacaactcaacagcaaaaaaaagctaatcacccaatttttaaaatgggttaaagacttttaacagacgtttatccaaataagacatacaaatgacgaacaggtttatgacaagatgctcaaagtcactaatcatcagagaaatgcaaatcaaaaccacaatgatactgcctcaacctgtcaggatagctatcttcaaaaagacaaaaaatactggtgaagatgtggggatgttgccacccttctacaccattgctaggaatgccaaatggtgcagctgctatggaacacattatggtcattcctcaaaaagaaaatgaaaa

SEQ ID NO: 755769 - DNA, 584 bp, Homo sapiens
tttacctccttggttaaatttacaactaagtatttaaattttttgttgctattgtaaatgggattattttatttttctgtcagatagtctgttattagtatatagaaatgctatttagttttctatgttgattctatgtcctgtaactttactgatttcatttaccrgttctaacagttttgtgatagagtctttaggattttttatatgtaaggttatgtaatcttacatataaaatatagagacaatttcacttcctctattgctatgagtatgacttttatttctttcttttgcctaattcttctggctaggacttccagtactaagttgaaaagaagtgttgaagagagtatcattatcttgtctctgatcttcgaggaaaagctttcaaattttcaccattgggaatgatgtcagctacaggtttgttatatatggcctaacggtgttgaggtgcattccctttatagctaatctgctgagaggttttatcatgaatagttgttaaattttatcaaatgttttttctgcatctactgagatgatcataggatagttatctctaactttgttaatgtggt

SEQ ID NO: 755770 - DNA, 584 bp, Homo sapiens
tttacctccttggttaaatttacaactaagtatttaaattttttgttgctattgtaaatgggattattttatttttctgtcagatagtctgttattagtatatagaaatgctatttagttttctatgttgattctatgtcctgtaactttactgatttcatttaccagttctaacagttttgtgatagagtctttaggattttttatatgtaaggttatgtaatcttacatataaaatatagagacaatttcacttcctctattgctatgagtatgacttttatttctttcttttgcctaattcttctggctaggacttccagtactaagttgaaaagaagtgttgaagagagtatcattatcttgtctctgatcttcgaggaaaagctttcaaattttcaccaytgggaatgatgtcagctacaggtttgttatatatggcctaacggtgttgaggtgcattccctttatagctaatctgctgagaggttttatcatgaatagttgttaaattttatcaaatgttttttctgcatctactgagatgatcataggatagttatctctaactttgttaatgtggt

SEQ ID NO: 755771 - DNA, 641 bp, Homo sapiens
acagacttatgtgagaagaaaattaaattgctcacttttaagtgaaaaagtattgtgcttcttattttagcactttaatcaattttccttagttaatgatgaaaaggcaataagaataacatgctaatgatagagacaggagacagacaagggtcccctgcgaaaccccactttcaagcctaaaatagcctgaagtctgaaaaaccggactgctggccctggatgaagcctgccctttccccgactagttctctctgaataatgcccacctgcacgctgggagaatggggtggaaccaggggaagtttgccccatttgcagagaggagaagcctggcttcttcagttcctgtgtggtgtcctgggcttcaatctgtaagacgggagcctgttagcargactctctctccctttgctgagagttcctctttcctttttcccttttcacccaataaaccctgccctaatcaccctacaatatgtctgtgtgcctaaattttccttgtcatgtgacaagaacccacttttttctacaacactaacatgtgaaagtctctcttctagaaatatccaagaatatctagtcctttggagcttattatttagtccttaccctgtcattaggaaaaaaaaaaaaaaaac

SEQ ID NO: 755772 - DNA, 641 bp, Homo sapiens
acagacttatgtgagaagaaaattaaattgctcacttttaagtgaaaaagtattgtgcttcttattttagcactttaatcaattttccttagttaatgatgaaaaggcaataagaataacatgctaatgatagagacaggagacagacaagggtcccctgcgaaaccccactttcaagcctaaaatagcctgaagtctgaaaaaccggactgctggccctggatgaagcctgccctttccccgactagttctctctgaataatgcccacctgcacgctgggagaatggggtggaaccaggggaagtttgccccatttgcagagaggagaagcctggcttcttcagttcctgtgtggtgtcctgggcttcaatctgtaagacgggagcctgttagcaagactctctctccctttgctgagagttcctctttcctttttcccttttcacccaataaaccctgccctaatcaccctacaatakgtctgtgtgcctaaattttccttgtcatgtgacaagaacccacttttttctacaacactaacatgtgaaagtctctcttctagaaatatccaagaatatctagtcctttggagcttattatttagtccttaccctgtcattaggaaaaaaaaaaaaaaaac

SEQ ID NO: 755773 - DNA, 515 bp, Homo sapiens
caattttgatttgtgactttaaggatcctgccaactgaattcataacaagtctggtttattggattgtggagaatcattcctggtgacagagtattttcaagtaccaatttgttatgtccagtgctcaggttctctcattaaggaagggcacataagtyagatcttcctggcttcaaaatcagaaattatgctgattaggatgtacttattgtaccaccttttactcagtgagtcaaataaaacgagtatcattctcaaaagcatgacagtatttcaaaaagtggggcattcagaaggtaaagaatttgtctcatctatgagtctcctatggaaatatggcaactatgccaccaattctcctcactaggaagagaggcttgaaaatcagtgatataagacttccacaactccctctctgaaatggattatcagaattttctttgaggaagagaacaatgaaataaggtctccaaaaagtaagatgcaagagaaagtatatttgagaaagagggaa

SEQ ID NO: 755774 - DNA, 611 bp, Homo sapiens
aaaaaactgcatcaattaacaggcaaaataacaagctagcatcataatgacaggatcaaattcacatatagcaatattaaccttaaatgtaaatgggctaaatgccccaactaaaagacacagactggcaaattggatagagtcaagacccattggtgtgctgtattcaggagacccatctcacatgcagagatgcacataggctcaaaataaagggatggaggaagatctaccaaggaaatggaaaacaaaaaaacaaacaaacaaaacaacaacaacaacaacaamaaagagggttgcaatcctggcctctgataaaacagactttaaagcaacaaagatcaaaagagacaaagaaggccattacataatggtaaagggatcaatgcaacaagaagagctaactatcctaaatatacatgcacccaatacatgagcacccagattcaaaaagcaagttcttagagacctacaaagagacttagactcccacacaataataacgggagactttaacactccactgtcaatattagacagagcagcaagacagaaaattaacaagaatatccaggacttgaactcagctctggacgaagccgacctaatag

SEQ ID NO: 755775 - DNA, 562 bp, Homo sapiens
actcttatttagggccagcactgtgcctggcatcagcaaatgattaaatcattacttctggatgaatatatatacacataagttatatataatgtattatatataatagattcattcaaaatgattgatacactartataatttaaaatatatagtctatatattataattcagtgtatatatttagcatatatttttccatcagtatactatttgtatagcctttgttatctttatataaatagtattgttgtttctcaagctgttacagtttgtctattattgactaacaaatcacccctaaatttgatgacttacagctacatcaaggctacatctcttaccactttgaaggatcaatgatttgagaagccgagtggttattgtttggggtccctggcacaattgcagtcagactgtggcttaaccaggaaccaggaggttgaggcagtgggggatggctggagatctctgtgtagtctcaagtcctctctgtgtggtctttccccttgggctactttgagcttcctcacagcatggcagtctcagggaagtcagacca

SEQ ID NO: 755776 - DNA, 496 bp, Homo sapiens
atttttgactggtggctttatagtgacttacattttttcttgtgtttctaaattttctatgaacaattcaagtactactagtaaaattaatccccatcccactgtatgaatggtaattcccatcccattatagcctgtttgatttatcatttgtgtttacaagtctaaaataactgtgattttttatcctgccataggcaggatggcaagcactactcttcatatacttttggtaccagcatcagttttcattcaacagtactgttcaraacactttgttggtgggcccagcttttcaaagccctcttcaatctcttgccaccctccacaacagacacagggcttcaggccagctgtgtccctaatccgcccacgtcccagatttgggtatggtttccccgcccctccccgctttcttccagtctcatctctaccaggtcatctgaggcctcatctacactccctggccttccccactggtcaccacctaatttca

SEQ ID NO: 755777 - DNA, 392 bp, Homo sapiens
tacacctgtgacccatacacctgacccatacacatgcacatccgtacacctgtgttcatacacgtgcacacagtcaaacagcttggcttgggagaaatttaggcaaggctgcccgagaccgggctcatttcacggacgctgctgccacctaccggctatatcttgcattagcayccttgcttagttcctgctctattccattctgtcctccattgctcatccctggaagctgtgcattggaattggttcctgaaagagggacacgaacaagggaggtgagtggggtggggaattatcattgactaactgtccgttatatgtcaggtactgctgtcccttacagctgttatatttgttttctcaatccatgtgccttatgcagtgcttggcca

SEQ ID NO: 755778 - DNA, 581 bp, Homo sapiens
ttttccttctggttagattaaggttatgaattattagcaagaatactataagaggagaggggagcaagaggtccaaatagaagcctccattaatcatcctcactgcaggaacaccaaattgaaaaactattcacaccaaaaaagcaccttcataagaatcaaaaatcatcttaggcagcagttcagccacagtcaggtagagcatcaagcrgtctcctggggtccttgattctaggccttggctcttggaaagtaatgttggacctgccctgggccagaagaaagcccactgccctgaagggagagtcctaggcctggcagcatccaccacaaactgatggaagaaccctcttgggccttaaataaacatcagcagtagcctggcagtactcgccatgagcctggggtggtggtggccatggggagaactccttagcttgtggaaaggggagagaagagtgggaagaacttcctcttctggctccggtgccagctcagccacagtagaacagagcaacagatagattcctaaggttctagactccaggccctggctcctgcttggcatctctagatccacc

SEQ ID NO: 755779 - DNA, 670 bp, Homo sapiens
attaactgggcgtggtggcaagtgcctgtagtccaagctactcaggaagctgaggcagaagaatcacttgaacccgggaggcagaggttgcagtgagctgagatcgtgccactgcactccagcctgggtgacagaaggagactccatctcaaaaaaaaaaaaaaagaaaaataggatctaagaatgaggtcatgttcyaaggaataaaggtgacctctggttgctgaaaaaaatcaagtaatacattctgccacatagccctcagaaagactgcagccctgcccaaaacttgatgttagccctgtgagtttcatttaaggcttctgaactatagaactgtaggattaacggtcactttattgtaagatatgaagtttgtggtaattggttacagcagcaagaggaagtttatattgtaagtgtatcatcaaaatgagaaccataatttacaactgcttttaatactgcacttggatgtttgaaatcacgtacatggaaatgatctctatgtgcatgagggaggatagcaaattgatgccaaaataatgcaaatgcaaatcttgcactcatttctatgtaggtttcatttaatctttgaaattaaaatgaaattaaaagattgtgatcttttgatgaaattgggctaaaatgaacaataacaaaataagaa

SEQ ID NO: 755780 - DNA, 670 bp, Homo sapiens
attaactgggcgtggtggcaagtgcctgtagtccaagctactcaggaagctgaggcagaagaatcacttgaacccgggaggcagaggttgcagtgagctgagatcgtgccactgcactccagcctgggtgacagaaggagactccatctcaaaaaaaaaaaaaaagaaaaataggatctaagaatgaggtcatgttctaaggaataaaggtgacctctggwtgctgaaaaaaatcaagtaatacattctgccacatagccctcagaaagactgcagccctgcccaaaacttgatgttagccctgtgagtttcatttaaggcttctgaactatagaactgtaggattaacggtcactttattgtaagatatgaagtttgtggtaattggttacagcagcaagaggaagtttatattgtaagtgtatcatcaaaatgagaaccataatttacaactgcttttaatactgcacttggatgtttgaaatcacgtacatggaaatgatctctatgtgcatgagggaggatagcaaattgatgccaaaataatgcaaatgcaaatcttgcactcatttctatgtaggtttcatttaatctttgaaattaaaatgaaattaaaagattgtgatcttttgatgaaattgggctaaaatgaacaataacaaaataagaa

SEQ ID NO: 755781 - DNA, 686 bp, Homo sapiens
ctttaatttgggataatcaatatgattattaatattattggattaccaaatgtgcaaacacactttcatccccaaggtggatattttttttatttttttttgccaatttcttgtcttactgtttcaaatattgttggattttatttttattttatttggcattttagtatcaacatttgtaattgagatactctacatattttttcttcaatatctggtgggttttataattactgctgtattggatttgtagtagacattcacaaaaattattcctgtatgttttatagctgtatgagggaaactaatatattttacccctaaatatatttccttgatatatatcaaaatggctattgagaatggctggaaatgcaaagttagctgcaaagctgtcttggggagatttgcatcggtagagaatctgccttgatgcagccaggctttctctgaggtctkcccccttgtctggatctaggaaagtttaactgagagtctgaggtctccaaaggtctgaaagaaacattttctgtctattctctctgaggactgctcccagtgaggttccacctatgtaatcagtccacagttgctagcgggtgtcgttttctcacataacctttcttttttttccctgtgatccaagaccccattatttttgtaaacttcatgtggtagataagctt

SEQ ID NO: 755782 - DNA, 575 bp, Homo sapiens
gagtcaacgaatggaatcaaatggaatcctcgaatggaataaaatggaatcatcatcaaatggaactgaatggaatcatcgaatgcactctaatggaatcatcattgaatggaatcgaatggaaccatccaataaactcgaatggaattatcrttgaatggaatcgaatggaaatatcgaatggaaatgaatggaatcatcatcgaatgaaatcaaaaggaatcatcgaatggactcaaatgtaatcatcattgagtggaatcaaatgcaatcattgaatggactcgtatgaaatcatcatcaaatggaatagaatggaatcctcaaatggaattgaatggaattctcgaatggcatcgaatggaatcatcatccaatggaatcattgaatggaaacgaaaggaatcatcatccaatgaaatctaatggaatctttgaatggcatcgtaaggaatcatcatcaaatggaaccaaatggaatcatctagtggactcgtatggaatcatcattgaatggaatccagtggaatcatcgaatggacatgaatgggatcatcataaaatggaatcgagtg

SEQ ID NO: 755783 - DNA, 610 bp, Homo sapiens
tgtctggggaacagtggcgtgacttggcactgtgttgaggcatcaaatgaatgatatctggggagaggaaggcaggccctagggacaggtcctgcagggcaccggggcagtctcaccatatctcaacccgggtccctgtgctcactggggccatctcttctcttctgcargagcagagcctcacccagggcaggagcagagggaggaggcgggcactgcgggcgttctgggctgagaggggtggggccagatgtccaggacccgccggtgggtctgttcacaccgtgaccttcagcagcatcacaacactctttcatgtttgaaaagtataattgtcacaagctaatcatttgtgagttattgagtgaattaaagatagatgaatcgtagctctgaagcctggcaaagctgtgcagagcctggctggcgtgccgctcagcatctttgttgctccttgcaggatggtgtggttccggcttagaccccctctcggagcctgacgtggcctccagccccctcacgctggactcagagccactggcaacctggagactcatggctgcccatcgggagccaccagggatcccggtcattacagcatgtcttgaaa

SEQ ID NO: 755784 - DNA, 610 bp, Homo sapiens
tgtctggggaacagtggcgtgacttggcactgtgttgaggcatcaaatgaatgatatctggggagaggaaggcaggccctagggacaggtcctgcagggcaccggggcagtctcaccatatctcaacccgggtccctgtgctcactggggccatctcttctcttctgcaggagcagagcctcrcccagggcaggagcagagggaggaggcgggcactgcgggcgttctgggctgagaggggtggggccagatgtccaggacccgccggtgggtctgttcacaccgtgaccttcagcagcatcacaacactctttcatgtttgaaaagtataattgtcacaagctaatcatttgtgagttattgagtgaattaaagatagatgaatcgtagctctgaagcctggcaaagctgtgcagagcctggctggcgtgccgctcagcatctttgttgctccttgcaggatggtgtggttccggcttagaccccctctcggagcctgacgtggcctccagccccctcacgctggactcagagccactggcaacctggagactcatggctgcccatcgggagccaccagggatcccggtcattacagcatgtcttgaaa

SEQ ID NO: 755785 - DNA, 610 bp, Homo sapiens
tgtctggggaacagtggcgtgacttggcactgtgttgaggcatcaaatgaatgatatctggggagaggaaggcaggccctagggacaggtcctgcagggcaccggggcagtctcaccatatctcaacccgggtccctgtgctcactggggccatctcttctcttctgcaggagcagagcctcacccagggcaggagcagagggaggaggcgggcactgcsggcgttctgggctgagaggggtggggccagatgtccaggacccgccggtgggtctgttcacaccgtgaccttcagcagcatcacaacactctttcatgtttgaaaagtataattgtcacaagctaatcatttgtgagttattgagtgaattaaagatagatgaatcgtagctctgaagcctggcaaagctgtgcagagcctggctggcgtgccgctcagcatctttgttgctccttgcaggatggtgtggttccggcttagaccccctctcggagcctgacgtggcctccagccccctcacgctggactcagagccactggcaacctggagactcatggctgcccatcgggagccaccagggatcccggtcattacagcatgtcttgaaa

SEQ ID NO: 755786 - DNA, 610 bp, Homo sapiens
tgtctggggaacagtggcgtgacttggcactgtgttgaggcatcaaatgaatgatatctggggagaggaaggcaggccctagggacaggtcctgcagggcaccggggcagtctcaccatatctcaacccgggtccctgtgctcactggggccatctcttctcttctgcaggagcagagcctcacccagggcaggagcagagggaggaggcgggcactgcgggcgttctgggctgagaggggtggggccagatgtccaggacccgccggtgggtctgttcacaccgtgaccttcagcagcatcacaacactctttcatgtttgaaaagtataattgtcacaagctaatcatttgtgagttattgagtgaattaaagatagatgaatcstagctctgaagcctggcaaagctgtgcagagcctggctggcgtgccgctcagcatctttgttgctccttgcaggatggtgtggttccggcttagaccccctctcggagcctgacgtggcctccagccccctcacgctggactcagagccactggcaacctggagactcatggctgcccatcgggagccaccagggatcccggtcattacagcatgtcttgaaa

SEQ ID NO: 755787 - DNA, 621 bp, Homo sapiens
acacaggtgccctcagccacacctgggagccacgccacctacctgtccccgtgaccaggcgtggctgtgatctccatgccccctcttatgcccacccgcgggtgtcgccatcttggatgtgtggccactgtgggcctgaccacgctccctggcaggagaaattgtgacgcctcccgcatctccatgatgaatggtgtgttccatacctggagctcccgagaggaggtcgccttggaggcggcrtggcctcccaggccggagggaatgaggctgagatttatgaaatggcaagaagacaccaggggcaggagatttagggaacgtgtgagtcccacagctctcaaccaaagaggctggtacgaaaaggggggaaagtccatctctgcaaggaatcagtggcaacagtcaatctcagcgcttcccggggagaaaatagagccaaggaaggcggggatggaaagaggaaggagggcagtttgatccctggaatttaaacacacgcctcagagctcaagactgggcccaaaacagatacacacactcaactgaaccaagcaacacacacccaagctgagggagcaacacacacccaagccgagggaacaacacacacacacccag

SEQ ID NO: 755788 - DNA, 518 bp, Homo sapiens
agtctgtgaccagaaccaggactcagagtgtgaccaagggcaargctgtttccacggtcccttccaagagtgggacatttctgcaaaactggaagaaaattcgggaccagcaggaccttccaatggccgtgttttctctatgtccactgagggagcaggagcctggctcggcccttctggcagggcctcctgactctcgtcctcctccctcactcccaccctcctggatggacctgcctcttgggccttgaaaaggagaaatgagctgccagcacctctctgcccatctcttccctgcccatctcttccctgccattccacactgtaagctccaactcattattccccttcccggcaattgtgagactctcaaccaattcatcatgattcccacaaaaccctgagccatctctgggctgtgggataagagggaggacgctgagggctcacagggggtccagccatgggggcagcaacgccaagacactggcccaggatccagcctgcattgcagcaca

SEQ ID NO: 755789 - DNA, 554 bp, Homo sapiens
cagtcctctccccaccaagccggctgttcttggagtccctcggcttccagcttccacgccaggaagcctgcctaaattgtcctgaccacgtagccaagctgacttcctggacttccagagtacagatggactcagcctgatgctgttacttaactgtgtctggaatgtccgtctcatccctgtagtcacactgtaatctctttagagggattggtaagaaggcatcaagattcaggctgtgaacagaatcagggctctgtcagtggccaggatcagggctcagtatataaggggatcagtgcccagtctataaccagggtaacagttcagcctatgaccagggctcagtctgtgaccagaaccaggactcagagtgtgaccaagggcaaggctgtttccacrgtcccttccaagagtgggacatttctgcaaaactggaagaaaattcgggaccagcaggaccttccaatggccgtgttttctctatgtccactgagggagcaggagcctggctcggcccttctggcagggcctcctgactctcgtcctcctcc

SEQ ID NO: 755790 - DNA, 549 bp, Homo sapiens
gatagcaaagctgtcacagagctagaaaaagctccagcctgccatagtgctggggacaaggattaggggtccccagcatcccaggtcatccctgcctgggtgtacctggctcctgcagtgagtgggcagcagtggaccggggccttctgagctgcaccctcatcagtcctggtacccagaactttgagggctgggggatctgcaggctgggaccccagcagcagcaccgaagcagcccctggaagggtttgaacagggcctggcatctcagaaccatccctgggtcacagagagaccccctcctctctgacasacagcccagcatgcttgattaacagggcctcgagctgtttcctatgacgtctgctaaaacctgatcatgccctcatttattcaactcctcagctttcatctgccacccactactcgggcacatggggggttttggaagtgagcgctgagtcttctcctctccccaggcatgcttcctggagggaacctgaaaccactgttgtcccccgagggcaacacggttcttggcaggcaggc

SEQ ID NO: 755791 - DNA, 549 bp, Homo sapiens
gatagcaaagctgtcacagagctagaaaaagctccagcctgccatagtgctggggacaaggattaggggtccccagcatcccaggtcatccctgcctgggtgtacctggctcctgcagtgagtgggcagcagtggaccggggccttctgagctgcaccctcatcagtcctggtacccagaactttgagggctgggggatctgcaggctgggaccccagcagcagcaccgaagcagcccctggaagggtttgaacagggcctggcatctcagaaccatccctgggtcacagagagaccccctcctctctgacacacagcccagcatgcttgattaacagggcctygagctgtttcctatgacgtctgctaaaacctgatcatgccctcatttattcaactcctcagctttcatctgccacccactactcgggcacatggggggttttggaagtgagcgctgagtcttctcctctccccaggcatgcttcctggagggaacctgaaaccactgttgtcccccgagggcaacacggttcttggcaggcaggc

SEQ ID NO: 755792 - DNA, 549 bp, Homo sapiens
gatagcaaagctgtcacagagctagaaaaagctccagcctgccatagtgctggggacaaggattaggggtccccagcatcccaggtcatccctgcctgggtgtacctggctcctgcagtgagtgggcagcagtggaccggggccttctgagctgcaccctcatcagtcctggtacccagaactttgagggctgggggatctgcaggctgggaccccagcagcagcaccgaagcagcccctggaagggtttgaacagggcctggcatctcagaaccatccctgggtcacagagagaccccctcctctctgacacacagcccagcatgcttgattaacagggcctcgagctgtttcctatgacgtctgctaaaacctgatcatgccctcatttattcaactcstcagctttcatctgccacccactactcgggcacatggggggttttggaagtgagcgctgagtcttctcctctccccaggcatgcttcctggagggaacctgaaaccactgttgtcccccgagggcaacacggttcttggcaggcaggc

SEQ ID NO: 755793 - DNA, 600 bp, Homo sapiens
ccagatatcccctcagcacagccaactaaatgccaggagcttttgtgtattaggcactttatgtttgtgaactaattgtaaactcacaacaaacatacaaatccttccacttatagatgggaggactgaagctcagagaggttaggcaacttgtctgaggttgcacagtggtgactggaacggggcttgaacccaggccccaggctccaatgctcttggaggttctctatggttcttgtcccactgctgagaacaaacacagtgacaaacagattgagaactgaccactctacagcacccagaatgccactgacagagccagagctgaaggarcctcatgctccctcagagacaaccccctagctcagaccacaaggctgctaagtacaccacaggccaccccaagccagaagattccttcacccgccttcaagggcccagtatatcctgcgcctgaggccagcagggatgcctgtgtctctactaggaacaggtaagaatctttgtttgtgagctgattcagcttcaaagagatctctgggggccaaagaggtgggcccagggcttcccaggcaaccatggggaagaaggggagagaaa

SEQ ID NO: 755794 - DNA, 596 bp, Homo sapiens
cctgagctcactcgggtcatccccagctccagcagacattccaggcctggggcatggagatcaagtctgaggatgtcgcccctgacctcccaagcctgggactcgtgtcctgccagcacctgctcctgggatccacgtscctccaaatacccacctcactggccagcacttgagtgtgtccaactccaggccagctaagagcaagccccttagctcttgctgccaagtcatgacaggaaagtgagcctgcctgggagccatgctcacacttgccagggcagaaggagaggatgcgggggcagaggtgagggagtgagggtgtggggatgagtcccagcccctgcgcctcacgctgagcagctctgctgggctgcctgtcctctctgagcctcggtctccactggctgctcgtgaacagtatgcctgttccctggctcagctatgaagggtgtggcccgttccctgccctgaacaggagtgacctctcactgcctctcagcccagccaagtcctaaccaccctgcgggccactgcctaggtgtccccactcccaggaagccctccctgactggtcctgctgtggccatctttccctc

SEQ ID NO: 755795 - DNA, 633 bp, Homo sapiens
cggcttccacccaccgcagctccaatcagcctcccctctggagcctgattaggacagtcagttggagggaagctgtaggagaggcatcgcccggctgggagggagggtgacatgtgggctcccgtcaaacgcgtcctcctcgtgcccgcgcctgggctgttgaagagcagttgggagctggcgtacagggtggagagcagagcagcttccgtgggagaaggggctcttctctgggcaatagagagacacggctctgccgcctcctcatccagagtggggctgaggggagaatgagagggtcactttttccctgcagaggaggctgtcgggcagacagggaactggcctccaccgtctttgtcatcatgacgaaggccacccaacctcctgcgtcctctccccatcagccctgccctccccctgggctgggtcatggtcctgacctgtgggctcaggtggcttcagattgtctcccttcctgggcatctcycagcctggcttttggtgcccccagaagccatttggaaacaggatttccacataggaggtcaagtcttggaagcctgtcaggcagagggggtacaggagtcactgagtttaggctcagagtgtcctcggatggatggggtggga

SEQ ID NO: 755796 - DNA, 595 bp, Homo sapiens
gtccttcatgcagtcggctggtcctgtgtggggctggttcctcctggggctgcctgcccacctccagcctccagcaggtgggagtcctcctgggtccaggctgtcctggtgggacaggagggcagaggggaagcccgggaggaagaggctgcaggagtggggtccctgatactgccccatcgccaggaaggcctttgtctttcatgagctccatgcaggaagaaggcatgcagctgagaggccaggcctggcgtgtcctcagggactttgtgtggcagccacgggtgcctgctcacggacgcacctggctggccccacccaggcatagtgaatcagaccccaggcaatcccagtgacctctggagcctgagagccctgktgtagagaatgcaggacctggccttgctccgcctgcacacatgtgtgctgtgcacatgtgaaggagagccacggcttctgtacaatgtatgtgtctgtgtaacacgtgtgcccagcatgtgaaaggtctgcgtgcttcctgggctgtgcatgtggagcactggctatgacaggaacacacaacggacatggagtttgcaagtgtgtgtgtgctgtg

SEQ ID NO: 755797 - DNA, 546 bp, Homo sapiens
ccttgtctctacacagagcctgtacagcaggaccatggaggcgctggacttcatgctgcaaagcctcatcatgcagaaccccaccgccgacgagctgcatttcctgctgtcggtgaggctgcagggaggccagtcggctggggccgaggggtcctcagcctatggccagactccaaaggagggcatctcagaggagacarggcgggacctgggggcttcgagtggtccaggaaccaggaggggtgagggccacccgcacttagggatcacagtggtttggggcactggggagggagagacagcaggtggcctggtagaaagagggctgataggccaggcacagtggcccacgcctgtaatctcaacactttgggaggccaaggcgggtggaccacttgaggtcaggagttcgagaccagcctggctaacatggtaaaaccccatctctactaaaaatataaaaaaaaaaaaaaaaattagtcaggcatggtggtgggcacctataatcccagctactcaggaggctgaggcaagagaatcgcttga

SEQ ID NO: 755798 - DNA, 589 bp, Homo sapiens
tgtagtcatagccaaatatgccactctacttccactagctccttcataatgaacttggaattatcttctgataatgcacttcttttttaggaatatttaagactcataaatttcagaatcaaatcagactacttaatccaaaaatggccttcctatrccaccaggccctctgaaaatgcccagtctttttttaaaaaaatcacactgtacccctttctctgctaataaattcacatagcagcagtacctcaatacatattctacatgcttttcttctcacttaccccaaccttcccctttggcttatcctattttatttatttttttttaagaatgctctttcctttcacatttctatacgttaatgcattatcattcagggtccatgtgctatgatttggatgtttgtcctcttcaaacctcatgttccaatttgattcccaaggtggcaatgttggaaggcagggcctggtaggaggtatttgggtcatgtgggtggattaattatgaaaagattaatgccctctgtcaagaatgagggagttcttgctgtatttgttacttgagagctggctgttaaaaagatcct

SEQ ID NO: 755799 - DNA, 522 bp, Homo sapiens
gttgctaatcatctgaccttggggagattattttttcttatctgggtgtgcctgatataatcaaatgggcttcattttctcaaaaatagaaaagggaggtaggagagttcatggagagagatgtgaccagggaagaaagacacggagagatgcagtgttgctggctttgcaggggaggaaggagaggcatcagctgggtgtactttggaagcggagagtggccctcagctgtcagccagcaaggcgatgggaacctcagacctagcgccgcaaggaaccaaattctgccgataatcagcctgaatgataaaaaaaaaaaaaaaaaaaaaaaattgattcttccctggagcctgaaraaaagtgcagcctgtggacactctgatttttggcctgtgaaactttaagaagcgactcaactgagcccaccacacctttaacctataaaaactgtgagataataagtttatgttgttttgagtatggacgaataaagaaaaaaataataaagcataaaataaatca

SEQ ID NO: 755800 - DNA, 522 bp, Homo sapiens
gttgctaatcatctgaccttggggagattattttttcttatctgggtgtgcctgatataatcaaatgggcttcattttctcaaaaatagaaaagggaggtaggagagttcatggagagagatgtgaccagggaagaaagacacggagagatgcagtgttgctggctttgcaggggaggaaggagaggcatcagctgggtgtactttggaagcggagagtggccctcagctgtcagccagcaaggcgatgggaacctcagacctagcgccgcaaggaaccaaattctgccgataatcagcctgaatgataaaaaaaaaaaaaaaaaaaaaaaattgattcttccctggagcctgaaaaaragtgcagcctgtggacactctgatttttggcctgtgaaactttaagaagcgactcaactgagcccaccacacctttaacctataaaaactgtgagataataagtttatgttgttttgagtatggacgaataaagaaaaaaataataaagcataaaataaatca

SEQ ID NO: 755801 - DNA, 541 bp, Homo sapiens
tattcataaaaactccaattagattatggaaatatatgtgaaaagcaaatcaaaatgttttcttagaaaataatgccagagaatattctcatgaatttaggataagggcagtttatttataattgaaatgcacagagcaatcatcatgagcacattaaaattaagaaatcatgcttatcaaataaatagcatcaagaacktgaaaaggcaagccatacaaagataaaagatgtttgctaaatatatgaccagcaaaagattagtgggtgccagaggtcagaaaaccttttctgtaaaaggccagatagtaaataattcagactttgcaagccatacagcttctgtctcaactactaaactctgcccttgtagcatggaagtaagtgtggctgagttttaataatactgcattcaccaaaatatggcaaatcagatttggcccatagtccagagtttacccattattggtgtatagaatatataaaaggttgcttcaaaacaattaaaaaacaattaaaagactggcaacccaaaataaaga

SEQ ID NO: 755802 - DNA, 482 bp, Homo sapiens
agacaaaccggggacatttaggaacaatggtgagaagaaaggagtagatgaccctcaactggctttgaatttactacttttcctgcctttggccgctggtgggagatgcagggtgcccagtggccttcgcagactcgcagatcccatcccaggaaatgcacgggccggtgtggccaggacagaacagagggaccactctcagtccagccctccctgcaggcggctcgccagctattccttctggtcttcggtttgcaggagggcaagagggtttcccgcgccctggaccatccgggcgtagtcccggcagcaaggccttstttccttgctagcctgggcctgccgcagacagaccccagagggagccgcgcccagcccgctgggcggccccggcttcccgcgaccccctccagaccctgggcagaaagagcgccctgctgtcccgacagagccactgtgcttttgagggatcctgacaccta

SEQ ID NO: 755803 - DNA, 468 bp, Homo sapiens
acctaaactttcagaattcaacaacattttctctttccaatgtccattaaacatatttctgttaagggaaagtgaggaatcgatcaaatatttaacaaaagttataatactagtaataagaaggcagccatttgcctagaactttataatttttgaaaacactctcccatatcttttttgtctcaatagaacatttgctggtagtttttyttttttctcaatctacactgagttaacacttgtataacccgcatactaagaaacagaagactatagatggaaagctccagttcatacagcttggctgcctggatgtacagaggaagatcaaggtcttgtcaagatgatgtcacttgttgagatggtgtgtgaatgaatggcttgtcaagatggtgtaagaaccagccttggaaccaactttgtgattcgagttttcttggtttaaaaaaaaaaaaaaatccaatgaca

SEQ ID NO: 755804 - DNA, 620 bp, Homo sapiens
ttgtgggaaggatcctgtgggaggtaattgaatcatggggacgggtctttcccatgctattctcatgatagtgagtaagtctcacaagatctgattgttttaaaaaggggagtttccctgcataagctctcttctcttgtctgccatcatgtgagaagtgcctttcaccttccaccatgatcatgaggcctccccagccatgtggaaatgtgagtccaataaacctctttcttttgtaaattgtaaattgcccagtctggggtatgcctttatcagcagcgtgaaaacagastgatacagcggctaagtccctcagctgtactgggtcttgtgacagtagctcacatattttacagagaaacttcttacaaagaaattacaactttctcacttccccttgaaaatactgaagcaaaagaaaaacttaataacctacagatatgttctgaaacaaaggcagaatttaactgctcttatacacaatggagtcatgatcttttgttaaagtcatccacctggaaaaataaaaacatgatttagaccttttctgaacctgttctttgcctgttaacctttagaaaatgaattaaagctgtgaaaggtgctgagttaactgctac

SEQ ID NO: 755805 - DNA, 514 bp, Homo sapiens
gtatgtttgtgtgagctaaccggcccttccactaaccccgcccctgtcagcctcccctcctcgtgtgactccagaggaagagtcccttgccctggcctggcctctggttcctcacctgaaaaggtgaaggggattgtaccgcagcatcccaactrtctccttcagcaccgagtggctgtctgactcctccggtcagaggtaccagaataggctaaatatccccagcagctgccatcccagcgggtgggatgagagcgagcctgagctctgctcccttgatctcctctgcgtctctgctggatggcaggggtgagctggagcttccctggaggctgccacatgctggactcccccaaagtgctgactcctgagcctctctgctcgttttctatgcattgaacttcaaacaccagagaggcactcaggcagcaagacgggtggatttggccattatgttctcgctctcctttttcccttcatctccctcaagacaggattatgggttgcacctatt

SEQ ID NO: 755806 - DNA, 669 bp, Homo sapiens
ggatggagacaagagaagggaactggggaagggagagaaaagtaaagaggggcaagtgtgaggtctgcatgaagaggctcactgatgtccttgcctttccctgttccagccccatcccatacagggcacatagcccaaggctgsatcccacaccaagacaggagatggaactgagatagaatctgaggccagagtggatcacagtgggaggggggctgtgacttgcatggagtggctgcaggagggctggggtggagtgggagagggaagcagggtcccacgatgttcctgaaccacaggccctccccacaccctgactatgccccactgaggctgaagccttgcaagtcatgtccacccctagggaaaaaagcaatgcagtcaaactatcaatcaatcaccaaaagcaagcaagacatttcctctgttcctttttggggcctcaagaggattgggcctgggacacagacacacagattcactggcaggaacacagaaaggaacccacaaggatggcattgtggcccctgtccatactactaatccagacttagatttgtccacatctatatggacctctgcattccgtctactcacctgcaccttctctcatgagcagacacgcaccaagaaacacatatagaaatgtgagaggatccccaacaccta

SEQ ID NO: 755807 - DNA, 607 bp, Homo sapiens
agaggacaggaccgaaggctccccactctgcaccaggatgggcacagcccaggatggaagggacttgctgaggccaggcacagccaagctttggagtcgcacagagggctgaattcaaaccctagctctttcactgctaccttgttgagcttgggcatcttaagtaatcactctcagcctgggagtctttcatacatggtaggcggtacagaagaatggttaagagcatcaatgctggagttacctgyctgggtttgattacaagctctgcctctttctcaactggttgtctggagaaagttgcacacctttcctgtgcttcatttttgtcatctggaaaatgcctcgttataaaattactcaataaatgttaactgtttatgaaacagtttacctgcaataaaaacaactttaagaaaaaaagggttgaaaacgatttactctcagaatatgggtactccaaggatcacctttctttaggagaggagggtcaacagtaaaatggttggcctagatgacctcatgaagttactcagtttgtccatgtgtttgaataatggacaccacttggtaaaagaaatgttctagacactttaattcacaccac

SEQ ID NO: 755808 - DNA, 537 bp, Homo sapiens
caatttttggaaatagtttgaggagactcattgtgaattcttctttgtaacgttggtagaatttggcaatgaagccatccatttctggactttgcttttttgggaggctttttattactgattaaatctcattacttgtcattgttctgtccaggttctctatttcttcctgattcaatcttcataggatgtacgcacccaagaatgtattcacttcctctgtccctaggccccccagtggtatgtgtggacactggctgtgctgtagtaggcaggagcagggtgatccacaggcccctgagagaatgcctgggtgggagcagcggctatactaaggccytgttgctgggagggcagggtgctttctttgtcaacagccataaataggtggcttggaagtgcacacttccagccctcactggtggctataagcaggttaatatttcctcagaatgcttttaaatgcatagtagtcctgctaccgtgagtggtggagttgctaccaatgacactcttcagccctggtagcagcagcca

SEQ ID NO: 755809 - DNA, 605 bp, Homo sapiens
cactgttttttccagtgactgtaccattttactttcctgtcagtactgtataagggctctgatttcaatgagcatactttaataaatattcttrtaggattgtgcctgcccaatgtgctttactgactaggaataaaaaatctgaaaagtctggagcctaccccgggagagtactttgaccccatgtaaggtaaggtaagtgcatgatcaggtgtgttttggggatgggatagggctgaaccactgtactaatgggaatctgggtctgacttccgtttgcctaagcttctctatctgtaaatgagaaatttctgcaatgagattgtagggtagccttcagtaggccactggtcattcattatccctcaggatctgcttgcttaaattttataccttagaaaatggaaacaagttacaatctgacttcttataaactataagaaaatcatatgcaccatttgcttccctccttctcagcacactggtctgtgttgtgattatcttactgcaggtgcctttgttgctaatgcaatctgttttttaaaaaggtgtcatgcagtaacaacaataaaaatgatatagagaaattaccttgtataatgcac

SEQ ID NO: 755810 - DNA, 527 bp, Homo sapiens
catgatccatgtgataggcagcctctagaatggttttggataatccctgcttcttggtattcatgaccttacataattcctctccttgagggtgggctggacctagtgattcacttctaccaaaagaagacagggcaaaagtgaatagtatgtaatgtctgatgttaggtcataaaaagcctgtggcttctgtcttgcttaccttctcttactctcttgcttgctctccrtaatgaaagtgaggtgccatattgtaagcttccctatgaggaagtccatgtggctggaagataaaagaggcctttgatcaatagctgattagtaacttaaattttcagtccaacagccatgaggaagcaaatattgtccacagccgggagtgagcttataagcagatcctctttcagttgagcctgcagagagctgcagcctgcctgacaacttcattgcagtcttgttacagactgagtcagaggatccagccagttaagccactctcctatttctgatccacagaactgtgagat

SEQ ID NO: 755811 - DNA, 660 bp, Homo sapiens
tatctttcccaccaggtgtgtgtgagagacttttctcaatacactcatggcagcactaaatattatcttttaaaaaaggacaacttagaaaacatcgtattgtctgttttaactggtatctctatttattaataacttgaatattttatttcatatcttattaacaatttatatgccatcttctgtgaattttgtattcatgtctattttcagtctaagttttagtgtctcctttatgagtttgagtaagtttttaatatagaaaatattattaaatatcagtcagcatggatataaataatattctcagtttgaattgtcttacaattttctgcagaggctttgctcttcagagatcttcaaattttacataggtaagtttagaatttcctaatgaggaatttcatttttttcccagtttagaaagctcttatccattctgataattctgagatcagttaaacagttgccaatttacatttgttttctgcttttattttttwattaaatttattttcatggatggcattttaaaattgcaacccaacttaatctgttcctcaaaagtataatttcctcagaacatttggataattcatctgcatgccttagtttgtaatgattcattcatgtatatatgtatatatattttatttatat

SEQ ID NO: 755812 - DNA, 698 bp, Homo sapiens
aaactccatgtctttttcactggctctgggtctcttcttcagcctcttaaacctggtaccatatccattggagtggataggggtttggcacgacagcaaaacgtaattttttttttagtttatattttaaagaagatgtggctgtaagtggcagctgagttggcattagattcacagtcagattctccygagcacattgcactgaacgctccatttccctgcttttcctttaattctcttggtgattctgttcttatctctgtgggaagatattaactatcccccactagtaatttctgagcttctgaaagcaaaaacacccaaagcagatttttgagtaatttgagaagctccctcatgagagtggaaatccagtgactttattagcatgactaaaattgttagaacaattctgtgcaatctgctgtacttctgtgaggtaaacatttttttccctcctaatcctcttattcttattgtataaaggaataacaatttttctttttaagttgaatcaatttgttcttagtcatataaagttggaaccaaagttgaagtttggctagaaattgcaagatgtctctaacctgtgaaaagtcaatggtgacgctcttggtacatttgaatgtcatgaaactactacaaagaaagactggtttctggattcatttttggtgcaacatttattaagctctttc

SEQ ID NO: 755813 - DNA, 698 bp, Homo sapiens
aaactccatgtctttttcactggctctgggtctcttcttcagcctcttaaacctggtaccatatccattggagtggataggggtttggcacgacagcaaaacgtaattttttttttagtttatattttaaagaagatgtggctgtaagtggcagctgagttggcattagattcacagtcagattctcccgagcacattgcactgaacgctccatttcyctgcttttcctttaattctcttggtgattctgttcttatctctgtgggaagatattaactatcccccactagtaatttctgagcttctgaaagcaaaaacacccaaagcagatttttgagtaatttgagaagctccctcatgagagtggaaatccagtgactttattagcatgactaaaattgttagaacaattctgtgcaatctgctgtacttctgtgaggtaaacatttttttccctcctaatcctcttattcttattgtataaaggaataacaatttttctttttaagttgaatcaatttgttcttagtcatataaagttggaaccaaagttgaagtttggctagaaattgcaagatgtctctaacctgtgaaaagtcaatggtgacgctcttggtacatttgaatgtcatgaaactactacaaagaaagactggtttctggattcatttttggtgcaacatttattaagctctttc

SEQ ID NO: 755814 - DNA, 595 bp, Homo sapiens
gacatgcagcatgatttcctccatgttaaaacatgagaaaatgaaaaatttcctttcttaggcttcttttacttgtaatctgtacgtatatataatttttttttttttaatcagagtctcactctgttgcccaggctggagtgcagtggtgcagtctcggctcactgcaactttcacctcctggattcaagtgattctcctgcctcagcctcctaagtagctgggattacaggcatgcgccaccacacctggttaatttttgtttttttagtagagatggggtttcgtcattttggccargctggtcttgaactcctggcctcaagagatctgcctgccttggcctcccaaagctgtttggattacaggtgtgagccactgagcctggcctgtatatataaaattatatttaaaacctggtggacttctttccatgtcaatacatatacagctttgtctgatttctaaaagttatatagtattctgtgtattattacgtagagactgtttaaataggattatcaacaaagttgcactgaacatcctatatggacatctttgtacctttcttgattcctagataatttcctgaaaa

SEQ ID NO: 755815 - DNA, 634 bp, Homo sapiens
gtgtgtgtgtgtgtgtgtatatatatatccctataaagatcttcatgctttactcacactctccaaaaccataaataatctgaatgtccaccaacaagtgaatggataaactgtggtatatccataccatggaatactagtcagcaatatgaaagaacaaactactgctacatgcaacataggtgaatctcaaaagcacaatactaagtgaaaaatcagaaamaaaaggctacaacctggccaacattgggaaaccctgtctctactaaaaatacaaaaattagctgggtatggtggcacactccagttatcccagctacttgggaggctgaggcaggaaaatccttgaacctgggaggcagaagttgcagtgagccaagattgtgccactgcactccatactgggcaacagaatgagactctgtctcaaaaaaaaaaaaaaagaaagaaaaaaagaaaaagcagattagtgattgtggttaccaagggttgtgtgtagggaaagaaattggctagaaaaaaaaagatgttgaaagcatttctagaaacagaccagatgagagattttttttttccccaaagtgctgggattacaggcatgagccaccatgcccagccagaaggactatttgaa

SEQ ID NO: 755816 - DNA, 635 bp, Homo sapiens
ttcccttttaagaggcctctctcctgtttttgaacttcacataaatggtgttatgacttttatatctgattttatttctgaagttatttctgtgagatttattcatattggtgtatagcagttgtttactttctgttttttggtagtttttccattgtatgaatataacagttaatcaatctttcttttcttgctttcttccttttttttgagaccgctctcactctatggcccaggctggagttgtactgacctgatctcagctcactgcaacttccacctccyagtttcaagcgattctcctgcctcagcctcccgagtagctgggattacaggcacccaccaccaagcctggctaagtttttgtatttttggtagagacagggtttcaccatgttggccaggctggtcttgaactcctgatctcaggtgatccactcacctcggcctcccaaagtgctgggattacaggcttgagccaccgtgcccggcaacagttaatttttctatgctcctattgatagacatatttgggttctttccactttgggtctttgatgctactgtgaacgttgtcatagatatttctgggtgaacataagcatttattttcctgggaaactggtgggtaacag

SEQ ID NO: 755817 - DNA, 641 bp, Homo sapiens
tacagtgatgtgatctaggttcattgcaacttctgcctcccaggttcaagttattctcctgcctcagccccccaagcagctgggattataggtgtgtgccaccacacctggctaatttttgtatttttagtagagatggggtttctccatgttggccaggctggtctcaaactccttgcctcaagtgatccacctaccttggcctcccaaagtgctgggattacaggtgtgagccacagcacccagccraatttaaacctttaatatatgctctgctccatatagcatccattatttggatgtaatacagtatggcctactttatgttaaatcacaacttaatagcttccattttatagtatgaattacatcatttattgcttctacatttaaagaaagtcatatgtgacttgtgccttttggaatttactgacagggaatgaaacatggaaaagatcagattatagtgctactcaaagtgtggtttggaaatagagatgtgagagttagctgcttaacttggaataaagcctgagtcttggatttagttgggggaaagtgtttattttgtgagaaatgttatctgaatgaaatcttatttgttaagctatctaaactgaacttcagaaagaaaaggtgac

SEQ ID NO: 755818 - DNA, 701 bp, Homo sapiens
acttcttttctcttgttgcttttaggatcctttctttagccatgatctttgggagtttgatcaacaaatgccttgaagtagtcttctttgggttaaatctgcttggtgttatataaccttcttgtacttagatattgatatttttccctaggtttgggaagttctttgttattatccctttaaatgaactttctatccctatctctttacctaccttgtctttaagtccaataagtcatatatttgcccttttgaggccaatttctaaatcttgtagttgtgcttcattatttgtttttttttcttttgtctcatctgactgtttatttttcaaatagcctttcttcaagttcataaattattccktctgcttaatcaattctgctattaaaagattctaatgcatttttcatcatgtgaattgtgttcttcaactccagaatttcttattatttttaattattttaatctttttgttaaatttatatgatagaattctgaatttctctcctgggttgtcttgaatttctttaaatttcctcaaaacagcaattctgtattctcagtctgaaaggtcatatatctctgtttctccaggattagtccctagtgccttatttagttcatttgttcagcttatattttcctgggaggtcttgatgcttgtggatgtttgttagtgtctgggcacttaagagtta

SEQ ID NO: 755819 - DNA, 701 bp, Homo sapiens
acttcttttctcttgttgcttttaggatcctttctttagccatgatctttgggagtttgatcaacaaatgccttgaagtagtcttctttgggttaaatctgcttggtgttatataaccttcttgtacttagatattgatatttttccctaggtttgggaagttctttgttattatccctttaaatgaactttctatccctatctctttacctaccttgtctttaagtccaataagtcatatatttgcccttttgaggccaatttctaaatcttgtagttgtgcttcattatttgtttttttttcttttgtctcatctgactgtttatttttcaaatagcctttcttcaagttcataaattattccgtctgcttaatcaattctgctattaaaagattctaatgcatttttcatcatgtgaattgtgttcttcaactccagaatttcttattatttttaattattttaatctttttgttaaatttatatgatagaattctgaatttctctcctgggttgtcttgaatttctttaaatttcctcaaaacagcaattctgtattctcwgtctgaaaggtcatatatctctgtttctccaggattagtccctagtgccttatttagttcatttgttcagcttatattttcctgggaggtcttgatgcttgtggatgtttgttagtgtctgggcacttaagagtta

SEQ ID NO: 755820 - DNA, 650 bp, Homo sapiens
agaattctccggattaccaggcaagtcccttgttctcttcccttttttccaaacaaatggactgtctctctgttatgagccacttggagctgggattgcggtgacacaagcactcctgtgaccaccacccctaggactgtgctggatcagatttaaagtcaacacatcactgggtcttgcccaaagcttgctgtaatgattacctggcctatgtttgctcaaggtcctagggctttasaatcagcaggtggtaaagccagccagactagtgtccttcccttcaggatggttcattccctcaggttctgggtaggtccagatatgccatgtaggagccagagactgaagtcaaaaaccttataaatctacttggtgttctattcactgcagctaagctggcacttaaaccactcttccctcccctttacacaggcacctctccccatggccagcaccagttaaggcccatggggaatactttcaagctactgtcaatgttcaaagacccacgggatcttcagtcagcatatgataaaggttgccaggcctgggactcaccttcatggcagtgggctcccctctggcccagggcaggtctagaaatgccatccaagagccaaagcctggaattggggatcccaagggcccac

SEQ ID NO: 755821 - DNA, 631 bp, Homo sapiens
tcccttgacataaggggcatggatgaggggggcagcttatttctacttggacaatcttttttaaagtgtccttgtagaccacactggaagcaagccctattaggcattcaatttgcccagcttttcccttttccagagcctccaaagtccacttgcctgagggccatgactaaagcggtggccttttctttatcctgtttgtcccgttctgcctgctccgcctgatctctattataaaaaactgaggttgccaagttcaatagggtttctaagttttgctctgggcctaaggcagacttttgaagcttttttctaatgtctgcagctgaatgagtgataaacttatcctttaacattagttggycttcaatagagtcaggtgacagggaggtatgcttcctcattgcctcccttagtctctccagaaaggcagtaggattttctccctttccctgtgttatagtggacatcattgaataattcacaggcttattcctagttttccttagtccttctagcacacaagttagtaaatgtctgcggcaccaatctccatgttctgattctgcgtcccaatgagggtctacactgggaactgcctgctggcctgtggggaatcgttctctttcct

SEQ ID NO: 755822 - DNA, 605 bp, Homo sapiens
cttggaataatagtcttcaattccatccaagttgctgtgaatgccattatttcattcctttttatggctgagtagtattccatggtgtgtgtgtgtgtgtgtgtgtgtgtgtatatacacatatatatatatcacattttgtgtgtgtgtgtatatatatgtatcacattttatgtgtgtgtgtgtgtgtgtgtatatatatatatatatatatatatatatatatatatatatatatatcacattctctttatccactcattgattgatgggcatctgggctgcttccatatttttacaattgcaaattttgctgctataaacgtgcgtgcaagtatcttttcatatratgatgacttcttttcctctgggtagatacctagtaatgggactgctggatcaaacagcagatctgcttttagttctttagggaatctccacactgttttccattgtggttgtactagtttacattcccaccaacagtgtaaaagtgttccctttttaccgtatctatgccaacatctattattttttgattttttgactatggccattcttgcagggatgaggtggtatcacattgtggttttaatttgcatttt

SEQ ID NO: 755823 - DNA, 523 bp, Homo sapiens
cttaaaagatatagagcggcaaattgggcggggtggggggacagtgtgaggaacaagacccaaccaactgctactacaagagacccacctactagctaaaggcagctatagactcaaagtaaagaagtggaaaaatatatattatgaaaatggaaaacaaaagcaagcaggagtagccatccttatataagatgaaacaaactttaagccaacaacaataaaaaaagacaaagagggtcattatataataacaaagggttaaatacacaaagaagatgtaactattctaaatatatgtgcacycaacaccggaacacccagattcataaaacaaatactactagacctaagaaaacagattgatagcaatacaataagtggggactttaacacctcactgacatcactaaatagatactgggatagaaactcaacaaagaaactctggatttaaactggactatagaaaaaacaaacgtaatagacatttatagaacattcattctatccaacaaccacagaa

SEQ ID NO: 755824 - DNA, 627 bp, Homo sapiens
acagatttgaagtcaaaacagcagcaacaaaaatccccataaatggcaaacaaatttcatttaaaactactgacctccactattaacaaattgatgacgccaacagagataggcagaatccaagtggagtcgggtgcagtgaggtcaggaaaccacagaattccaccagtagctaactgttcctgaacagaaaaacctgctaaaacagttttataaataaaacaatagaagtcctaaaaatagcagagaaaaatatataagacataaataagtagtctgacaattccaataaggtgtccctcacaggaaagatctgcactggatttattccagtttttcacgcacaatatatatattttttctcaatacaaaatgttcacaacacaaccaatctgtttacacttaagactttaaattctatacccttataaggaagatagtaaacatatcgtaattatgaaaagtatgctttkttttttttttttttttttttagtacaaagacaatgttagagaacttctttgggagaagacatacaataattaccttctgaatgtgctgcccccgtgcttaaattccggagagcaaaagacatgaagatccacattggaagctgaatccaaacca

SEQ ID NO: 755825 - DNA, 636 bp, Homo sapiens
acttgtgtcatgggggtttattgtgcagattattttatcacccatgtattaagtctagtacccagtttcctcaaatattgcctctttttaagtgtctctgctaaacttcttagtttttctttaaaggtaactatcattaatcttggtcacattattttccatcactcttaacttttctcactagtcattcatataatgtaatctatgaacatccacttgctctttggcatacttattaagagccttctgatcttttctcaaggctgtgggattctactattcctgaattttcccccttcaccawcctggatcttctttcctctctctgtatttgattcctgttcctcaattttatcattttagcacaacgtacatacaatgcttgacagaactaaaaaaaaactattctaaattttatatggaaccaaaaaaagagcccgaatagccaatgcaatcctaagcaaaaagaacaaagctggaggaatcacattgactcacttcaaactatactgcaggactatagtaaccaaaacagtacggtactggtacaaaaacagacacatagaacaatggtaaaataatagagaacccagaaattaagccatattcatataaccatctgatctttgacagagc

SEQ ID NO: 755826 - DNA, 593 bp, Homo sapiens
gaacttgaattgcattacaattctgttgtcaaatcatcatgcatgtttttccccattctctttcacaatcacccatctcatactcctctaataaagaaaatgggccacgcgcggtggctcacgcctgtaatcccagcactttgggaggctgaggcgggcggatcacaaggtcagaagatcgagaccatcctggctaacatggtgaaacgccgtctctactaaaaaagtacaaaaaattagccgggtgtggtggcgggcrcctgtaatcccagctactcgggaggctgaggcaggagaatggcgtgaacccgggggacggagcttgcagtgagccgagatcccgccactgcactccagcctgggagacagagcaagactcagtctcaaaaaaaaaaaaaaggaaaatgtacctttcattcgtcctaaatattactatagtacatggctctggaatgttaatcaaacctcagggtgccaaacaacagtgaaattcaaaatgaaaatattcaattggtgagctgtcaaaaatcaaggcatctatatttgtttagggattcttctcattctctgcattatatatttttgtgtaaaga

SEQ ID NO: 755827 - DNA, 639 bp, Homo sapiens
tacagttgtttttatatttccagatctttgcatctataaaactgattaacagattgaatcattcattcattcagtcaaccaagtattaatcaatgtaggcatcatttttcaacatatttttgttgcctctctgtcatatataagttgtgggcttagcaaaacccaacttagatttcagcttttaagtgaagaaggaaactacctaatcaccatcctctgaatttttttttattttttgtctcaatcataaagattagagtattttaattaatatttttaaacaattgaacacatgaatggagtttgagaaatgagaaaaaccccaaatacggaaatgagattttggttactcattatcttcactatatttctgtaataraatcatctgccaaagaatgcctttttgaatttccttgttaaatctcttcctataaaatgagcttcgctaattaactcagtgaattccagaaatcaaagcttataactactaaatttgtttaatgaatggactatcagtgtaatagaatattcacttataatgggttgcttggtaactattatatttaatatcaaaaataatatatagacatgacaacaaatcaaacaatgcaatcctgctagcccttctccagctgacag

SEQ ID NO: 755828 - DNA, 649 bp, Homo sapiens
tgtgggatacagggtcagagtagattattttaaagttttaagatgtaataattgccctgctgagtttcacatttacatgaggtttggaattcctttgttatggcctatttctccctttaggaatgggagtatttacccaatggctatacccaaattttatcttgggagtaactaagttatattctattttacaggctgatagatagaagggacttgccttttctccagtaagcctttggtcttttgacagttgagttaatgctggaatgaattatgactttgaaagactgttgggaaggcatggctgtattctgaaatgtaagaagcacatgagatttggaaggcaccaggaataamatgatatggcttagatctgtgtcctcactcaaatatcaaattataattcccgaaatgttggaggtgatgcttgttggaggtgactggatcatgagggtggatttctcatgagtggtttagcaccatctccttgctcctgttcttgcaacagtgagttctcatgagttctggttattttaaagtgtataacactcccccacttctctcttttgcaactgatctcaacatgtgagatgccccactcttcttctgatatctaccatgattgtaagtttcctgaggcctccccaga

SEQ ID NO: 755829 - DNA, 584 bp, Homo sapiens
atcaaattagaaatttaaataaggcatcacttttcagaggtagtgctgtgcttgggcattttgagtcactgatcaaatatatcaacagttaagtctaggcccttaagaactatatactcttaagaacttctatactctaatactgccagctggaaatattcaagaaaaaagaactttagtagagaaactttataccaatcactaatatttatttttggcctatttttcttaggctcaggaagatggaaaaagaaaaacaatgaaaggatgtggacttccacatcctgtattctaaagtayagtaacttttcagttaaagttgcattttgttattctgagtcagcaatttaaaatagtaatacatatagggattctttgggaatcttcttaaaaacatatttaacaggtggttaaagagaaagtgtgcagaactatattttattttacattttaattcattctaaacagatactcatcttatacctaactttatattaagaattatgggccaagcagggtggctcacgcctatcccagcactttgggaggccaaggcaggcgaatcacgagatcaggagatcgag

SEQ ID NO: 755830 - DNA, 499 bp, Homo sapiens
tgtgactgatgaccacatccggatgcacaaggtgctgcgggaatcaggcctgaagtacgtggctgtgatgccgccacacataggtaagcagggcagggacctggtggcaccaatgccatctgcctgttccctcctgccctctggggagatctgcaaggccttccctgaccaccctaaaattgcaaaccttcctatgatattgtgacatatatatttggcctttgtccctgtttcctggcatacaactcctaaaatccttggaatctccaaaatrgtaaatgtctttttctatgctaatgagttcactgagagctggcagcccctaggcagcttcaggtctggtcaccagaaagactaaggctggattacagggttgggactttcacctctggggagtggtgagggattgaaggttgaggggattaccactggctaatggtttaatccattatgtctatggattctggggcttcagcctcctgagtagctgggattacag

SEQ ID NO: 755831 - DNA, 656 bp, Homo sapiens
atgccatggaggaaagctggcctagggggtgtcatggcgagcatacacagaggctctgtgaaaggtggcagttgtgccagggctggcggctcagctaggaatggtgtgggccctggagtctgctggccaaggtggtgtggcctcctggggttgagcctgagggtggagcagcacaccagagccagggagcctgcacaacccatctgggggtgacacatggggagagaggggcaggtcctcacacatgagccattcataaacctgagggcaccgggcagacgggaccagggctgatgtagcccatatggtgcttttgtgtaaaagacatgccccttcctggaggtacttgacctccatctgctgggaaacgtgtaataaatatgtaaatgcagggtacctggcacaccagtggcagccccttacatacggagcctatatgcagtgcacaacctatgcaactgtacctagaggctytggggagaggggccatcagtggcaaagcaggcacaggggcagacggaaggatcagctcaccccatattgggcctcggagacatcagaaacaggtccttagctgggcacagtggtttgtgcctatagtcccagccactctgagggctgaagccagaggatcctttgagcctaggagttcaagg

SEQ ID NO: 755832 - DNA, 598 bp, Homo sapiens
cagcagattggattcctagacaggatccaggtttgtcactgcctcttctgggaagccctattgtgaatcccatagtggcttctgggccaggtccaatctgcatcatttacagtaaataccgggaatgccatgtctcccagtcccattcattacccacgcagacccccttcactggattccctctcctgtgggcgtttcacaggtcttcgggtcattgaatttacaatagagcacattctcacacacattcaagcctgcagggaggcaaatcccactccctgtcccmccaatcccagagggcttgaaggtccagccagccccttcctcagaatcccatcctcaactattctcttgttctgctgtaattaaagcccctcccccatagttaaattcagtttgtagaatatgggtctccgggccagatgcagtggctcatgcctgtaatcccagtgctttgggaggctgagacaggaggatctcttgaggccaggagtttgagaccagcctgggcaacacagtgatacccctgtctcttaaaaaaaaaattaaaaattagctgggcgtggtggcgcgtgcctatgttcccaactacttggga

SEQ ID NO: 755833 - DNA, 473 bp, Homo sapiens
gctatggcttctctgtctgtgacactacctgcccccaccccaacttaccttgctcttccagggacacactgcttttctctacttccctagcaaccccactgggagacaaaatttctttcccttctggtgttaactgcccagctgttaacactaaatgcccaagcaaagataacaacaacaacaacaataaaacccacaaatgaaaactttatctttgactatattctgttaagtttcaaggaacagcgtaggtaactatttgtctttctgcacaacaacttttctctgattccgaatgtcgcatccgaggaaaaagaagttgagaarttccaagagacactatttgacaatccagctgctgccagagatgatccatatctagaacatcccatcctttatatcttccgaacactttcaaataaatggaaacaaaagtcttaaaatagagataggcagtgatttcttgcaacttc

SEQ ID NO: 755834 - DNA, 610 bp, Homo sapiens
ggcggtgagggtgaagcaagagaaactcggctccagtgaaaaggacccatcattgcattccagaacgtaatttgcatttcatatgtaaatgaggaggcttcctagaggctggactgggctgggcttagctgagcctttgcaaacagcagggattcaaccctggggaactgcagaccaaagtgmgagagggacgcaccgcatctccaggcacatccaaaaaggatggacgagacaccgaagcagaggatacaggaggattaaaggattcaggaaagcaagcagccctccggagaagctgtcgaaattcaagactggcaagagaagcaaattcaacctctcacaccgatcatttctcattccctgaaaagaagagattgtttccccagggaagtgaaaataatgaacttttggaggtactgcttttttgctttcactctgctcagcgtggtcatttttgtgagattttacagtagccaattgagcccgccaaaaagttatgagaagctgaacagttccagtgaaaggtattttaggaaaactgcctgtaatcacgccttagagaaaatgccagtctttttgtgggaaaatatattaccatcacctttgcgaa

SEQ ID NO: 755835 - DNA, 550 bp, Homo sapiens
ctcccttgccccttccaccatgtaaggacacagggagaagatggctgtctgtgaactgggaaacaggccctcatcagacactgagtcagctgaggtattgatcttggacttcccagccttcagaactgtgagaaataaatttctgtttaaaagacacccagtttcaggtatttttgccatagtagcccaaacagactaacagtggatatwattttgttgagccagttataaaatccaagtccaagtcaaaactgcaggctgatattagctgggcatggtggtgcatgcctgtagttccagctactccagaggcggaggtgggaggatggcttgggccccagaggtcaaggctgctgtgagtggtgatcacaccaatgcacaccagcctgggggacagagcaagaccctgtctcaaaaacacaaaaatacaaaaaacttgcaggctccaaaactacctgaacttcaacctaccttctttcaatacaatgcccagaacatagtctctctcaatgacccagtcaagcttaaaaaaaaaaaaagaaaaaaaaag

SEQ ID NO: 755836 - DNA, 579 bp, Homo sapiens
tgggaaggagaatgagaatcctttaagttctttgaaatgacctcaaatctgaggttgtcaggcttttaaagagagccagtaggtagtcactccacatattgtagataatactgtgtcaacagctcaagttatctgaagctctctttgtgaaatgggacccaacttttgctctctgggaacactatcacatttctctctggcatgcaaacttaggtgtgtttgatgaagggagcctgcctctccactcctstgggtatttcttgcaaggtggagatgagagactgagaaaagaaataagacacagagacaaagtacagaggaagaaaagtgggccctgggggaccggcgcttagtaagtgaggaccaacaccggcgctcacttactctgagtctctgagttctttcagtatttattgatcactatttttcctatcttggcgaggggaatgtggtggggctatagggtgaaggtggggagagggtcagcagaaaaacatgtgagtaaaggaatctgtgtcataaacaagtttaaggaaaagtgctgggcctaaatgtacacgtaggctagatttatattta

SEQ ID NO: 755837 - DNA, 579 bp, Homo sapiens
tgggaaggagaatgagaatcctttaagttctttgaaatgacctcaaatctgaggttgtcaggcttttaaagagagccagtaggtagtcactccacatattgtagataatactgtgtcaacagctcaagttatctgaagctctctttgtgaaatgggacccaacttttgctctctgggaacactatcacatttctctctggcatgcaaacttaggtgtgtttgatgaagggagcctgcctctccactcctctgggtatttcttgcaaggtggagatgagagactgagaaaagaaataagacacagagacaaagtacagaggaagaaaagtgggccctgggggaccggcgcttagtaagtgaggaccaacaccggygctcacttactctgagtctctgagttctttcagtatttattgatcactatttttcctatcttggcgaggggaatgtggtggggctatagggtgaaggtggggagagggtcagcagaaaaacatgtgagtaaaggaatctgtgtcataaacaagtttaaggaaaagtgctgggcctaaatgtacacgtaggctagatttatattta

SEQ ID NO: 755838 - DNA, 583 bp, Homo sapiens
  misc_feature 100: n = A,T,C or G
cccctcctgtaaggggtttgagtgtgcaaaggggtcattaggttacggtatttaaacatatggctcgttgcctattgtattcagaaaacacaactgctanaatgaagaaccctaatgtatctgtaatagttttcctctctttatctctgtaattaatgccaaagctgaaaacaaaacaaaacaaamcaaaaaatgctatgctaccgcccctattaagcagtctggagaacacaggtttactttgctccagtttccttgatttttctgtctctgtccacagtttctcatgaatgaggaggtaacatgccatcaagtgatggttgctatgaaagttgcaagccccttggacataccccactgagttgccttgaccatatcacttaaaagagttactagagttaaacatttcattgcctgcgctatagcaacagtttttgaaagatggctaggttgtcactaacagacattaccttgcttgacataaaatttatgtttcatagctgaagatagttacatatctatcaaaacagctgtagtaacagaaagttagcagagtgatagcagttatcagttttgtattttt

SEQ ID NO: 755839 - DNA, 439 bp, Homo sapiens
aaggttaatatttttatgtttgaatttgatcctgtaattacaatgttagctggttattttgcctgttaattgatgcagtttcttcatagcatcagtggtctttatcatttggcatgcttttgcagtggctgttactggtttttcctttccatctttagtgcttccttcaggagctcttgtaaggcagggctggtgatgacaaaatctctccacatgtgcttgtctgtaaaggattttatttytccttcacttatgaagcttatttggctggatataagattctgggttgaaaattcttgtctttaagaatgttgaatattggaccccactatcttctggcttgtagagtttctgctgagatgatatctgctgttagtctgatgggtttccctttgtgggtaacctgacctttctctctggctgctcttaacattttttc

SEQ ID NO: 755840 - DNA, 560 bp, Homo sapiens
agacgaagaccaggaacagtgtttatattctttttcacattgaaaattagtcagatttgcttcagcctcaaagagcatgtttatgtaaaattaactgagcactggcagtgagctgtacttgatttttctaaacaggaaaaggattaataattgtccccccaraattcgtgtctactctgaacttcagaatattacctttttttggaaaacgggtttctgcagatgttattacgagtagttaaggccttgaaaccaaatccttctgtttttagagtaggttctcaatccaatgactggtgtccttataagaagaggagaggtttcagatacacacaaaaaatacacaaggccatgtgaagatggagagagaggctggagtgatgtcaaggaagaccaaggtttgctgacaacccccagaaagaatgaggtatgctatagttactccctcaaagcttccagaaagaaccaatccttccaagataatctggttggttacttggttggctgggtttttttggtttatttttcaacactgtctgatccatcttccaggcctcgtt

SEQ ID NO: 755841 - DNA, 560 bp, Homo sapiens
agacgaagaccaggaacagtgtttatattctttttcacattgaaaattagtcagatttgcttcagcctcaaagagcatgtttatgtaaaattaactgagcactggcagtgagctgtacttgatttttctaaacaggaaaaggattaataattgtccccccagaattcgtgtctactctgaacttcaraatattacctttttttggaaaacgggtttctgcagatgttattacgagtagttaaggccttgaaaccaaatccttctgtttttagagtaggttctcaatccaatgactggtgtccttataagaagaggagaggtttcagatacacacaaaaaatacacaaggccatgtgaagatggagagagaggctggagtgatgtcaaggaagaccaaggtttgctgacaacccccagaaagaatgaggtatgctatagttactccctcaaagcttccagaaagaaccaatccttccaagataatctggttggttacttggttggctgggtttttttggtttatttttcaacactgtctgatccatcttccaggcctcgtt

SEQ ID NO: 755842 - DNA, 528 bp, Homo sapiens
gtacacccattacagctgtgagggaagtaagaattgaggctattattcttttccatttaccaaaccacttttctagccattctgtaaaagtgatcatttacccctgagttgttggctaactcattggacagagaagttagaccttgcaatgcctttgttatacttccattaagggtgatgttgtttgggatgaaggtgcaacaytgagttttaatcatgaggcaaactcctccgctttctgctaatatcatgtttaaggctatcctattttcccaagccatctggctagtagcccctaattgttcaggtattcctttaacagcatctctagtgtagttaatagatcaccgttggttgtagatgtagtttatccaatctacatttttattaattgtcacctaccaaaatattgacttgaatcctgcagctatttgattttgggctttaaattgatctggtattccctgtgggactttaattgtgtctaaatagatgtgagagtcaaaagacctataagaggcttctctt

SEQ ID NO: 755843 - DNA, 632 bp, Homo sapiens
tcttcaccctggtgccaccccatccttcccaattcgttgtgacctctctttgggtcacggaggacaaaccgatcaatactatgttgtgacgagtgagatgacgtcacatagcagctgacgtcccctgtttgggcctgttggctttgcctggagtggctgagttcatctgtgcgctgagtcatctgactgggaggctgcagcctggcgtccctgtgcaggaggcctgcaggatggaaggaaccctgtcggggagcccagagactgaggctgggtcccaagcccccatgactagcacgtggtcctggcagagtccagcctygtcctcttgtcctcaggaaggaggttggtcagggttggtggctattgctcaagacctctgaaggtgcctggtgagaggaggaagacagctcagagccagaagcaacagaagctgggaggctggcccaggggctgccttgcttgtcagatgcatggcccagagacactctctggagtggacctgccttgggtgtgcccgaaggcggagttgactctcatctgtggaaatggacgagggcatttccaggcacacggcactttgaggcccaggtactgggcaggaaggacagatggccacagagagccaagcactt

SEQ ID NO: 755844 - DNA, 632 bp, Homo sapiens
tcttcaccctggtgccaccccatccttcccaattcgttgtgacctctctttgggtcacggaggacaaaccgatcaatactatgttgtgacgagtgagatgacgtcacatagcagctgacgtcccctgtttgggcctgttggctttgcctggagtggctgagttcatctgtgcgctgagtcatctgactgggaggctgcagcctggcgtccctgtgcaggaggcctgcaggatggaaggaaccctgtcggggagcccagagactgaggctgggtcccaagcccccatgactagcacgtggtcctggcagagtccagcctcgtcctcttgtcctcaggaaggaggttggtcagggttggtggctattgctcaagacctctgaargtgcctggtgagaggaggaagacagctcagagccagaagcaacagaagctgggaggctggcccaggggctgccttgcttgtcagatgcatggcccagagacactctctggagtggacctgccttgggtgtgcccgaaggcggagttgactctcatctgtggaaatggacgagggcatttccaggcacacggcactttgaggcccaggtactgggcaggaaggacagatggccacagagagccaagcactt

SEQ ID NO: 755845 - DNA, 448 bp, Homo sapiens
acctcttcccatgagtcatgaatgttctgaatggcatctagaagagtgaatcctttccagaaggttttcaattgacttgcccagatccatcagaggaatcactatctatggcagatgtagcctaatgaaatacatttygtaaataataagactaaaaagtcataattactccttgatccatgggctgcagagtggatgttgtgttagcagacatgagaacaacatttatcttcttgtacatcaccatcagtgttgtcaatgagcaatattttggaaggattttttcccccaagcagtagatctcaacattaggcttaaaatattcaataaaccatgccataaacagatgtgctgttatccaggctttgttgttccatttacagagcacaggcagagtgcatttagcacaattcttaaggactctgggatttggggaatagcaagtggg

SEQ ID NO: 755846 - DNA, 530 bp, Homo sapiens
agaaaaacatgttttagagcattaatgaaaacagaaatattacaatgcagtggaaacaacaaatggctaagcaagtgttactatggtcatatgagcactattgtccctgaaacttgcctctctccagccatcagattgatttagtattaccagtccctgatccagattactcttctaaactaaaaacaaaaggtggccatgcactgtagctcacrcctttaaccgcaacattttgggaggccatggagggaaaattgcttgatcccaggagttcaagactagcctgggcaacatagagagattccatctttacaaaaaaatttaaaaattagccaggtgtagtcgcatatgcctgtggtcccagctacttgggaggctgaggtgggaggatcagatgagcctgagagtttgaggctgcagtgagctggattatgccactacactccagccttggcaacagagcaagaccctatctcaaaaaaaaaaaaaaaaaaaaaaaaaaaaaagagcaagaggagactcagaaaata

SEQ ID NO: 755847 - DNA, 530 bp, Homo sapiens
agaaaaacatgttttagagcattaatgaaaacagaaatattacaatgcagtggaaacaacaaatggctaagcaagtgttactatggtcatatgagcactattgtccctgaaacttgcctctctccagccatcagattgatttagtattaccagtccctgatccagattactcttctaaactaaaaacaaaaggtggccatgcactgtagctcacgcctttaaccscaacattttgggaggccatggagggaaaattgcttgatcccaggagttcaagactagcctgggcaacatagagagattccatctttacaaaaaaatttaaaaattagccaggtgtagtcgcatatgcctgtggtcccagctacttgggaggctgaggtgggaggatcagatgagcctgagagtttgaggctgcagtgagctggattatgccactacactccagccttggcaacagagcaagaccctatctcaaaaaaaaaaaaaaaaaaaaaaaaaaaaaagagcaagaggagactcagaaaata

SEQ ID NO: 755848 - DNA, 530 bp, Homo sapiens
agaaaaacatgttttagagcattaatgaaaacagaaatattacaatgcagtggaaacaacaaatggctaagcaagtgttactatggtcatatgagcactattgtccctgaaacttgcctctctccagccatcagattgatttagtattaccagtccctgatccagattactcttctaaactaaaaacaaaaggtggccatgcactgtagctcacgcctttaaccgcaacattttgggaggccatggagggaaaattgcttgatcccaggagttcaagactagcctgggcaacatagagagattccatctttacaaaaaaatytaaaaattagccaggtgtagtcgcatatgcctgtggtcccagctacttgggaggctgaggtgggaggatcagatgagcctgagagtttgaggctgcagtgagctggattatgccactacactccagccttggcaacagagcaagaccctatctcaaaaaaaaaaaaaaaaaaaaaaaaaaaaaagagcaagaggagactcagaaaata

SEQ ID NO: 755849 - DNA, 605 bp, Homo sapiens
cattgaaagaatcaatatcatggaaatgaccttacttccaaagcaatctacagattcgatgcaattcctatcaaaatactaacgtcattttttcatagaattagaaaaaacaatcccaaaattcatatggaaccaagaaaaagcccaaatagtcaaagcaaacctaagtaaaaataacaaatctggaggcatcacattatctgacttcaaattatactataaggctatagtaaccaaaacagcatggtactggtgtgaaagtagatacataaatcaatggaacagaaatagactccccagaaataaagccaaaaactttgaaccaactgatcctcaacaaagcatacatagaaataattggaaaaaggayaccctcattcaataaatggtgctaggaaaactagatagccacatgtagaagaatgaaacttgatctctatctctcaccacacacaaaaatcaactcaaactgctttaaagacttaagtctaagacctgacaccgtaaaaattctagaagaaaacctaggaaaaagtcttctggacattggcctaggcaaataatttacaagaaggaaaaatccaatttgtatactgtaaatgaaa

SEQ ID NO: 755850 - DNA, 605 bp, Homo sapiens
cattgaaagaatcaatatcatggaaatgaccttacttccaaagcaatctacagattcgatgcaattcctatcaaaatactaacgtcattttttcatagaattagaaaaaacaatcccaaaattcatatggaaccaagaaaaagcccaaatagtcaaagcaaacctaagtaaaaataacaaatctggaggcatcacattatctgacttcaaattatactataaggctatagtaaccaaaacagcatggtactggtgtgaaagtagatacataaatcaatggaacagaaatagactccccagaaataaagccaaaaactttgaaccaactgatcctcaacaaagcatacatagaaataattggaaaaaggacaccctcattcaataaatgrtgctaggaaaactagatagccacatgtagaagaatgaaacttgatctctatctctcaccacacacaaaaatcaactcaaactgctttaaagacttaagtctaagacctgacaccgtaaaaattctagaagaaaacctaggaaaaagtcttctggacattggcctaggcaaataatttacaagaaggaaaaatccaatttgtatactgtaaatgaaa

SEQ ID NO: 755851 - DNA, 586 bp, Homo sapiens
atcacaggttttcatggtaaaaatataagacattatccttgatctcgaggaggttagagtctagtatactcattaaacaattgttgactcaaaggaatttcatttcaccttatatgccaggtagtagagtggttaagagaactctctggagttggactgcctagggtttaaattcctacgcttccatgtcttaccaacattactttgggcaagtcatgtaaatggcctcagcttccatgttcctgtaacccataacagctaatgggaattttccaagtctttttttatttttactaattcttcacatcaatgagataggggctattattacctgcatcttacaggtgagaaaactgaggacccgagattttaggcaagtaaaaggggtagaatttgaatgctctgctcatatatacttttcagttctgttatactgcctsatataggtatattcagagagctacagaaggtggctgatgatgagaaataaatagttatatcaaatgcactgtgcctagttatgtggtaagcagtcaataacattaatgatgatgatgattatgatgattatggaagactttggtgt

SEQ ID NO: 755852 - DNA, 496 bp, Homo sapiens
acaggcttcagccacctcacaagcttgctggacaacgggcttttcttcctctgtcttcttcaggactgtgagtgcctgacgggcaggagctgcacccgtcaccttgctgtcctcgctgttaccacagggccacatcagtgaacacaggctctactgaggmggcagcctccctgtagcttgtattcttgcaaagaagttgaaaaccaaatcaatgcagtcacaagacacagatacatatggatgcaaatttgctgaactcaggaacgaccaccagattggcagggctaattcaccctcagtgttttgtattttttccctaattattctaaaatgatcctgttgctttattcccacagaacaagcactggcagacgaggaacactatccccagcaggcctcggctgccggcaacgcacccctgccctcagaaagacagccttgctctgaatttattttcataattacatgaacgttatctaaaaaaaacaaaggacgt

SEQ ID NO: 755853 - DNA, 496 bp, Homo sapiens
acaggcttcagccacctcacaagcttgctggacaacgggcttttcttcctctgtcttcttcaggactgtgagtgcctgacgggcaggagctgcacccgtcaccttgctgtcctcgctgttaccacagggccacatcagtgaacacaggctctactgaggaggcagcctcccygtagcttgtattcttgcaaagaagttgaaaaccaaatcaatgcagtcacaagacacagatacatatggatgcaaatttgctgaactcaggaacgaccaccagattggcagggctaattcaccctcagtgttttgtattttttccctaattattctaaaatgatcctgttgctttattcccacagaacaagcactggcagacgaggaacactatccccagcaggcctcggctgccggcaacgcacccctgccctcagaaagacagccttgctctgaatttattttcataattacatgaacgttatctaaaaaaaacaaaggacgt

SEQ ID NO: 755854 - DNA, 556 bp, Homo sapiens
tgaacaataggactcactgggagtgaccgcatacactataccacgaattgcccaagtgtctgaaaaggtcactggaccatttcgctctatgctgtgccacgggccaaccacgagggctgtcagtgactcactgcgtgggccacccagagcatgtggtgctgaggctgtcaaagagcaagacgaggctgcatttaaactcaggcctctgctaagtgtcagaacttgggcaagatgccaaacactttctttagagccagtttcctttcctatgattgggttataacactcaccctgtcaggttctcgtgtgcrttgacaaggctggcacgtgacacaccaggggcagacctggacgagaaccttcttccttagacatcagggtcctcatgagcatcaagaaaataaggagagcagggcatctccagctgtgtcaggactacagcagggactcagcaacaatcagtgtcttctcttgtttcatccaaatcatacatttaaaaattagatggggttatcatggatgtttatattgattcctagaatcagacaaatacacc

SEQ ID NO: 755855 - DNA, 612 bp, Homo sapiens
agcttatgatattttagagaatgttgtcttatgtgccggactctgagcataacttcttacacagatgctatgtaatatttagcatgattataatgttagctacattaaatctcatatgaggaaaccaaggattaattatataattagccaagggtcacatctattaaactgtctgactcaagagcccaagagttaaccaatatgcagtattgtgattcagcacagacatggtacatataattgataatagccaacttttctatgttgctgtcagaggtcaacattttatataaatatttaattgcaagtatgagctgaagacttgctttagactttgcctgggatttaaagcaaaaagcacacacgcaacttctrttgagctaaaccgtaggtatgtcaacaacttagggtatcctgccaaattttatctgtactcatcatttggctgcgaaaatctttatcctgcttttgtatataaaaagcatctgctttcagtggattttatttagattaattttagttacttagactagtgttcctcaaccctggctacacattgtctaggaagttttcaaaataatcggtgcatgagacctctccgcatagaatttc

SEQ ID NO: 755856 - DNA, 588 bp, Homo sapiens
gagctctttttggaaagcatgcatcaggttgctggtgttactgattggactgccaccatcttcaggactgcctcaggaattggtgaaggctcgagtctgtagatgggaatcatcatctgtagaaagttgggaaagacattgagcagaggaaataagacagtgacagwcaacatgtagagcttgctagaaagggaaaataattcatataagggcaacatagttgaagcaaaagggaaaagactgataattacttatacacaccattatggccatacctactataaaatataaaaatacttccttactagttggcacatagcagctctactaagtcctcaaagtgtcctcctttccttaccctgccacctcttagtccctcctgagatggtctagcatagaaggcctcttggaccctgcttcagccactgtccattctggttgctaatgctcatgcatcatcagttattccatattttgctatgttcctgagaggcttaacctacattgtggctatatgtgtgcctgtctgagtcattcgattgcatgcaaatgaacaaattcacaaatatttttgcataagcaacccaa

SEQ ID NO: 755857 - DNA, 641 bp, Homo sapiens
gttcaattaaaaggaaagaaaaagcagaaataatgacttaatgacttaatggctttaggatattgagaattctgtattagcacttctctttccacatgagcaaaatgttccatggctccattacaaattccactatttattctctttctcatttccatttcttctagcatcttctaaacatccctcatttgaaatccccttttctggatttaactgtggctatttcaggctataatccatttcctgtaccaaaaggagtttattccagtggttctcaagtacaaaaaatatgcccttgatcatgaaagccacagaccaaagttcttggtttcgggagatgataaagtagcctagaaaaagcctataatagagatctagaatgtccctagcaagtttctaataaaagttcaaattaattaatgtattttcctgaacttagtttttaatagataatttaaaatgtcaaaaraaacaaaaaaatatgattgggacatgtccacccaagtaatgagagcttatatttttcttcaagccccactacccatctaactattagctgagacctaagattcaagtcataaaaataattaaaattgaacaactcattctatattaacagcagatatatagatattatatat

SEQ ID NO: 755858 - DNA, 580 bp, Homo sapiens
tccttcctcagatcccatggtaactgagagatcaatgtctcctgtctgcaccttaaatatggctcttggctgcatagtacaattttactctctgcagttgctcatattaattaaagtttttaaaaacataaataatagaaactgactttggttagtttgagtaaaagtgacaggatgataaactggactccaatcagacatttggcagtatgtgcacaggacaacagtagtatagcagaggccccttagacccacggcctgaagtgctggatcaccttgcaagacatgttaagagctacttgttcttctgtccctaagtttgtcttctatactaggccattaaaaaggaggtagggttagccatagagaagaytcctctggaatgagctgccagagttatgtgtaatttcctcatgatgggagatgtgctccactcttcagaatgaatgagaggggattagaaagaatgactcagagacctcaacaggagtctcctgaaggcgtaacggactcacatgtgggagtcagaggccaggactgtggcctcaatgcaaatcaaagaattttatattgggagctg

SEQ ID NO: 755859 - DNA, 561 bp, Homo sapiens
ttaagcgtgcagacctgtgagtcagttaaacctcttttcttcacaaattgcccaatttcgggtagttttttatagcagtgtgaaaacggactaatacagtgagatattaagaatgaatactaggcctggcaaggtggctcatgcctgtaatcctagcatttggaaggctgaggcagcaggatcacttgagttcaggagttcaagaccatctgkggcaatatagcaagacctcctccgctaaaaaaaaaaaaaaaaaaaaaaaaaaaagaaaatagttaaaagaaattagtctggggttgtggtgcacccctgtagtcccagctgcttgggaggctgaggtgggaggattgttcgtgccctggagagccatgctgcagtgaactatgatggtgccactacattccaacctgggcaatacagcgagaccttgtgtcaaaaataaaaataaataaagaatgaataaattctaaaatatttagatgttcagatgatcttatacattagaaaataattatttgtatctgattaaaagatacatgtctctcctttaatctggaaggg

SEQ ID NO: 755860 - DNA, 597 bp, Homo sapiens
ttggaaatgtccctgacagctgtaccttctactatatttcaaatgacaaacttctaaatagccttgtccttaggtgtgcatccaacacagtttgtgcagcaaataggttgtacctagctatggccctttttggcacaaccgttgttgttgttcctcctcctcctcttctttctcttcctcctcctcctctttttttttttttttttttttttcttttttgaaatgggttcactctgtcactcaggctgcagtgcagtggcatgatcatggctcactgcagcctcgacctacctgggcccaggtgatccttccacttcggcctcccgagtagctgggactacaggcacacaccaaccatacccagctaatttttgtattcttttaggaatggagtttcaccgtgttgcycaggctagtcttgaactttcaggctccagtgatccacctgccttggcttcccaaagttctgggattataggcatgagttaccatgcccagcctcccttcttttctttgttattttggcagtgaagacccaagagtgactcaggttttgtttaaacatttatttagattacataggtaattataacattt

SEQ ID NO: 755861 - DNA, 534 bp, Homo sapiens
accgatttaaaaacatttctatttctgcatttccattggtccctctcatgtgcttgttgaatttggtaatcccatttgagacagctcctttaacaatgctgtcacagttcagggagccttggcatgacacacgtaacccttctgtgcggtattctctctggcattrcattcttacattacattctctctggcattacattctttcactttccattttgtacttttctctattgctttatttgtatgtaatgttctgaagtccaaataacaaaatgtcatttggaagttatgtgaattattcctaaattacataaatgtgtttgtaaggagttattgaattgtttgtgatggtgatccatgaaataactaagaaaatttatttgattttttatgatttcagccaatgaaaaagtatataaaacagtataacagacacctatttacccatcacacaaatgtcgtagagattgacgttttgtaatatttaggagttttttaagtaaataaaaaattgcagatacagctaaggtcata

SEQ ID NO: 755862 - DNA, 640 bp, Homo sapiens
ttaaaccccagagtaaagggaaaagaaatgggattatgaggaaaaccaattattaaaaaaagtttttcacctcaccttcagcattattcagtttactttaaaaaaaacttttttatcttttattatggtaaaaaaatatatagttcaccctcttagtcatttttaagtgcacagttcattagtgttaactatattcacatggttgtataacagatctttagaattttttcatctcccaaaactgaaactctatccccatcaaacaacaactgcctattcccccttccctcagcctctggcacccatcatttaactttctgtttccatgattttgactgctgtacatatcttgcattaatagactcatacagtatttgtcttttttatgtctagcttatttcactcagcataatgtcctcaagatttatccatgttgcagcatttaacaagatttctttttttaaggctaaataatgttccattrtatgtatatatcacattttctttattcatctgttgatggacatttgggctgttttgacctcatggctcttgtgaataatgctgcaatgagcatagttgtaaaaatatctcgttgagactgtgttttttgtttatgttatttttaatgcatctttta

SEQ ID NO: 755863 - DNA, 617 bp, Homo sapiens
ccattgtgaagtttactgtttttcccttttcatgcactattatttataagtgagttacttatggaggagaattaagctccatttttggagtgaggagtataaaagaatctgtagacataaagtaaaaccactaacaataattaataaatattttaggggagatttttaaggctatgcaagtatcctatttctccttacagttttgctcactaatttttgcagtcatcagtggatgctgccagctgcaattattcctgtggtgttctactgctaacttttgtttgtttgttttttgagacggaatctcactctgtagcccaggctggagtgcagtggcaggatctcggcttatggcaacctcctcctcccaggtcccrgttcaagcaattctcctgcctcagccccctgagtagctgggattacaggcacacaccaccatgcccagataatttttgtatttttagtagagacggggtttcaccatgttggccaggctggtcttgaagtcctgacctcatgatccacccgcctcggcctcccaaagcgctgggattacaggcatcagccaccgcacctggccccactttgtatttctgtcatctcttttacatttatca

SEQ ID NO: 755864 - DNA, 670 bp, Homo sapiens; identical to SEQ ID NO: 741790

SEQ ID NO: 755865 - DNA, 547 bp, Homo sapiens; identical to SEQ ID NO: 741791

SEQ ID NO: 755866 - DNA, 636 bp, Homo sapiens
tttcttttctattgcattgtcaagctgcaaattttccaaacttttatgctttgctttccttttaaatataagtttcaattccaaaccatacctttgtgaacacataaaactgaatgttttcaacagcaaccaagtcacctcttgaatgctttgctgcttagacatttcttccaccagataccctaaatcatgtctctcaagttcaaagttccacagcgttctagggcagggacaaatgctaccagtctttttgctaaaatatagcaacagtcacctttattccagatcccaacaaattccacatmtccatctgagaccacctcagcctggccttcattgtccatatcgctatcagcattttggtcaaagctattcatcaagtctctaggaagttccaaactttcccacactttcctgtctttttctgagccctccaaactgttccagcctctgcctgttacccagtttcaaagtcacttctacatttttggatatccttatagtacccctctctactggtaccaatttagtgtattagtccattttcacactgctatgaagaaatacctgagactgggtaatttataaagtaaaaggggtttaatcaactcacagttccacatggctggggaggct

SEQ ID NO: 755867 - DNA, 622 bp, Homo sapiens
tttcaaaattccatctacatttatttatttgttgacattctattgtaagaaagagtttttgctttctccttttatttatattaatgtggactagtgtgtacttattaagttactgttatgacttttgatgctttttcctttttcttttcattattattattwtttttttttttgggtagagacagggtcttgttatgttacccaggctggtctcgaatttttggtctcaagcaatcctcccaccttggcctcccaaagggctgggattacaggcatgagccactgcacttggccttgatgctcaaattatacctgatttgtcctaagctagcttgtccttaagcttgtcctaagctagcatgtccttaagctagctgctgtttccttttgacatgtccctattctttgaatactttattttctgacacaaaaatgttccttaaaatcagacatttcttcatagagctccagttccttttagcagagaatagtaattggaaatcaatatccaggcactagttgtgctcattgctccagggtgtgaggggcttgctccctgtcctcttggtgtgcagaattaggaaatatatatgtaccacacaggcacgtgtgcacacacaca

SEQ ID NO: 755868 - DNA, 622 bp, Homo sapiens
tttcaaaattccatctacatttatttatttgttgacattctattgtaagaaagagtttttgctttctccttttatttatattaatgtggactagtgtgtacttattaagttactgttatgacttttgatgctttttcctttttcttttcattattattattatttttttttttgggtagagacagggtcttgttatgttacccaggctggtctcgaayttttggtctcaagcaatcctcccaccttggcctcccaaagggctgggattacaggcatgagccactgcacttggccttgatgctcaaattatacctgatttgtcctaagctagcttgtccttaagcttgtcctaagctagcatgtccttaagctagctgctgtttccttttgacatgtccctattctttgaatactttattttctgacacaaaaatgttccttaaaatcagacatttcttcatagagctccagttccttttagcagagaatagtaattggaaatcaatatccaggcactagttgtgctcattgctccagggtgtgaggggcttgctccctgtcctcttggtgtgcagaattaggaaatatatatgtaccacacaggcacgtgtgcacacacaca

SEQ ID NO: 755869 - DNA, 622 bp, Homo sapiens
tttcaaaattccatctacatttatttatttgttgacattctattgtaagaaagagtttttgctttctccttttatttatattaatgtggactagtgtgtacttattaagttactgttatgacttttgatgctttttcctttttcttttcattattattattatttttttttttgggtagagacagggtcttgttatgttacccaggctggtctcgaatttttggtctcaagcaatcctcccaccttggcctcccaaagggctgggattacaggcatgagccactgcacttggccttgatgctcaaattatacctgatttgtcctaagctagcttgtccttaagcttgtcctaagctagcatgtccttaagctagctgctgtttccttttgacatgtccctattctttgaatactttattttctgacacaaaaatgttccttaaaatcagacatttsttcatagagctccagttccttttagcagagaatagtaattggaaatcaatatccaggcactagttgtgctcattgctccagggtgtgaggggcttgctccctgtcctcttggtgtgcagaattaggaaatatatatgtaccacacaggcacgtgtgcacacacaca

SEQ ID NO: 755870 - DNA, 575 bp, Homo sapiens
gcatacgttggttagagtatcctctgcttctattcatttcctgctacgacctagcttcctcacattctgctcagcgttttctgtgccttgtatcttctgtgtattcatagcttccgcttacacatggtcccacccagccccattctactgtacttcatcactccttttagatcatcttctcagtttctgttcccacaaccaattgcctgattctctttctgcttccaagtgtaaactcctaagagaatctcactcctctagccaactaacctccgtgaagggcctgaggggccatggggaggtgcaggggtatatcacccagcccagaacacagctgcgtatgcaggaaatagtccttatgcaggaactattgacatggtaggtatcatcttggcctgtatagcatagttccactgcctgtgtatactcatatcaaamtaatattgcagtgaacataaatagcctctctacttattttctgtatccattctacttaaaaggacaggggccatgatttatttaattttgtaaccccaacacttattatggtacctggcactgccataagtgtttgt

SEQ ID NO: 755871 - DNA, 523 bp, Homo sapiens
ttcatttgagtagtcatgaaggaaatgaggaagcaacccatgcagatacatgcagatacctggggatggggaagggaagggtgggggtattccaggcagaaggaacagcaaatgcaaacaccccgatgtagaaaaatgcctggagtgttcactcaacagtgaagggaggccagtgagctggaggcaggtcaataagggggatagtggtgggaatgggggtctgagaaataaaggtagggataggaataaggaaggaaggtagaatatcaaggctcctagagaccactctaaggactttctytggcttttactcttaaagaacaagggaggcactggaagattggagtagacatgactgctgaggacttgtatatggcatatgaaagtgtgttagactgttcttgtgttgctataaagaaatgcctgaggctgggtaatttataaagaaaagaggtttgtctggctcatggttcagcaggctttataggaagaatggtgctggcatgtgcttctcctgaggcct

SEQ ID NO: 755872 - DNA, 589 bp, Homo sapiens
attagggtttgtctttaaaatgtgtctgtttttaatttgctaacagcttttttcccaccatcttccaatccatagaacttgagtattattattaaaagggggttgattttatttttttagaccgacagacattaaaatttctaaacctgcatggaatcaaagggtaacctgaacatattagatttctccaggaaaaaaatatatatgtgtgtctgtgtctgtgtgtgtgtgtgtgtgtgtgtgtgtgtgtgtgtgtgtgtttatgtatgtatgtatatccaatggataaaagtaaaaaggtggcaaatcccagctcagtagaagaacaaactgcctaatagacmatgtgttgtctcagagagttgattctacatcagggattattgtgacaggacaagcagtattagagtaagtgactttagagagtcatttcacctctaaaattctgttccttttgtttagactttcagtaaatagagaatggagagcaactcacatgtacaggtcacttgccctgcactaagctctgaatgaactattttaatccttcctgcataacactgggtttgctactattcaacccatttta

SEQ ID NO: 755873 - DNA, 625 bp, Homo sapiens
accgcacccggccagcctctttcttttgtaaattgcgcatctccggtatgtctttgtcagcagtgtgaaaacggactaatacagcatccaaattaaaaatcggaatgaaaagcaggtttcatcctcaattcatccctagatcaccacttggaccccagctcttagctccagatttccagagttccaagtctacatgaacatgaaagagtcagggagactgtacatcttggcttgggcaggatggtcctgctttatacttgttgtcctggcataattattaatggcaccctccttcactctcaaaagtgtcctagtttacatgagaagtcttagagccatccaaagtcagggggaatcagtgactaaacacaaacttttaggagcaagttcatttattcaartttgtgcaagccttcagatgaagctaagtagatttggcattgttttgtaagtataaagatatttaaataaacttccaaaatatcccaacagaacggttcaataaaagcagtatgtcatgaattttaaaatcatagacaatataggaaaggctatcaatatgtgaaaaattttgaaattcactaataatcaagaaaaatttcaataacaatgaggtaacattttg

SEQ ID NO: 755874 - DNA, 525 bp, Homo sapiens
ggaggggagacagagtcctgcttggggcatctggcaacctcagtcaagtcacagcaggggtgcccaagggccagctttctgcagctgctggaggggtgtcctacaggagttgggccctcctcttgctggccattcccccatgcctcccattggcaagatctagcagggagccaggtgagaaaggarcctgggaaacatccttcacacagtcttagcatcagagcagaagcccgtggcttcctttgctttccctcttccttgttggcctttattatcagttgtattcacttatctgactataaaacagggtaatattagtgagagaggaatctgttactgataaagaacaaggaaaggaatccattaatcccttttgattatcatacagattattccccagtgattattagaaaatacttttatcttaatgaggaaaaatctcaatttatttttaaaatcctggaaaatggaatgccgggtaatattcttatttaacttttgacattttttaaaaagtcatgttct

SEQ ID NO: 755875 - DNA, 624 bp, Homo sapiens
gaacaaggaaaggaatccattaatcccttttgattatcatacagattattccccagtgattattagaaaatacttttatcttaatgaggaaaaatctcaatttatttttaaaatcctggaaaatggaatgccgggtaatattcttatttaacttttgacattttttaaaaagtcatgttctatttggggtatgaacgtgtgtgcccataataattattttcatctgtgtgtgtctatcttgggcctagaaaaaaaatgactcattttcttctaaagattagaattccatgggcatctctttttggtacaattcctttgtttgttcattcctggagataatggagttggtactgatagtgccctccttgtattgtattcagctcagttcaatgagtctttattagggggcctgtcaagtgccaggctgtgcctcaaagrtatggaggcagaggagactcaggcggtgtggaagagcatggcttggggcataggacagacttggctttgaattccagttctaccgcctaagagtctcaccctgtggagctcagttgcttcatcctggatgtgaggatgaacactggtactgcaaggctgttaaagaattgtatgtggtaaagcact

SEQ ID NO: 755876 - DNA, 542 bp, Homo sapiens
tgaacatgtaactcttttttctctaccttatgtagttataaaaatcatttatagtcattgtgtgtgtgtgatgatttttgttggaccagcattatttgctaaaatatagcattgtattttcataacaaatattgtgaggcagaaacttttccttttgtttctttttttgtgtttttaagtagtaataggcatttctgtaactcaaggtaaatatcaaactggaacagtcagtagggaaaagaagggaaaggrgcagagtttgccggatgggaaaactattttacaatttacaaggagtagcagtacttcattttaacctaactgaacacattttatagcgacaccatcacacgtgcagtacatctaaagcttacccaaacctcaattgttctcacattgtttcttcatgacagattctcagaaaaatgaaatgtgtttttagatacttgagtagttacaatccatattttatgtttcatcacttttgaaattctcatgaaacagaaaaagatatagtataaaaatataggcaattattcatt

SEQ ID NO: 755877 - DNA, 623 bp, Homo sapiens
attaattagacaagtgtagaatgttttatcttcagtctcctttagaccaatatcagtctgactgaatttctatgtttaaaatcagttattgtgtcactaggcaaaatcatgtagttaaaagttatgaccatttaaaatgtgaatcaattatttccattcttctgtttattatttaataaactccaaataggaatatctcttccatatgtgagcagtcacccaaaaagtcatccatacattggcaggggagggaaaaaaaaggaactacggagcaagatgataataggaaaaataagaggagagataaaaaaaaatggagaagggtaagaaaaggagacattttattctgagagaaaaaataggttgactgaaaaacatatgttcaacatcagttaagcagattaaagctggaytttggatgtaagctatactcattgatttaacaaatattagtttactgtctgattcgtatttggtattgtgctaagtttatagtaatgaagaaagtggatatggaaaatggctggaagccaagagaaggaagtaaaacttaacccacaaatactatataaatatatattataattagtgctatgatgggactttagctgggagatatttct

SEQ ID NO: 755878 - DNA, 617 bp, Homo sapiens
ttatattgaagatgtgatgtttatacaaggagagaagtatactttctggacagccaagaaagctagtagccagggcatgccatcattttggaaagcctagttggaaatcaggccttgcagtgagaaggaggccattttgctttaggcagtgctcttgtgtgattgtactttctcctctaaagaggaactccttgtgactggtaatttattaagaagtgatatgtattgtttgagggcaagacagaaggctctctcactctctcagggctccctctgtccctctctttcccagggacacatagaattaacatacttttaaaatgtaggattgaaaaattggtgaatgcattcctgtgattcatgtccaaattttatttaaatggcaagyactagcaaaaagaatgttaatgaaaattctcctacagaaaaagcaaaaactaggtacataaacttgccgatagttttatagaatgaagctacatatgtattctcccagggcactagcagaataggagtttccttggctgcccttggagcaggtgactttaggctaacatagctatccatcttctttgagacagatgagtaaatataaaagtatcaacaaaacacttaat

SEQ ID NO: 755879 - DNA, 617 bp, Homo sapiens
ttatattgaagatgtgatgtttatacaaggagagaagtatactttctggacagccaagaaagctagtagccagggcatgccatcattttggaaagcctagttggaaatcaggccttgcagtgagaaggaggccattttgctttaggcagtgctcttgtgtgattgtactttctcctctaaagaggaactccttgtgactggtaatttattaagaagtgatatgtattgtttgagggcaagacagaaggctctctcactctctcagggctccctctgtccctctctttcccagggacacatagaattaacatacttttaaaatgtaggattgaaaaattggtgaatgcattcctgtgattcatgtccaaattttatttaaatggcaagtactagcaaaaagaatgttaatgaaaattctcctacagaaaaagcaaaaactaggtacataaacttgccratagttttatagaatgaagctacatatgtattctcccagggcactagcagaataggagtttccttggctgcccttggagcaggtgactttaggctaacatagctatccatcttctttgagacagatgagtaaatataaaagtatcaacaaaacacttaat

SEQ ID NO: 755880 - DNA, 619 bp, Homo sapiens
gaaatatgcctgtatttgatgaccaatagttttataggctaattattttgttacatacaaaagttatgctttctttactgaattacatctctagtttataagtagggcaaagcaaccagcataatacaaaatatagccattatgatggctattactacaaaatttytctaaagttttgaggagataataataacctcaatgtaatgttttgcaggccggtgctgtgttaaacagctgtcactttttaccacaaagatggttgtatccttaacatgggttaggtgattccatgaatatgatttgtagaatattgagagagctgctgaaataacagcagcatatgagtgctgctgaaagttggccaagaacagtccaagataattttcatagtgttttgtactccaagtgactcttttaaccattagttttgccctgtatgtaggaattgtgcttggccaaagaagtagtatttgttttaagtacatataacatccttataatagcattataacaaacatcttggagtcagatctggagatgtttgctcatttggtcaatcattttttcaaatgacaaatttgaaaaattcatacttcatccaggtataacttagttgtaa

SEQ ID NO: 755881 - DNA, 547 bp, Homo sapiens
agcagcatctatgactaaagtaaatagagttgtcatgggacgccactctgctatgtttttctttcctccctccatactctaaggagttgtactctggcaactcacttgatctttgaaattttcattacattcatcttagagcctaatcttttgacagaaggttctaagtatgatgttctgccttgactacygtggttccatttttctccctaaggagggagggtcttcaacacaaaacacttgcttactaatgatgcaccttaggaaaccaaactcagtcctaacagtctccttctcagtggatggtttatgttattctgagaaatattttaactctttcttagaaaacagccatgcttctatgaccaaagacattagctagatttccagttttgtcataaagaatgttgggccatctcatttgagggataaaagaaagtgaaatgcaatgaggggtaaagaaaaaaaagaaagaagcagtgtggttctggccccagcctggctcagagactggtaagccaacagagggctccaacgtggcttcctc

SEQ ID NO: 755882 - DNA, 501 bp, Homo sapiens
gtggtgttatttctgaggccgctgttctgttccgttggtctatatatgtgttttggtaccattaccatgctgttttggttactgtatgcttgtagtgtagtttgaagtgaggtagcatgatgcctccagctttgttctttttgctttggattgtcttggctatacaagctcttttttggttccayatgaaattttaaagtagtttttttctacttatgtgaagaaagtcaaggtagcttgatggaaacagcattgaatctataaattactttgggcaatatggccattttcacgatattgatttttccggtctatgagcatggaatattttttctatttgtttgtgtcttctcttatttccttgagcagtggttccttcaaggagcctcttgtaaattgtattcctaggtattttattttatttgtagcaattgtgaatgggagttcactcatgatttgtctctgtgtttgtctattattggtgtataggaatgcttgtga

SEQ ID NO: 755883 - DNA, 501 bp, Homo sapiens
gtggtgttatttctgaggccgctgttctgttccgttggtctatatatgtgttttggtaccattaccatgctgttttggttactgtatgcttgtagtgtagtttgaagtgaggtagcatgatgcctccagctttgttctttttgctttggattgtcttggctatacaagctcttttttggttccacatgaaattttaaagtagtttttttctacttatgtgaagaaagtcaaggtagcttgatggaaacagcattgaatctataaattactttgggcaatatggccattttcacgatattgatttttcckgtctatgagcatggaatattttttctatttgtttgtgtcttctcttatttccttgagcagtggttccttcaaggagcctcttgtaaattgtattcctaggtattttattttatttgtagcaattgtgaatgggagttcactcatgatttgtctctgtgtttgtctattattggtgtataggaatgcttgtga

SEQ ID NO: 755884 - DNA, 566 bp, Homo sapiens
tgtgttccaataaaacgctattggtgtgcaggagtgagtgtgtgtgcttgtgtgtgaaatacataaatacataaatgaataagcatgcctgtgttccaataaaatgctattggtgtgattgagtgtgtgtgtgtgtgtgtctgtgtgatgcgtaatgctgaggcatagccatcatcctgtaaaagaggtggcatgctgtactcagttaaacctggtgtagtgctggtaccaaggggaagctcactaaatatttgtggaagaagggaaggagagagagaggaattattcccattttatagatgaagaaattccactgcagagcaccartgccatgtgaggttgaggaagccattgtcattttccctaatgaatctacaaagaaacagaattccataagcaaggtattgaattttgctcctaagagaatcttatacgttcagtcgtcttcagagaaggagagcactgatggcctctggtggatcactggggctctgggatgcaaagtgttattataaaggatatcacatggagagcatttcttcatgtgttttttggctgcataaatg

SEQ ID NO: 755885 - DNA, 573 bp, Homo sapiens
ataataaaaaccaaagtctttttcttttagagcatctcagacccaaattgccacatagtggtcttataaagggaaaagagctttggtgaactttatcaaagtttttgttgctgttgtgttttcatttgtttgtttgtttttatatgaagcaaacttattttttaattggaaaaataagccatggtctaagtattaaaaaaaaaattaaaccctacaaaagtaagtctcactcctagcccaggcttctgaccctagccttctttcccatatacaatcattaataccactgtgacccttctagaaacactttaaggtagaatgttttacaggaggttgagggagggagaaaagaatgagagtgcattctttaaaaaaaaaaaaaaaaccaacaatattgacagattattaagttttaaaaaaagtcytatagtttttttttaaatatcagcatccataagtctactttaatctttgtcacaactgcatagtatggatatgttatctattttaccgcaccgtatcagaggacatttaaattatttaatttattgtttattatgtttgtttatttca

SEQ ID NO: 755886 - DNA, 641 bp, Homo sapiens
gcatttatgaatccacagaaggatgttgggcagcggagtgacctgatcagatttgagtttaacaatttgccaaacatccctaagcaactcacacctgctgactgcaatgaggaataaattacaatggatccaggctggggagaatgagagaagtgactctgactcatttgaggtttgtttccttagcttttgccttatctctattactgctttcttttaattaaattttgtctattttaaaaaattcatatattcactgattcacttgcttattatagttttctttataagtatcacctagttcgatgttaaagataatctaaaaggktgttggtcctttagtaagagaattttacctcttcatgatcaataacatattatataggttgacgctatttctgccacctattatttactttttaagtaaaattttatctgagtacaacaaacatacagaatagtgcacacattgtaaatatacagctgggtgaattttacaaagcaaaccctcctaaatcaagatgtagtttatttctgcactccagaagccttcttgtatccctcccatcattgcattcacaaaaggtaaccattgttctgcctttatcatttggcctggttttcaacttcacaaaattggg

SEQ ID NO: 755887 - DNA, 555 bp, Homo sapiens
ttgataaaatttaacacccatttgtgctaaaaactctcagcaaagtagaaacagaagggaacttcctcagcatgataaagagaatctacaaaataacctacagctaacattatatttaatggtgtcagactgaattctttctcccaaagatcaggaacaaggcaagcatgtctactctcaccacttcttttcaagatagcacagtgcaaccaggcaagcaaaagaaatatagtttgaaaaggaagaatatctgtctctgcatgaccaaggattaggcaaagagttcttagacatgaaatcaaaagcatgawccataacagaaagttggtaaattagagtttatcaaaatgaaaaatttgtgttttgctaaaggcactgttatgagaatgaaaactcaagctacagattgggaaaaaatatttgcaagtcatatgtccaacaaaagacttgtataaccagaatatataaagaattctctaaactcaacagtaagaaaacaagccatccaatttaaaaagcgggtaaaatacttaaaaatacacttcaccaaagata

SEQ ID NO: 755888 - DNA, 675 bp, Homo sapiens
ctcgcactcctgtgaggcttttgcaggtcgaaggcccccctgaggactctggggggacgttgagaagaggggtgtgggaaggtaaagaaacttgctggacaagtcattaacacactttaagcgaatggtgccctgggaagcgcactccccctgcccgggccccctgcccgctcgcggacagattttttatccctgggatcatgagcgtccggtcttgcccacagggcctgtgctgcgacgcacatacatacgtgttgtgtctgtcaataaagtgtaaataaggtctccctgccccacacggccggttgcagtgccagccctcgggggggggtttcctccccttcctcctactgcgcaggtgggaaaaccaagcccaccgcacctcyggtgcacgggacagcgcggccaggccggagcctccggtgcacggggcagcgcggccgggctgaagccctggcgtctggtggctcgtgtagtccaggaggtcttcgttccttctgttccacgagaccctcgtggctgctgggaggtgcagcaggcctacggcccttcccgccaggtttcggggcacatggtgcctcctgtgccctggctgcttgagcgagcccgacggtccagcacggcctgttcagtccacgtgtacagcttggtggcctcggtccagggatccacacg

SEQ ID NO: 755889 - DNA, 675 bp, Homo sapiens
ctcgcactcctgtgaggcttttgcaggtcgaaggcccccctgaggactctggggggacgttgagaagaggggtgtgggaaggtaaagaaacttgctggacaagtcattaacacactttaagcgaatggtgccctgggaagcgcactccccctgcccgggccccctgcccgctcgcggacagattttttatccctgggatcatgagcgtccggtcttgcccacagggcctgtgctgcgacgcacatacatacgtgttgtgtctgtcaataaagtgtaaataaggtctccctgccccacacggccggttgcagtgccagccctcgggggggggtttcctccccttcctcctactgcgcaggtgggaaaaccaagcccaccgcacctctrgtgcacgggacagcgcggccaggccggagcctccggtgcacggggcagcgcggccgggctgaagccctggcgtctggtggctcgtgtagtccaggaggtcttcgttccttctgttccacgagaccctcgtggctgctgggaggtgcagcaggcctacggcccttcccgccaggtttcggggcacatggtgcctcctgtgccctggctgcttgagcgagcccgacggtccagcacggcctgttcagtccacgtgtacagcttggtggcctcggtccagggatccacacg

SEQ ID NO: 755890 - DNA, 658 bp, Homo sapiens
gactctgggcttagccccttctggggccacaggtcaggcaggtccaggccccaaggacctcccagtgacaggcgactgtgagctgggcagacaggagtgaagtcaggtgggggttctggcttgctgacaccagcgtttggagcctcctgctgctgcctggcttccctgcattccctgttccctgcctcaggcaagaaataaccaagccgagttgcctctgcacagcagtgagctcctggtggccctggcttctggggagccctgtggatggcttccttgcccaagtcmaggccttcttgttccctttgtgtgctccagagaaagggggcagcaccagatccagatccagggccaaccaacagaaagctgagtccatcccaaactcgcccattctcagagcacaaagaccccatgatctagggcaaacttgtccaactgttggcccatggaacagctttgaatgcagcccaacacaaatctataaattttcttaaacattgtgagttgttttttgttgttattttgagacagagtctcgatctgtcgcccaggctggagttagtggcccaatctcggctcactgcaagctccgcctcctgggttcacgctcgtctcctgcctcagcctcccgagtagctgggactacaggcgcccgcca

SEQ ID NO: 755891 - DNA, 554 bp, Homo sapiens
tcagagcacaaagaccccatgatctagggcaaacttgtccaactgttggcccatggaacagctttgaatgcagcccaacacaaatctataaattttcttaaacattgtgagttgttttttgttgttattttgagacagagtctcgatctgtcgcccaggctggagttagtggcccaatctcggctcactgcaagctccgcctcctgggttcacgctcgtctcctgcctcagcctcccgagtagctgggactacaggcgcccgccaacacgcctggctaattttggtatttttagtagagacggggtttcaccrcgttagccaggatggtcttgatctcctgaccttgtgatctgcccgcctcggcctcccaaagtgctgggattacaggtgtgagccaccgtgcctggccaacattgtgagttttttttacgattttttttttaaagcttatcagctatcattactgtattccatgtatggcccatgtatggcctcagtgtattccaatgtggcccagggaagccaaaagattggacacccctgacctagggca

SEQ ID NO: 755892 - DNA, 554 bp, Homo sapiens
tcagagcacaaagaccccatgatctagggcaaacttgtccaactgttggcccatggaacagctttgaatgcagcccaacacaaatctataaattttcttaaacattgtgagttgttttttgttgttattttgagacagagtctcgatctgtcgcccaggctggagttagtggcccaatctcggctcactgcaagctccgcctcctgggttcacgctcgtctcctgcctcagcctcccgagtagctgggactacaggcgcccgccaacacgcctggctaattttggtatttttagtagagacggggtttcaccaygttagccaggatggtcttgatctcctgaccttgtgatctgcccgcctcggcctcccaaagtgctgggattacaggtgtgagccaccgtgcctggccaacattgtgagttttttttacgattttttttttaaagcttatcagctatcattactgtattccatgtatggcccatgtatggcctcagtgtattccaatgtggcccagggaagccaaaagattggacacccctgacctagggca

SEQ ID NO: 755893 - DNA, 534 bp, Homo sapiens
cctgagtgtgggatccacccccacaagttctcagtaaacctgacgggcgggtctagcttgtcctgacgtcctcagttcccgctgctggcggggcacaggcaacatgacagagagtcaggtgggagggggtccagacaaaygcctgggacagtcaggccaggctgaaccagcaggcccaccaggctggggccctcacaggagagcccctggggttaggtgaggcagagcagatggaatgtggagctcaggaagccccagccctgggccctactgagcaccctgagggatcctattctcagatactccagctgtggtgagccccaggtgtgtcagggtactgctcagtggcaccccatggaggctcaagttcaagacctcagaccctgcccagcgcagcctccacacacactcaagctgcttcgggcagtttattgaggttttcacgttggggtaggggaagtggcacacacatgctcttgctgtgtacacacagtgaaggacctctcccgcaggcaagcacatgcccacagcttg

SEQ ID NO: 755894 - DNA, 575 bp, Homo sapiens
tggtacccataccctccctggggtggtgaagcagcctgggactggctgacctgagtgtgggatccacccccacaagttctcagtaaacctgacgggcgggtctagcttgtcctgacgtcctcagttcccgctgctggcggggcacaggcaacatgacagagagtcaggtgggagggggtccagacaaatgcctgggacagtcaggccaggctgaaycagcaggcccaccaggctggggccctcacaggagagcccctggggttaggtgaggcagagcagatggaatgtggagctcaggaagccccagccctgggccctactgagcaccctgagggatcctattctcagatactccagctgtggtgagccccaggtgtgtcagggtactgctcagtggcaccccatggaggctcaagttcaagacctcagaccctgcccagcgcagcctccacacacactcaagctgcttcgggcagtttattgaggttttcacgttggggtaggggaagtggcacacacatgctcttgctgtgtacacacagtgaaggacctctcccgcaggcaagcacatgccc

SEQ ID NO: 755895 - DNA, 534 bp, Homo sapiens
cctgagtgtgggatccacccccacaagttctcagtaaacctgacgggcgggtctagcttgtcctgacgtcctcagttcccgctgctggcggggcacaggcaacatgacagagagtcaggtgggagggggtccagacaaatgcctgggacagtcaggccaggctgaaccagcaggcccaccaggctggggccctcacaggagagcccctggggttaggtgaggcagagcagatggaatgtggagctcaggaagccccagccctgggccctactgagcaccctgagggatcctattctcagatactccagctgtggtgagccccaggtgtgtcagggtactgctcagtggcaccccatggaggctcaagttcaagacctcagaccctgcccrgcgcagcctccacacacactcaagctgcttcgggcagtttattgaggttttcacgttggggtaggggaagtggcacacacatgctcttgctgtgtacacacagtgaaggacctctcccgcaggcaagcacatgcccacagcttg

SEQ ID NO: 755896 - DNA, 572 bp, Homo sapiens
gaagaacattgagaatggcccccaagtctggccaggaggttgaagaaaccgaggaagaggctctcctgtcccccacagagcaagagtcggtcagtggtcacctgggacctccagcaggcgcacctgcagcccccgagactcccacgtgcctgccagacaccacgccccaccccrcaccggtggtctgctctgccgacccgcagtaaggaggagagggaggactggtgagcctcctgggccaggtggccaggggccggcctgagtaagcagcagggtctgctgccgctgcaggttggctcttgagtccctggaccctcgcacactgcggctgctgtggagacagcgagaactggagatccaggccttgcggtgggccatccagaatggcgaggacgcccggctctgccacatcctggaagaggtggcggggcttccgcccaagaggtctgcagcacagtccccagcccaacccaaccccgccctgtcctcgcccggactcctggtttctgtctgaccccaaccccaaccgctgaggcagatccttaccctcatccttgcccgcgctgaccctc

SEQ ID NO: 755897 - DNA, 558 bp, Homo sapiens
gagcccaggtgtgcagatgaggcggtgggtctggccacgctgtccccaccccaaggctgcagcacttcccgtaaaccacctgcagtgcccgccgccttcccgaggctctgtgccagctagtctgggaagttcctctcccgctctaaccacagcccgaggggggctcccctcccccgacctgcaccggagatctcaggcacccggctcawctcagacctcccgctcccgaccctacacagagattgcctggggaggctgaggagccgatgcaaacccccaaggcgacgcacttgggagccggtggtctcaaacacctgccgggggtcctagtccccttctgaaatctacatgcttgggttggagcgcagcagtaaacaccctgcccagtgacctggactgaggcgcgctgggggtgggtgcgccgtgtggcctgagcaggagccagaccaggaggcctaggggtgagagacacattcccctcgctgctcccaaagccagagcccaggctgggcgcccatgcccagaaccatcaagggatcccttgcggcttgtcagcac

SEQ ID NO: 755898 - DNA, 470 bp, Homo sapiens
taatttttatcacaactggttttctgtgaggtcgtgcgctttaaactcctgtctgcctgttgaggtggacacctcgcctttccacacccggagagctgcttcaacagccactctgtggatgacaaagtacagtgcctgaggccatcaggacacgatattaaccaggggcgggggcagtaccccatcaggacatgttcttatgaacatgaagctgtggggctgggtaagaactcggagctaactgagaaactgctyaagaagggaaatcaatgcagaaaaatggctgaggaatggtccccccaacttcagctacatcttccgtgactgagacatgggctgagtgcttgcgaacagcctgaggaccagcagcccacagaggaaggggccgtggcagggaaggcactcacccgccctcttggcgctgagggagccgtcgcggtggatgatgacatcactgctgcccagcatca

SEQ ID NO: 755899 - DNA, 623 bp, Homo sapiens
ccttgacatgaggggattattacaattcaaggtgatatttgggtggggacacagagctaaaccacatcaatattgattccttatttactgattttctaatttcctagaattcatctgggccttgtactgtcttttggtgcaggtttaaccacagtcttgactgtgttaggaagtctcctgatgccatggactcagccttgcaaaaatggtctcctctgtattttatccagttctttagagtaggtagggaattttattgattgaaacatctttataaaaagactcttctccttccatccctcctctgaaacrcatttctttctcttgacatttcataaatttctggttatgtttagtaataatagcaagaatagcagtgatgatagcagtagagttgtagtaattgatccatatgctaaaattttatgatgtctcacatttttctttaacgtgtataaactcactgattctttgggaagtcactcagtgggtttgggacgaggctaactgcccttgtcttcccatcaagggagctgtcactcagacaagttcaatcagcacaggccatcccctggccttgggatttgtgtaaggatgagaatgagaccccaaatgccccataa

SEQ ID NO: 755900 - DNA, 633 bp, Homo sapiens
atttccatatttgctgtttcttttactttttgcagaagaaatgcaatatagtcgctactcaggaattttgactgaggttggacattgtttagaaatgggaacaagtttgaaggataggatggagggaaggaaaatattttttattgcttccaatatagtggctttcataaagctgaaagtctcccctggaagaagacctcaggggccctttcctgaacaggtgagaatggtttgtaattaacatattaattggtaggtgcttctgaaatgctggaggatgcttgagaaaggacttgagtagttccagcattaccttttccaaattgttcttgtcataaattsactcagccaaccctcttctttatacaaaggttaacttcccgtccagcaggtgtgggttatcacagtctacatgtggcagtttctgtataatatttgcctctgggtgcccctgtgaaaacagctaaaaatagggacttttggagagagaagtctatcgggacagctaaggactgcaggtgaccttgaagccatgaggataagtccccgctttttggaagaggcagccggaacctgttagactgctactgaagctcggtacgttatctataccggcatctaactgctgccagc

SEQ ID NO: 755901 - DNA, 444 bp, Homo sapiens
cgtggaccacttagcgtccatcccctcttctccatgaggaaaggagcatagagcagcctactttagccagccgggattgactcacctgcactgaagactcacctccactgcagcattggagatttgcctaagaatataactagcgtgtatacatacgtacacaaacacgcacacacaatatgtaaatgtattaagatgactgactaggctgggtgtggtgatgcatgcctgtagttatagttgcttgggagrctgaggtggaaggaccctttgagcccatggagttgagactgcagtgagctgtgatcacaccactgcactccagcttggatgacagagcgagatcctgtctctaaagaaaatgtcagttatggcacagaaagtcctgtgtcctgggaaacctcacagtcccaggcaaactggggtagttggtcaccccagtgt

SEQ ID NO: 755902 - DNA, 681 bp, Homo sapiens
cgctggggtctctgctgcttatggatcctcttttcccatcctcctcatctatctgctcctaggaggcactcctttcctacagtcctgcagattcaactccattccagctttccaacatcctctcctcgtgttcttcccaccctctgcccacttctaatgtctgccaagttccttcctgtttcaaggtctttgcactttctattccctgtactatcagtgttctttcctggattttgcatggctgtgtcagcctaactttggcctcatttcaattgccatctttacagaagggccttctgtggtcacttgattttaatggtcctcatccttcatcactttctattctacaccgtgtttgcttttcttcatcgtaaaatattgcatcttacgtatsatggtgacttgtttatcacatgtctctcctagaagaatgtaggcaaatgtaggcaaactttgtcttgttcaccactgaatccctggtgacctttccagcctctggcacatagtaggtgctcaataaatacctgttgaatgaaggacgaatgaattcagaaagtctggctgctcccacactaggtacaatacacttagggttcctaactcctgactccgaagcatccctgtgagtagagttgactgactagagaagtggtctgttttattttgtttctggatctcata

SEQ ID NO: 755903 - DNA, 616 bp, Homo sapiens
tctaaacttcaggcaagaatgaaatagttcacaagacaatgatttacaaaacagagtaggtatcaaatcattgtgatatagtagccatccttcagtcattagcatttcttgtaaacatataacatgtatatatcataggatgtacctgctgttaccaggtactcgatcttttttcgtgccatgcatgtagtatagcaatgaaaataaaaattacccaaataatagtataattgattttataaatagggatatagggggtattatagaagcttgatctttggcataaatattcatgggattgggtctttgaatgtaaaagtccagattatttyttactgtcagagttaatggttacctcaaatagacaaaattttgaaaaagaagaataaagctgaagcactcacatttccttactttaaaacttactacaaagctacagtaatctaaacagtatggtactagcataaagtcaggcatatacactagtggagtagaataaagattccagaaataaatccttgctatatgatccaatgattattgacaaggagaataagatcattcaataggaaaaagacagtcttttcagcaaaagttgaacataatcaaagaaata

SEQ ID NO: 755904 - DNA, 616 bp, Homo sapiens
tctaaacttcaggcaagaatgaaatagttcacaagacaatgatttacaaaacagagtaggtatcaaatcattgtgatatagtagccatccttcagtcattagcatttcttgtaaacatataacatgtatatatcataggatgtacctgctgttaccaggtactcgatcttttttcgtgccatgcatgtagtatagcaatgaaaataaaaattacccaaataatagtataattgattttataaatagggatatagggggtattatagaagcttgatctttggcataaatattcatgggattgggtctttgaatgtaaaagtccagattatttcttactgtcagagttaatggttacctcaaatagacaaaattttgaaaaagaagaataaagctgaagcactcacatttccttactttaaaacttactacaaagctacagtaatytaaacagtatggtactagcataaagtcaggcatatacactagtggagtagaataaagattccagaaataaatccttgctatatgatccaatgattattgacaaggagaataagatcattcaataggaaaaagacagtcttttcagcaaaagttgaacataatcaaagaaata

SEQ ID NO: 755905 - DNA, 601 bp, Homo sapiens
cgcacatcatgcgcggcgtgatctgctgcggcaggaggttctcgcaggtggtctggttgatgacgcggatctcacccttttgcaggatcagcgcgccagtgcctggggagagggcaggacggggctgagagccgggctgcttcgagggcagcgtcattcgagacgctccccacgggtcattggactagaaaactctggaacagcscagatgcccggggctgacaaacgggtaatccgcgtctactcagtgggctctggcaatagcagccacctagaggaagcaggggcatgctgagatctgccaggcgagttgagagggaacagacgccgtggcaagcaggggtgagggaacaagaagcagagaggcggagggaaggcgccgcaaatgcccgcggggttctgtgagggcattggagctgtaagtcctgttcgttttctttcctctccaaagacgacaaatgttcagcatatgctgtacagtggattctttcaatctagcatttgccaactaacggcctgcttcccttcatacccaccccctcacgtgccttaagcaccactgggcttaaggtgttgctatcttcattacgcgcatgcacaa

SEQ ID NO: 755906 - DNA, 601 bp, Homo sapiens
cgcacatcatgcgcggcgtgatctgctgcggcaggaggttctcgcaggtggtctggttgatgacgcggatctcacccttttgcaggatcagcgcgccagtgcctggggagagggcaggacggggctgagagccgggctgcttcgagggcagcgtcattcgagacgctccccacgggtcattggactagaaaactctggaacagcgcagatgcccggggctgacmaacgggtaatccgcgtctactcagtgggctctggcaatagcagccacctagaggaagcaggggcatgctgagatctgccaggcgagttgagagggaacagacgccgtggcaagcaggggtgagggaacaagaagcagagaggcggagggaaggcgccgcaaatgcccgcggggttctgtgagggcattggagctgtaagtcctgttcgttttctttcctctccaaagacgacaaatgttcagcatatgctgtacagtggattctttcaatctagcatttgccaactaacggcctgcttcccttcatacccaccccctcacgtgccttaagcaccactgggcttaaggtgttgctatcttcattacgcgcatgcacaa

SEQ ID NO: 755907 - DNA, 698 bp, Homo sapiens
acctcagtttccttatctgtaaagtaataattgtatattatctacttcgcgtttccacaaggataaaattaaataatgtatatgaaagtctttcatcaactacaaattgccatacaaatttaagttagtaatagaatcattgtgggaaaatagcataagcattatgttctaagagcaaatcttatgtcatgtatgttattmtctggtggaattagattaattttgttttgatcttaggttttcactgggatctttacagcagaaatgtttctgaaaattattgccatggatccttactattatttccaagaaggctggaatatctttgacggttttattgtgacgcttagcctggtagaacttggactcgccaatgtggaaggattatctgttctccgttcatttcgattggtaaaaaaaaaaaaaaaaagcaccaaattcaaaaacctttctaacaatcagggttcttgcatagcaatgtcatagtttttttgccacacaaccattagcattgtaagtttttctgtaacatttgcattgtcaaaaacttttcctacatggaaaaaaattctcaattatttatgaaaacctttatttcaaagaacatagttacgtaaaagttaacgtattactcagttgctattttcactaagtattgcttctagagactactacagttaatatttctagacctaaga

SEQ ID NO: 755908 - DNA, 623 bp, Homo sapiens
taaaatagaaaatggatggctaaaaaaagaaatacaaaattcaactgattagtataattatatctgggatttaaaatgtaaaaaaaattgtactctttaggtatgataatatttaattccctaaataattcaaaattgactttattattattatcttatgaagacaaacacccccaaatctcaaaaaggttaagtattttacccaagaccttatgcttagtgagtggcgaaatttggttcactgagataataaatacttggtaccttatactatacatactacctttatgatgttaaaggcaataattttcttatttaaatgtagcaaagagttagaggatgtatactgcaagacagtttggagtyactcattaaaaaagtcactctaactctgtcaagaattggaggaaagggataaaaagaaaactggatgagttagtgagagatttaggggataaatcagagctcatagcatagtaagtatgggacagaccagtagggatagaagattggaacactggcaagtaagtgaaatagagtagcctgatattgacttaagaatactactggtaataagaaaagggaattgaggggagaatgttctgtagtctaagaaagcactc

SEQ ID NO: 755909 - DNA, 629 bp, Homo sapiens
aaaggtacaactttaataactcaatttatttaaaatttttatttaaatggaattaagtagtaattttcttgacatcaccttacacttttgaacatttttaacttccaaatagcttttagatcttcataacatttctataagcatcataggacagatatctcatttaataaattaggaaacggggtaatatagatttagcgatttgctcatagtagagttaaggcttataagctcttaatctagtatccatataaatcaaccaaamctcaaaaaattattgggcaactgttatgcacccagcattgtggtaggtgcttcggaggatagaaatgttataaaatactatccaaaaccaaaataaatttactttctatttggggagataagattttatattgtcttttgcatagtcttggcagttttgcccagccttcaaagctctctcagatctgtccaagtcaccattctttattattaatgttcaataaaaattcatgtttctagcttatcattattcctactatggcatgagtcaagaaattttctgaggttttaaaaaacaattcctcaaattacttgaatgtactttgaaggttgaagtctcttaggacttaaagagaggatgaaat

SEQ ID NO: 755910 - DNA, 602 bp, Homo sapiens
cgggttcaagtgactctcctggctcagcctcctgagtagctgggactgcaggtgcacaccaccatgcctggctaatttttttgtatttttagtagagacggggtttcaccatgttggccaggctggtcccaaactcctgacctcaggtgatctgcccaccttggccttccaaagtgctggaattacaggtttgagccactgtatctggcctatgtagactattaatctctccaattttgtttgggttgaattagttttcctayatggggatagtttggtggaaatgtcagtcaaggaactgttagttaagtttactcttaactaaaaggatcagattcatgacccaaacttgaccaaccagatgtttacttcctggaattttggtgttaaacatgaatgtcaggaaaaaaaagaaaaaaaaaaaaaaagaaaaagaaagaaagacaaagagcctgaaagcagttgagctgattcattctagattacagcaccttacagaaaccaccaaaagtctaccaactgggctatctgctcttatagttttctctgctcctggcatttttcagtctagattgtagctatcccttaactctgtgaactat

SEQ ID NO: 755911 - DNA, 593 bp, Homo sapiens
gtctgactcctcctactcaaatgtaagctccaagattggaagagtttttcttggttttattatttcagtgcttagaacagtgctagacacataggaggcattcagtaaatatttgttgagtcaactgaattagggtttttccccagcattaattagcctgtaaaatctgagaaggcagaaactgttcagttttgctcactgctatctccagcttctaatggacatacagtaacccttcataaatatttgctgaacgagtgattcagtgaacaaatgaatagagaagaccaacatccgaaaagttattttattttcaagcctcatgtctttaactgttttayatcagcctttcttaagttgaccgtcattaatatttgctgaatgaatgagtcagtgataaacagagaagaccatcaccctaaaataacgacccctccacttttaagtcttacgtctttaatgggtttcatataatctttctgcgctctttttactgtccagtgtgggagctgacactagtttgccttaagtccttaaaaatcgcacccggaggcgcagtgtcataggtaacccaagctttcctagtaaacatg

SEQ ID NO: 755912 - DNA, 439 bp, Homo sapiens
gacgggctgcaggtcccgagccctgccgcgcgggaggcggctgaggccccgtgagaattcgagcgccgcaggggcaggctggcagtgctgggggacccggtgcactctccgcagctgctggctcgggtgctaagcccctcactgcctcgggccagcggtgccgacccgccgctccaagtgcggggcgggcggagcccgcgcccacctggaactcgcgcgggcccgccagcgccaaccgcagccscggttcccgcccgcgcctctccctccacacctccccgcaagcagagggagccggctccggccttggccagcccagagacaggctcccacagtgcagcggcgggctgaagggctcctcaagcactgccagagtggacaccgaggccgaggagacgccaagagcgagtgagtgctgctagcaggttgtcacctctca

SEQ ID NO: 755913 - DNA, 646 bp, Homo sapiens
ttaagcccgttggaaaagcgcagtattcgggtgggagtaacccgattttccaggtgccgtccgtcacccctttctttgactcagaaagggaactccctgacccgtggcgcttcccaagtgaggcaatgcctcgccctgcttctgctcgcgcacggtgcactcacccactgacctgcgcccactgtctggcactccctagtgagatgaaccsggtacctcagatggaaatgcagaaatcacccgtcttctgcgtcgctcacgctgggagctgtagaccggagctgttcctatttggccatcttggctcctctgaggctttcttttacttcttagcttaagctgtatgctagagagaaacaatttttctttctttcttcctttttttttgagattgagtcttgctctgtcgcccaggctggagtccagtggcacggtctctgctcactgcaacctccgcctcctgggttcatgacattctcctgcctcagcctcctgagtagctgggagtacaggcacctgccaccacgcccagctaatttttttttatatttttagtagagatgaggtttcaccatgttagccaggatggtctcgatcttctgaccttgtgatccacctgccttggcctcccaaagtgctgggatta

SEQ ID NO: 755914 - DNA, 646 bp, Homo sapiens
ttaagcccgttggaaaagcgcagtattcgggtgggagtaacccgattttccaggtgccgtccgtcacccctttctttgactcagaaagggaactccctgacccgtggcgcttcccaagtgaggcaatgcctcgccctgcttctgctcgcgcacggtgcactcacccactgacctgcgcccactgtctggcactccctagtgagatgaacccggtacctcagatggaaatgcagaaatcacccgtcttctgcgtcgctcacgctgggagctgtagaccggagctgttcctatttggccatcttggctcctctgaggctttcttttacttcttagcttaagctgtatrctagagagaaacaatttttctttctttcttcctttttttttgagattgagtcttgctctgtcgcccaggctggagtccagtggcacggtctctgctcactgcaacctccgcctcctgggttcatgacattctcctgcctcagcctcctgagtagctgggagtacaggcacctgccaccacgcccagctaatttttttttatatttttagtagagatgaggtttcaccatgttagccaggatggtctcgatcttctgaccttgtgatccacctgccttggcctcccaaagtgctgggatta

SEQ ID NO: 755915 - DNA, 646 bp, Homo sapiens
ttaagcccgttggaaaagcgcagtattcgggtgggagtaacccgattttccaggtgccgtccgtcacccctttctttgactcagaaagggaactccctgacccgtggcgcttcccaagtgaggcaatgcctcgccctgcttctgctcgcgcacggtgcactcacccactgacctgcgcccactgtctggcactccctagtgagatgaacccggtacctcagatggaaatgcagaaatcacccgtcttctgcgtcgctcacgctgggagctgtagaccggagctgttcctatttggccatcttggctcctctgaggctttcttttacttcttagcttaagctgtatgctagagagaaacaatttttctttctttcttcctttttttttgagattgagtcttgctctgtcgcccaggctggagtccagtggcacggtctctgctcaytgcaacctccgcctcctgggttcatgacattctcctgcctcagcctcctgagtagctgggagtacaggcacctgccaccacgcccagctaatttttttttatatttttagtagagatgaggtttcaccatgttagccaggatggtctcgatcttctgaccttgtgatccacctgccttggcctcccaaagtgctgggatta

SEQ ID NO: 755916 - DNA, 601 bp, Homo sapiens
acaaaaatcaacttaaataatttaaatacttaaaacctcaaagtgtaaactcgtagaagggagcatagagaaaaagtttcagaacactggttttgataattatttcatagatatgataccaaaagcacaggaacaaaagcaaaaatatacragttagactacatcaaattaaaaacttttacatggcagaggaaatattctgtaggtataaaggcaacctacacaatgggagacaatatttgaaaaccgtatatatcaaataatgggttaatttccaaaatatctaaggaactcctacacctccataacaaaaaaccaaatagcatgcttcaaaaatgggcaaaggacttaaatagacatttctccaaagaagacataaataaaagcatacaggtgtatgaaaaggtgttcaataatgccaacatgagggaaatgcaaatcaaaaccacaatgggatattacctcacacctgttgggatggctgttataaaaaataatataatgataagataaaattgttgttgatattgtgcagaaatagttcttgcacactgttggtgagaatgtaaaatgatgtagctgctatggaaaatattatgga

SEQ ID NO: 755917 - DNA, 565 bp, Homo sapiens
cccacagtgaaataggtagtagtaccactaactcactctgattttttaaaatttgttacagcagcaaattattctatagtataaatattagaatggaatttacattgaatgttggtatatttctgcatttctcattacatttaaattaactaaagggtttttgtttaaagcatcccttctcttgaggaaaatgtaggtagaattataaaatcttgtggttttacatatgggactttctttyacttaatttgcattaagctgccacatttatgtctttaaagaataaacaaatttacatttttgcatacaacttgcctcatcagaaaaagcattgaatattcagatatgtgtaatttgtctttgctgtcacattggtttagggtgtgatttacctgccttttctaagatatttaagttataccatgattaaataacatgaaggtgatagaccaatggaacattttaatctcacgaagaaaacaggtgcacaaatgttagagagcaccctactcccactcaccctgcaatataccaaattcaagtgttgcctatgataatattcaac

SEQ ID NO: 755918 - DNA, 601 bp, Homo sapiens
tgactcctgctatgcatttgggattatgtttcttgccgagggtgctgtggggaaaataatacacataattctaatatttataaagtgtattagtccagtaggtgagaactacatttaaaaattgttaagtactaagagtacttttaattgtattttaattgtaatcttaactactagggattaatgggaggcactgtaaaacagwataacaactcaacagtggtgcccaggaaattgttgtcgagatcaggcttaacagttgacaacataaaagcagaagtgaagaaaattagaggtagaaagaacaagggtgggtgtaaaggtgctgggctggaaaacagctggatacattccaggcatagaaatgatcaatgtgatcccagtgtatcgaacaaagggaccagtgctgcaaaattggctgaagaaaaagacaaggcatgggcactgaaagattttggtccttctcctagaaagtgttatgtgattatgggaaattttagtggggaggtaccacggcaggatttaggttttcagaagaatgtcttgattgttatgtaacaaagagattatagaagtgcaagagtgaaagattccaagtggt

SEQ ID NO: 755919 - DNA, 567 bp, Homo sapiens
gttcctgggccaaatgcgttatttatgttgcaagttgtctcagctgctttacaacccattttgaacacgaataaaaaaatcgctagaatttgctttttgtctaacatcatttccatagtctaaaataaacagcaagtaataagtcattaactaaaaatcataaagtaagaaaggcccattaaaatgatatataacataaccatatttatttaagagtgtattccaatataaaatggcaaattccaacaatgcaaaaaccacaattacgtttgcaccaacctaatagctattagttttcaaataacttgacacaattgctcatgcttctgttttatcctggccaaacatcttctattscagattctgccaaaattctgctactcatctctccatatgtaagtatagagggactatggtatttggtttatatgacattcaaaattgaaataacctactcagatatttagttggaagttcacctaattttttgaacatcagttacaggtcttttaggcagagccatatctgagtggaaaaactggatgtagtcatcctcttggtgtgtct

SEQ ID NO: 755920 - DNA, 632 bp, Homo sapiens
gggatatgaagccaggcaggaaggagccgccgctgtgtgctctgcctgggaatgctgaccatgggcctctggtactgtcaggccactgggggagtcagtgcggtccaagctctgcacacaggtcacctggccaaagcacttaggttgctgttcagtttcctgagaggtgtgcacctgggagggtcgtagccatgtcccactgccaaggcatccaraaaacaggtggctgtctctctcatcttacatccgccattaccctctcaactccgaagtaaagaagtattgtacaaagagaaatccttcacagttacttaagatgcccccccactctgaacactgtatgagtggcacccagcacctacaatttcaggatggacactccagttgtccctcgacccccaaacaccctaccaatgtcacacactggcttttgccaaaccctcttcaacggaacatttccctctctccttcgggaaagcatcattacgggaattacaaattcattccgaatcagatccaaatacattaaaaaaatcagccttgtcattatcacagtgttttctccccagaatcctgcagaaaggccacataccatttctggctgtgtcactggtgctggccacacaccagag

SEQ ID NO: 755921 - DNA, 626 bp, Homo sapiens
aaagtataaaatttctagaaggaaacataggggaaaacttcatgcattgatttggcatgattttttgcatatggcattaaaagcacaggtgacaaaagcaaaaatagagaattgggactacatcatacttaaaaacttctgtgtatcaaagtacacagtcaacacagtaaaaaggcaacctgccagaatgagagaaaatatttgcaaattatgtatctggtgaggggttaatatccagaatatataaagaacatttaaatctcagctacaacaacaaaataagtaactcaatttaaaagtgggcaaaggccttgaatagacatttcttcaaagaggatatacaaatggccaaataagcacatgaaaagatgctcartatcactaacattagataaatgaaaatcaaaaccacaatgaaatatcgcctgacatccattaggatggctacaataagaaaaacaaagtgtcgacaagggtgtagagaaatcgaaaacttaatgtaaagttggtgagaatgtaaaatggtgtggccactatgtaaaccagtatggtcattcctcaaaaaattaaagatagaactatcataggatccaacagtgccacttctggttacatacccaaaggaa

SEQ ID NO: 755922 - DNA, 626 bp, Homo sapiens
aaagtataaaatttctagaaggaaacataggggaaaacttcatgcattgatttggcatgattttttgcatatggcattaaaagcacaggtgacaaaagcaaaaatagagaattgggactacatcatacttaaaaacttctgtgtatcaaagtacacagtcaacacagtaaaaaggcaacctgccagaatgagagaaaatatttgcaaattatgtatctggtgaggggttaatatccagaatatataaagaacatttaaatctcagctacaacaacaaaataagtaactcaatttaaaagtgggcaaaggccttgaatagacatttcttcaaagaggatatacaaatggccaaataagcacatgaaaagatgctcaatatcactaacattagataaatgaaaatcaaaaccacaatgaaatatcgcctgacatccattaggatggctacaatargaaaaacaaagtgtcgacaagggtgtagagaaatcgaaaacttaatgtaaagttggtgagaatgtaaaatggtgtggccactatgtaaaccagtatggtcattcctcaaaaaattaaagatagaactatcataggatccaacagtgccacttctggttacatacccaaaggaa

SEQ ID NO: 755923 - DNA, 623 bp, Homo sapiens
gatcctcatcagatccactctccaggcagccacctcctgggacctgcactgatgagcatcacaattaatgtcacaattgttaaaaaatgttaaataccttctgactccccttttctctcaatataggtctgtgggtgtctcttctgagctacaccagtttccaggttacctgggaccatggataactctcagatcagcaacttgtcagttgatttccaagctgctgttggctggactcagactcagcagggagcacctgggcgagccctgtgctgcgggctggactccggcccatctcgctgattactcttgcttttgctccccagtgtgtcctcaagaggtcagagcctgcttgttgtttcttcatgaccacgggaggaggggcaccaacatgagggtgctagcatctccccagtggtggcttcccagggctggggaaaccctgggggaggggttggsacagggacctctgtcgcttgctgtcactgcctgggtcaactgcctggcagggctggccgctcgtgctcagaaggctgaggccttacctgccttctcctctcacccagcgcccatgtaaggacacatctgagttggcattctgtgtctgctcttgagctactcgc

SEQ ID NO: 755924 - DNA, 641 bp, Homo sapiens
ttgatgctcaccttatatgaaaactacagagcaagttttattattgttcagacacactaacacctattgcctggttattgttctaatgacgacgtgaaatgatgatggtgcactatggatgtggacagtgtgcagccaagacaaaggagtcagggcatttgtgttgctgtggaaagaggttggagctaaaactcagccaaaccaaagcaagtcacttccttgtctgggcctcggtttcttcacctggaaatacggatamaggagagcccagccagatcactgtcatgatcttttaatgcctaatttaacaatattttatgagaatgaatttgtcctaaattctgaaccatctcacttccaggcccaggatgcaagggtacactctagttagttgttaaaatgctgaaatatttttatatgtttctgtagctgcagtaaatagcccatgccctgaaccccacaagtacacacctcccaaccaccctggccaccccatgatctgacaatcaaagagttaatgtctagcacagtggggacctccagggccctgctccagcaggagggctggctgatagggcagtgcccaggacatgccaaatacttcacaaatcacccctgccactctgaagcattagacttca

SEQ ID NO: 755925 - DNA, 641 bp, Homo sapiens
ttgatgctcaccttatatgaaaactacagagcaagttttattattgttcagacacactaacacctattgcctggttattgttctaatgacgacgtgaaatgatgatggtgcactatggatgtggacagtgtgcagccaagacaaaggagtcagggcatttgtgttgctgtggaaagaggttggagctaaaactcagccaaaccaaagcaagtcacttccttgtctgggcctcggtttcttcacctggaaatacggatacaggagagcccagccagatcactgtcatgatcttttaatgcctaatttaacaatattttatgagaatgaatttgtcctaaattctgaaccatctcacttccaggcccaggatgcaagrgtacactctagttagttgttaaaatgctgaaatatttttatatgtttctgtagctgcagtaaatagcccatgccctgaaccccacaagtacacacctcccaaccaccctggccaccccatgatctgacaatcaaagagttaatgtctagcacagtggggacctccagggccctgctccagcaggagggctggctgatagggcagtgcccaggacatgccaaatacttcacaaatcacccctgccactctgaagcattagacttca

SEQ ID NO: 755926 - DNA, 585 bp, Homo sapiens
taaaatgcaccaatcagtgctctgtaaaatgcaccaatcagtaggatcctaaaagtagccaatagcagggaggattgaaaaaagggcactctgataggacaaaaatggaacatgggtggggacaaataaggggaataaaagctggccaccccaaccagcagcggcagccctctcgggtccccttccatgctgyggaagctttgttctttcgctcttcacaataaaccttgctaccgctcactctttgggtctgtgccatctttaagggctgtaacattcaccacgaaggtccatggcttcattcttgaaatcagcaagaccacaaacccactggaaggaaccaactccagacacactcagacccatcagattggcaaaacatcaaaatactcatcaggcaaagattgggaaagatggagagaaacaggaaatcccatactaaacatcagagtataaattcataggactttgcagagcaaattggcaacatccagttcagctgaaaatgtgcatactctgatcttccagtttaaaatctgtaaatggcctgaaaaaattcttacatatgagcctaaaaagacatgt

SEQ ID NO: 755927 - DNA, 533 bp, Homo sapiens
gctgctccacatcctcatcagcatttggtgttgtcagtgtcctggactttagccactctaataggtagatatcttatggttgtaaatttccctaaagacataatgtggagcatctttccacatgcttgcttaccatctatatctcttctttaatgacgtgtctgtttaggtttttggcccccttttatttgagacagggtctcactgtcactcatgctggagtgcagtggtgcaatcatggctcattataaccttgaccttccaggctcaggtgatcttcccacctcagcctcctgagtagctgrgactacaggcatgtgccattacacctggctagatttttatatttttcttgtagagatggggtttcaccatattgcccaggctggtctcaaactcctgggctcaaatgatgcacccaccttggcctaccaaagtactgggattacaggtgtaagccaccatgtgcagcccggactggcccatttttaaaatcaggttgtttattttcttattgttgagtgttaagagct

SEQ ID NO: 755928 - DNA, 640 bp, Homo sapiens
taaagcagtggtccccaacctttttggcaccagggactggttttgtggaagacaatttttccacagatagtaagggggttggggtgatggtttcaggattcaagtgcgttacatttattgtgcactttattcctattattacattgtaatatataatgaaataattatatgaatcagtgggagctccaagcttattttcctgcaactcagcagtcccatctggggatgatgggaggcagtgacagatcatcaggcattagattcttataaggagcacacaacctaggtcccttgcatgcgtagttcacaataggatttgtgctcctttsagaatctaatgccactgctgacctgacaggaggtggttactgctcctcaggcagtaatgtgagcaatggggagtggctgtaaatgctgtgtggcctgggggttggggacccttgtcttgtcttcactaggtatagtattctgggtttgcaggtattttctttcagtacattgtatctatcttccccttatttcctggcttttaatgttgcaggtaagaaatcagctgtctgtctttgaggatattccctcaggctacttctgtggttttttagaaaatatattatttttattctttcagactgtcttggtt

SEQ ID NO: 755929 - DNA, 629 bp, Homo sapiens
ggtcagaaacaagagcagtgtctccaggatcatcttgtccttacttctttatgtttactgcttactccaacacccttccccacctatggctactgtgcatagcacatctatattcaatagtgcttctgttatacccacttgcctcatcaaaactcattcatccagtgtcctaataccacaagtttttgctagttgatcctgttatgtcaaaaaactaaaagaatcctagaatgtcagagtaggaaagtctcaaacatataatcttacccatttccttcattttaaaaatcagaacagtggcccagaaaagacaagacatttgatagtgcctaagaacctcaatggatgtgcagtattagagtacaggaagaaaataaaccagaacctcttttatattgattttatattaaagttgagaaagaaattaaggtttacttytacataacatgcaggctggcactggttctatcagcctgcagttaggagatcacttattacctattgtacatgatgggcctgaaagaagaatggctttaaacacagtttagagatgacagtggaccctcttgtttgcttggttttagaatattacaatatattgaaacttatatgctttaggatttcactac

SEQ ID NO: 755930 - DNA, 629 bp, Homo sapiens
ggtcagaaacaagagcagtgtctccaggatcatcttgtccttacttctttatgtttactgcttactccaacacccttccccacctatggctactgtgcatagcacatctatattcaatagtgcttctgttatacccacttgcctcatcaaaactcattcatccagtgtcctaataccacaagtttttgctagttgatcctgttatgtcaaaaaactaaaagaatcctagaatgtcagagtaggaaagtctcaaacatataatcttacccatttccttcattttaaaaatcagaacagtggcccagaaaagacaagacatttgatagtgcctaagaacctcaatggatgtgcagtattagagtacaggaagaaaataaaccagaacctcttttatattgattttatattaaagttgagaaagaaattaaggtttacttctacataacatgcaggctggcactggttytatcagcctgcagttaggagatcacttattacctattgtacatgatgggcctgaaagaagaatggctttaaacacagtttagagatgacagtggaccctcttgtttgcttggttttagaatattacaatatattgaaacttatatgctttaggatttcactac

SEQ ID NO: 755931 - DNA, 634 bp, Homo sapiens
ggtggataagctttttgatgtgttgctggatttggtttgccagtattttgttgagaactttcgcattaatgttcatcaagaatattggcctgaacttttcttttttgttgtatctctgccaggttttggtatcaagaagatgctggcctcatagaatgagttagagaggagtcccttcttttcaagtttttggaatagtttcaataggagtggtacaagctcatttttgtacctctgctagaatttagccatgagtycatctggtcctgggttttattggttgttaagctatttattactgcctgaatttcagaactcactactggtcttttcagggattcaatttcttcctggttcagtcttggaagggtgtatgtgtccaggaatttatccatttcttctagattttctagtttatatgcatataggtgtttataatattctctgatggttgtttgtatttgtgtggagtcagtggtgatatcctccttatcatttccaattgtgtttatttgaatctttactcttttcttttttattagtctagctagtggtctgttttattaattttctcaaaaatcagctcctggattcattgatcatttaaatggcttgtcatgtctctatctccctt

SEQ ID NO: 755932 - DNA, 555 bp, Homo sapiens
tttgcacattgattttgtatcctgagactttgctgaagttgtttatcagtttaagaagctttcgggctgagactgtgggggtttctagatatagaacaaacaaacagggataatttgacttcctctcttcctatttggatgtccttcatttctttctcttgcctgattgtctgggccaggacttccaatactgtgttgaacaggagtggtgagagagggcatccttgtcttgtgccagttttcaaaaggaatgcttccagcttctgcccwttcagtatgatgttgactgtgggtttgtcatagatgactcattattttgaggtatgtttcttcaatatctagtttattgagagtttttaacatgaaggggtgttgaacttttcaaaagccttttctgcatctattgtgacaatcgcgtggtttttgacataagtgctatttatgtgatgaatcacatttattgatttgcatatgttgaatcaaccttgtatcctggggataaaacctattcaatcatagtgggtaagatttttgaggtgctgctggattcggttt

SEQ ID NO: 755933 - DNA, 583 bp, Homo sapiens
aatgtggtgagtctgaattgaaatatgttataagtattaaaaaaaaaaagtaagtggggagctagttggcttaacagaaggctccaacaattgtcccctccaaaggagcatcaaatttaacaactatgtacacataaacaacaccttcataagaaccaaaaatcaggtgagcactcaccttacctagttttagattcctatcactgaaagatrcactgaagaggaagaaaaggctgtcgaattgctgacaccatccctccccagtcgccccacaatagctgtgtggtgtggagagagaatccatgcacttgggaatgggaaagtgcagtgactgggagactttgctttgaattcagtaatgccccatcagaggagaaagcaaaactcggctgaactcagtcaacactcacccatgtagggagcatttagaccagccctagccaaagaggaatcacccattccagtggttggaacttaagttccagtaagcctcaccattgcaggctaaagggccctatggccctaaataaactccaaaggcagtataggccacaaagactgcaactcctaggcaagtcctagt

SEQ ID NO: 755934 - DNA, 583 bp, Homo sapiens
aatgtggtgagtctgaattgaaatatgttataagtattaaaaaaaaaaagtaagtggggagctagttggcttaacagaaggctccaacaattgtcccctccaaaggagcatcaaatttaacaactatgtacacataaacaacaccttcataagaaccaaaaatcaggtgagcactcaccttacctagttttagattcctatcactgaaagatgcactgaagaggaagaaaaggctgtcgaattgctgacaccatccctccccagtcgccycacaatagctgtgtggtgtggagagagaatccatgcacttgggaatgggaaagtgcagtgactgggagactttgctttgaattcagtaatgccccatcagaggagaaagcaaaactcggctgaactcagtcaacactcacccatgtagggagcatttagaccagccctagccaaagaggaatcacccattccagtggttggaacttaagttccagtaagcctcaccattgcaggctaaagggccctatggccctaaataaactccaaaggcagtataggccacaaagactgcaactcctaggcaagtcctagt

SEQ ID NO: 755935 - DNA, 583 bp, Homo sapiens
aatgtggtgagtctgaattgaaatatgttataagtattaaaaaaaaaaagtaagtggggagctagttggcttaacagaaggctccaacaattgtcccctccaaaggagcatcaaatttaacaactatgtacacataaacaacaccttcataagaaccaaaaatcaggtgagcactcaccttacctagttttagattcctatcactgaaagatgcactgaagaggaagaaaaggctgtcgaattgctgacaccatccctccccagtcgccccacaatagctgtgtggtgtggagagagaatccatgcacttgggartgggaaagtgcagtgactgggagactttgctttgaattcagtaatgccccatcagaggagaaagcaaaactcggctgaactcagtcaacactcacccatgtagggagcatttagaccagccctagccaaagaggaatcacccattccagtggttggaacttaagttccagtaagcctcaccattgcaggctaaagggccctatggccctaaataaactccaaaggcagtataggccacaaagactgcaactcctaggcaagtcctagt

SEQ ID NO: 755936 - DNA, 599 bp, Homo sapiens
aggcatcttaaatttaatgcatccactttgggaggctgaggtgggcagatcacgagatcaggagatcaagaccatcctggctaacacagtgaaaccccgtctctactaaaaatacaaaaaattagccaggcgtggtggcaggcgcctgtagtcccagctactcgggaggctgaggcaggaaaatggcatgaacccaggaggcgtagcttgcagtgagctgagatcrtgccactgcactccagcctgggcgacagagcaagactccttctcaaaaagaaaaaaaaaaaattagtgcatccaaagctgaactcttgggcttctcccaaatccatctctttttagtctctctcatctccacaaatggtccctcagtctacacaatctcaagggaaaaatcagctcgaatctttccttcaatcccccataaccaatctatctcccttactcaaaatgtatcctgaacgtacagcctctcttctttccaatccttaattcactcttacctgggctcctccactagccttctcattggcttccatgtttccccacttgcctccctttagtcccttctcctccctgcattgggagaacttattaac

SEQ ID NO: 755937 - DNA, 620 bp, Homo sapiens
tctttttacctgtgaaaataagaaaaatatattttaataaaataaacacacaattaaaaaaactaacaaagtgaaaacaaaacagtaagccatattgagtgtttaatgattataatacagggaaataaattctccctatagaaactcatattttatttaattaatcttataattttctgttgatgttaccataggaaaggaagacaaaagaaaaatgaaagtagaaggtacttagtgggaaagctatgagaaaacaaaattacacacacacacacacacacacacacacacacacacacacacgccccaktaatctttgaagctcaggagaataacaacagtcatgaatgtacaattacattgaaggatgatgcaatgcagaaggcaaaattaaaccttcatggttaccaaatcacttttaaaaattaaaggcaaaagtaataaagctgcgatttggtaagttaaagggaaaaaataataaaaaccctggaatgattacattgccagagcttgtcttaaaaacacaaattcattataaaaataggcagaacaactaaatgaagtatgaattctacaagaagcaaaatctgttatgttacagattcttaagttaccaaaaa

SEQ ID NO: 755938 - DNA, 516 bp, Homo sapiens
tttacttttcttttttttcccctggggagaacaattaagctctagtctcttagtaaattttaagtatatagcacattatcattaaccaatcatcatgctgtacattagatctctagcacttaatcttgaaaatttgyattctttgaccaacattccctgtatccccctgcccagcccttggtaaacaccattctattctctgtttctgtgagtttgaattttttatattccaagtataagggagatcatgcagtatttgtctttttgtgtctgactcatttcacttagtgtaatgccctctaggttttcgtgttgtggaaaatgtcaggatttccttatttttaaatgctgaataatattcctttgtgtatatgtagtatattttctttatttattcactaagggacacttaggttgtttccatatcttggctattgtgaataatgctgcaatgaacatggaaatgccgacatcttttcgagaggcggatttcatttcttttggatgtatacccaa

SEQ ID NO: 755939 - DNA, 603 bp, Homo sapiens
cctcagtttacaacatttttggtgaccacgaagtgaatggagacagcaggcttactgtctcctttgcctctggggttggagcacgggcctcaggaaacctgtgaccccaggcaccaccgggaggacttcagcccagaagggagatcagctctcccctgacccagtgcccctacccagcagcaccatggaacctaaagagagactacaggatgaattcaaaaacagcrtgcttcaggaactgcggtaaggttttggaggcctaaggcaggacccatcccttggacagaaggggagcctgatcacctcctggggtgtgctgaatagtttgacccacaggggctgggggtgatgagagtgactcaccaattcagatgaaactcacaccccaccgacacaggacacgagagtggctcactaagtcagctagtaatctggaggtggtgagagtggcgtgccaccccaactgggaactagaggtggcaagagtggctctccaccccaactgggaactggaggtggcaagagtggcttgccaccccaactgcaaaactagagggggcaagagtggctcaccaccccgattgcaaacatgagaactaaaag

SEQ ID NO: 755940 - DNA, 480 bp, Homo sapiens
gtgggggctccaatgccacatttcccttccaaactgccctagcagaggtcctcaatgagggctccacccctgcagcagacttctgcctggacatcaagtgtttccatacatcctttaaaatccaggcagagcttcccaaacctgaattcttgacgtctgtgtacctgcaggctcaactgttgaacctkccaaggctaggggcttgcaccctctgaagcaacagcctgagctgtaccatggatccttttagccatggctggagctggagaagctgggatgcagggaggcagggtactaagtcttgaggttgcacacagcagtggggccctgggcccagcccatgaaaccattttttccttctaggcctccagatctgtgatgggaggggctgctgtgaaggtctctgtcatgccctggagacattttctccattgtcttggctattaactcattactcaggcaaatttctgcagtcagctt

SEQ ID NO: 755941 - DNA, 573 bp, Homo sapiens
ccatgctggagtgcagtggtacaatcagagttgacttcagccttgaactcctgacacaggtggtcttcctacctcagcctgctgagtagctgggactacacttgctccatgtgtcactatttttgttgttgttgtagagacgaggtctygctatgttggccagtctgctctcaaacttctggcatcaagcgatcctcccacctcggcctcccaaagtactggaattgcaggtgtgagctaccatgcccagtcattatttttaaaataaaaactttttctgcagaaaatttagtggtctgtattataaatgatcttttcacagattgggacattattgctaattgtttaacccattcttgagagatgaagctagtcatgtatgctgagttatgcaacaacacagaatgttgccaagcctgccaagaagtgcacaaccattcttatcttaagtagacatgcagcttttcagtcttttgtcatttgctttgggggggtttgtaaaaaatatttggggaaatagtcattgatcctctttcacatgttctttggttttctcttaaaattatgtcataa

SEQ ID NO: 755942 - DNA, 598 bp, Homo sapiens
tggtatcatgaaagcagccatacctaaataaatgagcatgggtgtgtttcagtgaaattttatttagttacaaaaacagatcgtaggtcagattttgcgcacagagtgttatttgctgacccctgagttaggtcacaatagcaaagagacctcaatagctcacttaagccagtcaaagttcatgtctctcatacttaaagaatctcagtatagagttcagagctgatcgaacaatttggyggtgtcaggaaccctggaaaaattcttcttcttgctggcaagtcttaatgtaagaccctcaactcattttcccagctatctgctctagctccatttatcagctttgaatttcagccagtaagaatgggaatgcaaggaaatgggggacagaccaattttctttaacagcgaagtcagaagttgttcacattgcttttctccacacatggctggtcactcatcaatcacagggccacctctagctaaaagaaaagttggagatgtgcagattttggaaagccaagagcacttctatgttctattgccagaggaagaaagataaaaaaaaaagatgaaatagataagcagtgattgttcc

SEQ ID NO: 755943 - DNA, 492 bp, Homo sapiens
atgtattattactgtggaggaggtggaaataatgccaacttaaaccttccctcccctagggagctctccctaacaatctgggctggaaagagtgtgttcctttaggaaacaaagcatgtattacccattgagaatccattattactttgaatttttagttttgttttcatgtgttgctttatcttcttaattaaattatctcttctagggagargacatcttactcttattggatcatgcacagtgcctgaagcattctgttgcatgtagaaggtattggtggatgtttgttaattgatttgttgaattttttttcactgaacacattcccaagaaacagccaaacccagagtaaggaaaccatctggcaagaaccgctcaagagaatgcttcttggctctcacatcttaaaggtcttaaaatagctaacatttattgaacattttactatatgccaggtattatgggctaagcccattatatatgtgatct

SEQ ID NO: 755944 - DNA, 550 bp, Homo sapiens
ccatgttgccatgttgtccttgttttttcctttggcttgaggatgagtttttgttgcagcattttctatctgtgctttgtgtttctagcctgccggctttttcaactctaaatgtaggacatatgagacaaaaacaaaataaaataaattaaaaaaaaaaaacagggacctcgcaactgtgtcgtttcttgggtcctgaggtctctatctggtatccattcttttctccacatttcagttttcttatgtttgttttayatacaatgtccacagagtttagttctaccaagcagggggaatagggaaaataaatatgtctatgctcatcttcagagaagccgaatccccttttatgtttttgcccaaaaatgaaacaaatatagtttcaaaaaatagaaaatgacaaattatccctattagttatttaatgacatcctattattaaatttactagcagaagaaaaatatttaattgctacaattggttattaaatccagaggttttatgaagtaacataccttagagataaattggataatgctgccaaaa

SEQ ID NO: 755945 - DNA, 580 bp, Homo sapiens
gtgtgcactgagaagtggcttgtgtccagtaccattctggatggaatacttttatagttaggatatttgttccctgtaaaactcctgtggaaatttcattcccagtgtggcgatttgggaaggtgaggcctagtgggaggtgattgagtcatgggagtgaacccttcatgaatagattaatgtttcctcttgggtgggagtgggctctcactattagttctwacaagagttggttgttaaacggagcctgccactcccccatctctcttgcttcccctctcaccatgtggtctctgcacacactggctctcccttcacattgatctgtgagtggaagcagcctgaggctttcaccaggtgctcagtcttccagtctgcagagctgtgagccaaataaaccttttttctttataaatgacactgcctcaggtattccttgatagcaacactaaacagactaagacaagcatagaagttgaaaatagtgttatctagcaatcgctaaaaattttctcaatgccccttgtactttaaaaagtataaaataaattattagtaaattacattttgtgataacaca

SEQ ID NO: 755946 - DNA, 605 bp, Homo sapiens
catcacctgaggtattcctcaaagtgctaattccagtttcccacccagagcaatcctatcagactttacaggtggagccccatcccactggtctttttcaacaaatagctatttttgtcctgtaatttatgtttatgttacaaaggagaaggattttccctacattatgtaggcaagccagcaaagaccttcttccacaaattcgaaaacggagttcattgtgcctctttagtacctgtgtgtggggacaagccccgcgtgcactggtagaggatggacttctggctctgacaccttgtgtatacttgggccagctccttcatttcttcttgtgtataagaacagactgtggctttgcccgtaatgaaagtaagacaaattgcctcctataagcctgcacgcagctatgagcagtacctstcactgtggaaggtaattcagttggagtctgtctcttcaatttcacccagggataagacattttttttcattttttttacatgtggagtaattaagctaatacttaagtataattctgtctctaattgtagaccattagtgattttttgttatttagagagacagaaaagaaccaagtaaatatt

SEQ ID NO: 755947 - DNA, 621 bp, Homo sapiens
aagcactagacattcattcttgttttgatccctgctgccctcctagcaggcaagaagtctcactctaccaaggctcagagaggatggcaacttgcttaaggtgacatagccagcctactgtggcaaattcagacatccaatgcaggtcattgactccaaagaccataggcctacactgccccagactatttaacacatcacttttattaggttgtatttgtcctaattcactccatacttcttaaagattttctatcaatggtcaaaaatacaaatacaggttgggcacagtggctcaygcctgtaatcccagcactttgggaggctgaggcaggtggatcacgaggtcagagatcgagaccattctggctaacacggtgaaaccccatctctactaaaaatacaagaaattagctgggcatggtggcacgtgcctgaactcccagctacttgggaggctgaggcaggagaattgcttgaacctgggaggcagaggttgcagtgagccgagattgcaccactgcactccagcctgggcaacagagcgagactccaaataaaaaaaaaatacaaacacaatctaagatatttttattaatagcccaggcttggattctgcaa

SEQ ID NO: 755948 - DNA, 636 bp, Homo sapiens
agtttgaagcggtaactggaaggtagattaggggattgctggtaatgttctgtatttttacctgggagctgcttaaataggtatagtcacagaaaatttcattgagttatatagttaagatttttgcactatatgtatgctgtaattcaacatgaaattgtcagttaaatagaaaaagagtagctaaattgcagataagttgcaggataggtacaatggacaaatctgaagacaaagttaagaaaaattataagaacattgatattttccatctgaaatattaaaaacaggaatgaaatgtcaaaaaaycatagaaataagttagagtgttttagttttctttaatatatattgaagtataaaaacttcaatatttctttctttcagaggctaaatctagaatgaatgtaaataatataggcaaccaagaggaattattatcatctcagataacaggaaatcttgaggtagggattttttagttacttaatttattgatccaataacattatcaagagctcagttttatttcttcttttcacattcatatgttgcattataactggaataattaaaacaccctgatgagctaaaaacaatcaagattcacatttgggttctggagacatcctttct

SEQ ID NO: 755949 - DNA, 573 bp, Homo sapiens
agaggacctagaaactgtgatgccccatatcactaagcacatgtagcacacagggattaatttctaatacattctgcaacaacagcaaaaaaaaaaaaaatcagaactttctaaatgacggatcctagagctatggcaggaaataattgagatgagcctgaaacattgtgtagttccataaagtaaggattatgcaaaaatatcacagtgatgctgctatgtcagagrgatattggagccaatggaaattataccttatggacaaatttggtcaacaaaaaagtaaagaagcattgaactataagatggagtagaaaataaatattcacaaattcatgttgatgtaaataaaaaagtaaattttaaaaattaatttttttaataaaagagacaaatattccatgcagaaaaattcagttaatctatgtagatatgcagccatccacaggtgaagtacaagtctcactccttacatgtggggtgtgcctagtgactttcttctaaagagtgcaatatgagaaaaggagataaaaagagtaaatattcagtggagcaatcaaggccagcataaac

SEQ ID NO: 755950 - DNA, 619 bp, Homo sapiens
tattcagtttgtatagattttggcatcaaaatttctgtaaataaagtgttttcagaggcttcaatcattttgaaataaaatctataattttttgtttcataatgacagatttttttttttaatcaagaaatcacacaattatattgtggcaactcaatgaatttctccagagaaaagactcactctaaaagaatttctgccatgatttcttttagatatatgccatagcaattcccttttttaatgtaaattaaatgatttgagtaagtgagctgttacacagcttagagaaagagaggtcctctgctttgctggaatgatgtgttcatgagatatggaycttctaacctattgggtaattttctcctaaatgtagtcatcaaggactattaaataaatttatcaattaaagacaaaattaccactcccatgtaactgcaagtgaatcttattaaatggcgtgctactatattacagtaaacatggcaggtaatttaagattctacagaggattttgattcattgtccaaacatgccttatttagagtttaatcaagacctgtttagaagatcattaaccatatttcatgttttttcattgttcacatcataagtccaa

SEQ ID NO: 755951 - DNA, 619 bp, Homo sapiens
aaaatactagctaaccaaatccaacaacatatcaaaaagataatccaccatgatcaagtgggtttcatgccagggatgcagagatggtttaacatatgcaagtcaataagggtgatataccacaataaacagaattaaaaacaaaaatcacatgatcatctcaatagatgcagaaaaatcatttgataaaacccaacatctctttataattaaaactctcagcaaaattggcatacaagggacatatctcaatgtaatcaaagccatctatgacaaacccatggccaacagaatactaaatgggggaaagttaaaagccttccttctgagaagcasaacaaggtaaggatacccactctcaccacttctattcagcatagtactggaagtcctagtcagagcagacaagagaaagaaaggtaaaatttctagaagataacatcggaaaaacccttctagacagtgccttaggataagatttcatgaccaagaacccaaaagcaaatgcaataaaaataaaaataaatacctgggacttaattaaactaaaaagcttttgtatggcaaaaggaactgtcagcagattaaacagaaaacccacagagtgggagaaaaatct

SEQ ID NO: 755952 - DNA, 579 bp, Homo sapiens
actctacttcctaattccactgaatataagccattaataggtgtattctctgctttctcagatacttcctccatattcagctcttacccttctagaatttttctgaaatttaagatttctttttaaacctgttttccttgagcacctattgctttcttagagcccctggcatgtattaacatcctccactagttccttatcctgctgatgtaagtttgccttactttttacctccttttaatcatttcaatgaatttagaaagaaagagccagaaatatgctcatgtgaccgccatcctcaggaatatctaaggattctatgttttataaaataataattaaatcaataacttcagcattaaaaaaattgtgaacaaaatatgaacaraaatatcctagtgaaaataaggattgacatactcaataattttatcaaagaaataaacatatttagtcaaaaaatttaaaaggtggtatcgtattgtggttttgattttcatttccctgattattagtgatattgagcattttcttcatatgtttgttggccatttgtatatcttgttttgagaattgtct

SEQ ID NO: 755953 - DNA, 554 bp, Homo sapiens
tgggttttttaaaatttttattttcatgaagattttcttctagaggccagtataaattcaatgaattatataaatattattttaggagctgcttttctgcaccaagaattctggaatccaggaaaaaaaaaacgtatttccataattcatcttaattagttaaatggcagaactagtcctaatgaggagactccagcattgaacagagactgtctttacaggctacatgacttcctcagaggacaggaagactattctttagtaccttgcttatttctccaaagctacattkgtttcctatgagattgtgaagacaccatctgggaatattggtataaatacatagcctgcctacattactagccacagagacaacgtttccaataatttcaaggtttatttattaattgccctccttgcttctgggatagtgttgacatctaaagccagtaatggagtcccccttcttccctcatcttgtccttgaaaacaattccacctcttatttgcatgattcaatggggccaacttcacaaatagattccaagcctttt

SEQ ID NO: 755954 - DNA, 578 bp, Homo sapiens
cttaaccaagtctgacagttgtggtcaagatactaaaagtgacacttgtaaagtgtcaatcagctggtggtttaggcaacaatagtctctgtctgtatcgtctccccttaaattttgtttgaaaatattttatttcataaccttttactttaaaatgtaaacaattgagagtttaattttgaagatgggggaacctaaaaaattgtaatacaatgataaaagctctacaaatctttatatcttcatcaaaaattgttgacattgaaattaaggttgaataagcaggatggaaaatagtttcrtattttgttggaagaggtgatatatgaaaaagagtttaagacatatgaattttttttcagcattcctatttgtacagaagaaaaagatttttttttctgaataactcttatttaaaatgaaaacaccattatgttggctaacaacagccaaagttctagtttttgaggccatatctttattcctaagtaaatgatgagaattaaaattaattttttcactcgaggccacttatatcagttttgcaaatatttgcttttttacttgtttttgtcagt

SEQ ID NO: 755955 - DNA, 541 bp, Homo sapiens
actccttcgaagtcataattgtaaattataattatacacatttaatattgttgatgttaataatgtaatagataaattaaaactctaccacaagtttctgagaattaggtattatgaacttattttaaatcaaaagaaacatttcaagtacaaataagatttcggatataacatagctaataaattatagaacaattcaattttactattgctgaatccaataatctctagagcgcaatagaagtcaaaatatgccctgtgaaattccaacccagataaaaatatagtgaccttaagttttatcagagttcactcatgatatattcatattgacacagcacccatcaagattagcatgtgtgcaagatttttcaattttagtgaattttcrttaataataattacattaaattaagccaggatgattaaacagactttcattgtgtacttgcagtatctgccatctagtgcatgaatcacatgtgtagcgaacataattctcatttttaacacatggttaaatctgaaaagagaccacaga

SEQ ID NO: 755956 - DNA, 573 bp, Homo sapiens
cctcacttccaatgctgggtgacaatcataaataattttaatgacaatgtcaggaatgttagaaatatttgaaggatcatttgttttgcctgagcaatatacagaactggaaagaaggaatgatttacattttggtaattagacatttctaatccctttcattcttcagtcaagctataacctactgaattgaaaatgtaagatgtcagtgcttttcaatacaagaatacatattttctggcatttctctggattgaacaaaactttggtttccatggatcccaattacagtttcaagttgttcwgcaccacagcaacaagacaaaggagaaattcatttaaagctgttgaacttttaacatggaatataaaggaaaaccaatgaatgcaggcttggtacatgattgctccctaggagcctgatagatcctgaccaatcactccagtgctaaggaatgtcctttcaagacaatgccaccaggcaagttcacgcaagaagaacaaaaaggttaaaatggaactaatgatttcatgtcttttatttaaattggctatagcctcacctaggagtaa

SEQ ID NO: 755957 - DNA, 580 bp, Homo sapiens
tgtctggcactccctagtgagatgaacccagtacctcagatggaaatgcagaaatcacccgtcttctgcgtcgctcacgctgggagctgtagaccggagctgttgctattcggccatcttggctcctctcctggtaatcctcttatayatttttaaaatcaaattcttagttcattagtttttaatcttccttatttttaaaataaatgtatttataatttttattttaaatattgctatagctgtaactcacaaattttgtcatttggctttttattgtctttcagatctaaattttactaatttcctttctgacttaatttttacctgtgatttagtagtattattttaattattggacatatggaatttcaaaattatccttttgtaatttatttatgatattatagtataacaattagataacatagtttacataataaacgttttctgcttttgctgagactttattatttggctgaatttataaactttccaagcacatttaaaaaaaaataacctttatttaatcagtgtaaagctttgtttatgtttcaaattgtctataatgtttacattt

SEQ ID NO: 755958 - DNA, 650 bp, Homo sapiens
tgtgtgtgtgtgtgtgtgtgcatatgcacgctcatgtgtgcgtggaaaaaagagaagaaatggtaaagtaaatggggcaaaatgttaacaacagtaaaatatggataaaggacatatggctgtcttttgcactgtttttagtctgtgatttttcttcaaatttattttcattttttaaaaaatatttttgagttctggcactctgaagatttaacaaaaggaaaaaaatgtggatttttttttcagctgccgtaaaaagtagaagtaattctttaatagaagaaaattcccatagacttgcatagaaattatttaggagttaattttcccattatattgytctcctttgagaagcttccagtgatttcaaacactacagtgattaaaaactcaattggctgaagccaaaaatcacattaataaaataaaaatcaaacttaaaatttaaatagtcaaaaggaagaacatggaaaacacatgcttaattgttacctgcaagtatagttaaattggaattatttggtcaaacatatttacaaatgtcacagagagaaaatgaccaatacaattttgagaactacataatggtttaaatgcttcagaagtataatttttaaaagttattttaaatgataaaacattcaataact

SEQ ID NO: 755959 - DNA, 630 bp, Homo sapiens
aaacatgaagaataccatcctgccatttcacatggactacaccagtgacagcagtgggcagtctaggcacccccttggtgacagttgctatctgtacactgatgacttccaaatctagatctccagcccaaaactatttcctctgctccatactcaattgaccaattcctgctgggcttttccaccatgatgtcacagttgccttgatttacagctcccagagaaacttgactctttcctttcaagaagtaaatgacatgtccatccatacaacaggcaactctgcaagaaatttgggactcactcttggctgcatagtgttagtggttaatagcatagacccgaggtggagactacgtgttcactggctatggcacttaacctctctgtgtgtcattttatctcatccaccrtatggggattatagaagttccagcttcataggtgtagtgtagtgattaaatgagttaatatttctaagtgcttagaacagtgcctggcacatagtaaaaaaccatgtaaatgattgctgaataaatgaatcacacatagcagtccctgaaaagctactaaatttacacattcctcttcctcttcatctccaggcaactaaggatgctgccttagttc

SEQ ID NO: 755960 - DNA, 638 bp, Homo sapiens
tacatgcttagagggaaaggagaagacctttctcctttgttggattatgaggcaataggccttctaacctccccaataaaagtagccctgcagaggttgcagtgctccagcctgagccaaatgtctctctaggagtgaccctgacaatggtgatcaacatagattgaccattgttcttttcattattgttgcctaaatgatcagaatagcacaccagcctcagggtttatatcccccttgataaataatggttcatccagaccattgtttttgctgggagccttcagtctcccagtgtgacaataattgcctgaatggagatgcagagaagggaactattgaataaactcctagacatttagcatgggkttgaagccttcccagtttgatgcaaacttactcttttgccataaaacatgctgctgattctctttcttttaccctgagctacagttgtaccaaattgctcaagctctttaaacacaccatgcctccatgcctctgtgggttattcctatagtgaacttccatgcttcttcatgtgaggaatgtctgcgattattttaggacccaattcaaaaaccatcttctctctgaagccttccctgatcccctcccttcatcactacttctctaaa

SEQ ID NO: 755961 - DNA, 557 bp, Homo sapiens
tcctacttctttcttctctccttaacataaatcagatcatgtaatgctactgctaaattctttcaatgatttcctatggcactgaaataaaattcaaattcctgaccatgacctacatgacctgattcttggcccaatctccagtgtcatcctactttgtactactctccccacaactaactatactgcagcaacactggccttctttctactcagcaaacacatcaaaccaattcagtgtcagggcctttgcacttgctatttcagtttcttgccaatttttagctcaaacgtcacctcttcagggaagccttcttctctatcagagtctyttattttagtttttttataatgcttactactatgaaatttactcatttatttgttatttatttcttgtcttcctcttctaggagtctgttttctctctttcaccactgtatctcttgtttatgaaaaactccataactgggttgaacatatgaatgtgtgaatgaataaggttgtcaaagtccagttgacagcattacacagatagttatgtgtgttggttgggg

SEQ ID NO: 755962 - DNA, 592 bp, Homo sapiens
ctggacctcaaaaaactttgtgtgtcaacagagtggagaattttcagcaggtcagtggtttttatctctttctcaccctgcattgactataccttctctatcccttttccctcagtgwtaaacacattgtggtctctcctttacgacaaaaattttcctttgatcctaaaatctcactgattgtatctttccttctctcccaaccaagtagacaagtttctgaaaataataatctaatttcagtctctacttcatatttaccactaagcctactgtaatatgttttctgtcccattgctccatctgactccatgagaaagcaccctcagcaaagactccaattaactctgttgtctgttctaacaggcctgggtcttaagaggaccgttagtgacatctgacatgactgataagcacttctttgatgccttcttccttggcttccaggacatagtctcttttgcttttcctcttacctctctagcatccctgagtcttcactgcaagctctgcctcctctacaaaaattttagatgctaatatacccctctttatacatgctactcgttagtgaattcctttccattcttca

SEQ ID NO: 755963 - DNA, 558 bp, Homo sapiens
caagattgtggccaggatgaaaagaaaccaataaagagttgatgaagcttcctacaactaacaagggccagaaacctttatcattctgaggcctgaaggaacaagatataagaacctagagacaattatagctaagggagaggaaatctggaagaatccatgtgcttagattgaggattacagccactgccaaacaatagaccrgcacagacagagccagaggaacaaatagcccaacctctctcttatctacatctaaatctgctgctggtgtctcccactggtcaaacctaaacagtagctacagttcatgagaacactggattgttgcagtccttagatatctgcttcctggggcacatggtaaactggtaagaggggcaggatgaatctggaggcacaaatggagattacctattacaaatatacaggtatataacttcagagaaactttcagcataacttttgggagtagaaagcaacatatgcacttctaccaccagagactaaaatttaattttttttccatatactgtaagtactctaagatgtttagaa

SEQ ID NO: 755964 - DNA, 602 bp, Homo sapiens
gtctgcatcaagtgtgtttttctccaggatatttttgttttctttcaagtgcacagggacagtaccaaccaatggctactataaatgcattcttcctttgagactttctaggatgaatctaagaatttttcatgtagacttttttctcctcactgagccacagccaagacaaacaaattctcttgccttcactgcagaacatgtttcctctagcccattctctcagccatgatacaaataattctgctttgcatggctcctataaggacaaatttcagttaccccaatttaattaaataataccagttccccaacaacacagttaaaatttccctatcattatctattaactatttggagttaaataaagtacaaaattcattgctagccgtttactccacaaattactaccaaaataacagttgcgcatcaggatccatgaccaatcacatgacttctttcaaaaytgttattcttttttttttttactcaacttttagcagtagattctttccctaaggagagatctatatttttggagcgggtaggggtgcgaataaactttgagaaacatctttggttgcaggcagtgatgccttcga

SEQ ID NO: 755965 - DNA, 551 bp, Homo sapiens
caaaaatgttgtgtatgcttactgtcttggctttagattagctccacacaaaatagttggtatcaaatacacaacaaatgaattaatacaactttattagaaatcttttatctttataataccccttaaatatctaataatagctaaaatgtactaagcatttaaatataacaggcaataatctaagtatgttgcaagaaaagtctaatttaagcctttacaatatacgtatgactagcaactaattgttttctcattctactcctaaggaaacygaggcagagagaagtaaatgaattgtttaaaattaaaccttagaagtgatcccatcatgactgattttttatattcactggtcacagagccacttgaaggcactattgatggctcagtgtcccctcattgtgagaatggcagcatctatggaacggggaattaagcatgtataaataaacatatacatgtttagctgtgtatacacacacgcacatacacacaccctaaatccctgtacacacgtttactacacagccttctttgttagatttttc

SEQ ID NO: 755966 - DNA, 493 bp, Homo sapiens
gtccatctttgagagaccctatctctatttaagacactcatgatagctcttttatgtgtagccaacatctaacccaatggaaacactcatacattctctgtcctgagaaactcaggatcacaggctgattctaatacagaaatatttccatkttattccatcgttaaagcttttagccagtcaatcactcaccattttgatgtctcagtcataagtcagacatctttctgctgtgtccaaaaaatgtcggaaaacaacagctctccattttgtttcctaatgaatcctctttcttgaacataaatgaagatggagtgcattctttacccttcctctctgaggggagagagacacacagcatgcccaaaactctccagatttttattcctaatctttatctttcagctcttttcataataacctcactgggattgtggagattgagtcacaagactggttttctgaacgctcctttgtctgtgtcgtacatggt

SEQ ID NO: 755967 - DNA, 597 bp, Homo sapiens
tgatactcaataaaacctaacagtgctagtagcagtaatcacaggagcagttgctattattattcagctatattgtatttgttttgtttgtatttccataagataatcacagtatagtaaggagtcgaagggagggtcacttaagaaaattattatttatacttacataaacattattaatcttgagataaaaatctatgtggagaaatacaatagcagttttacagaaaaggcttcataaaatatgaactacttaaaggaaaaccataaaatccatggcttgtacagtggaattaagttttcaagattacattactaaatcttggaagatttgctaataaccagtggctaatttcagcaaggaatttatatatatrtgtgtgtgtgtgtgtgtgtgtgtgtgtgtgtgtgtgtgtgtgtgtctatatatctatatctctatatttatatttccttgttatttaaggaagtcattatatggtagccattatatggtactgcctaataaatagtgtttgcctcacaatagccatttaaaaaatgttacttttttctcctcttcacactctatgggatttttattcctttcatgggaaa

SEQ ID NO: 755968 - DNA, 635 bp, Homo sapiens
aaggtttctctgcttctcagagatttagaggtgattggtttcaatgccagttcattccatgcctaagaaatccaaatttctgaggattgctactcatctcagtggactttgactctcatgttcttccctacttctcactcctatgtacgcataagcttattttttatccttttcttcagtttccaccagaaatatactcatgccacaaattctatgaactaataatcttaagatgacagggctaagggatgggtgacgggaggcactttctcatgtaattcccaatttgccggcttgcttatgtctctcattccttctcctcctctgctcctccttcacacattgtcctcttcagctctaagtttttccctcaattttgcatagaaatttagctactagctcctgaggacaacttgcaatcccaaactcgtcaaagtgcagcagaacaaagaaactttgaattgtcagaastcatgttccttagaaaatacttgatattataaaagagcttttttttttaaatgaaaggataattttctcccctattttatatctattttgtgggtggtaagctctggactagctaaatactaagagatgtgctgtctgagaatatggttaaggatgccctaggt

SEQ ID NO: 755969 - DNA, 544 bp, Homo sapiens
tcccaccatctcttcacggatgcataaaactgaatgttttcagaataatccaggtcacctcttgaatgcttaaaaacttattccaccagataccctaaatcatctctctcaaatttgaagtcccacatatctctagggcaggggcaaaatacggccagactccttgctaaagcrtaacaagagtcacctttattccagttcccaacatatacttcctgtcttcttctgagccctgtaaacagttccaacctccgcttgttattcagttccaaagttgcttccatattttcaggttatctttatagcagtattccactctacttataccagttctctgtattagtctgttttcacactgctataaagaaataacagagactggacaatctatggaagaaagaggcttaattgactcacatttctttatgactgtggaagcctcaggaaacttacagttatggcaaaaggtgaaggggaaacaagggatgccttacacagtggtaggagagaagtgtaaaggagcaacttccaaatacttttaaaa

SEQ ID NO: 755970 - DNA, 631 bp, Homo sapiens
ttctagataactttctgtagcttctccatcagcacttgctgcttcatcttgcactttcattttatggaggaggcttctttccttcaatctcatgaactcagctagcttccagcttttccactgcagcttcctcacttcttttaaccttcataaaattgaggagagttagagtgctgctccggattagtgtttgacttaagggaatgtkgtggatggtttgatcatctttcctgatcattaaaactttctccatatcagcaattgtttcggtctctgatcattcatgtattcactgtagtagcactttcagtttccatcaagaacttttcctttgcattcacaatttagctaatggtttggtgcaaaaggcctagctttagacctgtcttgactttcaacatgtcttcctcactaaacttaatcatttttggctttgatttaaggtgagaaaagtgcaactcttcctttcacttgaacacttagaggccattataggattattaattgacctaattttaatagtgttttgtttcagggaacagagaagactgaggagagggagagaggagacaggggaatggccagttggtggaacagtcagaacaaaaacttaatttaccaattaagtttg

SEQ ID NO: 755971 - DNA, 656 bp, Homo sapiens
actctctctccctagaaatgttatctcatctaggtaataaacacctgaaattggtgaatctgctattaaaaaaataaatcttttccataaaaacagtgtttccttagtcttcaagattcatgtatgactgtcatgatttctgccataktctatttttaataataatttttattttacctatttttatgtttggtatcttcctaaacaataatctttatgaaattactacattcatatgttagttacaagggttaaaatgaatacataagtatcaaaaaatgttatctatgaccacccaaagtatcactcagtgatgtgtgcattatattttgtgaaacactgagttaaatattctccccaaattgtcattccttcctgaaacacaaacaattttgggagacaatttagcattatatatttaatcccattaaaaatgtccgaaagagaggagaaaggggccaagcatacttcccacattgctttgagaaagtcaagaaaatgaaaaccttctgtcctgcaggatttctgttgctaaaccaccaaaagtgtaaataccaatataaatttttaaaacttatgatacatgttatttctaatgttcaattatatgtctacacacacacacacacaaatatatacataaacatgggtgtgca

SEQ ID NO: 755972 - DNA, 656 bp, Homo sapiens
actctctctccctagaaatgttatctcatctaggtaataaacacctgaaattggtgaatctgctattaaaaaaataaatcttttccataaaaacagtgtttccttagtcttcaagattcatgtatgactgtcatgatttctgccatagtctatttttaataataatttttattttacctatttttatgtttggtatcttcctaaacaataatctttatgaaattactacattcatatgttagttacaagggttaaaatgaatacataagtatcaaaaaatgttatctatgaccacccaaagtatcactcagtgatgtgtgcattwtattttgtgaaacactgagttaaatattctccccaaattgtcattccttcctgaaacacaaacaattttgggagacaatttagcattatatatttaatcccattaaaaatgtccgaaagagaggagaaaggggccaagcatacttcccacattgctttgagaaagtcaagaaaatgaaaaccttctgtcctgcaggatttctgttgctaaaccaccaaaagtgtaaataccaatataaatttttaaaacttatgatacatgttatttctaatgttcaattatatgtctacacacacacacacacaaatatatacataaacatgggtgtgca

SEQ ID NO: 755973 - DNA, 663 bp, Homo sapiens
cacctatgagctgtagtcctatggcatagagtgcctttaagtttacttatagaccaagagccctttaagccttggtggggaggtttgtgggcactcaagttcagactgcttggatctttgattccccactggctagggctgctttaaatactcctgtgggccggtgtcrgttgagtttggtctatgagtgctcacctgatttttggttcttgtgaaggtgttttttgtttgtttgtttgtttgtttgttttttctatgtagatagttgttgatgtctttatggggaggatgatcagtggagctttctattctgccatgttgctccacctgtttgtttttttctctcatttattatttatttaatgcccataatatcaacgtgcgaaccccttttttgtttctgatattagtaaattttgtcttctatttcttcatggttagcctggctaagggtttattagctttattaatattttcaaagaaccagcttttggttttgttgattttctctatctagtttctgttttcaatttatttgattttcactctaatgtttattatttattttcttctgcttgctttaggtttacattgtacttctttcactaatcttttaagttggaagtttaaattgattttagatctatcttattctctaataat

SEQ ID NO: 755974 - DNA, 663 bp, Homo sapiens
cacctatgagctgtagtcctatggcatagagtgcctttaagtttacttatagaccaagagccctttaagccttggtggggaggtttgtgggcactcaagttcagactgcttggatctttgattccccactggctagggctgctttaaatactcctgtgggccggtgtcagttgagtttggtctatgagtgctcacctgatttttggttcttgtgaaggtgttttttgtttgtttgtttgtttgtttgttttttctatgtagatagttgttgrtgtctttatggggaggatgatcagtggagctttctattctgccatgttgctccacctgtttgtttttttctctcatttattatttatttaatgcccataatatcaacgtgcgaaccccttttttgtttctgatattagtaaattttgtcttctatttcttcatggttagcctggctaagggtttattagctttattaatattttcaaagaaccagcttttggttttgttgattttctctatctagtttctgttttcaatttatttgattttcactctaatgtttattatttattttcttctgcttgctttaggtttacattgtacttctttcactaatcttttaagttggaagtttaaattgattttagatctatcttattctctaataat

SEQ ID NO: 755975 - DNA, 600 bp, Homo sapiens
aaataaataaataaataaaaataaaaaataaaaataaataaataaataaatctcacagaggagaggactcaattatcagtagaatggtggcagagagatggaaaaggaacatagccagtgatttgggtgcagtgtcacgggagcaaagcttgccctcatgaaataggacttacctgtaggaaaaagytccactgatggaagaaatactaagaactaggctcctgatgagttattttccaaaatatactcaggaatgtcatatcaattcaatatgcatttatgaataagggattgggtttctagttgaaacaagataagcctctcttttgtttttaatacaaagagaaattatacgcttctgaattctgaaaaccaaaagaatagtgaggaatcaaggtccagcttgtataaacagaatagtttaatatgctggctagttgaacaggtatcaaagagatacctattttcatagcttatagtaaatcattaattgtaatatttagagggattgaactttggataagtctaaagtgaaatgtcctaatacattccttttttaacctttgcttgtagctttcattcaccagggctgccacaaag

SEQ ID NO: 755976 - DNA, 600 bp, Homo sapiens
aaataaataaataaataaaaataaaaaataaaaataaataaataaataaatctcacagaggagaggactcaattatcagtagaatggtggcagagagatggaaaaggaacatagccagtgatttgggtgcagtgtcacgggagcaaagcttgccctcatgaaataggacttacctgtaggaaaaagttccactgatggaagaaatactawgaactaggctcctgatgagttattttccaaaatatactcaggaatgtcatatcaattcaatatgcatttatgaataagggattgggtttctagttgaaacaagataagcctctcttttgtttttaatacaaagagaaattatacgcttctgaattctgaaaaccaaaagaatagtgaggaatcaaggtccagcttgtataaacagaatagtttaatatgctggctagttgaacaggtatcaaagagatacctattttcatagcttatagtaaatcattaattgtaatatttagagggattgaactttggataagtctaaagtgaaatgtcctaatacattccttttttaacctttgcttgtagctttcattcaccagggctgccacaaag

SEQ ID NO: 755977 - DNA, 600 bp, Homo sapiens
aaataaataaataaataaaaataaaaaataaaaataaataaataaataaatctcacagaggagaggactcaattatcagtagaatggtggcagagagatggaaaaggaacatagccagtgatttgggtgcagtgtcacgggagcaaagcttgccctcatgaaataggacttacctgtaggaaaaagttccactgatggaagaaatactaagaactaggytcctgatgagttattttccaaaatatactcaggaatgtcatatcaattcaatatgcatttatgaataagggattgggtttctagttgaaacaagataagcctctcttttgtttttaatacaaagagaaattatacgcttctgaattctgaaaaccaaaagaatagtgaggaatcaaggtccagcttgtataaacagaatagtttaatatgctggctagttgaacaggtatcaaagagatacctattttcatagcttatagtaaatcattaattgtaatatttagagggattgaactttggataagtctaaagtgaaatgtcctaatacattccttttttaacctttgcttgtagctttcattcaccagggctgccacaaag

SEQ ID NO: 755978 - DNA, 632 bp, Homo sapiens
aggagaggataaaagtttggaaaatctgcagactgacaatgcaatagaaaagaaaaacccattttctggggagaaattcaagcctgcagcagaaatttgcataattaacaagaagccaaatgttaatcaccaagacaatggggaaaatgtctcaccttcagggccacgcctcccattacagacctagaggcctaggagggaaaaataatttcctgggccagggccagaccctcyccttgctgtgtgcagcctaaggacttggtgccctgtgttccagccacctcagccatggctaaaaggagccaaggtatggccatggcttcagatggtgcaagtcccaatccttggcagcttccacatggtgttggacctacaggtgcacagaagacaagaattgaggtttgggaaactccatctagatttcagagtatgtatggaaatgcctggatgaccaggcagaggtgtgctgcaggggcagagccctcatgaagaacctctgttagggcagtgcagaagggaaatgtggggttagagctcccaaacagagtccccactgggggactatctactagagctgtgagaagaaagccacagtcctccagaccccagaatggtagatccaccagcagctt

SEQ ID NO: 755979 - DNA, 637 bp, Homo sapiens
gtaaataatgtcagattggacaaaaaaactcaactatatacttcttaaaaaaaaaaagtacatttaaggacacagaacagctaaaactacaaggatggaaaaatacatatcatgctaaccactaaccaaataaaagctggggaagctacagtcataagagatcgagtgaattctatatgatgaagcactgctagagataaagaaataatttcataatgatagagacaacccaccagcatgtttacaaactaaattacatggcctcaaaatacattgtcagccagaatgacaatgtcatagtggagattttaacatgcctctctgctacctgaaagaacttcacacacatataataaagtagacacagggaagatctgaacastatcaataaacctgatatattttgagacttatagaacagtatatccaacaactactacatatacattattattttcaagtacacatggaacattttaaaaagctgaccatatgctgggccataaagtaaaattcaacaaactctaaagaattaaaatcatagaaaatattttctaatgtcaatatttagctaaatattaataataaaataactagaaaacctaataaactaaatcttcactagttacccccaata

SEQ ID NO: 755980 - DNA, 626 bp, Homo sapiens
aatgatattaaaatgatcgtatggtttttgccctacattctgttggtaggatgtatcacattgattgatttgcatatgttgaaccacccttacatccttgggataagttgtacttggtcatgatgaatatctttttaatgtgttgttgartttgctttgctagtattttattgaggatttttgcatcaatgttcatcagggatagtggcctgtagtattctctttttgaggtgtctttatctggttttggaatcaaggtaataccggccttgtagaataagttggaggtattgcctccttctctatttttcagaacagtttgagcaggattggtattttaatgtttgataaaattcagcagtgaaaccatcgggtaccaggcttttctttgttgtgagattttttattactgcttcaatcttgttatttattattggtctgtttaggctttgaatttcttcatgactcaatattgatagtatgtatgtgtctaggaatttatccatttttttctgggttttccaattgattggcatatagttgctcacagtagccactaatgatcctttgaatttctgcagtatcagttgtaatgttcccttttacatctctgattttatttgcat

SEQ ID NO: 755981 - DNA, 576 bp, Homo sapiens
cacctgttgcatgtccaagtttcagacacaaaaacaaacgtgctgagttttgtttttggctagaataaggtctctggatttgagacatctgtaaagtacacagatcaggaaaactgccttctatagcaagtatgtgcaaggtatgctcttagaagcagtaactgaggggacaatgtccattcaggccagccagagaatatgtcatccacctcagagaaaggtatagggctggaggtccctgagtaggtagggggagggcagtaggaaggattctatagagtccaacaaagcattctttgagagaaagaaccagcatttatttgcacatctgmcaaactgatggcctcaatgccagattccaatggcaatgatcaagttaaaccttgcgcttttcttctagttcctcttctttgcctgatcttaaaggagccagacgcaacagctaacaagtggtagaagaaatagaacaaaaccagtgaagaaataggccatgttttggcccattcctcaatgctgccggttgtagaacctgggttatgcctaagccaagaccggggaataccaagatgaacagaa

SEQ ID NO: 755982 - DNA, 597 bp, Homo sapiens
caagaccatacaccatgtgtcactagagatattttggcttccacttccactgacagtccttctgcctggggatggtgccagcaagtgtacaacacccatctctggggccttcatttgcagcccaattttttgttgcaaattttgtttccccaatatkcaaagaaagacaagtactcactggggctacctcaataagcgctgctttgaggcagaagaacagttacccagttttcaggtaaataaatattttgttttatgaactagaaagtaatatctggaggactaatggctttttggcctcattttaggcagataaattttccatttcttatggctaaaccaattagaagaaaaaaacctgtgtttctcaacccagatccattggcctaataactaatgaaaattcctccataaagttgattctagttttcagtgctattgtgtattgtctttgtttttgctttcaaagatattttagtgggaatttggggattactccatttcagggacttctagctaggctctgttttaactgaaagctggtggtactgtgatagaagctttaaacgtgtgtgataatagcttgacgcagttgca

SEQ ID NO: 755983 - DNA, 507 bp, Homo sapiens
aacgttacattatcacagttatgctttctatttctatggcttcagcaagaatttcttatgcaatttgaaagaagaggaagaatagacaagcagcagaaatcatggcatggtggtgggatagctatcagaaacagcaacagcaaattatagacttttttgcaaaaaaggaaggttagcaacaaggagaaggaaaggtgtagattcataaactgcagagtagaggcaaactaccgtcttgtcaatagtcccttcacccctgcaagcacatacacagaagaaaacctttgcatatcttsctcctacttccgtgcatgctctctttattaattcattagaaggttacgccaggcactgtgtcaggttctgcatattcaacgatgaacaaagcagatatgatcactatcattatggaactcactatgtggtaagagagataagcactaatcaagcaaaactcaaaactgtaaaagtgcaataagttctaaaagatgtgcatgagtgatgaga

SEQ ID NO: 755984 - DNA, 442 bp, Homo sapiens
ctggttgaaagcaataagcctgtggtgagttgggttttcagggaacagactgaaatggagatttgcatgcaggaggtctctagactgaaatagagatttgcatgcaggaggtctctagcagagcaacctggggtacctttaagggagtgagggaagcggggctgggcagagatgggctgtgatgcagacacagcagtagccttggccaaggttctgagggttctaaagttggggtggcccttcgaaggcaagggacccaggcttttgttctcccataccaacmtgccattggatagtgactgcccctggggaagggtggtcactttgtgcacagcagctccacgtggctgaggcagtgtttagggaggaactcagctgtgagccatcagcagacaacactcccagcgtctggagaaatgagtgcctcagtacagaagggcct

SEQ ID NO: 755985 - DNA, 608 bp, Homo sapiens
tacagtgtttccagacctgactcagcccatctgtctgttaggaaactttatgaagacgccccccagaattaaaccctaattcaaatgtctcactctgaatagagaccttctgaaataatcttggtatagagacccagacacgtgccttttgccttaaaataaaaatatttagcccgtgttgttttatgtatctgtctttcagttagttttgaaggcccgcacggaaaagtggggcctgtgcacctgaaaagaaatgtgtatgttatgtggttgttggtctttcctactagagttatcttgataattgtgaagagtggccacagagaagacacttacgggaagagtttcccaacccctgaaaagtgcatccactttattctctttcctctagtgaaaggagatcttcatttaatgtgttttaactgcagttgcactcaaggcataaaaaragagtatagttcaaagttggaagcaaaaatgaaaataaattgggtaaatgcaacaaagaaggttctgaatgtgatttagcccctgttaagggaataccgggcgtgatattgcagtgatgtgcctcctcacagagagactatttcaaggagaaacaatta

SEQ ID NO: 755986 - DNA, 608 bp, Homo sapiens
tacagtgtttccagacctgactcagcccatctgtctgttaggaaactttatgaagacgccccccagaattaaaccctaattcaaatgtctcactctgaatagagaccttctgaaataatcttggtatagagacccagacacgtgccttttgccttaaaataaaaatatttagcccgtgttgttttatgtatctgtctttcagttagttttgaaggcccgcacggaaaagtggggcctgtgcacctgaaaagaaatgtgtatgttatgtggttgttggtctttcctactagagttatcttgataattgtgaagagtggccacagagaagacacttacgggaagagtttcccaacccctgaaaagtgcatccactttattctctttcctctagtgaaaggagatcttcatttaatgtgttttaactgcagttgcactcaaggcataaaaagaragtatagttcaaagttggaagcaaaaatgaaaataaattgggtaaatgcaacaaagaaggttctgaatgtgatttagcccctgttaagggaataccgggcgtgatattgcagtgatgtgcctcctcacagagagactatttcaaggagaaacaatta

SEQ ID NO: 755987 - DNA, 633 bp, Homo sapiens
ccatgattggaagcttcctgaggcctccttagaagcggaagctgctatgcctcctgtacagcctgcagaaccataagccattaaacctcatttcttcataaattacccagtctcaggtatttctttacagcaatgcgagaacagactaacagagagtgcatcccttcaagtgccaaacagaaagatgttggcattagccactgtttttattatcacttagttgccctccttctttgtagtagaatagtgattgaggtagaattccctcatgaatgaagaaaattgaatgcattatcaaggtcagatttgcgaatgtaccacagccagccacaggaggtgagttgggaaggtcatgattaaaagcaggcatttagatggaagagccagtctgtacagctctggacaaaggaagtggaggcaccggcagtgatgcaaacacacccctgcccggaggccaagggagasacatgatgtcttttaagggtcccagccagccagaattccctttctgtaaaacaaaactaattcaccatattcagacagagtagagaaggctgttaaagtaggacaaggatcctgtcttctcattttcacattcaggatcttggtggccgggagagctaacaggacagt

SEQ ID NO: 755988 - DNA, 627 bp, Homo sapiens
ataaatatattatttcaagaatattatatagatgggattgtacagtatataaccttttgaagctggcttttcactaagcgtaatttcctggagtctgtccaactcactgcacgtattggttgttcattcctttttattgctgagtagtattccctgtattccctggtacggatattccacagttgtttaaccattcacctgtggaaagacatttgggttgtttctagtttggggccattatgaataaagctgctatgaacatttatatactggttttttttctaaacgtaagttttcatttcttcaggataaagccccagagttcaattgctggatcatatcataagtgcatttttagttttaraagaaactgccaaactattttccagagcagctataccattttacattccatcagcaacgtacatgtgatccaatttcccagcatccttaccaatatttggtggtggtactgttttttattttagccattctgatagatatgtaatgagatctcactgtagttttattttccatttccctaatggctaattatattgaacatctttgcttgtgcttattttctatttgtatatcctctttgatgaaatatctggtttgtctttt

SEQ ID NO: 755989 - DNA, 609 bp, Homo sapiens
ggggaactctgtggctcaagcagcagcagttgaaagatactctcactgcccacttcctgtagacaaggaggttttggtgggctgcttaggaactgtgccagccttgtgtctgactggtaactgactcatgagaaaagcagccttatgtcggaaagataagggccaacaaattgcctccaggtggtggtagtttggaggtgactgaccattcatttcctttctttgggaggagacagtggggagggaattggtgaataagtggtcttgcctgcgtttttctccagctcttagtgatgcagccaggcagatagttggttctctgggctggaatggctcgtggaccccagtgccctcagaatcccctctgctgctatcagagcatcagacttakgtgtcatccatcctgtgtcttctcttcattactcttcttatgctcttgccaggaaactggctgtgtgcaccaagggaactctgatagttccatcgctgccagatttttctgtgaccaaccaaactccatcccactggtactggtttccttcaaatctctccctgatggcaacactggaattgatcagaagcagtggttctgaaccaccatcccttggc

SEQ ID NO: 755990 - DNA, 550 bp, Homo sapiens
gtgcaatgttcagttcaatcttttggatcctttgaaataccacatgaaggtaaaacttttttcaaagttcaattgttaaaaatgttttatagatccttgaaaatattgaaaattgatatacagtaaatgctggtttatccagatatttagagaagaaacctcgtattggcatttccatgtaacttaagttaaaattgatattcacaatgattatataagattttaaaatcctttccaatgatgaaatttttaaaataaagttatggatagaactggaagccattatgttaagtgaaataagccaagcatagaaagacaaatggaygttgtcactcatatgtgagagctaaaaaagttgatctcatagaggtagagagtagaacaatagttgccagaggctgggaagggtatgtgtggaggggtaggagaagaggaagagaggttggttattatgcacaaatatacagttagatagaaggaataagttgtaatgtttggtgcaaagtagagtgaaaaatagctaggagagagcacttagaatattgccaac

SEQ ID NO: 755991 - DNA, 634 bp, Homo sapiens
cacattataccatttaaggatgtatataaaaaaagattcattttgtacatccacaacaagtaataataatagtagaagtaacagtgatgtggttctaacaattctatagctgttgactctgtaatgctgttccaaggatatattagcttatttaattctcgtaacatcactgaggaaggtactgttatttttattcctatttttcagatgaggaaccagaagcacagaaaaattaagaaacttgcttgagatctcacagctgtagtaagaggcaaagttggaatctgaaccaaatttgtccgcgtctcagactctaaatcttaacattgtagttaacttttgtctaaagtgtaaatcaagacaattaacttcaaatttgaaaaccatggaatctrggtgttctaatttagtcccctacaccaatgcatgtgccaaggaagtttccactaatgaattgtttataagaaagatttcaattattttattttattttatttttttgagatggagtctcgctcttgttgcccaggctggagtgcaatggtgccatctcggctcaccgcaacctctgcctcctgggttcaagtgattctcctgcctcagtctcccaagtagctgggattacaggcgtgcg

SEQ ID NO: 755992 - DNA, 628 bp, Homo sapiens
tttcattgaatgaatgcaaagatggatgatcataaagacaaatggacagacagatgcgggagacagagacaggataatgttcttagcatcattaaaaagcctggagcctctcaaagtgatcgctgtgaagaggataacactcaggaaattacatatacaggggtccctgtatccatggggsattggttctaggacctcctgcaggtatccaaatctgcagagactcaagtctctgatataaaatggcatagtacttgcacataaactatacatatcctgctgtatactttaaatcatctctagatttgtgaacctatgatacctaatacaatgtaactgctattacatagttttatactgtattgtttagagaataatgggaaaaaggtttgcacatgttcagtaaagacctaattttttaaaaacacttttatctacagttggttgaatccacagatgtggaatgcaagagctgatcatatttatttgataaatatattgaaaacacttaacattttatgttaaaaaataaccactttttgaaagacataaaagaaaaaaaagtcccatagaaaaaacaaatttccctaacaaactcattttaatttcattagtctaattgttctca

SEQ ID NO: 755993 - DNA, 597 bp, Homo sapiens
caatattcataaaagcttacaatcatcacactatttccactttaattcaattctcagttttccatgtctttcctacaagaaaacacccacatttgcccaataatttatgttcagtgatgttgatatcaattttattagtcatagcaaaaaatggaaaacaacttacatgtccatcaggaggagaatttttaaatcaattatgacacatacacattttagaattgtaggaagtagttaaaagaatgagacatrtctataggtgctctcacagaatgattcagcatttatttcattaagtgacaagtgcaagaggcaaaagaatatgtacatctttgtccaggtacattaaaaacatacaatgtattttgtctagtatatcgatttaaggaaaagcctaaaatatattttaaaataatatgtacaagaatttgaattgtggttatttctgaggggaactgaattttggaggaatgcagtaaggaaaggggttgtgatttagccatattgtcagatttttttttgtatcatgaatgtatgcactattatttttgtaattaaaatgtttcaataagacagaaatagtacctgtgtattgtt

SEQ ID NO: 755994 - DNA, 515 bp, Homo sapiens
aaggtcaactctaggccagatacctccctgtatgccactgtctggatccagtctagctgtgattaggctgccaagaggctaacctgaggctcacccaggcctggtacatgggactgcttgcagcaaatgtggttgtaagtagagaggagagaggtgggctgaagatgtatyttcctagccttggcctttgagacaggatggatacccagttgtgcttatcagcagccagcagcactcctcatttcacaaattacttcatcacaagtgcctccaaaactctaaccatttctccaacttgggaattctctctagaaagacttattttctgtcaatgtcagcccattgtcacttcatgttactgtatctttaatgtgctcttagtttctgtactaacctgagctaaattttgtaaaaaatacagcatttacactgttctttggctattgtctttcattgcgttgggctgcagtcccttcatttaacatgcttccctcaccccatgtgagaaatttcct

SEQ ID NO: 755995 - DNA, 529 bp, Homo sapiens
cttgtttttctcaggtttgtcaaagatcagatggttctagatgtgcgatgttatttctgaggcctctgttctgtttcgttggtctatatctctgttttggtaccagtaccatgctgttttggttactgtagccttgtggtatagtttgaagtcaggtagcatgatgcctccagctttgttctttttgctttggactgtcttggcaatgcaggctcctttttggttccatgtgaactttaaaatagttttttccaattctatgaagaaagttactggtagcttgatggggatggcattgaatctataaattaccttkggcagtatggctattttcacaatattgattcttcctatccatgagcatagaatattcttccatttgtttgtgtcctcttttatttcattgagcagtggtttgtagttctcctttaagaggtccttcacatcccttgtaagttgtattcctaggtattttattccctttgtagcaattgtgaataggaattcactcattatttggctctctgtt

SEQ ID NO: 755996 - DNA, 588 bp, Homo sapiens
tactcttgctattttgcagtttccatttgcatggaatatcttttccatttccatattatcagtttatttgtgtctttataggtgaagtgtagcttcttgtaggcagtagatcattattttttaaaaatccattcagccactctatgtcttttgattggagagtttagtccatttacattcaatattattgttgataagtaagggcctattactgccattttgttatgtgttttttggttgttttgtggtcttctcttttttctttcctttctgtcttcctttttgtgaaagtgattttctctggtggtatgttttaattttgtatttttttktgtgtgtatatctgttgtaggtttttaaatttgaggtttccatgaggcttgcacaaatatcttataacccattattttaaactgatgaaaactttgcaaaaacaaacaaacaagcaggaaaaactaattaataaggactccatgcattaacttcatcctcctgctttttaactttttctgtttctatttatatcttattatattgtctatgtcttaaaaaattgttgtaataattatttttgataggttcctcttt

SEQ ID NO: 755997 - DNA, 433 bp, Homo sapiens
aagaacatttttcttgaccttgattgattgtaaggagactccataattcccgtttctgtaagctacagttgaaattcactctcaataattcatggcactttttatttaacaaatgatacattctggcaattattgcttttctctctattaaagcagccattatttctacacctgtgatgaacacctaaaaaagagaaagaaaaatgggaatcaaagcattttacaagasctgtcatataacgtgcttcaggaatcaggatcagatgagacattctaagaagaactctgtgttattaactaaattcttacaactactttaacccccaatgtgtaactcctaatttccagatgaggaaactgaagtacagagatttttgagtaccttgcccaatacccagtggagttgctgaggcttgagctcagacactccaga

SEQ ID NO: 755998 - DNA, 433 bp, Homo sapiens
aagaacatttttcttgaccttgattgattgtaaggagactccataattcccgtttctgtaagctacagttgaaattcactctcaataattcatggcactttttatttaacaaatgatacattctggcaattattgcttttctctctattaaagcagccattatttctacacctgtgatgaacacctaaaaaagagaaagaaaaatgggaatcaaagcattttacaagacctgtcatataacgtgcttcaggaatcaggatcagatgagacattctargaagaactctgtgttattaactaaattcttacaactactttaacccccaatgtgtaactcctaatttccagatgaggaaactgaagtacagagatttttgagtaccttgcccaatacccagtggagttgctgaggcttgagctcagacactccaga

SEQ ID NO: 755999 - DNA, 628 bp, Homo sapiens
ggaatgaagctgcagaccttggcggtgagtgttacagctcttaaggtggcgcgtctggagttgttcgtttcttctggtgggttcgtggtctcgctggcttcaggagtgaagctgcagaccttcctggtgagtgttacagctcataaaggcagagtggacccaaagagtgagcagcagcaagatttattgcaaagaaagaaagaacaaagctttcacggtgtggaagcggaccccagcaggttgccactgctrgcttgggcagcctgcttttattctcttatccggccccacccacatcctgctgattggtagagccaagtggtctgttttgacagggcgctgattggtgtgtttacaatccctgagctagacataaatgttctccaaggccccaccagagtagctagatacagagtgttgattggtgcattcacaaaccctgagctagacacaggatgctgattggtatgtttacaaaccttgagctagatatggagtgccaattggtgtatttacaatccctgagctagacataaaggttctctacgtccccaccagactcaggagcccagctggcttcacccagtggatcccgcagggggtctgcaggtggaggtgcctgccagtc

SEQ ID NO: 756000 - DNA, 628 bp, Homo sapiens
ggaatgaagctgcagaccttggcggtgagtgttacagctcttaaggtggcgcgtctggagttgttcgtttcttctggtgggttcgtggtctcgctggcttcaggagtgaagctgcagaccttcctggtgagtgttacagctcataaaggcagagtggacccaaagagtgagcagcagcaagatttattgcaaagaaagaaagaacaaagctttcacggtgtggaagcggaccccagcaggttgccactgctagcttgggcagcctgcttttattctcttatccggccccacccacatcctgctgattggtagagccaagtggtctgttttgacagggcrctgattggtgtgtttacaatccctgagctagacataaatgttctccaaggccccaccagagtagctagatacagagtgttgattggtgcattcacaaaccctgagctagacacaggatgctgattggtatgtttacaaaccttgagctagatatggagtgccaattggtgtatttacaatccctgagctagacataaaggttctctacgtccccaccagactcaggagcccagctggcttcacccagtggatcccgcagggggtctgcaggtggaggtgcctgccagtc

SEQ ID NO: 756001 - DNA, 628 bp, Homo sapiens
ggaatgaagctgcagaccttggcggtgagtgttacagctcttaaggtggcgcgtctggagttgttcgtttcttctggtgggttcgtggtctcgctggcttcaggagtgaagctgcagaccttcctggtgagtgttacagctcataaaggcagagtggacccaaagagtgagcagcagcaagatttattgcaaagaaagaaagaacaaagctttcacggtgtggaagcggaccccagcaggttgccactgctagcttgggcagcctgcttttattctcttatccggccccacccacatcctgctgattggtagagccaagtggtctgttttgacagggcgctgattggtgtgtttacaatccctgagctagacataaatgttctccaaggccccaccagagtagctagatacagagtgttgattggtgcattcacaaaccctgagctagacacaggatgctgattggtatgtttacaaaccttgagctagatayggagtgccaattggtgtatttacaatccctgagctagacataaaggttctctacgtccccaccagactcaggagcccagctggcttcacccagtggatcccgcagggggtctgcaggtggaggtgcctgccagtc

SEQ ID NO: 756002 - DNA, 518 bp, Homo sapiens
atactttgcaactgtgctatttggtgcattgacacttaagattgttatgtcatcttcatggatttaccctttcattattatataatgccctttggctctgggaatcttttttctctgaagtctactttgtttaatactgatatagccactcttgctttactttgatggatgtttgcataaaatatctttttctatccttttactttaaacctgcctatatcattatatttgaagtgagtttcttataaagaacatttaattcagtcaatgccttttagttgatatatttagacctttgatattaatgtaattattaatctgtcaggccttaattctgccattttttgttttctgtgtgttctttctktttttttgttttgttttgtttttatttattctgtcttctgtgtgatactgaaaggttttattcgattctactttgatttatccatagtgtttctgagtgtttctctttgtatagctttttaatggctgctctaagtattatatcatatata

SEQ ID NO: 756003 - DNA, 606 bp, Homo sapiens
actttaagatttaaaaagttccaagttatttacatgtgttatattgcttgagccacaaaacaacccaagtgaggtacgtagtggtgatgtctacacagatgttatatatgaggtaatatatgaccactgtctagaacacagcattttcaataaatgctggcccagaatgggggttcaataaacactgtctcctgtcgtctaaaatgctggcaagtgacagaattgggcctggaaatcaaatcttctggttcccaatctaatattttccatgctgcatgacactaactctacaggtaaaagttcaactgagataatgaagcatcaactagccatagtctcctacctgcaagggcaagagaaggttgcaattagctctcagaaggacaactctgwcatgtcctagagctttacatggaaaaggaagaaaattctattatcttccttgaattagttgcacaggcagcttccagcctggtatagtagttaatagcacaaaatgaactccctcataacaaacacccaggtaacttgtggctcctttttttccattatggaaattttcaaatatcaaaaaaagcagagatgtataatataaagagccttcgt

SEQ ID NO: 756004 - DNA, 643 bp, Homo sapiens
aggatgtcctaaaagcccagcaaaggctcctcaaggagataatactgtaaacagtggaatgatgtcctgttggtcaaggtaacgtatttcaaaaagatggaaatttcaagagtgtcaaattccccaaggtaatcttgtatcatggtgccaccttattggtccacatcaaagagctatgcttgacttgagaacatcacattcattttgcttttgataattcttccattatatttgcatgtgtttcctacagattacatataaaaatcttgtgatcaaggccagttgtggtggctcattcctataatcccagtgctttaagaggccaaggtgagagratctcttgagaccaagagttcaaaacaagcctgggcaatacaatgagaccctatctctacaacaaatttgaaaattagccaagtgtggtcatgcatatgcctgtggtcccagctactcagggggctgaggcaaacagacccttgacccacgagtttcaggctgcagtgggccatgatcacaccactgcacttcagctcaggtgacagagtaagacttcatcaagagagagagagagagatcttgtgattacagtcattttacagaagaggaaacttatggttatacaatcagtacattatggctttaa

SEQ ID NO: 756005 - DNA, 643 bp, Homo sapiens
aggatgtcctaaaagcccagcaaaggctcctcaaggagataatactgtaaacagtggaatgatgtcctgttggtcaaggtaacgtatttcaaaaagatggaaatttcaagagtgtcaaattccccaaggtaatcttgtatcatggtgccaccttattggtccacatcaaagagctatgcttgacttgagaacatcacattcattttgcttttgataattcttccattatatttgcatgtgtttcctacagattacatataaaaatcttgtgatcaaggccagttgtggtggctcattcctataatcccagtgctttaagaggccaaggtgagagaatctcttgagaccaagagttcaaaacaagcctgggcaatacaatgagaccctatctctacaacaaatttgaaaattagccaagtgtggtcatgcatatgcctgtggtcccagctactcagggggctgaggcaaacagacycttgacccacgagtttcaggctgcagtgggccatgatcacaccactgcacttcagctcaggtgacagagtaagacttcatcaagagagagagagagagatcttgtgattacagtcattttacagaagaggaaacttatggttatacaatcagtacattatggctttaa

SEQ ID NO: 756006 - DNA, 627 bp, Homo sapiens
ataaatttgaaactcttccacacatatatggtagcagaaatcttgggcatggatggggagcctcttgcctgtccatccactgaattattgtatttaatgtcttttgatttcctctcttttctttttactactattttctaccctttgtttctttacaaaaaaatagatttcatttgccccttctcaattcctttccagcatcaagcataactcttactttttgattcattattatcttcatcaccctccttcttacacttacttttttcataattgtttctaatcatctttcttttgtaacaaaagctttattccttaacaccactcyaaatatagaatgattctaaattatggtcctgtagttttttaacttcttaacattatcatgtagaatcaatacatacacaaaaacagatagaataatataacaaattcccatatgcttcaacagggagctatattccttaaaataaaataaaatcaatgcatgaccactgcaatcatataccaatctcattcttgtctcacaacagaaaataagaatcagaacagatttttttgtgtgtagatatccacatttttatccttaaatcctttgccctgtactgtgcaccattctagcaaacc

SEQ ID NO: 756007 - DNA, 595 bp, Homo sapiens
tgaaatgatggagactctgcccctccagtgatccagggcagtcacagccccaacaaatacagccattcccagtggaatcagcaggggtgcctgggagctttggtggtggtgcctggaaaagcagcagcaggaatgggcagaagtggtggtaccattgggacagggcaataccatggcagatggtctggagcctaacagggaaagcaggtggacacwgctttctacccagtgtgtaaaaatctggggtagaattgtctaatacagagtgggagagacattttcagataactgtagcaaaagctaccttgaggttctaggttcagaatcaattaggccatcacatttctctctaaacattaattcctactacacagaaaatatagccatagaattgtgagctgatgtagaagatgtaagatcatagatcagtgttttaaagctgtctgggaacttactggctaagctaatcatcgaaacttttaagagttgctcagcagttactattgctgaacctaaaacacaaataataaagccccagatgtgagcatctctaagctattgggctttatatttcctaagtggaataccacaaaga

SEQ ID NO: 756008 - DNA, 595 bp, Homo sapiens
tgaaatgatggagactctgcccctccagtgatccagggcagtcacagccccaacaaatacagccattcccagtggaatcagcaggggtgcctgggagctttggtggtggtgcctggaaaagcagcagcaggaatgggcagaagtggtggtaccattgggacagggcaataccatggcagatggtctggagcctaacagggaaagcaggtggacactgctttctacccagtgtgtaaaaatctggggtasaattgtctaatacagagtgggagagacattttcagataactgtagcaaaagctaccttgaggttctaggttcagaatcaattaggccatcacatttctctctaaacattaattcctactacacagaaaatatagccatagaattgtgagctgatgtagaagatgtaagatcatagatcagtgttttaaagctgtctgggaacttactggctaagctaatcatcgaaacttttaagagttgctcagcagttactattgctgaacctaaaacacaaataataaagccccagatgtgagcatctctaagctattgggctttatatttcctaagtggaataccacaaaga

SEQ ID NO: 756009 - DNA, 679 bp, Homo sapiens
tcagtgtatttggcatatctatcatcttgagtaattatcatttttatgtgttggaaacatttcaagatctctcttgaggctgccatgaaatataccatatattgctcctaactattgtcatcctactctgttatcaaacattagaacttataccttctatctaactgtgtatttgtagccattgaccaatctctcttcaccgcctgcacctggcccaacccacacacccttcccagcctctrgtatcaatcattctaatctgtgccttgatgaagtcaatttttttcagctcctacatatgagtgagaacatgggggaaatctgtctttctctgcctaactttctatgcctaataacataacataaatattatgttatttcatttagcagaataatctccagttccatctgtgttgctgcaaatgacagaatttcattttgttatggccaaatatattccactgtgtgtgtatacaacattttctttatccattcatctgttgacagacacttaggttgattccatatttttgcaattgtgaatagtgctggaataaacatggtagtgcaggtatccctctaatatactcatttctttttctttggataaacaataatgtgattgctgaatcatatggtacttttagttttggagaaatttacacactgttttccatag

SEQ ID NO: 756010 - DNA, 585 bp, Homo sapiens
aatctccagttccatctgtgttgctgcaaatgacagaatttcattttgttatggccaaatatattccactgtgtgtgtatacaacattttctttatccattcatctgttgacagacacttaggttgattccatatttttgcaattgtgaatagtgctggaataaacatggtagtgcaggtatccctctaatatactcatttctttttctttggataaacaataatgtgattgctgaatcatatggtacttttagttttggagaaatttacacactgttttccatagtggctgtattaatttactgtcccaccagcagtgtatgagttcacttttctccacattctcaacagcacctgtaattttctgactttttaataacagccattccaactggggtaaggtgataactcatygtagctttggtttgcatttctctgatgattacagatgttgagcatttttttcatatacctgtttgcctttgtatgtcctcttttcagaaatgtctcttcatgtcctttgcccattttttaatggaattctttttttttttctgttgagttgttcgaatttattttatattt

SEQ ID NO: 756011 - DNA, 571 bp, Homo sapiens
ccaaaaaagctgtcaaaaaggaaaagagataatcataatgtatcaaggtttcttcagaccttctgataggttcattttgaacatgttgcatctaagatgccagtagaaagcttggaaggacacccagttggcaaatggacagactggtctagaacttagaggtacaatatgggttgtaagtgcagagacatcagcatatatatgttagctaaagtcacyagtgctacaacttcagctagtttagcccctctgattcccagtttcctcctcaataaaataggaatgataatggtaccttgagggctgttgtagggattaaatgagctaatatcggtaaaacacttgacctagtacataaatgttagctattgtcattgttaattttattaccgttgatgagagtaacccagggataatgattaagttgaggagagaacaggggttgttgtaacattctatgcacatcagcccaacttccagtcattggtgtgtgactctttgcctgagggcaggctagatgtatcaggtaattaatgtagctctattccacttccaggagcagcctttgacc

SEQ ID NO: 756012 - DNA, 526 bp, Homo sapiens
tgatttaatcattctacattgtatatattactccataaatgtgtacagttataatttgccaattaaaaataatattaattttaaaagtacagaataatatttataatggcacattttttaataacaaaacactagaaataacccaaatattcattaatgttataaggatagacaaattacagcacattgcttatagtsaaattctatatagcaagagaaaactaattagctacacctacacacagtgacatggatgaatctcacaaacataatgttgaatgaaagaaaccagacacaaaagaacatgtattacttgattccattcttctagggtgttagtaaagttctatttcttgacctagttggtgattgtacgtgtctgtttactctaaaaattcattgagctgtgtacttataatttgtgcaccttttaaaatgttatattttaatttaaaagttagtttataaaaactaaatttacaagcacagtagcaataagattaaaataatcaaatgcagaaaattc

SEQ ID NO: 756013 - DNA, 594 bp, Homo sapiens
ccagaatccatcaggaacttaaatcaacaagaaaaaaaaacaaacaaacgaccccattcaatatgggcaaaggacatgaacagacacttctcaaaacaagacatacacaccatatcaacaagtataagaagaaatgctcaacatcactaatcattgtagaaatgtaaatcaaaaccacaaagagataccayctcacataagtcagaatgggtattattaaaaaaacaaaaaaagtaacagatgttggcgatgttgaggagaaaaaggaatgcttatacactgcaggctggaatgtaaattagctcagccactgtggaaagcagtttggagatttctcaaataacttaaaacataactactatttgacccagcagtcccattactgagtatatacccaaaggaatataaagcattctaccataaagacacattcacatgtaggcttattgcagcacttttcttaatagcaatgacatggaatcaacctagatgcacatcagtggtggactggataaagaaaatgtggtactcatatacacaccatggaatactgtacaaccataacaaagaacaaaatcaagtgctttgcagcaa

SEQ ID NO: 756014 - DNA, 579 bp, Homo sapiens
  misc_feature 553: n = A,T,C or G
taaggtatcagcaaatttggttcctgatgaggcccttctttctggtttgcagatagctgccttgtggctgagaaatcatctatcttgagtctccttataagagtgctaattctgttatgagaaccacaccctcattatttaattacttcctagaagtaccccttccaaacwctaccatattgaggtttacgtcttcaacatacgaattttgagaagacataaacagtcactaacatacattacaatatttggcatatagtaggtatttaataatttgagtaattgataaatactacttattatatgtcagcattatgataagtgctctatacagatgttacttgacttatgatatggttacactcatcctgacaaacccatcataccatcataagttgaaaatattataagttaaaaatttatttagctgggtgcactggcatgctcacgtagtcccggctatttgagaggctgagatggaagcattgcttgaacccaggagttcgaggttgtagtgcattatcatcacatgaataaccactgcactccagcntaagcaacatgtagagatggaaaccc

SEQ ID NO: 756015 - DNA, 643 bp, Homo sapiens
gtttctttaccagccaggcagagacccaaatgctagcattgacataacagaggaattaattgcttctgtgtacatgagcagtaagtactgactgtccttgttaaacatctgaagtttattgctggtgtaataaattttcattacatttcatttatagtaaagaaatattagtcaagtatgaaacattgctaatttgaatcctctataaatgaaagatgacacaatgtttcctaaagtgcttgaaaaaaatatataattaagtgaggggttcaaaaccctagctaatgttccttaaccaaggctacaaataaacaattagcaaaatattttaaaaatacaaagaaataaaaagattcatgtgaaaacagtaaaattcttaaaaatatacccttggtttcagaggtggttgaagtaatttattgtccccattaagttggatgaataaagaacaaaatattgtaaacaacaattaattttaatgacatgaagatgatcayggatcctggacttgatattccaatctaagtatttcttttaatcttggattagcacttgatttggttaaaacattgttggattacctcacataaagtaagacagattcattcttgcatatttcccccctttttattcaaagtttatt

SEQ ID NO: 756016 - DNA, 653 bp, Homo sapiens
caacactccaactacacttggttgttgcgggtaaagaaacatgatcctgattcgtatatcaggcccttcactgaaattcgtgaaccagagagggcagagggtcttcaatagtcaaagctggaagatgacatctaagaagctgctcttgatgatagttattaccaaacaaagaaaggacacccgcaataagaaagatgctgatagagagatacagttaagaaatagtgagtcatgttctgatattcaagtctttgtgagcccatctgcaatacctgttacttggttttccaacctttcctaggcagcactcttcctttccttcatcttataagttggtatctatcacgttctaccaagaaaattcctaatcagattatcgaatttcacataagttttttttagaaataaaatatgaatgtaacaagactttaaaaactgtaaaatactacccaaatataagacagtgwtactgtggttattatctctaactaactccaaatgttggagggactgtcacattaaaaaaaaagtatttcttattattagcagtttcaaatggcaacatcagggaaaatggtttggtgaaatttaaaggaaagaggatttaagctctgtgtaagaaaggaagttttaaaaactggagttttctagtt

SEQ ID NO: 756017 - DNA, 645 bp, Homo sapiens
acaagtgctgtcaaggattggagtaaaggtgacccttgtacactgttggtgggaatgtacatttgtacggtcattatggaaaacagtaaggaagtccctcaagaaattaaaaatagagctatagtatgatccagcaaatccactactgggtatatatcaaaagaaatgaaatcagcatgttgaagagatacctgcatttctaggtttattgcaacattrtttataatcacaaagataaggaatctacctaagtgtccatcaatggatgaatgaataaagaaaatgtgatatataaatataatggaatactcttcaatcttaaaaagaaggaaatcttgtcatttttggcaacatggatgatcctggggattaagtgaaataaaccaggcacagaaaaacaattactgaatttcttcacttatgtgtgaaatttcaaaacgttaaactcatagaatggtggttaccaggggctggtgtggaggtgtaggggcttggaagattttgatctgaggacaattttggttagataggaagaaaaagttcaagagatccactgtaaaacatggtgactatagttaataacaacatattgcatttcgaaaattgtatttttctattctcaccattaaaaaaatgacatttgtg

SEQ ID NO: 756018 - DNA, 638 bp, Homo sapiens
tcttgttaaatatgcacctattgatccactattattcctttgttcattgttcatttttttaattcagtcatcaacatctaccttgttcagtggcaccaactgagggttagaaataaaacgtatgacttttgcctttgtaaagctcatagtctaatgagggaaacagatggtaaacctgaaaaatcattcacaaattgtgttaagtgttcagaaagaaacgaaaaagctgccatgattggaaaagaagaacttatcatatctagggttgtcaaggaaagcctctccacatagctgggatttttccaagagataaggaaccagcaaggcaaagagtgtttacagcagaaggcacatcataggcaaagatccaacaaaaggggagtgtttgttgtgtccaaggaactgaaaggctcctgcggctggagtgtagtgggtgaggatgcaagcaaggagctgagctgggataccagatgtaggcagggaggagcgagtcagggctktgcatgccatggagagaatctgaatcctagtttaagtgcagtggcaagcttattcattggtttaaattgagagttaggattccttgtattacatttcagtttttgttcttgaaaggaaaaaaaaaaacaagattaaaa

SEQ ID NO: 756019 - DNA, 622 bp, Homo sapiens
ggaaagtagggatccagtatcaatcttctgcctatggctagccagttatcccagcagcatttattctatagggagtcctttctccagggcttgtttttgttggttttgttgcagatcagatggttgcaggtgtgcagctttacttctagttttctaacctgttccattgatcratattgtctgattgtgtgtgtagtagtaccatgtaacaacctgcttttgttgctatagccttgtagtatagtttgaagtcaggtgttgtaaaaccttcagctttgttctttttgcttaggattgctttggccattaggactcttttttggttcagaataaattttagaatattttcttctaattctgtgaaaatgtcactggtagtttgataggaatagcattgcatctgtaaatagctttgggcagtatgcccattttaacaatatcgattctttctatccatgaacatggaatgctttttcatttctttgtgttgtctctggtttctttgaatactgttttgtcattctcattgtagaggtctttcacctccctggttagctgtatgcctaggtattttattccttttgtggctattgtgaatgggattgcattcttgatttggctg

SEQ ID NO: 756020 - DNA, 586 bp, Homo sapiens
ttaagaagcactgatcctctccctgtcatggtcaggagtctgacccttatggctacagctatttggtgtattaactaatggcgtgacctaccacttctaccgccttagtttagggagcactaggtcctctcctaacttaatcatggactagagtccatctgcggtgccacccccaatgagatcccatagataggcratctatcttgatgtggcagataggcgatctattcaccactccagcattctgccaacattatttgccttaaggacttgtatattgtaagtttcatgaaaacttgcagagaatgtttgaataagtgtatgtacattattgtgtaattattttattttacatgtgttcataaaagttgctgttgctaacatatctcctggatagaatatgtttaatgcttcttttagttcattttacttttttgttttcttctctttgggggaaaatatgtaagatttcaaagaaaaaagatgattcataaagtagaatagcaatgataatgattataatgataagactgaataagttttggaattatctttacttaatacttcttttgccaagcaaggcctg

SEQ ID NO: 756021 - DNA, 563 bp, Homo sapiens
ggtaatgtgagcttttctgacaatgcacctcaaaattcttttagctctcaaatctttacccaatttcgaatccacttccacctctttaagtatttgctgcagaaatatctctcttttggtattaaaatttctactagattccaaggtccaccataaaaattacaataaaccaggtgacttaaaacaatagaaattaattctctcatagttatacaggctagacatctggaatcaagttgtcagcaaggccatgctcccattaaagtctctagggaagaaccctttcttgcctcttctagtttctggtgaccccaagcattccctggcttagaacaaaataacttatttctctggtctctatcttcacaagaacatttctycatgcgtttttctgtgtctctgcatccaattttttctttcataaataaggacacacagaaaaacgtcttaaagtgctaattagacaattacaaaagttcatacacacaatgaattagactatgtaaaatattcatgaaagctatgactgaaaagaaactcaccaaatcagcaaccatagatag

SEQ ID NO: 756022 - DNA, 529 bp, Homo sapiens
agaaaacatttttgacattatatagaagagttaacatataaaaggtcatctaacatgtcaatccagtaagctggatttagagcttaccctaatccagtattacctcatcttaactaattacattcacaaacaccgtgtttccaaaamaatgtcatattctgaggttccagatagacacgaatttggagggggctgctattcaactcatttcaaacaccaagcaagatcagtttccctcatttgaatgtttcattaataccctgtatcaaattctactatagaatgcatcacataatctgctaattgtttgtgtaggtttctgcctactctactaaacaacaaggactacaaataatagatttcatttttaaatttcatacttgtcactgtacccccattgtttaaatacagtatccaagacataatccagtatatgattatttaacgatttataaaataaatgaatattacataaaccctggagctaaagtttaattgaacaaaatggttcacagtcaccaataagata

SEQ ID NO: 756023 - DNA, 512 bp, Homo sapiens
cctgtatgagattggagactattactctaagtgaagtaactcaggcatggaaaaccaaacatcgtatgccctcactgatatgtgggagctaagctatgaggacacaaaggcataagaatgatacaatggactttggggacttgcggggaagagtggaaagggagacaagggataaaatactataaatatggtgcagtgtatactgctcgtgtgatgggtgcaccaaaatctcacaaatcacygctaaagaacttactcatgtaaacaaagaccatctgtactccaataacttatggaaaataaaaactaaaaaaaagaaaatgtccatgaacacttgagaaggaagtacattttgctttcattgagtggtaccttctatagaagtttgttgggtctaggtggtttatactgtcatcttttattttcttgttgatcttcttagttgttttatttattaaacgcagggtaatgatgtctccaactatatttttaaattgcttatttctcttttc

SEQ ID NO: 756024 - DNA, 629 bp, Homo sapiens
aggatgccttatccacaatcatggtattccatacagcattgcctctgaccaaggcactcacatgacgcctaaagaagtgtggcagtgggttcatgattacggaattcactggtcttaccatgttctccatcatcctgaggcagctggattgacagaacagtggaatggccttttgaagttacaattacagtgccaamtaggggacaatattttgcagggctggggcaaatttccttagaaggctgtctatgctctgaatcagcatccaatatatggtattgtttctcccatagccaggattcacaggtccaggaatcaaggggtggaagtggaagtggcaccactcatcatcacccctactgatccactagcaaaacttttgcttcctgttcctgtgactttacattctgctggcctagaggtcttagttccagagacaggaacactgccaccagaagacagaacaatgattccattaaactggaagttaagattgccacctggacactttgggctcctcctatctctaattcaacaggctgagaaggaagttacagcgttggctggggcagctgacctggactatcaagatgaaatcagtctactactccacaagggaggtgaggaag

SEQ ID NO: 756025 - DNA, 629 bp, Homo sapiens
aggatgccttatccacaatcatggtattccatacagcattgcctctgaccaaggcactcacatgacgcctaaagaagtgtggcagtgggttcatgattacggaattcactggtcttaccatgttctccatcatcctgaggcagctggattgacagaacagtggaatggccttttgaagttacaattacagtgccaaataggggacaatattttgcagggctggggcaaatttccttagaaggctgtctatgctctgaatcagcatccaatatatggtattgtttctcccatagccaggattcacaggtccaggaatcaaggggtggaagtggaagtggcaccactcaycatcacccctactgatccactagcaaaacttttgcttcctgttcctgtgactttacattctgctggcctagaggtcttagttccagagacaggaacactgccaccagaagacagaacaatgattccattaaactggaagttaagattgccacctggacactttgggctcctcctatctctaattcaacaggctgagaaggaagttacagcgttggctggggcagctgacctggactatcaagatgaaatcagtctactactccacaagggaggtgaggaag

SEQ ID NO: 756026 - DNA, 626 bp, Homo sapiens
tatctacacttatgatttggctcatgtagtgtttattaggtttctccactgtaatgttactcatttttcttctcttttaatactgtagtctttagaaggaagtcactataagtacccctcacttaaggaaatgagaattgyccctgacctcattgacaaaaaattaattgcacaaatttttggtatttttctgcacagaacatgtgtttcatagcaaaccccatttttttacttatgcatttaatcatttatttctgtcagtataaatgatatggtttggctctgtatccccacccacatctcatctcatcgctcccataattcccacatgtggtgggaggaaccaggtggaagataactgaattatggggacaggtctttcccatgttgttctcatgatagtgaataagtttcatgagatctgatggttttaaaaatgggagtttccctgcacgagctctctatttttgcctgctaccatccaagtaagacatgacttgctcctctttgccttctgccatgattttgaggcctccccagccacgtggaactgtaagtccattaaacctctttttcttcccagtctcagttatgtcttcatcagcagcatgaaaatggactaatac

SEQ ID NO: 756027 - DNA, 608 bp, Homo sapiens
atctaatatccagaatctagaaggaactgaaacgaatcaacaagcaaaaaacaacctcattaaaaaatgggcaaaggacatggacagacattttgcaaaataagacataaaagtgtccaacaaacatgaataaatgcttaacatcactaatcatcagagaaatrcaaatcataaccacaattatataacaacttatccccgtcagaatagctattattaaaaagtcaaaaaacaacagatgctggtgaggcttctaagaaaagggactgcttatataccgtgggaatgtaaattagttcagccgctgtgaaaaacagtttggagatttccctaggaacttaaaggaaagctgccattgaacctagcagtcccattactgggtgtatacccaaaggaaaatagactattatacaaaaagacaaatccactcatatgttcatagttgtgctattcacagtagcaaagacatttgtaatagttaatattgagtgccaacttgattggatggaagtgtgcaaagtattgttcctgggtgtgtgtgtgaggatactgccaaggagattaaatttgagtcagtggactgggaaaggcagacccacccttagtct

SEQ ID NO: 756028 - DNA, 602 bp, Homo sapiens
tgtacacgacagctggcttgtaattttacagcttcaattttccattattcactaaaataactgacctaggtgatgaaatgaaacatttaaatatcatgttatgtcacataaaggcaatattggctatcttccttgcagtcataagagttttttgtttgtttgtttttgttttgtcaggtatggtaacaatactgaggcaattctgtctcatactctctcaccgtatgtctgctctaaataaaacactcatgggaatttcagaaaaacatacagtatgtatacacttaagtgattacagatggatcaaagagtcagaaaagagcctcgtaaacattcatgtaatgccaagtagaatgcaaaagacaggtatcgtgcasacaatgacgccattataatagagacatgagttgaaattctgatgtcctgtcttatctgtggagatttatataattttttactgtcacttattctttatttcttctgttacacaaaggagatgataataactcatttgtaagtttttatgtaagggctaatggagtaatgcataaaaagtgttggcatatattagtgatgttggcttgcagttttcctgatcttac

SEQ ID NO: 756029 - DNA, 586 bp, Homo sapiens
cttttgtaggcatgtttctaagaagcagctacacaggctggtgctgtaattagggtacattagagtatggccttgtgattatttcccaaacattgtgagctaatgtgatgttgttgctcttgttgtttctggactgacattattaagaaacaagttttcttttccacatccactttttcccatcctgttgctgcctagaattgttgaaaatagcagagccacatttgagcagtgcctagtcctggaatgatctgagacagcatctggaagatatcaacatctggcatttgtgtaaaggagagataaactcctattgtattaaatccacagagatatttggatgtctgagttaccataactaatatgccctctgatatttttgtgaggacgtcaaatattttatgattyagggtacaagaaattttctctctaggcagtaaaattgacattgatatttctattttagttgagcattataacatgggatcaattgctctttgataaattattggatcaccatttacaaagtatacacgaacatcacctatacagtttaagatatttgggcagttaaattaaccaatcc

SEQ ID NO: 756030 - DNA, 550 bp, Homo sapiens
tgcctggaaatgaatatcattcctttcttttcagcaatggtgggtagttatgtaaaccaccttgactttagaacagaatgaattttagagtaagtaatacttcactcaatcttctttgtttaatcaaaagaattattttggttactttagttcatacttaatttgtgttactttatggatactacaggcagggcattgtcatttaattatgacatgcaaagctttactatttgagattactgaattgactggttgattaaaattatatgtcaatatttacatctatacatttatgtctacatgcatgcaaacatgtaataatagtgattataaaatatctactaagtgccaggcaagacaggcaaaccaggtcattgtcttcaagggttttagaatctatgtaytcagtatgtgcctacttgtctctagattgcgttttcacagaaacttccacactttttttttaactaggatagaagtggatgctcacctagatattgaaggagagtcctagaactaacattttagcatagagaatagcccagtagaa

SEQ ID NO: 756031 - DNA, 680 bp, Homo sapiens
agtcaaactttatctgcatctagcacataattaaaacaacctatcagatttcacagtaaagttgaaaatttctaagagttaccattatgacatgtaattgaaattactaaaaagaaatctacctgcaaggtgtataaaaaacagtaaaatgtgtttttatttaaagattataagaaagcatggaaatatacattttatctagaaataaaggattgtctttttaaagtagaaagtttaagcaaattgtgaaaagaytgtaaaaattaatctttcaaaggaaactctgtgtgtgaacatattaactaaatacaaaagggtattatacttttttttctgtaaacactataataaaagcagaacaaggttttcttaagatgccaatccactctttagcaaaatttgtagaggttaataaaaggtttgtgaaaatctcacttcatagtcaaactggttaagattatgtaggattgtctacaaggtttcattaaaaattagagttaattttaatagcaaactaatgcatgggtaaaatttaactttctctcttgaatgggattttcatgtaattaaaaatgctgatgaatggtttttgctttttcagatttttgtctcatcattttggcaaaacaaataacttatggtaatctaaaattctacttcataatatcaagtgttttaaa

SEQ ID NO: 756032 - DNA, 680 bp, Homo sapiens
agtcaaactttatctgcatctagcacataattaaaacaacctatcagatttcacagtaaagttgaaaatttctaagagttaccattatgacatgtaattgaaattactaaaaagaaatctacctgcaaggtgtataaaaaacagtaaaatgtgtttttatttaaagattataagaaagcatggaaatatacattttatctagaaataaaggattgtctttttaaagtagaaagtttaagcaaattgtgaaaagactgtaaaaattaatctttcaaaggaaactctgtgtgtgaacatattaactaaatacaaaagggtattatacttttttttctgtaaacactataataaaagcagaacaaggttttcttaagatgccaatccactctttagcaaaatttgtagaggttwataaaaggtttgtgaaaatctcacttcatagtcaaactggttaagattatgtaggattgtctacaaggtttcattaaaaattagagttaattttaatagcaaactaatgcatgggtaaaatttaactttctctcttgaatgggattttcatgtaattaaaaatgctgatgaatggtttttgctttttcagatttttgtctcatcattttggcaaaacaaataacttatggtaatctaaaattctacttcataatatcaagtgttttaaa

SEQ ID NO: 756033 - DNA, 626 bp, Homo sapiens
tgggcttggttttaaaaagtccgatctgaaattccttgtggaacagagagttccatcaaagccaatcaaaaaggcctatatagaggtgattattcttgcttcattttatgcaaataatcaggccaagtatacaactaaagtttactttgcaaacagctaagtcctatcataagttgttttttaacaaaatgaggactagagagacagaaattatgtttcaaaatttatcatacatctgtcattggattcaagtctcattagtcatttttaaattcttgtctacattttaaactaaccatgctaattcttgtaatccaaccacatctccagctgtggctcaaacaaaacagaaagtgataggtaatgtaaaaatctcgaacaatgttctggctgggcaattatcctataaatcttgctaggtagcctataaccccaaggttttctttttttgggaaagtaagatcaaraaagtttaaaaaagcctagccccatacactcacttaaaacagcacaacccatctaaatggcttacaggtatcaaataaactctgttgtcatggttatggcctatagtgcccccactaataatggtagtcttaatactcatattttaaccctatattcta

SEQ ID NO: 756034 - DNA, 584 bp, Homo sapiens
agcagcagatcttggggaaacagaatagatataccactgctttaaaagcaatagagagataatttaataccacagtacagttagaatctaaagccccaaaatattatgtgtatgcaaaataggagaaatttctataatwtttatttggtttttacacaaataatggcacactctctatgttttttgtgtgtctttcactttatagcataccttagaaatcctttcataataatacataaagagctaccttttccccacttttagcagatatattatttttcatcatgcaagagtctcacaatttaattttttacctcttattgatagattcagtttcttttaaattctttgctaatatagacagtgccttgatgagaaaccttttacattttgcacacattttgcacatatgtaagcatatgtgtaggctgattttctaaactacaattgctggtatatttataaatactgtctaattactctccatcgatagtctacttttagatttttatcattttgctatctgagaaatggtacctctgggcaaaattaatttgcatttcacttataatgactgatctcct

SEQ ID NO: 756035 - DNA, 611 bp, Homo sapiens
tcttctttttaccatttttcaggaactattaatttattatagactttagccgtttgcttttagaattatttttccctccttttgttattagtttctacatcttgtatatgatggcatgtggtcaggcagaaattctatttatttttaattttgatgaagccatagttagatgaacacaattatttgatgtattattttcgtacaagtcacaattctgctgttaaaattttcagagttaagtgaaatgaaagatgaacccaataaaatgatataacaatgtggtatatgataaggtagaggggagtaaaaagtgttatacaagtktagctctgccccagctatgaaatctgatataatcattaatattttacccaacatacctataaaataatattattgtacactttacactaaagttttacctagctaataaaaatattctcaggttgattttttcttccttatataattgcagtcgcctcaagaataagcatgcactgttttactttaatgccctcagagagtgaatgtcatatttaactttaaacaaatgtattgactgaatttatgtcatctttgaaaatttgtttccattctaagacttgggattt

SEQ ID NO: 756036 - DNA, 608 bp, Homo sapiens
atttcttcagttaccattctttcctattacttctcttctctctattgcaaattcacttagacgaatgacagaccattagctcttttgttcttttctttattttcctggatgtttctctactatcttctaccttgcttgtcttctgtttattatgctacttttaatttactcactacatgtttaatttcagttagctgtgtttctcagacttagcatttccaagattttctatttttagggattccrgttttctggtatgaatcttcagtttttccattttctctggaatatattaacacagtaattttaaaatttgtgtctagaattcttatacgttcatcatctctgcctttgtttcttttgtctgattttttttctttttaatttctatcatttctattctaccttctggtattcctggaaatatattttacattttgaagaaagataaacttttcctggtctaaatagggatagaatatttcagtctttgtgaaggttagccaatttcctattggctttttgttaggcagtcctacggtacgcctcttttcctaacacacttgctaagaaactcctttctgcaatcaaaatgttgggttgaaaca

SEQ ID NO: 756037 - DNA, 629 bp, Homo sapiens
aacccatactctccaacagccaggccctcagatgggaagcttcagagccttgtgacagcctggctgaacctctccagcctgggcgctccctccatttcctgccccggaaacaggcatctcctctggccacctcccaaagaagcctgtctggaagcctcaggcacccgttcctggaagcctgtactattcacaacaaagggcctgtccacccagtygtgctgagcacacccctattcccccgagctctgaattgtcctttgcccaggctgggacaacatctcagagccttctgcctgctgcagactcggctcagcccaaagcactccatgaaattggggtgtggcatctgcctcaaggagcatttctacaacctctgctgcctctaccgcaaatgaaaactccacctctgaatgccgagttagaactgcacaattgtaaggaagaaaagttgggcaggactggtggctcacaactgtaatcccagcactttgggaggatgaggcaggcagatcaccggaggccaggagtcaaggccagcctggccaacatggtaaaaccccgtctctactaaaaatacaaaaataagccgggcagagtggctcacgcctatcatctcagcattctgggaa

SEQ ID NO: 756038 - DNA, 547 bp, Homo sapiens
aaaagtgagaaatggccgggcacggtggctcacgcctataatcctagtactttgggaggccaaggcaggcagattgcctgagttcaggagttggagaccagtatgggcaacatggtgaaaccccgtctctatgaaaatacaaaaataaataaatttaaaaaatagctgggggtggcagtgcgtgcctgtagtcccagctactytggaaactgaggcagtagaattgcttgaaccctgcagacagaggtggcagtgagccaagatagtgccactgcactccagcctggtgacagagcaaggcttcatctcaaaaaaaaaaaaaaaaaaaagtcaggttttaacagatgtggagaggatgtggagaaataggaacgcttttacactgttggtgggagtgtaaattggttcaaccattgtggaagacaacgtggtgattgctcaaggatctagactcagaaacaccatttaacccagcaatcccattactgggtatatacccaaaggattataaatcattctactataaagatacgtgagcatgtatgtt

SEQ ID NO: 756039 - DNA, 592 bp, Homo sapiens
gggctctgctcagttaacatcatgaggctcaagttagtatctctttggagtgaaaagctctttctgaatcataactttgtggtcagataagagaaagtttctaggtcttagctcagtaggaaaggtaactgccatcagaattccagaccatctttcataacttctcgaagaggtgacaataactaccatcaccatcattcctctggccctatctgtgactcagaaccagttctgatattttgacattgcccattggtaccgaacgcttccctctggtgttyctagtttcactagtgactttagatctctgaacactctgactgtcacggtggtgttttggaccctcactaggatagaatggccatagttttggggagatgctgattcactctaatctcctactgggctctcaaatatattatcgtggaagaacattaccctactggctaatttcataaagatatcgtgtttgttaaggtctgtgatgcgacgtatcttattgcatggccttaggcaagttacttaacctctctaagactcagtctctttatctgtaaagtggaggaagtaataggattgatcctgcgaggtt

SEQ ID NO: 756040 - DNA, 600 bp, Homo sapiens
cataaattatcagactgtttttctgaagttggacctgatatacttgcaggcaggtttgcataggggaggcgggagaatgctattgaaatctctaatctctggtgcagttctcattttagttacattgtattcccaccacagtagaaaatagcaatattcagactgggatgaatgactttagtatccctctttccagggaatattctcacaagaatacatgcaaaacacattgcttacagtagattattgataaaagttgagcaacttgagtagttcagctaaacattggtgagattagagttagatcggtcaccatgatgaaaagacacatgtagaaaaggctgtagctaagaaatagaattracaggcttgcaactactcgagtggttgatattaatgaaagaaataactctcctaatgactttataacaaaattttagccctacacaatctcatgagatatgtgctactattcccactttatagttgaggcaagggagagagcttaggtttaagctgatgcagtatgttaagagacgaaaaatagtcctgtgacaagagaaaatgaattcagatttgaacatattgagctatatggaa

SEQ ID NO: 756041 - DNA, 553 bp, Homo sapiens
gcccaagcatgcgtgagggtggcttgttttgtgaactgactccagggaataggtgtgggggctggaggagtatgaaacagggaaggaaagaagccccaacaaggttgagttgccaaactggctacttcagacaggatgacctcagagccacctgcccataggactgaagcaggcaattggcactgattccccgggcgccatctccaccatygggggtcttgtggagtgactatccccctggcattttcagttgcatatgcataaatgccagttcccaagaaggtcccgcagcaatgccagagaaccctgggaagaaggcgtaatgcagtggcctgaggtgaagcactttcagactagacctctatggagctggttgccacagtactggctggagcagaggtgggggagagcatgcgcggaggacaaggagaggtgcacctattctgatgcctttaaagtctcactgtcagccatgaggtaggtactatttcctccactttacagtggagacccaggaaggctcactgacctgcccaaaacccacatgcaaaag

SEQ ID NO: 756042 - DNA, 615 bp, Homo sapiens
tacacacagaccaggtttgtaataaaaacaaaatataaaaatacaaaagccacaaaatgtcccagctggcagagactgcactccaaatgggagggatcctaggcaggaagcacagttcatatttatggaacagaacgggacagctagatgctttggttctttgggggaagtatttagcctaacccaatcacaacatatatattttctaactcagggattcatgagttattttcatagattgctcatggttattaccgaaggttgctctgtctctttgaaaccaaccatgttgccgggcaacagcttccttgttgatttcatttctcctcttatcattgtctcagtaacttcagcaaatctatccatattctgytctctcccacacaaaataaagtccctttacattcctgaattatgaggcagcagaagtaaaaagtgatagattcatcaagcttaattataagataagatgctggatattttactgctatttctgcagtctcagctttggtttgagtttgaagcattatgggtcaaaattcctaatgatttttgaaaatgccacctgtgaggtctgtggcagagcaagcagttatactgggggaaagcaaaaat

SEQ ID NO: 756043 - DNA, 663 bp, Homo sapiens
ctcttcctcctaaaccaattctagtccatgcacataacaaaagatcaaaatacatcgagcaaaaactgaaagaactgaaagaagagacagataaacccactattatagtaagagattgtagtacatgtctctcaataaatgaaagaacaaacagacagaaaatcagtaaagatacagaagacttgaacaacactaccaaccaaattgacctcattgacatgtatagaacactctgtctatccaacaacagcagaatacacatttttctcaaggtacatgggacactgagcaagatacaccatattttggaccacaaaacgagtcttaatacatttaaaatyatacaaatcataaaaagttttttctgaccacaatagaattacaatagaaatcagtaacagaaagatatctagaaaaatcctctatgtaaaaaccaaacaatgcactctaaagtaacccacaggagaggaaatgaaaataaatcaaaaagcactttgaagtgaatttaatttttaaagtgaaaaaaatgacatatcaaaattcatggtatgcagctaaagtaatgcttagagggaaattaaagtatcaaatgtctatgatagaaaaaagaaaggtctcaaattgatgatctaagcttctatgcttagaagttagaaaagaaaa

SEQ ID NO: 756044 - DNA, 602 bp, Homo sapiens
agaaatcagtaacagaaagatatctagaaaaatcctctatgtaaaaaccaaacaatgcactctaaagtaacccacaggagaggaaatgaaaataaatcaaaaagcactttgaagtgaatttaatttttaaagtgaaaaaaatgacatatcaaaattcatggtatgcagctaaagtaatgcttagagggaaattaaagtatcaaatgtctatgatagaaaaaagaaaggtctcaaattgatgatctaagcttctatgcttagaagttagaaaagaaaaataatcccaaagtaaggagaagaaggaaataataaatataagagctgaagtcaatcaaatagaaagcagactaaaaaaatagagaaaatcaacaaagctagaagctggttctctaagaatakaaataaaattgataaatctctagccagatgtgaacaggaaaaaaagacgcaaatttcacatatcagaaatgaaacaaaggacatcacaagatattctacagacaataagaaaatataattacaaactttgtactaacactaattcaacaactttgatgaatgagtacatttattgaaatataactatcaaagctcactaaaaa

SEQ ID NO: 756045 - DNA, 488 bp, Homo sapiens
ttgacgggaatgtaaactggcacagccactatggaagacagtatgaaggctctgcaaaaataaaactaaaaatgaaactgccttatgagaggctgggcacagtggcccacgcctgtaatcccagcactttgggaggctgaggcagaagggattgcttgaggccaggagttcaagaccagcctgggcaacatagtgagamcctacctctacaaaaagtaaaaatattagctggacatggtggcacatacctgtagtcccagctactcaggatgctgaggcaagatgattgcttgagcctgagaggtcgaggctgcagtgaactatgattgcaccatggcactccaacctgagtgacaggtcgtctcttaaaataaaaaagaaaagaaaagaaataaattccatataatccagcaatccttcttctgtgtatatatgcaaaggatataaaagatctctgcagccccatgtttattgctgcattactcaca

SEQ ID NO: 756046 - DNA, 581 bp, Homo sapiens
tgcaacataaagagacagggtctttccagactgttggagagttgaaatcctcagataccagctgtgcttcagacttagacggcaactactgtggaacagaataaagcccagattggttagaagtctcttggagaaatttcttcaagaagataaaattgatagaatatttaataaatctgaaggcatgtagaaaggattttgacaattagtatayagtgtggtttagagtatgagatgcgtctttcaaaaataagcaagtttttaaaaatcaaggcaaccaataactccagggaaaagaaaaagctgagcaagaaataaaaatttatagtagtgctttacatagctttcagccatgaataataacattttcaaaatcacaatcattgaagcactttttatttaaccaaaaattataatataactatgttgagagaatgagagcaggaagtaggacataaaaggagtgtgtgtgtgtgtgtgtgtgtgtgtgtgtgtgtgtgtgtgtgttggaggaggaaaatagaagagacctaatcctcatctttctctctacagaagtcaattttcaaaacccaaatatg

SEQ ID NO: 756047 - DNA, 609 bp, Homo sapiens
tttcaataaaagatacatatatcttttattgttatatatcttacatattatatgtcatgtatacttataacatttttgttatttatattatcaaaaatatgtatttcatatatacatatgtaatatatatgtaatatatatgtcctgataaaagaaaaaatattataaattactgtgacttcatttcatagttgttaargccctggtatacaataacagtaagtgatgttacactgttgattaagaaaactgagctactccagaatatttttcgtctttagaatcttggctctaaatttttcagccaaataatcttttatttcttaggagatctgataacatgaataacaataatattaccaatgataaccataaaggctattatttattaagtttctctaatgcatcaaccatttttatctcattgtttacccctcaacaaccccataaggtaaatgttgttatcctcacttaacaaataggaagcactgagtttcgggaagactgagcagctcttgagtcaacacagctagtagagcttgaactcaagcctaggctgtgtgtctccaatgcccatgactttcccactaggctgggaaatttattttg

SEQ ID NO: 756048 - DNA, 609 bp, Homo sapiens
tttcaataaaagatacatatatcttttattgttatatatcttacatattatatgtcatgtatacttataacatttttgttatttatattatcaaaaatatgtatttcatatatacatatgtaatatatatgtaatatatatgtcctgataaaagaaaaaatattataaattactgtgacttcatttcatagttgttaaggccctggtatacaataacagtaagtgatgttacactgttgattaagaaaactgagctactccagaatatttttcgtctttagaatcttggctctaaatttttcagccaaataatcttttatttcttargagatctgataacatgaataacaataatattaccaatgataaccataaaggctattatttattaagtttctctaatgcatcaaccatttttatctcattgtttacccctcaacaaccccataaggtaaatgttgttatcctcacttaacaaataggaagcactgagtttcgggaagactgagcagctcttgagtcaacacagctagtagagcttgaactcaagcctaggctgtgtgtctccaatgcccatgactttcccactaggctgggaaatttattttg

SEQ ID NO: 756049 - DNA, 609 bp, Homo sapiens
tttcaataaaagatacatatatcttttattgttatatatcttacatattatatgtcatgtatacttataacatttttgttatttatattatcaaaaatatgtatttcatatatacatatgtaatatatatgtaatatatatgtcctgataaaagaaaaaatattataaattactgtgacttcatttcatagttgttaaggccctggtatacaataacagtaagtgatgttacactgttgattaagaaaactgagctactccagaatatttttcgtctttagaatcttggctctaaatttttcagccaaataatcttttatttcttaggagatctgataacatgaataacaataatattaccaatgataaccataaaggctattatttattaagtttctctaatgcatcaaccatttttatctcattgtttacccctcaacaaccccataargtaaatgttgttatcctcacttaacaaataggaagcactgagtttcgggaagactgagcagctcttgagtcaacacagctagtagagcttgaactcaagcctaggctgtgtgtctccaatgcccatgactttcccactaggctgggaaatttattttg

SEQ ID NO: 756050 - DNA, 551 bp, Homo sapiens
tgggagggggttacatatgtggtatagggaaagggcggaaataatcctatggtgttggtttggaaatagaaatatatcagtatgagtgtgaactcatgattttttagaaagaattatatttcctctctctgtcctctgaagtgtctacagtgacacccccgtagcaaaaaacactcctggtgcccagggcttgatttctaaataccattctgcctaagaggaaggagggctccttgaagaaatggcagaattcagaaacagggtgaaaacagtactgaaagtaaggaagtactcaaaaaataataatgacatatcaaaagtacataggagccagcttgaaggcacttccgttggccaatatgggacaatttgagcttcaaaataaaraatatagggagtgtatgtccatttttaaaaggccataagctcatcctgatactaaagagagtgaggttcaggatggggatggaaagctcttctttataaaagaataccaattaataagtatagaagaaatggcagaattagaaaatcatttcacagtctctgtg

SEQ ID NO: 756051 - DNA, 568 bp, Homo sapiens
gcccctgtgggcagggtttttgggatccagtggtccttggcatgttgcaatatttctgccaaaagtaaaagataagttgctacatcttgaacctgctaccacttaaaaggaggtgcagcacttggtgatgtctgcattttgaaggcatccacgcacatttgatcatgctccwctcacttatttgctgagtgaattacggctgccaattttggtgaagcccataacgagagctgacgggcagctggtctagactgcagtaccaaagagaagatcccatggtgcccaaacagacagaaaggaagtttcaaaggagcaattgacaaaccttgaccagaaaaacagcacaaaccctgggaattctttcaaagcttcttctgcaaataactattctcggttagagaaatagttgctggcttgccactgatgtccctgaaggcccaaatacctcaggcttccatggagccagttcatgctgtggaattcctgtttctccctcagcccatccccgcagtctcatggggcattctatgagatcagccagatcaggaagggaaagtccaggtggttc

SEQ ID NO: 756052 - DNA, 568 bp, Homo sapiens
gcccctgtgggcagggtttttgggatccagtggtccttggcatgttgcaatatttctgccaaaagtaaaagataagttgctacatcttgaacctgctaccacttaaaaggaggtgcagcacttggtgatgtctgcattttgaaggcatccacgcacatttgatcatgctcctctcacttatttgctgagtgaattacggctgccaattttggtgaagcccataacgagagctgacgggcagctggtctagactgcagtaccaaagagaagatcccatggtgcccaaacagacagaaaggaagtttcaaaggagcaattgacaaaccttgaccagaaaaacagcacaaaccctgrgaattctttcaaagcttcttctgcaaataactattctcggttagagaaatagttgctggcttgccactgatgtccctgaaggcccaaatacctcaggcttccatggagccagttcatgctgtggaattcctgtttctccctcagcccatccccgcagtctcatggggcattctatgagatcagccagatcaggaagggaaagtccaggtggttc

SEQ ID NO: 756053 - DNA, 639 bp, Homo sapiens
tatctatttattgtaataattaccttggaaaagttttaaaaattcaacttccaagacttaaccctggacctattgaataaatatttcttcataggacccatgaaatctctctaaattatcaaatattattattgataattttacaagtatggattgcagtcattttatkttataacagttcataaaaggttaatattttagattaattacataaagaagtcatattgtaaaagcaggctgtaaaaatttaaaagttaaggcagagttaattaaaattttaagagagaacgtgtttttttttggttagtttctacatgagtgtatgtatactagccattaaaaagtaggtctgaatctgcaaacgcatgcagacaagcattgcaatgctatctcacagttgtaccaaatagcagggaagcaattctctggttaccataaccatgaaggaataccagtatggcttcttcaaaatgtattgctaagattaaatattacagcccaatttttgcacatgttgcattaatatctccatttaaaataatattaatgtttaaaaatcatacagtaacaccacttcatttataaaaattaagtaactaaaatctctgtagtaggaatattttattgaagaaattgaaa

SEQ ID NO: 756054 - DNA, 631 bp, Homo sapiens
attgttaggtaagtttctccagttttggtggaaaaattgatgtgactgggtggcttgaccaagcactgatgtcataacttgtaggtttgcttgatcatcgacataaaccaatgggccaggcagtgagatgtgggcccaaatgtgtgtartaaaaataggatgtgtacgttgatctagcaattgctgaaatcaaagaaaaagtacacgcagggtgggctccagagtggagttaatgagggctgtctctgggttctgcaataaataaacagagtaagcagagtcactaacaatattgatgagctgagtggaaatagttttccaaggccaatattaaggctcccacctcagctctctgagttctaataaatccagaacgagtgagggaattatgcaatctccaccaaacagctgcttttccatttttaccagagtcatcagtaaacagtgttaaaacattaggtatgggggattggactatttttgtaggcaaaaccacagaggtacgaggtaaaaactgaagaagttttttagcaggaatggcatgctctatatggcctgtataatcagagagtgctatttgcaggtccatagataagggcaacactgtttcgaattgctttttagataaagg

SEQ ID NO: 756055 - DNA, 538 bp, Homo sapiens
acataaaatacttcagagcttttaattctgaatatggtagataaatgtatgtaaattaataaatacccatgtaaccaccctctagcttactaactaaaacatacatgaaataattcaatttaaatttgtgaatttttcttgaagaattgctaggtaagaaaacatatcctaacaatatatttaaccttataaataaatatttttaaattaagatagctaaaacaaagatgtaaggaagtcctgattcaagctcaaatatgcatattagaaaaattgatatatggcaaaagtggcattacaacttagttgggaatttgtggataaattatatgaraaatagtgctgatggaattaattatcaaaatgaggaaagaggattttgaatcctttacatctagccattcacagaaatcaatgtcagtcatatggaatgtttaaattgaaagaaaatagattaaaatctttaaaaaatatttttggccccaggaaaaatgaagaagcttatattaggctgacataaccacagaagaatgttagt

SEQ ID NO: 756056 - DNA, 576 bp, Homo sapiens
tggaaatcagtcattatttggtgaggtgtggagtccatggcccatgccttctactcctctggactagattactttattcttagattcatagtttgaaaatatattctcccattctgtaagttgtctgtttactctgttgatagtttatttcactttgcagatgctctttaatcagaagtccyatttgtccattttgtattttgttgcatttgcttttgaggtcttcatcataaattatctgcctaggccaatgtctagaagagtatttcctaggttttctactaggatttttacagtttttggtcttacagttaaggttttaatccatcttaatttttgtgtatggtgagaattaggtgtccagtttctttctactgcatattgctaaccagtttccacagaatgatttattgaatagggtgtcctttccccgttgtttatttttgtctgctttgttgaagatcagttagttttaagtgtgtggcttttatttcaggagtctctcctgtttattggtgttcgtgtcaatttttataccagtgccatgctgttttggttactatagctttgtactat

SEQ ID NO: 756057 - DNA, 576 bp, Homo sapiens
tggaaatcagtcattatttggtgaggtgtggagtccatggcccatgccttctactcctctggactagattactttattcttagattcatagtttgaaaatatattctcccattctgtaagttgtctgtttactctgttgatagtttatttcactttgcagatgctctttaatcagaagtcctatttgtccattttgtattttgttgcatttgcttttgaggtcttcatcataaattatctgcctaggccaatgtctagaagagtatttcctaggttttctactaggatttttacagtttttggtcttacagttaaggttttaatccatcttaatttttgtgtatggtgagaattaggtgtccagtttctttctactgcatattgctaaccagtttccrcagaatgatttattgaatagggtgtcctttccccgttgtttatttttgtctgctttgttgaagatcagttagttttaagtgtgtggcttttatttcaggagtctctcctgtttattggtgttcgtgtcaatttttataccagtgccatgctgttttggttactatagctttgtactat

SEQ ID NO: 756058 - DNA, 585 bp, Homo sapiens
tatttcaaatatgagataattataacttgtacactgcctacatgaaatttattataatgttatattgcattatatagtgtgttacaattgaataacaattgcattgccttgtacttctaacatgattcagaaaatgagcatgtcttcttagctcacatattctagcttaaatattgtatcaagtcaaatagcaatataagattgactttattcacttaccctccattcaaagtagacacacatttgttgctgttatttgggggaaaatccatgtttagtaagtgtttatttaacgcttacatagtgtttaacatattccaggctttgttgtaatcatttcaccaatattaactyatttaatccttgtaacaatcctgtgagatactgttattttccacatttcatatagggagaaaagaggcataaatgggtcaagtaatttgctcaagttccaatgacaagagagtggcagagccaggattcagatccagaaagtcttactccagactaaaagagttgtcactgtgacaactctgctagcaaagctctgagataatgcttttccagtggaaataatgacatttt

SEQ ID NO: 756059 - DNA, 595 bp, Homo sapiens
gcttaaacaattgaaatttatttattcacagttctggaggctggaagaccaagttcaaggttttacaagacaaggaaggagagaggcctcagaagagatccattctccttccttgtcttgcaaaagtttgatttcycactatgtcctcacatagttgcctcttagtctctatgttcacatgcctaatgtatctctctgtgtgtcctaatctcttcttcatagaaggatacacatgatgttaggttaaggctcaacctaacaacccatagtaactgaattacctctttaaagtcgctatgtccaaatatggtcaccttgggggatctgggggctttggcttcaacatgtgaatttttctttctctgggggaagaaggatagaattcaggtcctgaaaccagaggacaaacaggagtcaggaacacatatcatgagaatatgtaatacgaatgaaagttggagtggggccaaatctaaaatttctgactaaacagataaaatacacacacacacgcacacacacacacacacacacacacacaaactaaaactcacaattatacaaacgcacacacacaaaaataccttcaaacttc

SEQ ID NO: 756060 - DNA, 614 bp, Homo sapiens
gcatattgccatagacaaaaaagagacaagacccaaactgttaaaatcagaaaaaaaaatggagacattagtaccattttataaaactaagaaggatcatgagagtgtactatgaacagttgtatgccaacagattggatagttttcttagtttctttgtgcttctataacaaaatactaaatattgggttatttataaatcatggaaatttatttctcatagttgtggaggctgggaagtccaagatcaaagtactggcaggttcagtgtctggtgagggccgagtctgtttcaaagattgcaccttgaaccctgtatcctcacatggcaaaacaaaggggaaaaaaggaagctgctatttctctacagcccttttttcaagggactaatcctatccatgagagcacagccctcctggcctaatcactcyttaaaggcctcacttcttaatacggttgtagtggagattaagattcaacattaattttggaggggcaatattcaaatgatagcagtaacctagatgaaatagacatattcctaaaagcacgaaacctattaaaactgagtcatgagtaaataaaaacaacttgaatatacctacaactaataa

SEQ ID NO: 756061 - DNA, 624 bp, Homo sapiens
ccctcctggcctaatcactccttaaaggcctcacttcttaatacggttgtagtggagattaagattcaacattaattttggaggggcaatattcaaatgatagcagtaacctagatgaaatagacatattcctaaaagcacgaaacctattaaaactsagtcatgagtaaataaaaacaacttgaatatacctacaactaataaagagattgaatcagtaatttaaaatatcccaaccaagaaaaggactacatggcttcactagtaaattttagaaagcatttaaagaactaacaccactgcttctcaaactcttcgaaaaatttaaagtggaggaatatttcccaactcatcttaagaggtgagaattaccctcttaccaaagcccaacaaagatgctacgagaaaactagagaccaatgctcctgattaatattgatgcaaaaatcctcaacaaaatagtagtaaaatcctgcagcatcttaaaataattatacctactcacctattgggatttattcctgggacacaagaatgcttcaacatatgaaattaaatcaatttagtacattatgcgaacagaatgaagggggaaataaatgatatgatcatctcaattgatgc

SEQ ID NO: 756062 - DNA, 624 bp, Homo sapiens
ccctcctggcctaatcactccttaaaggcctcacttcttaatacggttgtagtggagattaagattcaacattaattttggaggggcaatattcaaatgatagcagtaacctagatgaaatagacatattcctaaaagcacgaaacctattaaaactgagtcatgagtaaataaaaacaacttgaatatacctacaactaataaagagattgaatcagtaatttaaaatatcccaaccaagaaaaggactacatggcttcactagtaaattttagaaagcatttaaagaactaacaccactgcttctcaaactcttcgaaaaatttaaagtggaggaatatttcccaactcatcttaagaggtgagaattaccctcttaccaaagcccaacaaagatgctacgagaaaactagagaccaatgctcctgattaatattgatgcaaaaatcctcaacaaaatagtagyaaaatcctgcagcatcttaaaataattatacctactcacctattgggatttattcctgggacacaagaatgcttcaacatatgaaattaaatcaatttagtacattatgcgaacagaatgaagggggaaataaatgatatgatcatctcaattgatgc

SEQ ID NO: 756063 - DNA, 633 bp, Homo sapiens
atcttgctggtaggaaagcaaaataatggtgcagccactttaaaaacagtttggtggttttttttcttttccctgcttttttttagaaagagtctcactcctgtcatccaggctggagtggaatggcaaaaaaaagctcactgcagctttgacttcctaggctcaggtcatcctcctacctcagcctctggagtagctggaactacaggcacatgccgccacgcgtggtcaatttttatattatattgttagtagagaggatgtttcattatgttgcccaggctggtcttgaacccctgggctcatgcaatttgccttcttcggtatcccaaaatgctgggattacaggtgtgagccacccggcctgaacctggtggtttcttaataagttaaacatagaattaacacgtaagttcaaaatttctcttctagaaatatgtccaakagaactgaaagcaggcattaaaacaaacgttagtacatggagatttataagaccactattaacaatagtgaaaaagtagaaacaactcaaatgtccatgaacagatgaataaacatatttaatatgtctataaaatggaatttttctttttttcaactttattttagattcagaatgaatgtgtcagg

SEQ ID NO: 756064 - DNA, 602 bp, Homo sapiens
aatgtatcatttagaaatttagaaaataaaatccatagattgggagaaaagatttgttatttatatttttttgttttttgttttttgttttttgttttgagatggagtctcactatgtcacccaggctggagtgcagtagcatgatctcagctcactgcaaccactgcctcctgggttcaagcaatacccctgcctcagcctcccaagtagttaagattacaggcatgagcgactgcacccggctaattttttgtatttttagtagagacggggtttcaccatgttggtcaggctgatctcgaactcctgacctcaaatgatcctcctgtcttggcctcccaaagttctaggattacaggcrtaagccaccacacctggccatttgtgatatatgtttctaactcaggattttatttagaatataagaacaactcttccacacaaattattaaaggaaagaatccatatgaattatcaaatcactttaatagacatgtcactaaaaaagatgcactatgcttaattagttattagatttgctctttatcattagtcattttggaaattcaaattaaaactactacaatgagctgctgctata

SEQ ID NO: 756065 - DNA, 633 bp, Homo sapiens
gaaatattgtgataatacataagaaaaaaaagaaaaatttaaatcacaggaacaaactcaataaacatataaattatgcagaaaattaaaatacattgtaggaatataagatattattggaataagtatacaaagcaaatgcactgggcagactccgagagcaaactgaatgaagaccaaggaaaacttgacaatgactctaaatttcatctgatgaaatatgcaaataaaactgttaagaaaatacttataaaaatagtgagcagttacttcgatcgtatgtaatttgtttgcaaaggtggttgcaatarttctctccatgcttatcagaacaacattctgccttatgacttggccactcttctaatcctcacaaaaattatatgagaaaaatattataactatctgcattttaccaatgagaagtataagcattgaggaagatactttttcttagattataaatttagtaaacagttgaagcagattttgagccccatttaattcagactctctctctctctgtgtgtgtgtgtgtgtgtgtgtgtgtgtttgtgtgtgagtgtgtgtagaatgtttgctaagatttgtgaatattattaaaattaagctgaaaaatattatttaaaataa

SEQ ID NO: 756066 - DNA, 633 bp, Homo sapiens
gaaatattgtgataatacataagaaaaaaaagaaaaatttaaatcacaggaacaaactcaataaacatataaattatgcagaaaattaaaatacattgtaggaatataagatattattggaataagtatacaaagcaaatgcactgggcagactccgagagcaaactgaatgaagaccaaggaaaacttgacaatgactctaaatttcatctgatgaaatatgcaaataaaactgttaagaaaatacttataaaaatagtgagcagttacttcgatcgtatgtaatttgtttgcaaaggtggttgcaataattctctccatgcttatcagaacaacattctgccttatgacttggccactcttctaatcctcacaaaaattatatgagaaaaatattatractatctgcattttaccaatgagaagtataagcattgaggaagatactttttcttagattataaatttagtaaacagttgaagcagattttgagccccatttaattcagactctctctctctctgtgtgtgtgtgtgtgtgtgtgtgtgtgtttgtgtgtgagtgtgtgtagaatgtttgctaagatttgtgaatattattaaaattaagctgaaaaatattatttaaaataa

SEQ ID NO: 756067 - DNA, 539 bp, Homo sapiens
taggttggaatcagatgatgaatggacttgaatgacatgttaatggttcagatttttttttcataaaatgttgggaagtatcagtgtttcaaaagaagggaactgattaattagaatagtatttatgttagaaatacggtcttttgacagctcacagaataaattgaagagagaagttcaggtatccctcactgtatgaatgctcactctccaaatatttgctgtaaatatttgtaaaatttatatgtaaaactcactactttagttgaaayacaagccaatatatcatcatacatgtgctagcaaaaatagtttaggttggaatctggacaagaggattcagagagcactgctttcatatcttctctgttctgataggaagacttttcatacttctgtttttaaaacattttgtgcattcttttacttatttgcttgacattatgaagtgaaaatatttttaatatattttttgaaacactctgcagaaacaaattttctagaaaagctcatatgcttaaaaagatgttggaggtggt

SEQ ID NO: 756068 - DNA, 575 bp, Homo sapiens
tgttttcatattttaattctcatactagagtataagcatcttaaaaaagaaactttgttgtatacttctttttgaaactccatacaatctaacagtgcattttacatagtagatcctcggaaattccttatcttagcatctaaattgggtgaaacttaaagaaactccttcctcaaaagacatctctactcatgccaggcattctggcctttatttgargcagttaaacattatgctgttggcagatttacttttcaagaaattctttcttatttgtactaagacaaaatctgctttgcagcaccttccaaccaagtcttagttatgttctctgaagtgacacaaaccaactccaacttattttaactgatagtactgcatttacttgaaggcagataccatgtctttctcttcacatgtttttgttcctagtcaaacatttctcattctatgtattgttcttcatataacatggtttttagccaacctgatcattcatttgaccttcttctggactctaagaattttatcaaagtttctcttgaatgtgatcatcagatcaaagcacaatactc

SEQ ID NO: 756069 - DNA, 618 bp, Homo sapiens
catactgggtagagagaggcaagcgggcaatagagactggagctcaaactctggctcctgttgactgactggctgggccagtcactcagcctctcattgccttgatttaatcctctgcaaagtgggaaataatactaatcatagtattaccctcacaggattgctgggagggttacctaagttaacctacatagcgcatttggaagagtgcatgggatttgataagttctgaacaaatgttagtcatcagtctgaggtgtctctgctaacccactcatggtaggtcaataagctcctgctctctgccaccactgggctcaatatgtccatttgttatcacatctgtcacactggagagttttttgtcatttgataccctgttttcatccaaaaaggacttgatttgtggttcagtcgctagcttgcttrtatttattgagatggagtctcactgtgtcaccaggctggagtgcagtggtgcagtctcggctcactgcaacctcctccttcccagttcaagcgattctcctgcttcagcctcccgagtagctgggactacaggtgcgcgccaccacgcccagcgaatttttgtatttttagtagagatgggggttttac

SEQ ID NO: 756070 - DNA, 618 bp, Homo sapiens
catactgggtagagagaggcaagcgggcaatagagactggagctcaaactctggctcctgttgactgactggctgggccagtcactcagcctctcattgccttgatttaatcctctgcaaagtgggaaataatactaatcatagtattaccctcacaggattgctgggagggttacctaagttaacctacatagcgcatttggaagagtgcatgggatttgataagttctgaacaaatgttagtcatcagtctgaggtgtctctgctaacccactcatggtaggtcaataagctcctgctctctgccaccactgggctcaatatgtccatttgttatcacatctgtcacactggagagttttttgtcatttgataccctgttttcatccaaaaaggacttgatttgtggttcagtcgctagcttgcttgtatttattgagatggagtctcactgtgtcaccaggctggagtgcagtggtgcagtctcggctcactgcaacctcctccttcccagttcaagcgattctccygcttcagcctcccgagtagctgggactacaggtgcgcgccaccacgcccagcgaatttttgtatttttagtagagatgggggttttac

SEQ ID NO: 756071 - DNA, 623 bp, Homo sapiens
aagcgttccaagagaataaggcaatgccatcactaccatcatttttaaaacttccagctttttgaagggctagaattcaagcccttatgtctcattttgttgtatctttcaggaaaggagcctggtcttgcatagattcttccagaaagatgtagagagaggaactggctaggaagaaccatcagttcaatggcccaggctatttcttataacagcaaaatgaagataacatttggaattgcctaaaacttatcatagagctttctcaaacattgtttyactctgtcttcacagcagtgaagattctgatccactgctagtgataagaaaactgaagcaccaaaaagttaacatattttctttaactcacacaactctttagaatacttgaaatgagcctaaatatcctaacacatggcctgagactggtcctggaaatgacatagcccctgatgtccactcttgactgcctctatgaagccatttcctacttcctagatggcacaatcaacccctcctcaggggtttcataattcttctcacaaatgtttaattaaacatattcacatggctatttatttttgtatctatcttcctctctggactgttagctttctaaagct

SEQ ID NO: 756072 - DNA, 619 bp, Homo sapiens
atgttggttgcttgggcattatcgacactgctatgttggtgttaaatgtgatgcaggcccgctttctcatggattgaggccatgagagaaaatactaaaagtctaaagctcaccacataaatcagaaactacttcatgctgtgactgtgataagtagatctgcaaatatctaccaggacaaatttagaagagtcttggggcactgtgttatacctgaattaaaaggcggctttgctaaaaatgaacttttctccaggmtagtatgtttgttgttttatgtttaaaaatgaagtgtagcaaaacccatgtaaggcattaaagataatttgctattgaaaaccaggatgtattttgctaaggggtggtcatcaaattgatgcaggatttttctcagcgtcttcatcagacttgtgacaggggggctccatttactcagctctccatgctcaaccccttgtgggagggagcacatgagcaagtgaatttggatctgcccagggtctctcttcgcgctggcaggagcaagctccatacagtacccatggccagaccaggcaccagtgagatactgcaggacccagcaagccactctgggtgccagcaagagcaagctccatgg

SEQ ID NO: 756073 - DNA, 579 bp, Homo sapiens
tattgaaaaccaggatgtattttgctaaggggtggtcatcaaattgatgcaggatttttctcagcgtcttcatcagacttgtgacaggggggctccatttactcagctctccatgctcaaccccttgtgggagggagcacatgagcaagtgaatttggatctgcccagggtctctcttcgcgctggcaggagcaagctccatacagtacccatggccagaccaggcaccagtgagatactgcaggacccagcaagccactctgggtgccagcaagagcaagctccatggggcagtgcccaactgtgtgtttaggggggtacctgtgacccccaaggccccacagggggtattacaatgatccttgagttctgccgtccacagacagctacgtgttaacagctcagttggccccttgcctcatcatgtsgggcagctgtccaccagtgagggcaaagggccattgtgacaacctttttatgagtacctgcactcggtgggtcctgagctcttgtctggcatccaagaagaattaggcttctagttaacatcctgagctctccatctctgccagagtcctc

SEQ ID NO: 756074 - DNA, 615 bp, Homo sapiens
atggacaaaaaagatcacagaccactgcgattgacagggactgcagagtgtatttagttcctcccacctcatttcacagggtggaaattgataggggaaagggggaattcaaattacaacagacttgatagaattcttttgctgttttcctctagacagctcaggctcagtttaagrtccttttaaaaagcccccattttctgatctgctccttcagaaacagggcagcaaatataaggataggaacagaagtgagaaaggcactccgaagcaacggacacaaaagaagagcgattgatggacctgcccgagcttgggtagataattccactctgaaccaatcctggcatagaggaaagaccataaaatattgatccatgaacagatatatcgaattacccattccttcttaaaatatactagtggacagacgcagcgatacaggtacatatcttaactgctaatcccataaacgtgattgagcatccactctgtattaaatccacagagattaaagtaaggatatgcatatgtataatgagaagaacaaacatttattgagagctacaatgttccaggggctggaccaagttatatccttaatagtaactacac

SEQ ID NO: 756075 - DNA, 615 bp, Homo sapiens
atggacaaaaaagatcacagaccactgcgattgacagggactgcagagtgtatttagttcctcccacctcatttcacagggtggaaattgataggggaaagggggaattcaaattacaacagacttgatagaattcttttgctgttttcctctagacagctcaggctcagtttaagatccttttaaaaagcccccattttctgatctgctccttcagaaacagggcagcaaatataaggatrggaacagaagtgagaaaggcactccgaagcaacggacacaaaagaagagcgattgatggacctgcccgagcttgggtagataattccactctgaaccaatcctggcatagaggaaagaccataaaatattgatccatgaacagatatatcgaattacccattccttcttaaaatatactagtggacagacgcagcgatacaggtacatatcttaactgctaatcccataaacgtgattgagcatccactctgtattaaatccacagagattaaagtaaggatatgcatatgtataatgagaagaacaaacatttattgagagctacaatgttccaggggctggaccaagttatatccttaatagtaactacac

SEQ ID NO: 756076 - DNA, 591 bp, Homo sapiens
atgatgatcattctttagtagatcttcttttccacccgctcctatcactcctattcttgtctcgtcttttgtctcttgtgtatggccctttcagtgccttgcccattgattggtgactctatctccatctagtctataagaccaattcttctgaacacttgtttttttcaygttttcccccggttcagagtctttcagtggcttccacttacttacaacagcagcctacaattctcaaaggcacctcctattcttaatgtatgtgttttgtttgtttgtttgagacagagtcttgctctgttgctcaggctggagcacagtggaggcgatctcggctcgctgcaacctccgcctcctgggttccggtgattctgctgcctcagcctctcaagtagctgggactacaggtgtacgccaccatgcctggctaatttttgtattttttagtagagacagggtttcaccgtattggccaggctgacctttaactcctgacctcatgatccacccgccttggcctcccaaagtgctgcgatcacaggtgtgagccaccatgcctggccaatgtttgtatttatttataaatcaaat

SEQ ID NO: 756077 - DNA, 591 bp, Homo sapiens
atgatgatcattctttagtagatcttcttttccacccgctcctatcactcctattcttgtctcgtcttttgtctcttgtgtatggccctttcagtgccttgcccattgattggtgactctatctccatctagtctataagaccaattcttctgaacacttgtttttttcatgttttcccccggttcagagtctttcagtggcttccacttacttacaacagcagcctacaattctcaaaggcacctcctattcttaatgtatgtgttttgtttgtttgtttgagacagagtcttgctctgttgctsaggctggagcacagtggaggcgatctcggctcgctgcaacctccgcctcctgggttccggtgattctgctgcctcagcctctcaagtagctgggactacaggtgtacgccaccatgcctggctaatttttgtattttttagtagagacagggtttcaccgtattggccaggctgacctttaactcctgacctcatgatccacccgccttggcctcccaaagtgctgcgatcacaggtgtgagccaccatgcctggccaatgtttgtatttatttataaatcaaat

SEQ ID NO: 756078 - DNA, 591 bp, Homo sapiens
atgatgatcattctttagtagatcttcttttccacccgctcctatcactcctattcttgtctcgtcttttgtctcttgtgtatggccctttcagtgccttgcccattgattggtgactctatctccatctagtctataagaccaattcttctgaacacttgtttttttcatgttttcccccggttcagagtctttcagtggcttccacttacttacaacagcagcctacaattctcaaaggcacctcctattcttaatgtatgtgttttgtttgtttgtttgagacagagtcttgctctgttgctcaggctggagcacagtggaggygatctcggctcgctgcaacctccgcctcctgggttccggtgattctgctgcctcagcctctcaagtagctgggactacaggtgtacgccaccatgcctggctaatttttgtattttttagtagagacagggtttcaccgtattggccaggctgacctttaactcctgacctcatgatccacccgccttggcctcccaaagtgctgcgatcacaggtgtgagccaccatgcctggccaatgtttgtatttatttataaatcaaat

SEQ ID NO: 756079 - DNA, 525 bp, Homo sapiens
gaagatggactggacagccaggcacggtggctcattcctgtagtcccagcactttgggaggctgaagcgggcggatcaggaggtcaggagttccagaccatccagaccaacacgacgaaactccgtctctactaaaaatacaaaaactagccgggcatggtggtgmgcacctgtaatcccagctactcaggaggctgaggcaggagaatcgctggaacccaggaggcagaggttgcagtgagatgagatcatgccactgcactccagcctgggtaacagagcaagactccgtttcaaaaaatataaatacataagatggactggactcaaagtcagagacaggagcaccagcctcagctcggaacaccagccatctccttgaaacgctcataccctttctgtctctccatacacccttctgtcaagggaggatactaggtgttgctagctaagaccttgattctaaagtgttgcatttatttcatatttccacacttgtcaacaaaagtaagatggattaggtcg

SEQ ID NO: 756080 - DNA, 627 bp, Homo sapiens
ttatggcctgaagtcctaatggatcccaggttcctcctctatcccagaggcaagctgcctggaagagggactttttcctaaggaaaatgagtctgtaccccaagctataacagacactcacagcaaagcagcagtattattcatcctagcactacttaaccttacatgtgattatatgcaaagcatttcattgcttttcactttatgcctacatatacataagataaaagggagaagaaaggatagatgaggtgagagggggcctaacattacgtacctaccacaaatcaggtgtatgcaaggacttttatatacaagctctcatttaatcctcccaataaatccatgtgggagattatgttgtcctcacgttacagataaggaaaagaagctcagaggctttcaatattctggccaagatgacacaattagcagcagatctaggatctgascaatttggcttgaccgcaaagcccatggtgtatccactatacactgtgtgattcttcgttcctgggcagtcttccttgccagtgggttttcttgggttgcccatctcccaggctgtccacgctaaacaagaatgctttattctcttatgccccttgggtccagaagccctggctc

SEQ ID NO: 756081 - DNA, 705 bp, Homo sapiens
ccgggtcttatttcttctaagtgtgtatttatagccattaatcaacctctttctccctttctccctgccacccttctcagctcctggtaaccaccaatttactctccatcttcatgagatccaccttttcagctctcagatataattgagaacatgggttatttgtctttctgtgcctggcttatttcacttaacayaatgacctccagttccattcatgttgctgtgaatgataggctttcgttcttttctttccgcccacctccttcttacaacctcgttcgttgtaatactgggcccacctgggtaatctggattcaccatctcatttcaagatccttaatttaatcacctttgccaagtcccttttgccatttgaggtagcatattcacaggtacaatggattaagctgtgggcatctttggtggggctggggttgggggtgttattctgtctaccccaagtgttatccattcaaggaagatttgttaacagaagacctagtcaggattcacatacgcatctgtccatgctaaaccagtatctaaaaccaacgtactagagtttcctgtaagtgatcaaagtgacaaacacagtgtttagtactctgggacccacccattaccagtctacattccagaccataggtcctggtttgagtttggaaacgttagtctttggatccaagttgtattttcatgtca

SEQ ID NO: 756082 - DNA, 558 bp, Homo sapiens
acccacggcgtgcctctaccagcactttggttcttgtttttgacttgacttgaattgcttgatactttggttttggttttgacctggcttggatttctggatactccgattttagttttgattctggtctggtgtaaaatgaaaaagagtgtgtgtgccctttttacccgttctttgttctgtggtgtgcgtgtggtgtgagcgtggtgttttgtctccaggaaacatgggtcagatayaaagtaagcctactccgctaggagctatgttgaaaaatttcaaggaaggatttagtggagactatggggttactatgacagcagggaaacttagagctttgtgtgaaatcgattggccaacattagaagtgggttggccatcagaaggaagcctggacaggccccttacttctaaggagtggcacaaggtaactggtaaaggatacttagactagttcccatacatagactcttcgttacagctggtgctagaccccccacagtggctaagagggcagggagcagcaatgctagtagcaaagggacagatagctaagga

SEQ ID NO: 756083 - DNA, 658 bp, Homo sapiens
ggacgtctgaaacttggtaagactggtgtttggaacttgcccactccatctgagtggaagcgtggcctgatcacccacggcgtgcctctaccagcactttggttcttgtttttgacttgacttgaattgcttgatactttggttttggttttgacctggcttggatttctggatactccgattttagttttgattctggtctggtgtaaaatgaaaaagagtgtgtgtgccctttttacccgttctttgttctgtggtgtgcgtgtggtgtgagcgtggtgttttgtctccaggaaacatgggtcagatacaaagtaagcctactccgctaggagctatgttgaaaaatttcaaggaaggatttagtggagactatggggttactatgacagcagggaaacttagagctttgtgtgaaatcgattggccaacattagaagtgggttggccatcagaaggaagcctggacaggccccttacttctaaggagtggcacaaggtaactggtaaaggatasttagactagttcccatacatagactcttcgttacagctggtgctagaccccccacagtggctaagagggcagggagcagcaatgctagtagcaaagggacagatagctaaggaaggatcctgctccactcgcccagggaaa

SEQ ID NO: 756084 - DNA, 553 bp, Homo sapiens
atcatttaaaatgattatgaattttataaatacagaaaatgccctttaaggaatctccagtttcctatagtggttgtactagtttacattcccaccagcagtgtaaaagtgttccctgttcaccacatccctgccaacatctattattttttgattttttgattatgaccattcttgcaagagtaaggtggtatcacactgtggttttgatttgcatttccatgatcattagtgatgttgagcatttcttcatatgtttgttggccatttgtatatcttcttttgagaactgtctattaatgtcctkagcccactttttgatgggattattattactaatttgttggagttccttgtagattctggatattagtcctttgtcagatgtatagatagcgaagattttctcccactctctgggttgtctatcaactctgctgattacttcttttgctgtgcagaagctttttagtttaattaagtctcatctatttataaaataaataaatataaaaaataaatttatttatttatctttgcttttgttgcattt

SEQ ID NO: 756085 - DNA, 464 bp, Homo sapiens
aggaagagggggctccaaggtggaggagaacaattgttctgagagatggctaaccacaatcaactcactggcacaacattttgttcccaaataccttgctcctccacgtcgccccagcaacacaaccctatctgcatacagcctctctagcatgacctataaaacttccctcctgaccctgcctcytggcagatagcaccctctctgctgtactgcctgttgtactttttcaatgtattttcctaatttctctctaatatacttactttctttaactcactactgttttggtacattcttttactgcccatggcactgacaccagtcccagccagtcataacccatgacatcttggtggcccatacagggacctctcccctactctccccttttctcctctttccggggcacaggatccaaacccagaaacaactgattgtccctgcctgagcctccaagccca

SEQ ID NO: 756086 - DNA, 599 bp, Homo sapiens
cttcttagggtatgagtcagggtggggactgggttctccaggcccatagctacttcttctctcactaaatgctctcctgtaacctctatacatcttgaaccaggtacacgtattgccctatggtgaaatggtcaagcaggtgactgtagattcgagttggatgagatgatatcactgccaaggttatcctcaagggttccactgtatactgagctacccatcatttcatgtccagtttttcttcttaagtgcagatactgatgacacataatgattctagatacaccatcggatgcagagacaacagcgtgcatggtgtggtcgccagctcctgcatggtgcaaggtcaaattcccagaataaatctctgatgccattggcttgggtcttgtgccctgataaaactgrtatactttttgtctccagaaaaagaaatctttgtttttatcaacaatgatgtcacaacaatgatgatgtctgtaggattcattccttataataaaataagagtgtcgaagttaggaaatcttaataattttgaaaagatcataatgtgtcaaacaatataaaatatgactatcagtgtttgaaatattaaa

SEQ ID NO: 756087 - DNA, 654 bp, Homo sapiens
ttattttcagattaatctaggtttttggtatattaatagcttattttttattgctaactagcattacattgtatgcaatatccatttacctgatggattccagtttttcttccagtatttggcttttacaataaagctgctattaacattcatacacaagtctttcgtgtgaacatgttttcatttcttttgtttctttcctgtctttcaagggtcattctcatgccctgtcccatgtctgaaaataacagtttcatayagtttgttcagcttttaattggttgaggtggaagggcaaattcaatttcagttattttaccttggctcaaagtgggtccttatcccatattattttcgtgagagacccttcattgatttttagttatagtttttcttccaataacaggttaaattccatgaaggcagcaatatttttctctgctttttaaactattatttcagttccatatgaaaagtttctaccactagttgaaactccatcaatattggttgaattaagcaaaattaaatgaactcaactaataggggctaaaaacacagggaaacatattctttctgcacacttcatgaggtaaaaatgtgatttgtacactcagcaatgctattcaagaccctgacattacatctatttca

SEQ ID NO: 756088 - DNA, 628 bp, Homo sapiens
tctagaatgcttggaatattgtaatcattacactaagaaaaatatcccagttttagcttcagtcatagttttttattttttgtttggtaagtaaaatattagcatcatttaaaaaacagaaattaagtacagccagatcacaytgagatttaatctgaaagacaaggaccaagtttatgttatctccatcagagctatagtttttcaccagagacttttgttaagtttttgatttattttcctgtctcaataacaaaaaggcattctatctggcttctgttggataattgactaaatcttcagtgtgctcatccaaatattttgccccaacttgggtcagttgtctaccatgttcttaacagttgtgattatgtaaataaaaccattaggcacaaatatgacccccagtcccatatcttctgacgggctgtgggtcccatatcttctgaggggctgtggatgaaggcaaattatcttggaaagtgtcagaaagtagtcaataagtattatctcagaacaaaatgcttaaaaatactcattttacttttctaaaaaccatacaaacaattttcaatagttttaaaatttcattcaaaacatatattcacgagaaattaatatgtttttt

SEQ ID NO: 756089 - DNA, 628 bp, Homo sapiens
tctagaatgcttggaatattgtaatcattacactaagaaaaatatcccagttttagcttcagtcatagttttttattttttgtttggtaagtaaaatattagcatcatttaaaaaacagaaattaagtacagccagatcacactgagatttaatctgaaagacaaggaccaagtttatgttatctccatcagagctatagtttttcaccagagacttttgttaagtttttgatttattttcctgtctcaataacaaaaaggcattctatytggcttctgttggataattgactaaatcttcagtgtgctcatccaaatattttgccccaacttgggtcagttgtctaccatgttcttaacagttgtgattatgtaaataaaaccattaggcacaaatatgacccccagtcccatatcttctgacgggctgtgggtcccatatcttctgaggggctgtggatgaaggcaaattatcttggaaagtgtcagaaagtagtcaataagtattatctcagaacaaaatgcttaaaaatactcattttacttttctaaaaaccatacaaacaattttcaatagttttaaaatttcattcaaaacatatattcacgagaaattaatatgtttttt

SEQ ID NO: 756090 - DNA, 646 bp, Homo sapiens
gatatatgaatcatcttagaagatagaacccttctctatgctctcctcacttctttctgagcccacaagagaatcgcctttaacatgtatgtttctaccaacaatctcttcaagaaaatcttgattttttttctcttgtgcatctcggaataatactagcctctatttatcatccaattccaaagcctattttaatgtgtagttatttgttaaaagagcaccccatttcccagcaccaaaatctatctcagttttctagcagtactgtaacaaattaccccaaagttggatgacttaaaaaacagacaattattttctcacatttctggaagatagaggtctgaagtcaaggkgttggcagagccctgcctcctttaaaggcatgagggaaggacccttctttgcttctcttatcttctggtggtagttagctatcattggccttatttggcccatggcagcatgactccagtctctgccactgtcttcaaataggccttttccttgtgtgtctatgtgtcttcacacaatcttcttataaaagtggacatggagagtgaccctacataaataaagctttatataagcatattacgaatagttgtacaccataaagttagataacttaaagtgaaaaaattcctat

SEQ ID NO: 756091 - DNA, 592 bp, Homo sapiens
ataaaactatcagatctcctgagactcattcaccttcatgagaatagcacaggaatgactctccccattatttaattacctctcacagtgtccctcccacaacatgtgggaattatgggagctacaattcaaggtgaaatttgggtggggacacagccaaaccaaatcaatataaatagcacttcaaacacaataataatgagacagacaacctactttgaaaaatagaaaaattccttaaaagatgcattaccagagaatatatatgaatgccaaacaagcatatgaaaagatgtttaacatcattacwttttagtgaaatgcaaataaaaaccataatgagatcctgctatgcacttactggaatggcaataaaagaaaaagaggaggatgaggcggagatatcacaaaattgtgatgataccgtccagccatagaactctcatgaattgctggtgagaatacgaaattgtccagtgactgtgtaaaacattatgacagttcgtcacaatgctaactacttactaatcacattactcagcctgatgggcttttaggtaattatcttataggaatgaaatatatgtccttg

SEQ ID NO: 756092 - DNA, 592 bp, Homo sapiens
ataaaactatcagatctcctgagactcattcaccttcatgagaatagcacaggaatgactctccccattatttaattacctctcacagtgtccctcccacaacatgtgggaattatgggagctacaattcaaggtgaaatttgggtggggacacagccaaaccaaatcaatataaatagcacttcaaacacaataataatgagacagacaacctactttgaaaaatagaaaaattccttaaaagatgcattaccagagaatatatatgaatgccaaacaagcatatgaaaagatgtttaacatcattactttttagtgaaatgcaaataaaaaccataatgagatcctgctatgcacttactggaatggcaataaaagaaaaagaggaggatgaggmggagatatcacaaaattgtgatgataccgtccagccatagaactctcatgaattgctggtgagaatacgaaattgtccagtgactgtgtaaaacattatgacagttcgtcacaatgctaactacttactaatcacattactcagcctgatgggcttttaggtaattatcttataggaatgaaatatatgtccttg

SEQ ID NO: 756093 - DNA, 553 bp, Homo sapiens
aacagaaacctgatgaatattgaaaaagtattttctcattgaaattaaaatttaaagtatttgaaattatagaaacaaagtgactctattaggatgcgtgatatcaaaaagttacatttagattaaaatatacaaactacgagcatatacactgaccaaaagaagcttataaaagagtcttgcttgagtagrttatttgcagtctgtttgattgtggacttctctctaaatgtggtcttagttgctttcatcaatggtggctgaaacaaatctcaggtttggtattttagtgtatcaacagaagtgaaattcaatttatgtggaataaattgcttttttattagcttcctatcgtaaacttctaattgcaaagacttccttgcaaggtggcccaagggtgtatctgtgcatctcttatttgttagacaatgggaactgctacatagacatttccaataaacctcttctgccccaatatttgtctcacccaactatcttaacaaccatctctttcctttcctagaatttcactcttcaaatatgtccttagagt

SEQ ID NO: 756094 - DNA, 553 bp, Homo sapiens
aacagaaacctgatgaatattgaaaaagtattttctcattgaaattaaaatttaaagtatttgaaattatagaaacaaagtgactctattaggatgcgtgatatcaaaaagttacatttagattaaaatatacaaactacgagcatatacactgaccaaaagaagcttataaaagagtcttgcttgagtagattatttgcagtctgtttgattgtggacktctctctaaatgtggtcttagttgctttcatcaatggtggctgaaacaaatctcaggtttggtattttagtgtatcaacagaagtgaaattcaatttatgtggaataaattgcttttttattagcttcctatcgtaaacttctaattgcaaagacttccttgcaaggtggcccaagggtgtatctgtgcatctcttatttgttagacaatgggaactgctacatagacatttccaataaacctcttctgccccaatatttgtctcacccaactatcttaacaaccatctctttcctttcctagaatttcactcttcaaatatgtccttagagt

SEQ ID NO: 756095 - DNA, 553 bp, Homo sapiens
aacagaaacctgatgaatattgaaaaagtattttctcattgaaattaaaatttaaagtatttgaaattatagaaacaaagtgactctattaggatgcgtgatatcaaaaagttacatttagattaaaatatacaaactacgagcatatacactgaccaaaagaagcttataaaagagtcttgcttgagtagattatttgcagtctgtttgattgtggacttctctctaaatgtggtcttagttgctttcatcaatggtggctgaaacaaatctcaggtttggtattttagtgtatcaacagaagtgaaattcaatttatgtggaataaattgcttttttattrgcttcctatcgtaaacttctaattgcaaagacttccttgcaaggtggcccaagggtgtatctgtgcatctcttatttgttagacaatgggaactgctacatagacatttccaataaacctcttctgccccaatatttgtctcacccaactatcttaacaaccatctctttcctttcctagaatttcactcttcaaatatgtccttagagt

SEQ ID NO: 756096 - DNA, 659 bp, Homo sapiens
aagagggatccagcaaggcttctggctatgtgacacattgtgctattgtcctgcaacaataaaccattttgtattgctagatcataaaacactaagggttgagaagctgagtagaagcttaccagtcagaccaattacattgtgaatgactttgtgtgctttgataggcatcttggacacagctaatagaaaagtagtaaacattggcatgatttaaaccagaagacaacatgaccatatgttaactcaaataatgatgttttttcaacatttttagggaagataggtcaaggatatgagatctcaactaaataattatagaaatagtgtaggcaagaaaaagtcagagatgttktgaaggtaatttcaaaatatatgttggcttttacaggtgtttaaaaattaatattgtggctaaaatgattataaagctctggcctgaacaaatagaaacatgttgacagcatagattaggattaaaatcaaaggacagaaaatataggtgtgcagcagattgggattaaaacatggaaattatagtaaattttgtgttggtccaaattcaagttccaatgggtattcatgttatgtcagtagatacactatgaattcaacagagctggaagctagagacattgttatgtgttaggacacattca

SEQ ID NO: 756097 - DNA, 579 bp, Homo sapiens
gaaaatttgataatatttgatcctatgtatcttgaaatagggggtactcttctcagtagcagcaaaagagaaaaaaatcttatcaaatttgtactgtcagttgaaaaggctaaacatgttttctaagtagttttctcatcaaatttgaaaataaagaataagtaatttttgagataataaagtatatctgtatttacataatagttattttatcctctagtgtatttatatatatctagaaatacagayataagataaaattatagttacattcaattgctaattaattataggaaaattctcagtttgaaatggcaaccagagtgccatgcattgtgttacatgttggacagtgtacaaccagaactgccatatggatgatatatagagaatgatcgatacataggataagacggtcacttatttatttacttatttatttattcatttatttattgagacagaatttcactcttgttgcccaggctggaatgcagtggtgccatcttggctcactgcaacctccgcctcccgggttgaagtgattctcctgtctcagtctcctgagtagctgggatt

SEQ ID NO: 756098 - DNA, 649 bp, Homo sapiens
cctttattttcttattaagcaatgaacaaagaacgtcacctgggcctggacaggctgggaaactatataactcaaatccacactctttacagaatatataaaatatggaaaaaattatttttttaacttttattttagcttcaggggtacatgtgcaccttgactttatagataaactgcatgtcatgggggtttgctgtacatattatttcatcacccaggtaataagcatagttcccaataggtagtttttcaatccttgcctttcctggcaacatggaaaaaccctgtccctacgaaaaaccctgtcctaccctccatctttaaataggccccaatgtctgttgtttctttctttgtgtgcatgtgtactcagtgtttagctcccacatataagtgagatcacgtggcrtttagttttctattcttgcattagttctcttaggataatggcctccagctccatccctattgctgcaaaggacattatctcattcttttttatggctaagaaattcttaacatccacactacaacaaggctagatttgtctagtaaccaaaatgagaccattgtgtttaaaatacttttgaagttggaaaatagtatggatgtatgaaaatgtcagtatgatttcaaatgtttttgg

SEQ ID NO: 756099 - DNA, 657 bp, Homo sapiens
agacactgttgcattgcccaaaccaccattactccatcctctggcagcacagacagaaaatttgtgagcttgtgggagggagagtgaagtgattgtgaggctttgcattgggactcggtgctgtcttgtcacaagagaacacaacacagaaccraattctgccagtgctcacagagaaaccatttagaggtttcccctcctgccagaggagaatcctccctcctaggggtaggaatctgagctccagctagctccaccaccagctgaccaaagtggcatggggtcccaaataactttgaaagacaggtcacaagaacttcagtccttgggcaaatcccagttctgcactggacttggagccagtggacttggggtacacatgacccagtgagacaacacctgtggcagccaagggagtccttgcatcacccctctcccaattccaggctgtgcagcatggggagagactcctgcttgaggaaaggagagggaggagtacagaggattttgtcttgcaactggtaaccagctcagctacattaaaatgaagcaccctgcatattcctgaagccactgattctagaccccagcgcctggatggcatttctagacccagcctgggctagaagggaacctgctgcccggaaggaaggatcc

SEQ ID NO: 756100 - DNA, 638 bp, Homo sapiens
ttttgtatttttagtagagatgtggtttcaccatgttggcctgattggtcttgaacacctgacctcaggtgatccactcacatcacctcccaaagtgctgggattacaggtgtgagtcaccgcacctgagcagttacttyacacttaattaattaatttaaaatgcatgaaatatgttttttaacttgtagcactgtaaggaagaaatggtagggattatttagttctagatacatgtgaaacaagtgatgtatatttggaaaattgtagctgtctgtgtgaacactggcacattttctatattcctcttccaaaataatttaagcaactgcatgtatttaagaatgtatccatggttcagttattttattttaaagcaattataatagaaacatgtgtttttaatgcttgttggaaccaagtgactacttttaatgcctgacatgtattatcacattcagtcctcacaacagtactatcaactaaatgattctgtggtgatcaaattttgcgaaagaggaaaataaggtactgagaagataagcaggttgcctaaaatgacatagctcataaatggcagagataagatttggatttggatcctttctaagttcaaatcctacaatcttttgggaaaa

SEQ ID NO: 756101 - DNA, 590 bp, Homo sapiens
atcatagtatcacttcataaaacttaatggcatcccaacttcttttgttatgcaggacttcctagagagataaatgctattagagaaaagcacgcattaatagttcctttctctttttctaaatgtaaacccagcatctatgcctcacttctttttttctcagctatagcaacttccagtggacggctgggtcaagttaaagctttagcatcaatgtactctggcacccacttggctcagagatactttctatstacttttattattattattaaaaaataaaagagagaaagataaagtgagaatcactgtgattcatgaaccatagctaggtggctgatctgcttttcatttaaaatcactatttgtattaatgtatccacactttggaacataaatcttactgaaggtaacagcatgctgagatatactgtctcatcccaactgaagcctaatacatgatatgaattatctgacagctggttaccctctagttctaatccctgatagtttaaatattcaagctgaataacctactggtggaagtatccttccaatagaataaagaaagaagaaagacaagtgcaaaa

SEQ ID NO: 756102 - DNA, 644 bp, Homo sapiens
ctaaagactgtcactaattgagattttgcattggatcaggtacttttaaacaaacaaacaaaagtaggccatgcatggaccggtggtgaatatatgccttgaaaaggagattatcattaatctattattcaattctggataatagaagaaaaatatagactatatttcttacctaggttacttagattggcattaaattaagtgcacccatgtcccaaagtcataggtgaaaatgagtggagcaggcagagtacgtcctttccctgagaatggatttagactaaaaatgttgttaaaaaaataaggtcacatattcatttggttattgctaaaataaaaarcattgaagaaaacatcactatgagacacttagaaaagttaaacaaaagaagatatgttgtctgtaagatttcctattccagcaagccatggtacagactccatcctcaaagctcagatcctaaacccagattcattcagtcattcactccctctgagagattggataagtctctagcatgttctacaccctttcccagatgtgcttgtgctcacttttctctagagtcagttcaaactacaatgcattaggtctaagccaatataattatattataaattttaatcaatttaaatcattttca

SEQ ID NO: 756103 - DNA, 598 bp, Homo sapiens
aattccacatataaatgagattttgcaactatcagataggtaaattaatatgagacttctaacagaagaaatattcgttagattatatatatattttttaaacgtcaagttaaaatataatttcctttagaaatgtttcacttggagacacagcattttgttccagaaacaaatgttgaatatgccatcagtctagaaatccattttcattaggaaaataccatgaggtaaaattgttttgattgacagatatttacatgtgttacaaattttaacaaaggaaaccattactacctcatgtgagttttattggtaatctggacctggaacataattttactttcaaacaaataatattaaccacaaaatgcttccggttagaaaaataataggatccaaaatcctgtgtactactgtgaaayatttagaatttgacaacttttctatttgtcaatttaacagttaaaaaatttaagcaaatcatcatctgacttaggttttgacaatcaacactgatttgactaatgagtggattgattggcatcgataaaatacgaaaatttggaaaatacatatggatgaaacagcaaataattgt

SEQ ID NO: 756104 - DNA, 663 bp, Homo sapiens
aagatatcggctgcatgtcccatgacttaagccacatatttcttctcctgaagtgtttcctttcttcgcctgtgacatccatgggcatgcactactcagatcttacttcgagagagagcttgcagggaggggtgctgacagcctccagctgcctcctctttgtgatccagcacaatgttcataccaaggccacatctttcctgggttgctcccagtcgatgactgattgtggcggtcttgggatgtgcagtctttgctctgagccttccccatcagcctgctaacattttctcaggcctttactataatctgagactcttcttaattcttctacctgcctgcattaattcctaagggctctccctgcctattcctgctacatttcccaatattcctcacatatattttgtcctacaaatcttttycatgtttaattccatcttggcacttctcagagaacctgaactagcacacatgctcaaactgatcacattcacttataaaaaatcaaggccaagttcttttttttttttttttgagatggagtctcactctgtcacccaggctggagtgcagtggcacgattttcactcactgcaacctccgcctcccgggttggagcgattctcctgcctcagcctcccaagtagctggaactatagg

SEQ ID NO: 756105 - DNA, 613 bp, Homo sapiens
caaaatacatgaagcaaaaattgacagaagtaaaagaagaaattgaaaatccatgtcacatatgagagactttaaaacaaacttttttttcctagttgatggaatataaagaaaaatacattagaaaagacataaaagatytaaaaaaagattaatgtaattgttacataaaaaacactaaattcaacgtgactgaaaaatcttttcttcaaatgcccatacaatgtttaccaaaatggcagtatattgagacctaaagtaagactgaaaatttttcaaagcattaaaataatttccaagcatgttctttttctcgaaaggaattaagttagaaatcaatgttttaaaaatctaaacaataccaaagttttataaattaagcacactatgctaagataaaccatgagtaaaaaaaaaaaaaaaaaaacacaaacaaaattataaattaatttgaactgaatttaatagaaatagaatatgtgaaaacctgtggaaaacagtgaaaagcatgcttaaaaataatagaatcaaatgcataaataagaaaagaaaattatgaaactaaataatctaaatttctatcttatgaattaaaacagtaatagcaaattaa

SEQ ID NO: 756106 - DNA, 613 bp, Homo sapiens
caaaatacatgaagcaaaaattgacagaagtaaaagaagaaattgaaaatccatgtcacatatgagagactttaaaacaaacttttttttcctagttgatggaatataaagaaaaatacattagaaaagacataaaagatctaaaaaaagattaatgtaattgttacataaaaaacactaaattcaacgtgactgaaaaatcttttcttcaaatgcccatacaatgtttaccaaaatggcagtatattgagacctaaagtaagactgaaaatttttcaaagcattaaaataatttccaagcatgttctttttctcgaaaggaattaagttagaaatcaatgttttaaaaatytaaacaataccaaagttttataaattaagcacactatgctaagataaaccatgagtaaaaaaaaaaaaaaaaaaacacaaacaaaattataaattaatttgaactgaatttaatagaaatagaatatgtgaaaacctgtggaaaacagtgaaaagcatgcttaaaaataatagaatcaaatgcataaataagaaaagaaaattatgaaactaaataatctaaatttctatcttatgaattaaaacagtaatagcaaattaa

SEQ ID NO: 756107 - DNA, 544 bp, Homo sapiens
ccatttctcccaggcgctgtcatacgcagagcacctgccgagccatgtgacgtgctgctctctgccagccctgatcgccttcctttccagcaggacttgcgcttcacactggaccttgaggccccatggagatctgccattttgggcaggttctgctcacagtgccagtaacttcacctaggagaagagcgacaacttcaaggccgcatgacccatctgattgtcatcacacaggtccccgcaggagaatttccatggcgtttctcactctttgtttgcaaagaatttctttttttatcgttttctttttctttttctattttcttttttcttttttttttgagacagagtctctctctgttgcccaggctggagtgcagtggcatgacctyggctcactgcaacctcggcctcctgggttcaagcaattctcctgcctcagcctcccgagtagctgggattacgggcacacaccacaacgctcagctaatttttgtatttttagaaaagacagggttttaccatgttggccaggctggtctcg

SEQ ID NO: 756108 - DNA, 498 bp, Homo sapiens
ctactcagaatggcacacagtttagaacttataaatgatttatttctggagtgatccactgcatattttcagacggtggttgatcgtgggtaactgaaagcaaaacctgactgaaaggggctgctgtgttcatgtcagcaacgctgatgccctcgaggccagaagagtaaccaccaatctggtacctgagcacctggctgtaagtccaccctccatttctggccagggccgaggaattctctcttyttctctttattttcctcttgatttgagaaggtcaactctgagcatgctctaaacacaaatcagcatctctacacttcttcggcaccaggtgttgctactgtctttctgattagaaaaaaagaaatatccaggaattctggaagacagtgattgatttgcagctatgctgcaatggagctaagaatcattagcacaacccgtgctggtgttcgacaagatgcccaatcaattcatccgatgacaggtgcgctg

SEQ ID NO: 756109 - DNA, 614 bp, Homo sapiens
gtggtgtcaaccatcagccactgtcttgaaaaacatcgtcatccacggcaatgccctgtgtggtactggagttcccagcaccgtacacggacaccatctgcagcttgcggctgtcagacatgctgtgattacagatatgtacatcctcaaaaggacatatttagcctttactgcaaaatgtcaaagacagatgaaaatgtctattttagctgaatatggtcctacttcccttatagccaggtttacttttttctttttgttaactttatttttgttyaattgatacataggagatctccctagtttcccacgcatgtgtaatttagtacgcctatcatttgtaaaggccaaatcagatagttgggatatccgtcactttatatatttgtctttttttaggctagaaacattcaaataattctctccgagctatttggaaatatacaaaagatgattgtaaactagagtcagcctactgatctagcaaacactaggttttatttcttctgtcacactgtatatttgtattcattattatttttattactcttgagatggagactcactatgttacctggactggacccaaactcttgggctccagtgatcctccc

SEQ ID NO: 756110 - DNA, 673 bp, Homo sapiens
gtcgagactccagcaagcatttccgcttgtcagattgagtaaaacatccataatttgctctaattggccccaaactttggtagtgcctgccttggactatacgtggtctctgagcaccctccttgccactccaaaaaatacccaaatgtttttttgcaactggaattggccaagaccctcctgaaggtactcgactgaaggaggtctggggctttctggcacaggatgggaccatctcacttgcagctggaggttcttctgccatctggctctgtggcctctgatagggcrtgcacattcctgagcctgcctccctgtattaagtgttcctggtgggtagtgggaattaagtgttcctggtgggtagtgggaattaagtgttcccagtgggtagtgggaattaagtgagacaatgtattcagagtgaccagtgcagagttcacccactctctggagttaataatcactccctcccaataaacaggaagctggaggtccccagccatcagtccatgagtgctgagccttgtgggggtgagaggcagtgggaaccaggaaggacctgctgacgagaaggagaattcctaattcctgagcacctaccgtgtgcctgccctgagccaagcactgagtccactttctcctgccatcctcactggggcctctgaaatgc

SEQ ID NO: 756111 - DNA, 611 bp, Homo sapiens
cagggatccctcctgtgcccagggctcgccctagccacaggattgccagagaaaatataaaaatacagttaaatttgaaatccagataaacaatgaaacaatttttagtataagtatgcctcaaatattttataggacatacttatactaaaatatcatttattgcttatctgaaattcatattaacatgaagtcctgaattattattattattattattattattattattattattttgagacagagtctcactctatcccccaggctggagtgcaatggtgtgatcttggctcactgcaacctccacctcccaggtccaagagattctcccacctcagcctcctgagtagctgggawtacaggcacccaccaccacgctcgtctaatttttgtatttttagtagagatggggtttcaccacgttggccaggctggtttcgaactcctgatcccaggtgatccacccacctctgcctcccaaagtgctgggattacaggcatgagccaccatgcccggccctgaatttttatttgctatggcaagcccgccttgtcccatgaatgggggaagggtgttggagcccattgcctgggtttgaatcccagct

SEQ ID NO: 756112 - DNA, 630 bp, Homo sapiens
tcctttataaattacccagtctctggtatttcctcatagcagtgtgagaacagactaatacagtgaattgctaccagtagagtgaggcgttgctgaagagacacctgaaaatgtggaagtgactttggagctggatgacaggcagattggaacagtttagagtgttcagaagaaaataggaaaatgtgggaaagtttggaacttcctagagacttgttgaatggttttcaccaaaatgctgatagtgatatgaacaatgaagtccagactgaggtggtctcagatggagaagaggaacttcttgggaactgaagcaaaggtgactcttgctatgcttcagcaatgagactggcatttttcccctgccctatagatctgtggaactttgaacttgagagagatgatttagggtatgtagtggaaaaaattcctaagctacaaagcattcaagaggaaacagaacacaaaagtttggaaaatttgcagcrtgatcatgcaatagaaaagaaaacccactggggggagaaattcaagcccgctacagaaatttgcataagtaatgaggagcctaatgttaatcccaaagacaatggggaaaatgtctccagggcatgtcagagaccttcatgg

SEQ ID NO: 756113 - DNA, 671 bp, Homo sapiens
  misc_feature 1, 2, 3, 4, 5, 6, 7, 8, 9: n = A,T,C or G
nnnnnnnnnttccaatcctggatcctagaagcaaattcttccctacaaagggggttttctgggctcattggtggtcattgtctaaagcatgtctgatctaaccctgaggggggctgggtactcatgaagaactgagctttcaatggcttcaggattcaaacttcaaactgggaccatcccacatgcaggaaaagcttttctgacatgtacatgtgggttttcattgcaggtttttgaaaaagtaggaaacttacacatttctatggttacctgtacttcttttaacacggcacttttcattttattgtttctaatccgaatcaaaatgttaaggtccgacagaactcaaagactctgacaatctaaatgccagcagtgacaaatggctcttgggttccatggtgtttccagtgcatctgtcaaatgccattatgcttttataatggctgggaatattcatcttttggaggaacagtgcaatcattctagcctctgaattatgaamaatgacaatttctctcttatgaattgtcatcttatgctgtgacacacacagccacatggctgactaattttataaaacaagcaaatcatacgaaaaaagctgcactcctattttctaggctgccctcctctgaggatttgcagtctgtcacagtgagattaattta

SEQ ID NO: 756114 - DNA, 648 bp, Homo sapiens
acacagcccaggccgcctctgtatggcaggcccggagccctgcccatctgcccagctcgcagacgagccgagtgaacccctagaagcacccaatggtaccctccactgtggagagctggccgtagaacagtgtttgtccccagggaccttcctgcaggcagttgctgaagtckcagcctattcacccaataagtgtttggggagcccctcctgcctgccggggacaggctaggttctgggtgcagctcggagccacacaacatcctacccacggaccttccagcccagtgagcggaatcctgaccctgcctccagctagacctgcagatagttccatgccccaagtcccgggcaggggtcctgacagcatctaccgtctaagagtgggacagacggcagagggggcttgcgggaggcggcgtggccagagcctgctgcctgccgcatccacgcaggcttctatgagcaaatgctttctcaggcaaacgaaacagactcctccaggctgaagctgaagccggaagatgagcaggcgttgtgcgcagctgcccaggaatgagggaggagggtctgggcatgggaactggagggagagagggagggcaggcagtcacggccgacacggagggcacacagcccacctgcccg

SEQ ID NO: 756115 - DNA, 648 bp, Homo sapiens
acacagcccaggccgcctctgtatggcaggcccggagccctgcccatctgcccagctcgcagacgagccgagtgaacccctagaagcacccaatggtaccctccactgtggagagctggccgtagaacagtgtttgtccccagggaccttcctgcaggcagttgctgaagtctcagcctattcacccaataagtgtttgkggagcccctcctgcctgccggggacaggctaggttctgggtgcagctcggagccacacaacatcctacccacggaccttccagcccagtgagcggaatcctgaccctgcctccagctagacctgcagatagttccatgccccaagtcccgggcaggggtcctgacagcatctaccgtctaagagtgggacagacggcagagggggcttgcgggaggcggcgtggccagagcctgctgcctgccgcatccacgcaggcttctatgagcaaatgctttctcaggcaaacgaaacagactcctccaggctgaagctgaagccggaagatgagcaggcgttgtgcgcagctgcccaggaatgagggaggagggtctgggcatgggaactggagggagagagggagggcaggcagtcacggccgacacggagggcacacagcccacctgcccg

SEQ ID NO: 756116 - DNA, 648 bp, Homo sapiens
acacagcccaggccgcctctgtatggcaggcccggagccctgcccatctgcccagctcgcagacgagccgagtgaacccctagaagcacccaatggtaccctccactgtggagagctggccgtagaacagtgtttgtccccagggaccttcctgcaggcagttgctgaagtctcagcctattcacccaataagtgtttggggagcccctcctgcctgccggggacrggctaggttctgggtgcagctcggagccacacaacatcctacccacggaccttccagcccagtgagcggaatcctgaccctgcctccagctagacctgcagatagttccatgccccaagtcccgggcaggggtcctgacagcatctaccgtctaagagtgggacagacggcagagggggcttgcgggaggcggcgtggccagagcctgctgcctgccgcatccacgcaggcttctatgagcaaatgctttctcaggcaaacgaaacagactcctccaggctgaagctgaagccggaagatgagcaggcgttgtgcgcagctgcccaggaatgagggaggagggtctgggcatgggaactggagggagagagggagggcaggcagtcacggccgacacggagggcacacagcccacctgcccg

SEQ ID NO: 756117 - DNA, 603 bp, Homo sapiens
ccactgtgtaggcagcggctcctttctttacagaccaggagggaggctcagggacagggtgacttgcccaagggcacggcagattagaagtagacccaggcagaaaccaggtctttcagactttaaatgaatagcagaaaagtggtaaagaatctttgtttgtttgttttgttttgcttgagacagactttcactctatcactcaggctggagtgcagtggcacgatctcggctcactgcaacctccacctcctgagtccaggttattctcctgcctcagcctccagagtagctgggattacaggtgcgcgccaccacgcctggctaatttttgtatttttaatagagatggggttttaccrtgttggccaggctggtctcgaactcctgacctcaagtgatccgcccggcttagcctcccaaagtgctgggattacaggcgtgagccaccgcgccccagtggtaaagaatctgatagatattttaatcttaatacaaacatcttcagaattttcagtgaggaacattggagaaaacccaaaaacccaccgttacagacagaacaaatctggaagagtgttgaaatggttccagcactaggcg

SEQ ID NO: 756118 - DNA, 598 bp, Homo sapiens
ttaagtctattccctttagcgaatctctagagagcatttcaaagtgccaagtgcattcacacgcacaagccccttcctcacagggtgaccagtgacccaacaagtatgcttcttattttccaaaaggaagtttgggtgtagagaagctaaggcttgtgtggaagagaygcaggtgactcagacagcccttccctcacagagctcccagcccaggaccaaagattgctctctgggttagcagacagctgtggcaaggactggcctcttgtcccctctgcccattcagggaagatgtctctgccctgatgttccccgcagaagccctcctgttctgcagagaatcctggactgtgggcccagacccagattcttgtcttggtcagacacgaacagcgggtaatacgccttgtcctcagcatgaagtccttactttattaaaaattgaaacaaggctggcgtggtggctcatgcctgtaaccccagtattttgggaggccgaggtgggaagatcacttgaagtcaggagttcgagaccagcctgggcaacatggtgaaaccccatctctactaaaaatacaaaaattagccagatgtggta

SEQ ID NO: 756119 - DNA, 626 bp, Homo sapiens
catgtagataattgattattccatcgtgtcctctgcctctgaatccagggcactggaaacagccatcctcttacttcctgtggcaggcagtttggcctgtgtctcaggcttggtgtctagagtcagactacttggattcaagtccagctctgcttctgacaagccrtggggtcttggaaagttagctgacctctttaccttcagtttccacatctgtaaagtgtgttaataatagaatgtgctggtttgggttgttatagaatccgattagagaatggatgtgatgtgcttagcacagtgcctggtgcagaggaagtgctcagtagagaacagcatcgacactgtcactgctgccaccaccctggcagtgtgagtcgactgccacagctgctttccaggtgccccaccagcacccctcggccccatcctctggcgacctgccttgtcttgcagtatcttgttctcaaacataggcatcctaggatcttcacctctgagtcttttttctatcctcttgttcccttttcttggcacactctttgcccaggcctttgttcactgctcccggggagagccctctggtgacccgagctgccgggctcctgtgcagtcttgctgtttcaggt

SEQ ID NO: 756120 - DNA, 600 bp, Homo sapiens
tacacaataattattaatgtgtatgaacctaactatagagtttcaaaatacatgaaataaaaaactgaaaggatgaatgaaccaaatcacaattagagacttcaacactcttctctcagtaattgatagaacacagacatgaaatcaataaagacataaaagtaataaacaccaccaaccacttcatastgattgataattagtgaacactccacccaccaagagcagaatatacatacttcccaagtgcacagcaacattcaacaaggtagaccacattctaggccacagaaaaaatcctgaactaatttaaaatataaagcatacaaagtatcttctctgaccaaaacagaattaacctagaaatcaatggtagaaggaaagctagaataactccaactatctggaaatttaatcaatgcacttcaaaacaacccactgttcaaagaggaagccccaagagaaataaaatattttggagtgaacaaaaataaaatatgatatatcaaaattctgtgactggagctaaagcagtacttagagaaaaatccatatcattaagtgattatataagaaagaacggcttcaaatcaataagcc

SEQ ID NO: 756121 - DNA, 600 bp, Homo sapiens
aaccaaaacctcgtctctgctaaaaatacaaaaaattaactgcatgtggtgccgtgcgcctgtagtcccagctactcaggaggctaaggcaggagaatcgcttgaacctgggaggcacaggttgcagtaagatgagatcgcaccactgtactccagcctgggtgacagagtgagaccctgtcacaaaaaaaaaaaaaaaaaaaaagtgcaaattaaaaccacaggaagatatcactatatgcctattaaaatgggtagaaaatcttttgaaaactgayaataccacatgctgatgaggaaacagagcacttatccactgctagtagagatggaaaatggtactaccactctggaaaacagcttggcagtttcttacaaagttgaatagtgaaaaatacatcatataatccagcaatcccagtcttaggtattaaactagagaattgaaaacttaaattcacaagaatcactctacatgagtatttacagcagctctattcataatcacaaaaagctggtaacagcctaaatgtcctttaaacagtgaatggatccacaggctgtgacatacctgtacaacagaaagcaactcagaaataa

SEQ ID NO: 756122 - DNA, 592 bp, Homo sapiens
ggcataagccactgtgcccggtctaaatttcttctatcgcttgtatcatttctttttttttgtttaaatctctgatccatttgaaggttatcttgctgtgtagtgtgagtaatggatccaatttttctgtttatccacggggctatacagttctttctgaatatcactaaccaccaccaccccccaagaaaacccacaaaaacccaaacaatattcacacaaaattgagatattgagatcgtccttttaccatatattatttgtgtataaaktgcaggatattccttttttcatgattttgtctaaaccgtgcacatatcccatattgttttaatttagattctttatagattgagttgttttaatatttgggggaggtagctcatcctcttgcccttttggatcgtcttcaggattctcttgggttttcatgctcactggtggatgtctttaacctgactaactagaaaagagtcagtcatttacctcttgccaaatcctaagagtggagctaaggaggtgcaaatctgtcatgaagtcctgagtgttttttaaacaaataaaatgcccaaagatacatttttaaatcaga

SEQ ID NO: 756123 - DNA, 519 bp, Homo sapiens
tagttggcacctcagaattgtacacctcaggagagaggggagcaagggcagcatttttccacaggcttccatttcctggtcaagggaactttcctgaacttccaaatagtgcctttgtgagtgccaggctgattcctatggagggcaattactccagtagagaagccctagggcagaaagtaagtgatttagatgcagccaaggtgaagtgttactcagttatgtctggaaactgactgccatatcaacggctgaggtagaaggcgaggtgaaggacatgaggtgggcacgagaaggataygaaacaacgtgaaagccattgctttcaaattttgcctggtggagccctagaaattctatggtggtcccttggggacagcactggtgggtggcatgggggtgcaaggtgagcagtgctcttggtctcaacatgtggttacatctggacagttgttctgtgatctgttttatatattgggtcccaagttcttgaaataagtgtctacatctaaaaacaag

SEQ ID NO: 756124 - DNA, 586 bp, Homo sapiens
tatcaggtgagcacactggtgtggaagggctgggatgggtggctgggctgagactggactttcctgacctctctctagctggggtttttaatgtcattcaatgatgtgtatctgaggtattcagggagagggatcgggacgcacaaccaagccaaaatataatagattcaaaggcctggacgtcctaaggcccttaagactgaattttttttaaatgttttccactcagctgggtacagtggctcacgcctgtaatgccagcactttggtaggctaaggtgggcagatcacctgaggtcgggagtttgaaaccagcctgaccaacatggagaaaccccatctctactaaaaatacaaaattagccmggcgtggtggcgcatgcctgtaatcccagctacttgggaggctgaggcaggagaatcgcttgaacccgggaggtggaggttgcggtgagctgagattgcaccattgcactccagcctgggtgacaagagtgaaactccgtctcaaaaaaaaaaaaaaaatatatatatatatacacacacacacacacacacacacacacacacatattttccactcgcc

SEQ ID NO: 756125 - DNA, 631 bp, Homo sapiens
aacaggcataaaatgggcttactgttaaaaatgtggaatcaaatctgaaaaaaacccacaaggatagtgtctttttcatctctgttggtcttaaaaacattaaaaacgacaacctaattagctacgtcattttcttttgactgtgggcaggtggctttctttctggtattctagagaaggattaaggatctaaatagatttgcagatagactggtacaaatgtctccattgtctgcctcctagggatggagatcaagaatccctacaggtggtttatgaggtgtaccggtttgaatataaccccacaagatcmatatcctcctggaagctgtgaatgtgaccttccttggaaatagggcctttacatatgcaatcaagtgaagatgaggtgatataggattagggtagatagaccctaaatgaaaagcttggtgtccctataaggagagagagacacaggggaaaaggccatgtgataacacacaggcagggattggagtgatgcagctacaagcccaggggagacaaggatccatggccaccaccagaagctgggaagagccagggaaaggattctcccctagagacttcagaggcagcatggccctgctgacaccttgattttggactt

SEQ ID NO: 756126 - DNA, 631 bp, Homo sapiens
aacaggcataaaatgggcttactgttaaaaatgtggaatcaaatctgaaaaaaacccacaaggatagtgtctttttcatctctgttggtcttaaaaacattaaaaacgacaacctaattagctacgtcattttcttttgactgtgggcaggtggctttctttctggtattctagagaaggattaaggatctaaatagatttgcagatagactggtacaaatgtctccattgtctgcctcctagggatggagatcaagaatccctacaggtggtttatgaggtgtaccggtttgaatataaccccacaagatcaatatcctcctggaagctgtgaatgtgaccttccttggaaatagggcctttacatatgcaatcaagtgaagatgaggtgatataggattagggtagatagaccctaaatgaaaagcttggtgtccctataaggagagagagacacaggggaaaaggccrtgtgataacacacaggcagggattggagtgatgcagctacaagcccaggggagacaaggatccatggccaccaccagaagctgggaagagccagggaaaggattctcccctagagacttcagaggcagcatggccctgctgacaccttgattttggactt

SEQ ID NO: 756127 - DNA, 560 bp, Homo sapiens
cagaggagctggtgcctttagaggtagtttgctttcccatagacactggtgtaaacactgcccatgtactgtctcaagtaaccttcctgacagtctttgagggaagcactgttagtttgctcgttttacagatggggaaactgagcgccagagaagctcagtgggccaagggtacacagcagagactgcctcacgcagtgggaagtgtgtggaatagagctggagggctgggctcttatcccaaccctgctggtgggcatctgcataccgtgggttcagtcatgtaaacacctcatctcctcatcagccaagtggacatgataatggacttttccggggttggcaggaggtgtccctggaggagtacgtaagaaagcaccgcatcagtgtaacccatgygatacagggtcccggatgacaaactctgtaggggctgaggaaagatgcttgaatgccaagactctcttcccgtttgctcccaggttttcactggtgcctacctagcagctattgacttagtgaactttatgttcattctcttcccagtctgtggatccaaa

SEQ ID NO: 756128 - DNA, 602 bp, Homo sapiens
gaggtaataagggagaaaatcttcattaaagacatagtgcatatacacgtatatttattgcagcactattcacaatagcaaagacttggaactaacccaaatgtccatcaatgatagactggataaagaaaatgtggcacatatacagcatggaatactatgcagccataaaaaaggatgagctcatgtcctttgcagggacatggatgaagctggaaaccatcattctcagcaaactatcacaaagacagaaaaccaaacactgcatgttctcactcataggtgggaactgaacaatgaaaacacatggacacagggagaggaacatcacacactggggcctgttagagggtggagggctaggggagggagagcattaggagaaataactaatgtaaatgatgagttgatgggtrcagcaaaccaatatggcacatgtatacctatgtgtcaaacttgcatgttgtgcgcatgtaccctagaacttaagtataataaaaaaataaaataaataaaataaaatagtacaaatactctgaaaaaaaaggcatagcacatatcttgacatttaccctgagtgaattggtaagccactaaatgtt

SEQ ID NO: 756129 - DNA, 515 bp, Homo sapiens
tattgctattttgtatcatatgaactgacatacgtgtgcacttaactcttttcagtaataacaacattaaaaactgtaattgaatttactttaatgggtcagaagtacattattgaaatttttttgggttccattctgagtttgtgattcactttaatagtcacccatgatggggtcctcagtagcattgattttgataaacctcatttgtatctcggatgcaagcccttctgataggctgatagacataaactctcctttcatgtagctaattgaagatgctcccttcttaatttctttctaatcttaattgcctttttcttttttaatcagaaataacactcagtcatccgcttyttaccaaactctcctttcactctagcttctgcaaccctgttattttacatactttcccattgaaagggacctcaagatatctgcttggaaaatctctattcagttaaatatcttcacggctatttacattttacagatgaggccattgtcacccagaa

SEQ ID NO: 756130 - DNA, 515 bp, Homo sapiens
tattgctattttgtatcatatgaactgacatacgtgtgcacttaactcttttcagtaataacaacattaaaaactgtaattgaatttactttaatgggtcagaagtacattattgaaatttttttgggttccattctgagtttgtgattcactttaatagtcacccatgatggggtcctcagtagcattgattttgataaacctcatttgtatctcggatgcaagcccttctgataggctgatagacataaactctcctttcatgtagctaattgaagatgctcccttcttaatttctttctaatcttaattgcctttttcttttttaatcagaaataacactcagtcatccgcttcttaccaaactytcctttcactctagcttctgcaaccctgttattttacatactttcccattgaaagggacctcaagatatctgcttggaaaatctctattcagttaaatatcttcacggctatttacattttacagatgaggccattgtcacccagaa

SEQ ID NO: 756131 - DNA, 593 bp, Homo sapiens
ccttggcaaacgcaaatgaatggaaatcataacgaacagcctctcagaccacagtgcaatcaaattagaactcaggattaagaaactcactcaaaaccacacaactacttggaaattgaacaacctgctcctgaatgactaccgtataaataatgaaattaagggagaaaaaataagttctttgaaaccagtgataacaaagagacaacatatcagaatctctgggacacagctaaagcagtgttaagagggaaatttatagcactaaatgcccatatcagaaagctggaaagatctcaagttaacaccctaacatcacaattaaaagaactagagaagcaagagccaacaaatgcaaaagctagcagaagrcaagaaataactaagattggagcagaactgaaggagatagagacacgaaaagcccttcaaaaatcagtgaatccaggagctggtttttttggggggaaagaaaaagatagaccaccagccagactaatgaagatgaaaagggagaggaatcaaatagacacaataaaaaaatgataaagaggctatcaccactgatgccacagaaatagaaactaccatta

SEQ ID NO: 756132 - DNA, 593 bp, Homo sapiens
ccttggcaaacgcaaatgaatggaaatcataacgaacagcctctcagaccacagtgcaatcaaattagaactcaggattaagaaactcactcaaaaccacacaactacttggaaattgaacaacctgctcctgaatgactaccgtataaataatgaaattaagggagaaaaaataagttctttgaaaccagtgataacaaagagacaacatatcagaatctctgggacacagctaaagcagtgttaagagggaaatttatagcactaaatgcccatatcagaaagctggaaagatctcaagttaacaccctaacatcacaattaaaagaactagagaagcaagagccaacaaatgcaaaagctagcagaagacaagaaataactaagattggagcagaactgaaggagatagagacacgaaaagcccttcaaaaatcagtgaatccargagctggtttttttggggggaaagaaaaagatagaccaccagccagactaatgaagatgaaaagggagaggaatcaaatagacacaataaaaaaatgataaagaggctatcaccactgatgccacagaaatagaaactaccatta

SEQ ID NO: 756133 - DNA, 589 bp, Homo sapiens
tagtaggataatactcagcagatttcttttccgtcttcttccaccacagtgtctgttctgtaaaacagctcattctatgagagtcacaaagccagatacacgaggcaattatttaaattcttcataccctagggatggttcctgcctacacttggcctacatttggcaccagaagaatcatcattttctcctatgatggaattttcttgttaattgacacaagtgctctccatggggatagaaaagtgttgtgctggcattatttgaaataattgtttcactccaatctactarctgtcagttgtatgaaaattaaaagatacatgaatgttatgcaaataaatactctaggggatatttagatgccatacactttaatttttaattggaaggattagagtgtaggcaaagtatgacctaaagtagagagtgaggaagcacaaaaaaataatttttttttccaccctgggttatgcaacaggctttgcaatcagaatctgtcattcgttgtggccaggtttcaaagatttaatctcagtagctccaaacctggtgagaaatactgcaggaatgacctttttgaggtgat

SEQ ID NO: 756134 - DNA, 597 bp, Homo sapiens
ttgagaagggagtctgagcagttcttattgagatacaaatactgggtggcccctgactcactgccaagctacttgattctgcctgcttagggggcagcaaatagcatatgcaatttaaaatcatgcttgacatgtattgttttattttctcrtaactactatgaaatgtagaaagtgtattttcatcacaaatacctacatgtcataggtgttgatgtctccttcaaaagtgcaaacgctccgttgctaagcacagaaatgtaagttatttattgtgtgtgtgtatatttgtataaagaaggcacaggagttatggtgttttacttcgttgtatatttttcataagtttttttttttttagatatctgtttctagcttttttttttggaagacccagtgatactttggaattcttctattcttgatggttactgacccatttgttcaaagtgatagattttgtcaaaaatttctacagagaactcagtgctagaatttccttgtttttattgttgaattttccaaaggatgaaataagcaggtctttttcttggcattcttaagccacatatttattctgtaggcatttggaaactg

SEQ ID NO: 756135 - DNA, 592 bp, Homo sapiens
aataggtcttatgtatttttgaaacaaagttttaaaaatttaccaaagctaaaaacattaatcttctcgttctaaagaaattatacaagtatttaaaaaaagttgtaagtcagaggaagtcatatatcatgtgaaaatcatgaaataagggggtaaaatgagtttgtttaaaaaaatggcggcygggcaccatggctcatgcctgtattcccagcactctgggaggccaaggctggcggatcacttgagtttaggggttcgagaatagcctggccaatgtggtgaaaccccatctctactaaaaatacaaaaattagccaggggtggtggcgcttgcctgtaatcccagctacttggtaggctgaggcaggagaatcgcctgaacccaggagacagaggttgcagtgagccgagattgattgtgccactactctccagcctgggcaatagagtgagactacatttcaaaaaaaaagtaaaatgaaaatgtggattcaagctggtcctaggatagatgacagtgcaagaataacctttctcagtttgatttttccttctgccaagagtaatacatttaataaaatttatgaat

SEQ ID NO: 756136 - DNA, 612 bp, Homo sapiens
catagaccaatttaatgaggtaaggatcctattccacaaatgagaaccctgagcccgaggtctcattaaaaaggtattgcatttgaactgtgtttggccttaactgtaaagccagagtatgttctctatgactatattgttttctaaccactctaatgtttttactgaaaaagtatgttaaagycatatgataaggagttatccttattttagattccttaagcatcaatctttgattttcataaagctccaagactactttcatgcacttatttgaatttcaacctttctattggttatatacaacttttactattggttactattttatatgtattcatttttaatttaaatttcttgaaataggaaaatttttatcactattatgaatgtaaaaacagtgtgtttgctagaaatagaaaaagagaaataattattgaaagatgtgagtttatgcaggtcttaagaggctctcaggcactatcagctgctcatggcgggaaggaggcaggagggagaaccctcccatgtgatactgggaagtcaggaagctccttgagtgtcagggagtggtcttcatcaggagtttcttgagggttacatcaggtctcc

SEQ ID NO: 756137 - DNA, 508 bp, Homo sapiens
tacatctattctcactagcagtatgttattatatatctgaattagatcatggtaaactaagatgtatttggtaagtcctagagcaaccaatataaatttaaaaatacagtttaaaagccatttaagtatgaaaatattatactagaaaatacttaatgctaaagaaaaaaatgaagaagaaatagaaaaacaaacaagatataagacttacaggacastaaaatgccagacataaatccaactatctcaataattatatcaaaagtatgtagattgaacaatctaatcaaaaattatagattgccagtctgggtaaaaacaaaaaacaaaaacatactccagttctatattgtctataggaggcacatcttagtttcaaatatatgcatagtttcagaataaattaatggaaaaagcaaacagcaagcttgctgtattagtgtctgacaaagtagactttaaaataagaaatgtaactaagagaaagagtagattttatattgatgaa

SEQ ID NO: 756138 - DNA, 576 bp, Homo sapiens
tcactactcgtgctaagtgtgtacttttttccatagcatgggttcaatctttctaaatcctatgtcattttatgaaattttattagccattcattcaggcattaattcattccatcagtgctaagcgagcatcttctctttgtcatgtgaagtaaggattagaggagcagagcagatgccaggcaaatccaagcaccggccctacagagtctacattctcccaagagagacaaatgttataccaagagttacacaaacagatgcccaaggaccagcagtgctagaagctaaggaggaaagtcccaggctgcaggcagaatcacagggacatagtttaaattgtgaggagaagtcacccaggtcccaggtgatatttaggctgggacttgagctatgacaagracaagtctggcaaagagagggtgggagagcaccgagggtgatgcaatggcaggagtggagggaggtcttaggcagactagagttctgtgagttgaagtaacaatggaaaccatgccgccagggcagtaggggcggaaggaagagtaggagagaggtcaggcactgggtcattca

SEQ ID NO: 756139 - DNA, 563 bp, Homo sapiens
cataaaaggaggcctacataaggatcatgcccagggttggggtaattcaacattagaatgttatcaatatttctcaaactaagttgaaaattaatgcaattccaattaaatttcaaggttttttttaaaaaatagattctaaaatatgtatggataaataaaggtctgtagatattaaataatattttgaaagagaagagcacgaagattcttcctgccagrtattaagaaatattaaaaagcagtagtaattaggatagtatggcaataaaataggggcaggactgaagacaaaggtagcagatcagaatactcatgtggactcccgggtgcctccaggaacttggcatattacaaaaatggcatcacgaatcaatgagagaaagaactgattatttggtaaataacctcactctatggcaaattaaaatttaattgctacttcccttcaaataaaaaataaactctatatgcaataagaatcaaatgtgaaagttaaaagtatagaattaatgaagaaagtgtaaataatatctttatgactttggaataggaaaggattt

SEQ ID NO: 756140 - DNA, 605 bp, Homo sapiens
cctgagcaacatggtgaaaccctgtttctactaaatatacaaaaacttagccgggtgtggtggtatgtgcctgtagtcccagctactcaggaggctgaggccggagaatagcttgaactcggaaggtggaggttgcagtgagctgagattgtgccactgcactcccagctgggtgacagagtgagtctccgtctcaaaaagaaaaaaaaaaagtgaatgtaacatgcatatttacagaaaaagcaagtcacaaacccccctttaacacaagctcttttgactcttattattagaaataatataattagcctaaagttaagtagacttcaaccctaagcatagatgacacatactctaattcagatccagattagatcagtatataccaggcagtattgaatgcatctcattaattcattcctaaagcaygaactttccatatcacatggcaattaaaggattatatgaaagaaactgttcagattagggtccaaccccaagcagatggctaagtgcatcctgctgttagggaagtgagtgtaccctcactaagcagtaatgattgatctgtcccatggaaataggtaggttgggtccaatgatgc

SEQ ID NO: 756141 - DNA, 595 bp, Homo sapiens
cattccttcccagttgggcaagatcaaagtctattcatcacctctttacaacatgactagaaagtagtgaacggctcatgtgaagtcagtattgtactggcctctgggtaccagttcagatgaagaataatgcatttatattcacccatggaataaatactcactgagatatttcttgcatttatataaagttttatattaagaacaatgcaattggagaaataaagggccaaaaatctgaagtcagtttgattggagctttatataacccccaaacattcactcctgtcacatttctgagtgcacattactgacataccacccaatgaacagtaatatttgcattaaaaaattttcattcacaatctctttgccactggggcttggaaaatcctcaagtctaatccagatgyctgctcatctaacttggaatggagcctttgaatcatctcaattattttagaatcatttgggttttctttaagacttttgctaaagaaaaaggtcgaggcaggatctaaaaccattgaagtagtcatagtcccatgtgttaggtggcccagataaaggctgggatattgcaatacaacatcag

SEQ ID NO: 756142 - DNA, 636 bp, Homo sapiens
tgatgaatccaacatacttctttttgcatctttttctttgaaattcaactagagcaatttgtttatagaaatactgaatggctttagagaaaatactcgatttctaattcagatcaatatactggaatgaaaacattattttcccccatttgtactttttttttcttcatgtttgtatttgatttttgtggtcacacattttgcattggtggcacttggtagcaagacactatgcagataagatgctactgaggactatcagaccatggaaacttaatagcatcttggtaatgtgtgcagcttatgtctgctcagattcacatatagcataatttcctatgctacttagaaaaataaaaacaagaagcaacaccattatacrataaaccactaatttcaggcttcatttacaaacaagtagcacgctgctgttaaataaacattaaagagctttctattatccagttattgttgaaaatactggtcatgtaataacccagatagtcaatatatttttgttaaattaagattgacatttaataagaaattaaagatatttaataagaaaaatgtgtgctaaaatcagagtcagaatacatcatcgcatagcactaaagtatgttaccctctttaaga

SEQ ID NO: 756143 - DNA, 636 bp, Homo sapiens
tgatgaatccaacatacttctttttgcatctttttctttgaaattcaactagagcaatttgtttatagaaatactgaatggctttagagaaaatactcgatttctaattcagatcaatatactggaatgaaaacattattttcccccatttgtactttttttttcttcatgtttgtatttgatttttgtggtcacacattttgcattggtggcacttggtagcaagacactatgcagataagatgctactgaggactatcagaccatggaaacttaatagcatcttggtaatgtgtgcagcttatgtctgctcagattcacatatagcataatttcctatgctacttagaaaaataaaaacaagaagcaacaccattatacaataaaccactaatttcaggcttcatttacaaacaagtagcacrctgctgttaaataaacattaaagagctttctattatccagttattgttgaaaatactggtcatgtaataacccagatagtcaatatatttttgttaaattaagattgacatttaataagaaattaaagatatttaataagaaaaatgtgtgctaaaatcagagtcagaatacatcatcgcatagcactaaagtatgttaccctctttaaga

SEQ ID NO: 756144 - DNA, 530 bp, Homo sapiens
ataatcatgtggtttttgtctttagctctgtttatgtgatgagtcatatttattgatttgcctatgttgaactaaccttgcaaccccgggatgaagcctacttgattgtggtggataagctttttgatgtgctgctggattcagtttgctagtattttgttgacaatyttcacatcgatattcattaaggatattggcctaaagtgttctatttttttgttgtatttctggcaggttttggtatcaggatgatactggcctcatagaatgagttagagaggagtccctctttttcagtgttttggaatagtttctataggaatggtatccgctcttctttgtacctctggcagaattcagctgtgaatccatctggccctgggcttttttcagtcaatagcctatttattactgcctcaattttcagaactcattattggtctattcagggattcaattccttcctggttcagtcttgagaggatatatatgtccaggaatttatccatttcttctagattttctagttt

SEQ ID NO: 756145 - DNA, 600 bp, Homo sapiens
tttgcaaacatttaagccaggagttctgccaaatttaaatgcctttggcaatcaagacaagaagcatctctctctgatataactccaaatagctggaaaatgacaaatagggcagaatttcccatgcacccttcctacacacacactaggtttctttgtagaacagtaatgtcatctcataactttttcactagctgcagtttgatrtatatgtttgagaatttccttgtttccttttgtctgaatgctttgatattgtaggggagaaaaagtcataacttttcctcactcatcacaaggtttatgactgagttccgtaaaagaaaaggaagatttaagccagagaaaagcaaagcaaatttattagccaaatattatgggatatgagagtcttcagaaatgaagacccccaaacatagggaagatcatgtatttttatgcttaggtttgatgaagaacggacagacatgtagaagtatgattagatgaaaaaggagtatgactgaatggtaataaactgggggtgggggaagtagcaaggtctgtttcttgagattgttcttggcctctctggatagcattccctcccttcggatatag

SEQ ID NO: 756146 - DNA, 623 bp, Homo sapiens
gtgccacatttggggctagtgtttcctgtaccccatcagcatcatatgtgaaattgttttattttttccaaaacctgttacgaatttgctctagcaaaatccacattcttatttcttattaaaacagtcccacttaaagtttttaagtctcagtgttaacaatgtaaaacctactaaaggagtgtaattggattgtttgtaactcaataaataaatgcttagggggatggataaaacaaacaaaacaatgtaaaaacttcaaacttctatttagttgatatttcttaatctcagctgtcctccctccctctcaaccccatcatccccctaatcaaggctaaacttgtggctctggtggctaggagtggtggggtctgggttatggtctgttctcttacgcactttttgctctgccttcttggaatgatgactctgattgatgttgagggcaatgaggaagggratgagatgaaaatgttgccttgtatgcctgtccatagtgaagttgcatgactcttcttggttggccctaattgctgacctagtttgcgattgagtccatgaaatccttgagcatgggtggtggctccatcaggcctcctgataacagtctcatcttaagt

SEQ ID NO: 756147 - DNA, 359 bp, Homo sapiens
cctggcctccactcactaaatgttaatagcatcctcctagtcataacaagcaaactatgtctctagacattgtcaaaatttcccttgagggaaaaattacctcttgttgaaaacaattgccccagatgatctataatcatttactacagtgctgaagmtaactatcatctttagttccagggttgactgacttaattcatgttatgctaattctccaaaaacattagacatcttcattaaaatagcatataaattataaggcatccctgaactatttttacaaaaataacttattttgagaaggtgttgctttgatgttgaaagaataagagcataaattttttaaactatatgtagaa

SEQ ID NO: 756148 - DNA, 554 bp, Homo sapiens
gagaaatagactcagcaagacatatagaaatatataaggaaagatttatgatgggaatcagctcatattcattattatggaggcccacaagtccagtgttctgtctgtaagctggagaacccatcttctgctttttgttctcttggggcaggtcccagtgagttggatgatacccaccaacattggtgagaggggacctcttttactcctgattyttgactacagattcaaatgctaatacagaaacactctcacaaaaactcccagaaatagtgttttcccagccgtcagggcattccttaacccaggcaagttgactcataagaataaccatcaggccagcacaccagtaatcccaatactttgggaagtaaggtagaagatttgcttgaggccaggagccaagatcaaccagggcaacatagtgagaccctgtcttaaaaaaaaaaaaatagctaggcatggtggcgcaaacctgtagtgggatgatatcttgagtccaggagtttgaggtgacagtgagctgtgatgacaccactgcattccagcctgag

SEQ ID NO: 756149 - DNA, 554 bp, Homo sapiens
gagaaatagactcagcaagacatatagaaatatataaggaaagatttatgatgggaatcagctcatattcattattatggaggcccacaagtccagtgttctgtctgtaagctggagaacccatcttctgctttttgttctcttggggcaggtcccagtgagttggatgatacccaccaacattggtgagaggggacctcttttactcctgattcttgactacagattcaaatgctaatacagaaacactctcacaaaaactcccaraaatagtgttttcccagccgtcagggcattccttaacccaggcaagttgactcataagaataaccatcaggccagcacaccagtaatcccaatactttgggaagtaaggtagaagatttgcttgaggccaggagccaagatcaaccagggcaacatagtgagaccctgtcttaaaaaaaaaaaaatagctaggcatggtggcgcaaacctgtagtgggatgatatcttgagtccaggagtttgaggtgacagtgagctgtgatgacaccactgcattccagcctgag

SEQ ID NO: 756150 - DNA, 671 bp, Homo sapiens
taatttacaaattagatgaattaatcatacaagagatctatatcgttgtaaacttgactgcttttcataatctatattatagatgaaattcatgatttagttatccaggtttttttttttttcaggtccctcaaaacacctaatatagcatgtattagacacttcttgaagaaaggtactctgatattggacaatagtgatgtctggccttgctgagtgatgcctggcttggctaatttggttgtatagcagactattccctccaaartttagtattctaaatacaactccaaaattttaacccaaagataattataacatataataggatgaggtaagtgatttctattttaatatacatttgccaatataatatctttttattggtaaatgtatattgaaataaaaatcactttatatgttgaataaaaattacgcttagaaaagaaaatgaagcgaaaagtataatccataatcatttgacaggattagtttgggtacaaccttttttaaaaaagtaattagaaattaagaatgtcaattattctaataagtggtaacaaattcttttgtttgtcaggtagtttacaattctttgccttcaacacaattgaaggagaacctagaattgttagctagtaagtcattaagaattatttttcatgatggat

SEQ ID NO: 756151 - DNA, 778 bp, Homo sapiens
taatttaaaattttaatacatactttatttatgcctacaaattaaatattgacatataccatataaatgtattttagctcttataatttacaaattagatgaattaatcatacaagagatctatatcgttgtaaacttgactgcttttcataatctatattatagatgaaattcatgatttagttatccaggtttttttttttttcaggtccctcaaaacacctaatatagcatgtattagacacttcttgaagaaaggtactctgatattggacaatagtgatgtctggccttgctgagtgatgcctggcttggctaatttggttgtatagcagactattccctccaaaatttagtattctaaatacaactccaaaattttaacccaaagataattataacatataataggatgaggtaagtgatttctattttaatatacatttgccaatatartatctttttattggtaaatgtatattgaaataaaaatcactttatatgttgaataaaaattacgcttagaaaagaaaatgaagcgaaaagtataatccataatcatttgacaggattagtttgggtacaaccttttttaaaaaagtaattagaaattaagaatgtcaattattctaataagtggtaacaaattcttttgtttgtcaggtagtttacaattctttgccttcaacacaattgaaggagaacctagaattgttagctagtaagtcattaagaattatttttcatgatggatccttgtattcttgtgaagcatctc

SEQ ID NO: 756152 - DNA, 778 bp, Homo sapiens
taatttaaaattttaatacatactttatttatgcctacaaattaaatattgacatataccatataaatgtattttagctcttataatttacaaattagatgaattaatcatacaagagatctatatcgttgtaaacttgactgcttttcataatctatattatagatgaaattcatgatttagttatccaggtttttttttttttcaggtccctcaaaacacctaatatagcatgtattagacacttcttgaagaaaggtactctgatattggacaatagtgatgtctggccttgctgagtgatgcctggcttggctaatttggttgtatagcagactattccctccaaaatttagtattctaaatacaactccaaaattttaacccaaagataattataacatataataggatgaggtaagtgatttctattttaatatacatttgccaatataatatctttttattggtaaatgtatattgaaataaaaatcactttatatgttgaataaaaattaygcttagaaaagaaaatgaagcgaaaagtataatccataatcatttgacaggattagtttgggtacaaccttttttaaaaaagtaattagaaattaagaatgtcaattattctaataagtggtaacaaattcttttgtttgtcaggtagtttacaattctttgccttcaacacaattgaaggagaacctagaattgttagctagtaagtcattaagaattatttttcatgatggatccttgtattcttgtgaagcatctc

SEQ ID NO: 756153 - DNA, 778 bp, Homo sapiens
taatttaaaattttaatacatactttatttatgcctacaaattaaatattgacatataccatataaatgtattttagctcttataatttacaaattagatgaattaatcatacaagagatctatatcgttgtaaacttgactgcttttcataatctatattatagatgaaattcatgatttagttatccaggtttttttttttttcaggtccctcaaaacacctaatatagcatgtattagacacttcttgaagaaaggtactctgatattggacaatagtgatgtctggccttgctgagtgatgcctggcttggctaatttggttgtatagcagactattccctccaaaatttagtattctaaatacaactccaaaattttaacccaaagataattataacatataataggatgaggtaagtgatttctattttaatatacatttgccaatataatatctttttattggtaaatgtatattgaaataaaaatcactttatatgttgaataaaaattacgcttagaaaagaaaatgaagcgaaaagtataatccataatcatttgacaggattagtttgggtacaaccttttttaaaaaagtaaytagaaattaagaatgtcaattattctaataagtggtaacaaattcttttgtttgtcaggtagtttacaattctttgccttcaacacaattgaaggagaacctagaattgttagctagtaagtcattaagaattatttttcatgatggatccttgtattcttgtgaagcatctc

SEQ ID NO: 756154 - DNA, 609 bp, Homo sapiens
tcttcgtaatgcgtgacggaaacagatttcttgtacaaaacaatgtatgataacacaattaagagattaagtcctgccttcagatcatcacagaaataaatgtgacatgaggggatgatggcgcttggaagacaaacaaaaaaatgccaaaactaaggaagtaagtcacaagaacttatcataagaacatctttgactctaagggacttaaaactaaacttgggcaagatctttaagggcccaagttaatgtaggagctacatgatctctttcattttagtgcagcaaactttgtaacatctaataaactacacttgagcattctattctttctatattttgagacataataatttaagtccatatgaagaaactttgtraacctagaataatttccatttgatcgtaaggtagagtcattttaacaaagtgctaaaataggcctttaactttgtattattaaatctatgtttgcaagaatgtgctttagttttcttatatgccagataaattaagaagctttatattttttatagagtttagaaattattacaaaatatagaaattaactgctcgttgaaaatcttggtaaatttttgaaaagctttt

SEQ ID NO: 756155 - DNA, 623 bp, Homo sapiens
acgcagaacaaaaccatatcacctctctttactgtacaatattagggtcaaatctatttcatatcagaacaagagaacccttctttatactcataactatgcaaagttgacttctctcaaatggatagattcaaacaaatacaaaaagcttttttttccatttaggctgttcctttagcagatatttgccaaagatattaaaatatatatttctgcaagaagatgtgagaagtgttaattaaaacaattttgttctttttcaggccagcttttagttgtatattattttgacccagagggatataatcctttacaccaatacgtaaaataattaattccatgttgccattatatyataataaatatttaatacagtccccatggaatcattgccagctaatattgtgacagaattaggctcaaaatttcttatcagcttgtttagtgaaggtctttctgtgctagtaaagaaattaattcaatgtttctgataagtgcagagttgataaccttggttattgagatggatttacccaataactgaaccattgagtttatatgtaaaattgatggggtaagtcatttttctctctccagttctcaaactactcacaactttttat

SEQ ID NO: 756156 - DNA, 519 bp, Homo sapiens
cagtttttgtggggaggctggccacaatgcccaaagggcttgtggaatacacttcttacagcatggtgctgctgaaccatctctctgatttggtaatttttgtctaagagggaaattagccctagagttttgtgtgctgaggcttttagctctaccttcactatctgtctccagctgccctcaggaatccctctccttacaggcacttgcaacgctgtctgtgggttgagacaggagcagctttcctgcatagaaaccaaagataatgggggctggctgcctcaatctcactttttctagtgtagaaactgtgagctcagggaattttccactaaaagtttggaggaggggcattgcacctgaaagtttgggaaaagggyattgaggatagataaatcacttctccttcctcctcctcacagtttttcatttctctgttgcccatgttttgtcatagcctcagctttgagttctgggatattggtggtaacagtcttgtcacctaatagttgtttttag

SEQ ID NO: 756157 - DNA, 575 bp, Homo sapiens
gcaaagatgactctagttatgttttttagcaaagagactggtggcatttggcccctgccctagagattggtagaactttgaccttgagatagatgatttagggtatctggcagaagaaatgtctaagcagcaaaatattcaaaaggtgacttgggtgctgttaaaggcattcagtttcttaagagaagcagagtataaaagtttggaaaatttgcagcctgacaatgagatagaaaagaaaatcccattatctgaggagaaattcaagccagaaacataaatttgcataagtaaaaaggagctgcatattaatccccaagacaatggggaaaatttctccagggcatgtcagaggtcttcatggcagcctctcccatcacaggcccagaggtctaggaggrcaaaatggtttaatgggccaggcccagggtcttcatgctgtgtagtctatggacttggtgccctgcatcacatccacttcaggcatgagtaaaaggagccaaggtacagctcaggctgtgaattcagagggtgtaaccccaagccttggtagcttccaggtggtgttgagcctg

SEQ ID NO: 756158 - DNA, 677 bp, Homo sapiens
cacgccattcttctggggacccttagatccaccccaggagaagccctagctgctgttccccattcaacaccccttttcagcaggaagtagccagaaagagtcatcatccaaaaccctgtaacagcagttagtgtgatatcgccacagggaggaatgtggtaggagttattaagaaattattttaagcagatagagagaaaggagtccttgggaagttttcatttttwaaagcatctgcggaaaagtttcttgtaaagccgcagctctgagagccaggccggcaacctttgatatacaaatgaagtccattagaaactgagtctacccaacatggcgattccctcggccttcttgcccttgccccacatgttcctggcaacatggccacccccacatagccccacgtgtgtagaatatcttggtgccctgcatttgcatattaaaaggctagggtgggagggccagcttttttgcaggctacgtgaatgatatgcctggtcaaaccaatcccctgggccctatgcaaatcagacaccacctcctccagcctctatatatacactgcctcctccagcctctatatatacacacctggctggtttctgccccacttggggtttcctctcttggctttggagcccccctccctctgtctctgtatgggggagcttctatct

SEQ ID NO: 756159 - DNA, 589 bp, Homo sapiens
gttttgaaattccctttgggtccagccctctcatggaaacttctggtctgaaagcagctcctgggaccctggatgaggcagtcctccttaagcagaccccagaggaaagttgcatctgggctaggctgtggggtcaggctgtacaggcacagaaggagtggtccccaaagcaaggggttcactggggcagccttctytctttcagtgattcctgtaaccaggccaggcaacaccactcgtgcctacagcaagttatggtactctggtgagccagactggctggaagaatggtccaggggagagttctacagtggctggaagggatcagaagacaaaaagtcagaagtcaaagctgtctgtggcatggagagagggaagtgagcctcaaaggcagaagctaggagagtaagaacaatctggcttttgggaggtgggtcagagcctgtgattccagtttaaagatgtgaatactgtaagggtgcctggtacacagccagtagcccctaagacacaggtgggtggaggcctaggacccggcacactctgtaaagctacaaggagagtagctgtgtctgaggaaaagggcaaa

SEQ ID NO: 756160 - DNA, 334 bp, Homo sapiens
tttttattctgtatctggcttatttcacttagcataatgttttccaggttcacccacgttgttgcaaatgacagtatttccttcaaaaagagggctgtttttccctaattgtcctgtaaacctcctggagttgaatgtcgttggcscggcttgagttatgtgcccttccctgtgtaatcactgtgacagggcaatgagacgcttggatcggccagacctgtatcatgtgcccaccttgggaattgggggccaaggtcagtcccacccaaattcatggcctgagcatgggggagacgaggaccccaaaggaagctatgcgcactgtttccagaag

SEQ ID NO: 756161 - DNA, 604 bp, Homo sapiens
gtcccccacctgggactctcactgcactaggtttgggctgtgctcctcctctgaggaatgcatcgccaaccccgtcctcaaacccaagcactgccttcccatctcctcgagcccctcgtcccctgcacatcctcatgtgtcccttcctgtgactggccactggcaagcaygagcctctcccagggcctagggtctggggtgtagggagttgcggggagcagatgcctacatgtttgtcacagccctttccttctgggtttgaggagaactctgtcaaagttctgtcaccccccagcagagaggcagtggctggctcaacccacgtgacccttcctgaggttaagaggcttggtgctgggagaagagaaggaatgtgagttagtacattcaaatggtatcttcccttcacttggcagtgctggaaggggagctaactttatctcccattgtgccttctgatgagcccctctgaaactgagtgactgcagaagaatcctccagccggggcattccagtttaatctgagcacatcgagtgtttggacaatgcaagtgatcacaaaatgctccctagagtgtctgggggactctgagagtgccttagg

SEQ ID NO: 756162 - DNA, 630 bp, Homo sapiens
atctgacctgagccccacattccacaggtgacaagtgcatggatgagtgccacccctaagaccacatagcccatagcagggctgggactggaacccacctgcttccactcccagcaatggtcatttccgtcactctgtccctctactcagagataaattcattaactgaccttaattaatttaatttgttttttctagccactgcttctcccttctcacagcccttcctcagtggaagtgctaactggaattgagtggctcagaaacaaatggcaaagaaggaggtggaaaagaaagagttatgaaactgtacgtcaggctyggaatggtggcttatgcctggaatcccagcattgtgggaggctgaggagggaggatcgcttaagcctaggagtttgagaccagtttgggcaccatagtaagacccccatctcaacaaaactaaaattaaaaattaacctggtgtggtgctgcacacctatagtcccagctacgcaggaggacgaagtgggaggattgcttggacccgggagttcaaggctgcagtgagctatgatcacaccactgcatttcagcctgagtgatagactgagaccttgtctcaaaaaaaaaagtaggtggggatcacaa

SEQ ID NO: 756163 - DNA, 574 bp, Homo sapiens
tattctaagcaggtgagtaggtacaatgcaagttactccattgtagccggaaacagaaatctatttatttctccatataactaaaaacctactataagttacccttagtgttaacctcaagttctgcttagccgcaaagtcatgtagagtgatacagagagctggggaatttcaataacagagtagagggagatcacgttagagaaggatctggttggagcttgcaaataatctggtaactactcctgrgaaggtgatccaatcggttgttgcctcctctggccaggactcctgtatgtcttcagctgaactgcttcccttctctaggtctctttccccccaaggccagagtctcctgaatgttagtgtgtatggccaggtaggaccccatttgtgttttccttctctgtgactttggcccttcaagtcctagctgccttgaaagccctatggtgcattttttttccttctcagcttctgatattgtcaaactctgctcagcttttctaccttttagcttctaccttctacctgctgtttcagacgcttgctccatgtgggttttctgaatcag

SEQ ID NO: 756164 - DNA, 525 bp, Homo sapiens
aagaaatagtgtagaatatcaggtttccctcagtgcatcttcctttttgagagaatcttgtactttacattttgacttccttgcagtacctcttcagaatcacaagggctaaacaggtaagtatctgatctaggcactacagggaaagcttgatgataaatacagaaaatagtttatgcagatgtttgtttgtggggaggtatcaaatgttagggatgagttgtggcatggagaaatctatggcaaggaaaatccctagtagtagttagtatccaataaatactttgaaatcactgaarcagagtgcttctttccctccttcacttaaaatcccctgggcaagacagaacacttgtatttatactagagatacaatacttctgattttttttccaagctaacagatttagctaactaactgaaaactagaccttgagtaaaagctactgagtagataagagaaactgtttttacaatgtatgaggacattttcagcagcatctctcatgctgcctcctcagttct

SEQ ID NO: 756165 - DNA, 605 bp, Homo sapiens
tggccagcctgttctccagtctaaagggacagggaggaggcccctggcccttagctgcagcccttgcttctggctttattgccattttctaagattaataaaccctccaaaacatataaggcttttgcagggggacagtgcgtcacttccagctttgcaattacargaaggggatctcaccataaatcccccaagttgatcacagcttggagtagaggaaacctcactgagatgttcaaagatttttaaagatgctgctgaaagaggctttttgtttactttaaagagtagtaaaactgtccctcacatcttgattttgagtctctgggtactgtcgaccataaggaaatagacaagtggattttctgcttcaaaatggaggatattatttaactcccttccataattaatccaccacctattatgtgcccagtgtggttaggcattgtggagaatgtaacagatttcctgctttcaaggtgttttaaacttgagggaaaagattaaaaatatatgatagcactccacaatcattcattcaattgttgaagacctagtatgtgccatactcaatgctaggcacaggacagatgtagaaatgggta

SEQ ID NO: 756166 - DNA, 588 bp, Homo sapiens
cttagaaaatgtcaggctagtttggggaaatctaaatctaccccagactaggtagtttcaatgatcattatccctattctctgttgtttgctataaagcggagatctaaaaagacttgtccaggtggtacacgtaggaggtatgtggagtgtggatgtgtgtttgcctatgggggacacgtgatcatatatactagtccttcttcgccagggacagacctcaaaattgggcaggtggccttgatgcttcctccagatttatcaggccactagcaagggccacgttggttggtttcactttgagtcatgtcagctctagggaggctccttgcccsctgtgggggcttcctgccgctgatatgctgggcacagaagtgagcagatactccatggactggtaccgatacattgtaatgcacacacacaggactgctgttttgtgtgcatgtgtattttttgtgtgtgtggtttttatttttggcatatgtgaaagagtttctgcaaaactgatttcacagagcaataagtcacctaagagggtgtcaccagccatttaaagtgcactactgaggtttttaacgtaataaat

SEQ ID NO: 756167 - DNA, 628 bp, Homo sapiens
tcagtcttgatgttgtggcctttagaaaattagtgtcttagtattttcagtgggtttaaaattacaagcaattaataattttacaactcgtatgagacccaggcagcatctacagagaattatatgaagaggctaagttggtggtgacttatacagaggaaacactggtggctggcttgtccttgggagcatcaacagagaagtggcatttcttgacctctctcctattattacgaaaacaatagagactctgctatattggggatttacattcctttaccttacacattttcttgaaaatacatgccttatttctccatcttatcyatatttgaaaaggtccatctgaaaggcaagaaagaggtcttcagtttttttcttcatgagtatcattgtctagaagagggtaattgagcttactaagtggatgtagggagagatatagtgaagggaagatttctgggggaggatttgggaaatgaagctaagagctgggaggcaccatggaagaatgactgaaaatttcctttaattttaaattcctttaattttttaattaaacctcctcttttggaaattttttaattttttaattaaaccttaaatttttaaattaaacctcctcttt

SEQ ID NO: 756168 - DNA, 628 bp, Homo sapiens
tcagtcttgatgttgtggcctttagaaaattagtgtcttagtattttcagtgggtttaaaattacaagcaattaataattttacaactcgtatgagacccaggcagcatctacagagaattatatgaagaggctaagttggtggtgacttatacagaggaaacactggtggctggcttgtccttgggagcatcaacagagaagtggcatttcttgacctctctcctattattacgaaaacaatagagactctgctatattggggatttacattcctttaccttacacattttcttgaaaatacatgccttatttctccatcttatccatatttgaaaaggtccatctgaaaggcaagaaagaggtcttcagtttttttcttcatgagtatcattgtctagaagagggtaattgagcttactaagtggatgtagggwgagatatagtgaagggaagatttctgggggaggatttgggaaatgaagctaagagctgggaggcaccatggaagaatgactgaaaatttcctttaattttaaattcctttaattttttaattaaacctcctcttttggaaattttttaattttttaattaaaccttaaatttttaaattaaacctcctcttt

SEQ ID NO: 756169 - DNA, 602 bp, Homo sapiens
gcctttcattcccaaaagagattaggatatcatgttaactcatcttttaaaagaaattctgctatatctagttgtcttaatatatttttattaacattattaaattatagataaaatcatggaagaaaatcaatgtttttataaataagatgctattgtatagttttttgataacttataaatgacaattttaggtcatatcaagtatatgtgctcttacatattctcaagacaatgttgaaagtaatcacactttgcttttaaagggaattaaatttccacacccgtgccacagtcatcatttgttcatgttccaaggatagtttaaaaataactgtaactgagagctagacactagcagaggtaattaactgctatattcttttaatacactcgttaaagaaactattctattagagctattctattaagtaaataatcttttttgctagtaattacatyctactttttatgcatgtagcttccacctaaaccagaaagttttctgttgttgattattgtaaatgtataatttcaagtgtctaattaacactttcagatagaagaataattttttctaaagtgtcatgtgatagtaatag

SEQ ID NO: 756170 - DNA, 680 bp, Homo sapiens
tgtttaactaaatttttttttcatttctgttcaaaaatttagctaacctaggagatagtaatgtaatagttattcaaagggaagcttgactgtttgggatactgtaaattcacatttcttattaaatgggaggagattggctgagatgatttcagagtctaaaattgtctgattatagtaataacatgtatataatttttttttcaggaaagcttgctgttgtgagggattcccattccatgaggtaatatccagtaattcaactstattaattttagaaactttcttaaaagtttaaatctcagtttctattttcttttttcttgctaggttattcaagaattccttttaaacaaggataaattggtgaaggttatcaggtaccaaagacctgatttgttattgtttcaggtatctgaaaataaattcttctttactgtatgaagttatatgctggaaagataggaacagatattcactctgattggtcttagaggaggtttaaaattaaaacaggcagctcttatattttttcagcatttatttctactctctcatttgccatacagtggccatctttgcacactataagacaaagtatagttatgctgttttagaagatgccttaattagcatatgtggatatattgcatccatggatattttgggggaagagggtt

SEQ ID NO: 756171 - DNA, 680 bp, Homo sapiens
tgtttaactaaatttttttttcatttctgttcaaaaatttagctaacctaggagatagtaatgtaatagttattcaaagggaagcttgactgtttgggatactgtaaattcacatttcttattaaatgggaggagattggctgagatgatttcagagtctaaaattgtctgattatagtaataacatgtatataatttttttttcaggaaagcttgctgttgtgagggattcccattccatgaggtaatatccagtaattcaactctattaattttagaaactttcttaaaagtttaaatctcagtttctattttcttttttcttgctaggttattcaagaattccttttaaacaaggataaattggtgaaggttatcaggtaccaaagacctgatttgttattgtttcaggtatctgaaaataaattcttctttactgtatgaagttatatgctggaaagataggaacagatattcactctgattggtctkagaggaggtttaaaattaaaacaggcagctcttatattttttcagcatttatttctactctctcatttgccatacagtggccatctttgcacactataagacaaagtatagttatgctgttttagaagatgccttaattagcatatgtggatatattgcatccatggatattttgggggaagagggtt

SEQ ID NO: 756172 - DNA, 630 bp, Homo sapiens
gcaggatgggttattgacagaagagaattataaaggatataaagtattttaactctctgtctgtcctatactagcctatgcctctctccttgtgctctcctcatattaagaaacagaggatgttgtccgggaggtcataataacctaagtgagtaaaattctgaaagccaattttcgattcccaagtgtattggctrtctagaatttccaaggaacttgatggatcagagtaatgcaaaaaagcaggacctcaagccccagggttttatagcacctataaaacatgttttacagtttctgttcaattttatgctgttaagctaaatatttgacatcatatggcactttaagcacattgatttatggtaagtcagcaactgcatctgtaataaaaagtccaaagtatgggttttaaaagtaatctgctgtatttattattgacataaacagttacctgcagtccatttgaacatcatcttagatttaactcatgtattaaagatattatgttttccactcagcaaggtcaccttcaaggtgaaaactgtatgtggttgaaaatgaaaaagatcaagtgtataaagataaatatttaaaaaataaatgatatataggatttcatttttgtac

SEQ ID NO: 756173 - DNA, 614 bp, Homo sapiens
actataaatcaaagacacctaacagatatctattcagtactttacccaacaacagcagaatacccattcttctcaagcacacacggaacattctgtaggacagaccatatggtaggccacaaggaaagcttcaatgaattgaaaaggatttaaataatataaagtatgtcttctgatcagaaataacagaagaaaatttaggaaattcataaatatatggaaattaaagaacacatttctaaataactaatgggtcaaataataaatcacaagggaaattaggaaatgttttgaaatgaataaacacaaaatacagaatactaacatttatatgatacaactaaagtaatgtttacaggaaaatttataactaaatgcctatgtttaaaaagaaaaaaataytatatcaataacctaatgttatacctcaggaaattagaaaaaagaaaaagaaactagacacaaagcaagcaagaaggagagaagtaataaaagttagcatgaaaataaatggaatagggaacagaaaaaccatagagaaaatctacaaaaccaaaagttggttcttgaatcaacaaaattgacaaagttttatccagattgaccaccaccac

SEQ ID NO: 756174 - DNA, 606 bp, Homo sapiens
aatcacattagaactcaggattaagaagctcactcaaaaccacacaactacatggaaactgaacaacttgctcctgaatgactactgggcaaataataaaatgaaggcagaaataaagatgttctttgaaaccaatgagaacaaagacacactgtaccacaatctctgggacatatttaaagcagtgtgtagagggaaatttatagcactaaatgcccacaagagaaagcaggaaagatctgaaatcgacaccctaacatcacaattaaaagaactagagaagcaagagcaaacacattcaaaagctagcagaaggcaagaaaaactaagatcagagcagaactgaaagagatagagacacacaaaaaaaaaaacttcaaaaaatcaatgaatcyaggaggtggttttttgaaaagatcaacaaaattgatagaccactaggaagactaataaaaaagaaaagagagaagaatcaaatagactcaataaaaaatgataaagcgtatgtcaccactgatcccacagaaatacaaactaccatcagagaatactatgaacacctctacacaaataaactagaaaatctagaagaaatggataaattcc

SEQ ID NO: 756175 - DNA, 614 bp, Homo sapiens
agatttgctctgtttctggcaatatgacatgcattgaatacaaattgttttattcaacttagaccacggggcttatatttcattgtctgttctctcattatttgcaatagagtatatgtcagttttagttttcagtatygataaggaatttttgcttttgcatcatagatatgttttgtcactggtgaagagatgccattgtaaaccagaaaccacagcaactgttttttttttcaaggatgatcatgttaataatggccatttattaagcatgtgttatattctaggcatggtgccttacttgtaaacatcaatattaatttgatgttttcctttcatttaatggacctgtggacatatttttgcctgattcttatctaagcaattgaattacctcattttatgcacactgaattgatatgttatcaccctgttcttttgtcccatactggaaagacaagagcttactcatagcaagtttatcagaccgatggtgtgcccttttggattaatctcaacagtgatttcatttcatgccactatttttatttatgttgtatttttgttgatgtcatttttagcctattaaatctgctgtaaatacttttttatag

SEQ ID NO: 756176 - DNA, 558 bp, Homo sapiens
tgggttagggccttctttagggcctggaaagccacttctgtttcaggtgtccatcttactatatgggtattggctttctgagtttccttaattaatgtacataatggcctggctatttcactgtatctgggaatccatattcggcagaaggctgttatgccaaggaaccctcttagttgctttagggttttgggatgaggataagccagtatacgctggatacrttcctctctgagggccctggtgactttggataattttagccctaagtatttaacctgctgtgagcagagctgagccttttgtttggagccacaggtagcgaggaaatttaagagcgcttgggtggcttgatgccacaaggtttctgaatgggtggctataattaaatcatccccatactgaagaacaagaatgtccagctatgacaattggctcaagtcttgggctaatgcctggccaaatagacgggggctatccttgaacccttggggtaaaacagtccaggtgagttgagacattggatcttcaaaggcaaacaagaattgagagtcagga

SEQ ID NO: 756177 - DNA, 440 bp, Homo sapiens
ccctcatctcccaggctctgccggctccacaagaatctcctcaagggagtggggagcctcagtttcctcatcagtaaaatgggaatgatactgtcttctcctttaatgattgcatgagagtaaacgagacatttgtacttggtggctaacatctcccaaggtgttggtattgatacaggagatggaaattatttaggcagatggaaagggcaacagagtcctcsgcggaatttcccttttaacaaaaagcagccccaaagtcatttattttctaacaaagagtagcctgtaaaatcatgctgcagacatgaataagcaagctggaaacttgtgtgggtgaatgctggcagctgtgcccatagaaaagggctacctgagggccagcatgttcaacatggaggcgccatcttcccttttctctgtcaccacgtgtatagtac

SEQ ID NO: 756178 - DNA, 588 bp, Homo sapiens
tgcaatggctcacgcctgtaatcccagcactttgggaggccaagacaggtggattgcttgaggtcaggagttcgagaccagcctggccaacatgatgaaaccccatctctaccaaaaatacaaaagttagctgggcatggtggtgtgcacttataatcccagctactcgggaggctgaggcaggagaatcacttgaacctgagaggcggaggttgcagtgatctgggagcccaccactgccctccagcctgagtgacagagcaagactcagtattaaaaaaaataaaaagagttaggtgggaggaatgagtgccttctctgattcaggcgttctggcatgtcacctctaggggattgaagggggaccctcattctgtaggrcagagggataacctttcacctccatcccccagatgtgccccaggatctcctgtagacacagcctacctccccctcctataatcctcaccagcgagcacacttggggtgctggtgactcatcctggatcctaagggaggcttcctgaggatgggcctagtgaaccaaacttggagacagaaggtgagtatggagacagcggagcccag

SEQ ID NO: 756179 - DNA, 602 bp, Homo sapiens
ggggtttcaccatgttgcccaggatggtctcaaattcctttcctcaagtgatccactcacttctgcctccctaagcacagaaattacaggagtgagcccctatacctggcctgatggttaactttatttcttcacttgattgggctaagggatgcctagttagctggcaaaacattatttctgggtgtatctgtgaaggggtttctgaaggagagtagtgtttgagtcagtagactgaataaagcaggtgtccttcaccaacgtggacaggcattatccaatcctttgagtgccttaatagaaccaaaagatggaggaaggatgaatttgccgtctctggttgagccaggacatgcatcttctcctgtcttttgacatcagcactcctagttctcaggccatcaaacttggacctaracttacaacattggttccccagttttccaaccttcgaacttggactggaaccacaccaccagctttcacgagcttccagcttgcagatggcagatcctgggacttctcagcctccataattgcacaagccaatccatcaaaacaaatcctcatttcatacatacatacataatacatatatatat

SEQ ID NO: 756180 - DNA, 558 bp, Homo sapiens
acttgtgccttcagaaggccctgttagggcctaatcacaaatataccacttgcatttgagaaccggatgttgtgtgctatgcacgcccaactttatggcgtggcgggtcagattacatcagttcatgatgggcagctagggttgcacggtaacttggtggcccatggtcaagcatttagtctctgctaaagcccagtagtaggccaagagttgtctctcaaaaggagagaagctatccaaggatgttggcagggccctgctccaaaattttttttttawacttttttctgcctttttttttttttttttttttggtaaaccaaaccaacgataaaacaactatttgaaattttacactaatgtagagattttgctggtcccccacataaaaatactatttccttgcaaaacaatccccaattgcaatggtgggttactcccagttcatcagaccctatcgagcaatgcactctcattccccacacctggctaactattgccattaatgtaaaccacagcaaaaggggataaacagtttagcaaaactctacacaactg

SEQ ID NO: 756181 - DNA, 612 bp, Homo sapiens
ttttcccactttaatatctctgaaatcagggtgtatcttacaaccaatgaagctttgtttctcttgatggaatacaaaagtaaaaagtaccacttatattggtgctatcttaaattcgataaaataaggtatataggaaagtatttaaaatgtatataaatgcaaataaacagcttttattatttgatgtgaatattaaatatcagtgttaaacattagattttgaaacattgttctagggtggcataagaacatagttccaggacaacattctagcacattcccttgtaaaatcagcactgtgtatatctcttctctattctgccatattttgtaagacgttagaagtcagagacccagggaaagatacctcttgatattctctacaaaaagagcaataaagagcagtcaggaagccctgcaagtgaaataatgagcaaaamgtttgtatgaaaaaaggaactgggccaggcgcagtggctcacgcctgtaattccagcactttgggaggccgagctgggcagatcacctgaggtcaggagttaaagaccaacctgaccaacatggcaaaacctcgtctctactaaaaatacaaaaattcaccaggcatga

SEQ ID NO: 756182 - DNA, 676 bp, Homo sapiens
aggaagcaatcatgatgaatgagggatccagcatctcattgtccgttgtctggatgtggtgatctggtgagtttcagttctttttctgtttttgagacagagtattgctctgtcgcccaggctggagtgcaatggcaccatcttggctcacagtaaccgctgcctcctgggttgaagtsgttctcctacctcagcctcccaagtagctgggattacaggcacacaccaccacgcctggctaatttttttgtatttttatttattttattttattattattattattttttgagatggagtcttgctttgttgcccaggctggagtgcagtggcgccatctcggctccctgcaacctctgcctcctgggttcaagcaattctccttctcagtctcctgagtagctgggattacaggggcccaccaccacgcttggccaatttgttttgtatttgaacccctgaccttgtgatcagcctgcctcggcctcccaaagtgctgggattacagacatgagccactgtacctggccatttttttgtatttttagtagagacagggtttcaccatgtaggccaggctggtttcgaactcctgaccccagtcctcctgcctcagcctcccaaagtgctaggattacagacgtgagctactgcgcttggctgaatttcagttctt

SEQ ID NO: 756183 - DNA, 569 bp, Homo sapiens
gctagtaccatagttcattccaagtctaaaaccctcaaaaccagagaagctgaaagtacagtacccggtctgaggctgaaggctgaaaacccccaagaggccattgttacaggtctgaaagaccaaaggccaatttatccatttcttttaggttttccaactggttggcatatagttgtggcatgatgccacaagtggaaagtttcacacttgacctcttgtgatgggttgcagtcaaaactatatttcatttacaaaattatttaaaatgttgcataaggctgggtgcggtggctcacatctgtaatcccagcactttgggaggccraggtgggtggatcacttgaggtcaggagtttgagaccagcctgaccaacatggtgaaacccgtctctactaaaaatacaaaaaaattagctgggcttggtggtgcacacctgtaatcccagctactcaggaggctgaggcaggagaattgcttgaaccaggagacaggtttcagtgagccaagatcatgccattgcactgcagcctgggtgacaagagcaaaaaaaaaaaaaaaaaaaaga

SEQ ID NO: 756184 - DNA, 587 bp, Homo sapiens
atcagatcaagtttattttctgaccacaatggaatataactggaaattaataacgaggaacttttgaaactgtacaaatacatggaaattaaataacatgttcctgaacaaccaatggatcaaggaagaaattaagagggaatttttgttgttgtttttttgagacagggtctcactctgtcatccaggctggagtacagtggcatgatctctgcttactgcaacctccacctcccgggmtcaagcaatcctcccacctcagcctctcaagtagctgtactacaggcatgcaccaccacaccaggctaatttttgtattttggggttttgccatgttgtgcaggctggttctgaactcctggactaaagcaatccacccgcttggactcccaaagtgctgggatcacaggcaagagccaccatgcccagccttaagaaagaaatttaaaagtttcttgaaacaaatgaaaatagaaacacaacataccaaaacctataggatacagcaaaagtagaattaaaaggaagtttatagcaataaacacctacattgaaaaagtagaaagatttcaaataaacaacctaat

SEQ ID NO: 756185 - DNA, 623 bp, Homo sapiens
cactcagaggaaaggcagccacagttggagaatttatatgagcatgtcaactggtggggactgaaacacacaaagccaaaatattggctatggtattaaggcctcctaaagtgaaaagggagagaaacccaaattgttttctatgtggagagccaggtcatatgaagagagaatgcctcaataatagagaccaaggtaactcaggaaaagaatccccttctatatttccccgatgtaacaaggggaaacaatgggcaaatcaaggcaggtccaaatttgataaaaayggcaaccctataagtaaccaggtgggaaacttcatgagggggctggccccaggccccgcttcaaactggggtaatgccagtggctttcctcggtcagatggaaagcccacagtcctctctctcagagcagccaccgctggaagcgcaggactggacttactctgccccgacgaattaatgctaaaagaaggagaagaccctaaaagggtttgcaactgggatctggggcccactgcctctgggaacagtgggattagtcccagagcgatcgcgcctatccagtaaaggaattaatgtgctcaatggggtaactgatagtaattatcaaggtcagat

SEQ ID NO: 756186 - DNA, 623 bp, Homo sapiens
cactcagaggaaaggcagccacagttggagaatttatatgagcatgtcaactggtggggactgaaacacacaaagccaaaatattggctatggtattaaggcctcctaaagtgaaaagggagagaaacccaaattgttttctatgtggagagccaggtcatatgaagagagaatgcctcaataatagagaccaaggtaactcaggaaaagaatccccttctatatttccccgatgtaacaaggggaaacaatgggcaaatcaaggcaggtccaaatttgataaaaacggcaaccctataagtaaccaggtgggaaacttcatgagggggctggccccaggccccgcttcaaactggggtaatgccagtggctttcctcggtcagatggaaagcccacagtcctctctctcagagcagccaccgctggaagcgcaggactggacttactctgccccgacgaattartgctaaaagaaggagaagaccctaaaagggtttgcaactgggatctggggcccactgcctctgggaacagtgggattagtcccagagcgatcgcgcctatccagtaaaggaattaatgtgctcaatggggtaactgatagtaattatcaaggtcagat

SEQ ID NO: 756187 - DNA, 542 bp, Homo sapiens
aggtttgggtatgttgcattttcattttccttcacctcaaagtgttttctaatttcatttgtaatttattctttggcccattggttgtttaagagtatgttgttttaggccaggcacggtggctcacacctgtaatcccaacactttgggaggccgaggtgggcagatcacaaggtcaggagatcgagaccatcctggctaacacagtgaaacsccatctctactaaaaatacaaaaaattagctaggcatcgtggcgggcgcctgtggtcccagctacttgggaagctgaggcaggagaatggtgtgaacccaggaaacggagcttgcagtgagccgagaccacgccactgcactccagcctgcatgacagagtgagactccatctcaaaaaaataataataataaaataaagagtatgttgtttaatttccacatacttgtgaatttcccaggtttccttttgttattcatagctagtttcattccattatgaccacagacaattttttgaataatttcaatcttttaaaatgttattga

SEQ ID NO: 756188 - DNA, 606 bp, Homo sapiens
atttcccaggtttccttttgttattcatagctagtttcattccattatgaccacagacaattttttgaataatttcaatcttttaaaatgttattgaggcttgttttgtggcctaacatatggtctacctaggataatgttccatataccattgagaaaaatatayattccactgttattgggtggagtgttctatataagtctgttaggtctggttgttttacagtgttgctcaagtattcagtttcctttctgatcttctgtctagttgttctataaagtctccaattattattttagaagtatctatttctcccttcaattctgtccatttttgcttcctacattgggggctctgttgtttggagcatatatgtttataataccttcatgatggattggctgtttatcaatatataatctccttctttgtctcttgtaacaattcttaacttacagtttattttgtctcatactataaccaccccagctctcttttggttactatttgcatggaatcttttcccatcctttcactttcaacttattgtgtctctggatctaaagtgaatctcttgtagcatcacatttttaaaaattcattct

SEQ ID NO: 756189 - DNA, 591 bp, Homo sapiens
actctcatgcaagaaaaactctgagccaacaaaagagaatgaaagaccatatgccaaagaaagagaccagcttgaacaaaagcacaggaatcaagaaaggacactgcatgttggggaataataatcaatccaataaaggcatggagggagagggggtataagaagatgaattataggctgaggtgggcagatcacctgaggtcaggagtttgagacaagtatgtgcaacatggtgaaaccttgtctttactaaaaatacaaaaatgagccaggcatggtggtgcacacttgtaatcmcagctacttgggaggtggaggcagaagaatcgcttgaacccaggaggcagaggttgcagtgagctgagttcgcactccagcctgggtgacagtgagtgagactccatctcaaaaaataaaaaaaaatttaaaaattaaaaaaaaagataacgaattatgagagacaagttgagggcaacttgtggagaattttaaatgtctctataggaaaaacagatgttatcctgtagattgatgagaacttgaatgatttttaagtaaaggagagggagatatatagagcttagaaaagta

SEQ ID NO: 756190 - DNA, 643 bp, Homo sapiens
attaattggtgaagttcttgaaaaatgcatccttcctgcctttacgaagtatactctcatattctgacactgtaaagctatggctcagatagtcaaatcctagtttttagttcaatgttttaaagccagactaatttgtgccttctccatgtgattgctaaacatggaaggaaagataggattytataatcagaattgtaaatacatcactgagatgcatttcaactttttgtttatatccccatttatttccatgcatatcagtaggatatagttattattaatgatgattcttgataaattctctgaaacattttggattcaactagaggaagacagtaataaatgccagtatcaaatcaaaaagatcccccactaataataatgaaactttaggcaaaaaagcatgaatataattaaagtataggttagatggtataacctatacttaataattagaaaagtttgttatcaaccaaatcaaataaagacatgaaaaaagaaagtggataggaaagtaacattttgtctaaaattttaattccagtatgtgtttcttttactgagctactactttgttaagctgcggccctctctacacttccccctttgtagtttctgctaccttctgccttccttttcc

SEQ ID NO: 756191 - DNA, 613 bp, Homo sapiens
gagaaaatcatgtttgtacagacaatttaaggaaaataaatggagacaataaatatgggctggttttccatgagaggcttggtgtcttcttttaagtatatcacaaagtccaatgtggacaattcactttaaaagtgtgagatgatggaaaatgggggtaggagatttttgagacaggcaaacaattggcccagagacatggaagraagagaaaattttaaaagtctctttaattattaaaaaatgaaatacataagtgatggtgctgatacagattatctaaaagcactttttaaaacaccaaaacatttaaaaatgtttttctaaatggcatagaatacatatcctgggaatgatactaagttcatctgttctgatgtatctttacagacgataggctgtaagcgccaaccaaatattagcaggtaaactttacagcagggaaatgttcggtaatgccctcatagttaaggaaattccaaatgtatttactacaacacactgtagagtaagagactggtatttgggttgagttttagctctatctatcacttattatttagcatgtcccctaatttctatggtttgtcattttccaaataaaaattgttta

SEQ ID NO: 756192 - DNA, 574 bp, Homo sapiens
caggctgctataacaaaataccatagattgggtagcttataaacaacaaaaatttatttgttatgtcctggaggctgggaagtgcaggatcaagcgtgccgatagatgcagtgtctcccgagggcatgcttcctggttcatagccattttgctgtgtcctcatatggtggaagggggtagatatctttggggttccttttataagggcactaactcgcctcatgagggatctgccctcatcctataatcacctcccagaggtctcacctcctaatgytatcaccttggcaattaggatttcaaaatttgagatttggggaacacaaaattttgaccatagtagtcacctttcacaaagagcaaccttcacaaagcataaagctttgctttgaagcagctcagtaatagattaagtatgtttgaccataacagcctgccagatatctcatccagagactcaaattagctctatgatatttcatataaaatcctgactttcaaattaccaagaatggaaggaaatgacattacataaataaaatctatgggaaaataaatggaaaatagacacaga

SEQ ID NO: 756193 - DNA, 639 bp, Homo sapiens
ggttgtgtgctccttatgagaatctaatgcctgatgatctgaggtagagctgaagtggtggcaggctttatagtggcaagtgagttgacgtacttcaatggtacagctgcatctggtgggaggctaagtcagaatccaacacttattttagtctgcatatggcccacccattattttatttaccacttccattcacacctctttcccacactgyacaacacttgtctcagtcacagttttggtaagcccacaagctaaccctagccaaaatgaggacaaaacgccctggagagcttctttgaaaaggaggaaagacccagtgatgagccagcagaagactctgagactgccaatccaaaaaaagctgcatttaatagaaaataccaagagtcctacttgaattacgtgttcactgcaacaagtgttcacattctccaagctcatccaacaaagccatgaatctttcaaaactgctttgcctcatggagaccaatcaccctgcattaaaagacacgactttggagttgtttttttgttttgtttttttgttttttgtttttaagtaaagtgaacacaaagagcagaagcaattattgaaggccaccacttcatcaaatgtgtctacactgaaacgatcat

SEQ ID NO: 756194 - DNA, 639 bp, Homo sapiens
ggttgtgtgctccttatgagaatctaatgcctgatgatctgaggtagagctgaagtggtggcaggctttatagtggcaagtgagttgacgtacttcaatggtacagctgcatctggtgggaggctaagtcagaatccaacacttattttagtctgcatatggcccacccattattttatttaccacttccattcacacctctttcccacactgtacaacacttgtctcagtcacagttttggtaagcccacaagctaaccctagccaaaatgaggacaaaacrccctggagagcttctttgaaaaggaggaaagacccagtgatgagccagcagaagactctgagactgccaatccaaaaaaagctgcatttaatagaaaataccaagagtcctacttgaattacgtgttcactgcaacaagtgttcacattctccaagctcatccaacaaagccatgaatctttcaaaactgctttgcctcatggagaccaatcaccctgcattaaaagacacgactttggagttgtttttttgttttgtttttttgttttttgtttttaagtaaagtgaacacaaagagcagaagcaattattgaaggccaccacttcatcaaatgtgtctacactgaaacgatcat

SEQ ID NO: 756195 - DNA, 590 bp, Homo sapiens
aacaaagccatgaatctttcaaaactgctttgcctcayggagaccaatcaccctgcattaaaagacacgactttggagttgtttttttgttttgtttttttgttttttgtttttaagtaaagtgaacacaaagagcagaagcaattattgaaggccaccacttcatcaaatgtgtctacactgaaacgatcatttttagtggctaaccacactgctaagctaagaagccatttagcattagtgaagagttgatcctgcctgctgctaagaacatttgtcttgaacttctaggagaggatgcccttcaaaaggtgacacgccttccccttttggctagcaccataactagacgaactgatgaagtagtagaggacattgaggcacagttggtaaagaggattaatgagtcaccatgttacgcaatccaggttgatgagtctaccgatgttgacaaggcaacaatgcttgttttgcgcaatatatttttcaggaggatgtgcatgaggatatgttatgtgcgcttttgttgccaaccaacaccgcaactgaattattcaagtcttgaataacgacatttcaggaaaactgaa

SEQ ID NO: 756196 - DNA, 632 bp, Homo sapiens
agacaactataaatgtgcaaaaaaaacctgattcatagttctttaaaatcttcataatcaaagtattttcttccagaagccaagatgtgtattttcagaattcttttctttgcaaataacagaaacccatctcaaaacagatgaagaataaaatgatgaagactaggaataaaaatggctactggaatatctgtagtgaaataatgctatatgagtctctctccttcagacaattctcttttttgtggtaggcaagatggctgacctatatcctgccaacttaacaagcccaatggagagtaatagtttcactaatatttatggtgaaaagctagagaagaagtgttctgactgagattacatgccacttgtccattccttaaccmatctctttagctaaagggagaaatactcggattgattggatatggaggtcatgactactcttgtaattgatgagtggagtgaatagggctatctcagccacagaaccacaggaaaaagtgcttcttatactggaaaggtctatcataattctcaatgtaatctgtcatagaccaatcacctgactattatttacaatacgatttctaggcaagtttcatgattcaaatctccggaaaaggggaggc

SEQ ID NO: 756197 - DNA, 616 bp, Homo sapiens
gtaactgaacaaaagacaagtgctgctggatggtagataagatagatggatgaatataaaatgtatagaaagggagagtgctggaaaagcatcacaaaagtagaagctgaaattacctgaccatcaaattctaggaagtcaatctagtagacaccctattataatgttgtaggaatgatgacaatctttttgagccaggaatcatgcggtccytaagacaattaggtagtttgataagatgcaaagacctctgtaaacaataccaatgcaatagaataattctgatgcattggagaagattaatcacatatatatctttaaaaaccagaagatgggaggaaataatctcagaaggagtatcttctcatacagagaacaaaaacaacatgcttaatagtcattcaattttttaaggaaaaatttgagagcatcttaatagggcttgggagtcacccatctgaccatatccatcttcttgcagttatttaaaggtaacttctttccttcttatttttgttccttcttccctcaacccctctccttccctcctttcccttcctcttccttcaccaaatatttattacatttgcactctatgtcaagaacttcgctaaac

SEQ ID NO: 756198 - DNA, 599 bp, Homo sapiens
actatcaattaatgtgcaaagtaaccagctagcatcacaatgacaggatcagagtcacacataacaatattaaccttaaatgtaaatgggctaaatgccccaattaaaagacacagactggcaaactggataaagagtcaagacccattgatgtgctatattcaggagactcacctcatgtgcaaagacatacataggctcaaaataaagggatggagaaaaaattatcaggcaagtggaaagcaaaaaaaaagaaaagcagaggttgcaatcctagtctctgataaaacagactttttaaaccaacaaagattaaaaaaaaaaaaaaaagacaagggcattacataatcataaagggatcaattcaacagaagagctaactatcctaaatatatacacacccaatacaggaggacccagattcataaaacaagtycttagagacctgcaaagagacttaaacaccccactgtcaatagtagacaagacagaaaattaataaggatattcaggacttgaactcagctctgcaccaagtgggcctaatagacatctacagaactctccaccccaaatcaagagaatatacattcttctca

SEQ ID NO: 756199 - DNA, 568 bp, Homo sapiens
agagtatttttgattaacggtttttttttttaaattctgtgctgtgatatatcatgctattctcccttggcctgcgaagtttttgctgagagatctactgatagcattttaagggttgctttatatatgattagttgcttttctcttktcactttcacaattctgtctttgttgctgacttttgacaatttaattataatgtatcttggtgtagtctcctttgtgttgaaaattttcagctccatttttggaaaatttgcagcttcctgaatcttgatgtatatttctttctcaagatttgggaagttttcagcttttatttctttaaatgagatttctttccctttctttctgtcttcttcttagatacccataatgcttacattggtttgctttatggtatcgtgtaagtcctgtagattttcttcactctttttttactttattcttctctaactgaagaatttcaaatactctgtattcatttttgtagattctttcttctgctttattgagtcttccattgaatctctctattgaattcttaaatttcatttattgaattctt

SEQ ID NO: 756200 - DNA, 598 bp, Homo sapiens
ctgtgatcaagttcagcctgaaagatggaggtttagaggaaaatagaaatcgattgcagtaacaagcatgacgaatagtgtgccaggagaaacaaacctagactgaaggtgtgagcgctcgagtttacaaagtcaagttttgcattggtttggctggtggggaaactctagaatgccatgcagcagaaatgaaaaagtaacatctcagaatctctgatcattttggatgtctatcaataaacctagcatggcagattagcrgagaataagtcaagaagaattatgaccagagaagattaattgaagtcaaggttcctatgactaaatttgtttatatctgggtgctgagttagaagcccaactagttcgtctgcctcacttttgtgttgctaatttctttaaaaaaacaacaacaacaaaagatcatcatggcagatgggaggcaggactagattgcagctctgactcagatggacagagcagtgtgcagaggcttgcatcatgaattttagctccagaatgacaagaataaaccagaaatcctgagaggatccacagaccctctgaaagaagcggactgttcctgcaggacctggaa

SEQ ID NO: 756201 - DNA, 529 bp, Homo sapiens
ctccagaactttttccacctcccaaaactgaaactctgtacccgttaaacactaactccccatttcccaaacctcccagcccctgataaccatcattctactttctgtcagcaaatctgactatgttaacttcctcatataagtagaatgaaacagtatttgtttttctgtgaccagtttatttcacttaacataatgtcctcaatgttcatccatggtgcagtgtcagaattttcttctttcttaaggctgaataatatcactttttatgtatatgccacattttgtttattcattcatctgyggacatttgggtagctttcttcttttgctgcttgtgaataatgctgctgtgaacataggtgtacaagcatctgtagagttgctgctttcaattctgttgggtatacacctaggagtgaaattactgggtcatatggcaattctatttttgccttttttgaggaaccaccacattgttttccataatggctgcaccattttacatttccatcatcagtggacaagg

SEQ ID NO: 756202 - DNA, 619 bp, Homo sapiens
tgaagcttacagcattttagtgaaactcacatagatcaatgtaagtatatatttcatatgacacagctctcaaactagacaccaaagagttctggtatccatgcattagtcagaaaaatcttagtctaccgccataccaccttgaacgtgtctggttccatctgatcttgaaagctaagctggggcgggcctggttagtatctgaataagggatcacgtgggaataacgggtgctgtgggcytaaaagaaatttatttggtgttttatcttttcggaccatttgggttttcaaaggcaacagctcaaatcaaaccttaagcagaagttttaatttttagaggtttttttctgtcattctacagtctttgctactttcatgttaagaatttcctccattactttaaatatttatttacctatggctttactgagaagacttatacatatacatacatatgtataactggatttatacgtatatagctatatgtaactatttatacatatatagctatatgtaactattcacatatatcaacaagtaacaccctgaatcctaattgtgattgatgtaaagctgtttgtttttatagactgaagtttatgcccctctgcaga

SEQ ID NO: 756203 - DNA, 490 bp, Homo sapiens
cagctactcgggaggctgaggcaggagaatggcatgaacccgggaggcggagcttgccgtgagcagagatcacgccactgcactccagcctgggcgacaaagcgagactccgtctccaaaaaaaaaaaaaaaaaaaaaattcctaagcctagctggggaaggtgaccacacccacytttaaacacggggcttgtaactcagctcacacccaacaaatcaggttgtaaagagggttcactaaaatacaaattaggctaaagcaggaggtaaagaagtagtcaaatcatatatcgcctgagaacacagggggagcgacaatgatcgggatataaacccaggcattcgagcagggtgtgggtaaccccctttgggtcccctcccattgtatgggagctctgttttcactctgttaaatcttgcaagtgaacactcttctggtctgtgcttgttagggcttgagctgagctttcgctcaccatccaccactgtt

SEQ ID NO: 756204 - DNA, 511 bp, Homo sapiens
taaaaatactaaatattagctgggcgtggtggcaggtgcctgcagttccagctactcgggaggctgaggcaggagaatggcatgaacccgggaggcggagcttgccgtgagcagagatcacgccactgcactccagcctgggcgacaaagcgagactccgtctccaaaaaaaaaaaaaaaaaaaaaattcctaagcctagctggggaaggtgaccacacccacttttaaacacggggcttgtaactcagctcacacccaacaaatcaggttgtaaagagggttcactaaaatacaaattaggctaaagcaggaggtaaagaagtmgtcaaatcatatatcgcctgagaacacagggggagcgacaatgatcgggatataaacccaggcattcgagcagggtgtgggtaaccccctttgggtcccctcccattgtatgggagctctgttttcactctgttaaatcttgcaagtgaacactcttctggtctgtgcttgttagggcttgagctg

SEQ ID NO: 756205 - DNA, 687 bp, Homo sapiens
aaggtatgggctttaggtacagctggatccagggatttgaataacaccgtaaggtctgtcactctcttcccaccttcctccttctctctctctgtctctctctctctctttctctctgcatttcttggctctgtcgggctttttatccaactcactgtgtccatttgaaaaaaaaattggaccccacaattccagattcaccttgtctttggaactcatatttcaggggagtgagaaggccaacactctgcaacattcaaattaatttcccccaaagaactctcatttgccatatattggtcataaatgtgtctagatcaatcgctgagaccggacaattagtgatctgattggccaactaggtgcaggtatctgttgggatgaccaaggcacatatttgaaagttcaagtaaaattgcttaaaataggcagtggcaggagggaaaagatgctgggaaacagaaacatagcagaaggccaatccacaggtcttctaccatcctggctctttataggagatcatctagtactcttgggcttctacgtgtaycccagctctctaggtagattctgatctgtgacaagcacagtgaggctaacatgccttactaccttacaatgtacaattattaacagagtttagagttttctctttgatttttttgttagcagcttcatcacattgct

SEQ ID NO: 756206 - DNA, 568 bp, Homo sapiens
caggtgcggtggctcacgcctgtaatcccagcactttaggaggccgaggcaggtggatcatgaggtcaggagtttgagaccagcctggtctacatggtgaaatcccgtctctactaaaaacacaaaaaattagctgggcatagtggcgggcacctgtaatcccagctactcaggaggctgaggcagaagaattgcttgaacccggaggcagaggttgcagtgagtcgagatcacgccactgcactccagccccagtgacagagtgagactctgtctcaaaaaaaaaaaaaaaaaaaaaaaaraaaaaagaaatgccttggcccccttaaaggtgattaaaggatgttggaggatagtctggggtgagagtgacaaagcctcatcttgttctcttcagatggaaatcaccagtacctgggaatatggatcaactgtgctattaactttacccaaaccaccttaaaactgaatcatgaatatacaacgccttctttgatgacatagtgtggtggttttgaaatatatccacaaattatttgatctttctcccttcaggacatagagttta

SEQ ID NO: 756207 - DNA, 604 bp, Homo sapiens
tttgaggtggcttcatccctctcttctcccaccagaaagagatgggagcttccacttcaacctggggtgaagacagagaacaaggtgtcccagcattttgcacagaaccaaagccctggaaattctggtggaagctagacattcagagtcatcaagctaacagtcacttcctgctatgtgccagatactatgcttttcacagacatctcatttacatttcccagaacatcaggttggagtgcagtgacgtgatgcaatcatagtttcctgcagccttgaacttctgagttcaaatgatccttctgyctcagcctcccaggtagctaggactacagacatacactaccacacctggctgagtttgtttgtttgtttgtgtgtttgtttgtttattttgtagcaatagcatttcactgtgttacccagagtggtctccaactcctggcctcaagcaatcctctcgcctccactttccaaagtgctaggattacaggcacgagccactgtgcccaaaagttaagattcttgtagctgctttatagaagatgaactgaggatcaagaaggtgagacttgatgtgagtcagatagtgaatatgctatag

SEQ ID NO: 756208 - DNA, 593 bp, Homo sapiens
cttcaaataatctggaaaacaacccagagtttatttctgccaaatggctccctgtttcttgaactggcatgctatggtgtttgcattgaccaaacttctgcgtggagcctttgttcttagaggttgtcatgtgaaaagtttcaatcatctttctaatatgtccttgtctgtgacatggtcccagtccttattttcatccaaagagcatgttgttccttcttctttatttccacaatactttatacataccctctatattaatataactataatattaatgtatacttattatataagaaatatatatcagctatcaatataaataataactagcacataacacctactgtgagccagtttctgtcctgaaacatttgatttgtgtttactcattgactcatacaaccaatgggagtagacacaattattagttgtgttttgcaratgaggaaactaaggcaaagagaatttaagtaacttgctcagggtcacatagaaactaactggaaaaattgagatttcgacccagttagtctagcctgcgaatctttactctgagctactttttaactgattctcaatgtatagtcaca

SEQ ID NO: 756209 - DNA, 601 bp, Homo sapiens
ccctgggcatagcctggctcttgtttgaaatgtgtggtacttctatgtgacaagatatagaataagtcattggaagaaaaactgtcctattactatattttatataaaagtgtatcttgtgttataatgggcctggtatacagagggtgcttagcaaatcttccgcagagctgaaactgagctgaagctacggcccccttctctgcttgctctcctttattctctagagtgctgcttcccaatgcgtggtccatggaccaagcagcttcagcatcacctgagcacttgtcagaaatgcagcacctaggcgcygcaccagacctgttgaataggaatctacattttcacaagattccagatgatttgcatacacagtggcatttgagaagcattaatccaggggcttctttgcagtcagtgatggtgatttgccaatcattagcatttcagaaaccccaggccgaaaccatacatttatccttagctaggtcggtatcaagtttctctgctttcatccagaatcctaacaattcagcttggttgattatctaagaagcttctatttgataattatatatctttcattttttttaaagtgctg

SEQ ID NO: 756210 - DNA, 571 bp, Homo sapiens
cttctgatcttgggctttttttttttattgttgataggctttttattactgattcaattttggaacttattattgacctgttcagggattcaattttttactggtccattcttggaagattgtatgtgtccaggaatttatccatttcttctaagttttctagtttgtgtgtttagaggtgttcatagtagtgtctgatgctttttgtatttctgtaggatgaatggtaatgtcccctttatcatttctaattgtgtttatttgtatcttccctcttgttttcttcatcagtctacccagcagtctattgatcttactaattttttcaaacacccaattcctggattcattgatcttttctgtggtttttcatatatcaatttgcttcagttcagctctgactttagtgatttcttatattctgctarcttttgcattggtttgctcttgcttctctagttcttctagttgtgatgttaggttgccaatttgagatctttctaaccgattgatgtgggcatttagtgctataaacttctctcttaacactgacttagctgtgtccaagaga

SEQ ID NO: 756211 - DNA, 589 bp, Homo sapiens
tttgatcagattattgttttttctcttatagagttgtctgagctccttatacattctggttattaaacccttgtcagaagggtaaatttgcaaatattttctcccattctgtgggctgtcacctcactttgttgattgtttcctttgctgtgcagaagttctttaacttgatgtgatcctatttgtccatttttgctttggttgcctgtgtttgtagggtactactcaagaatattttgcgcagaccaatgtcctggggattttctccaatgtttttgtagtagttttatagattgaggtcacaggcttaagtctttaatctattcttttttgattttttatatatggtgagagataggggtytagtttcattcttctgcatatggatatccagttttcccagcatcctttattgaagaaactttttcccagtgtatgttcttagcacctctgtcgaaaatgagttcactatatatatgtggatttgtttctgggatctccattttgtttaattaatctatgtgtctgtctttatgccagaaccatgctgctttggttaccatagctctgtagcataatttgaagtcag

SEQ ID NO: 756212 - DNA, 513 bp, Homo sapiens
gtcactaggtcaatgaacataatattttaaacaacttttttttctgagcagtaggcctcaactaaggcttaaaaatatttagtgaatcatgctgtaaataggtgctgtttccatttatagagcacaagcggagtagattcagcataattcttaagggccctaggatttttggagtgataaatgtgcattggcttcaacctaatgccaccaratgcactggtcccctagcaagagagtcagccagtcctctgaaactttaaagccaggcattaacttctcttctgtagctatgaaagttatagatagcattgttttccagtaaaaggctgtttcacctatacagaaaatttgttgttgaatgtagccaccttcatcagccatcttactgagatcttctagataacttgctgcagcttctccatcagctcttgctgccgcacctgcgttttatgttctggagatggcttctctccttaaacctcatgaaccaacatctgctagcttcaagctttt

SEQ ID NO: 756213 - DNA, 647 bp, Homo sapiens
gagtagaaggctcaattaattaccagatcaaaattgggctgggatttgctttgtaaactgctaagcagtttaactgggttgtagagaaagactctatatgacattaaatgaccttcctaaaagcttatttctcccccaactgctcatgttggaatcaatttcaggagtcattcacaatgagtggtttattagctttctcaatgcatttactacatgccagatgtccagctcacaccagcctgctgcttgcctttcactgaccccttcgatggatgctacggacttggatccactgccaaggaaacacgtcacagagcagtgtgtggttggcatactaagctccaccaagaaagaagacatcacccaggtgtgggcaaaagggatgatattaccaagcaaggtcataatgatgacacaaaatagatttttccccgttgaatttasaaatacgttgtgtcctcagacctctcagtgtgtttcaagcgttgaaaaatccctttgattggaaccaaattgattaaaactaaatgtagaaaagaccttcttgacagttccagggctattctatagctggcttgaatttgatttttaaaaaacatctcattaatccaaagtgttctgcataagagatctgtacatctgttttt

SEQ ID NO: 756214 - DNA, 526 bp, Homo sapiens
tcctcatctcactcctcacaattgagcagcataatgtctactgtttcttttctcttatcccattctatgaagccttgttctaaaattgctaggaattacaagacagcgagagtagctcattaagcctgggacctcagaatgtgggattctgtgggactgcatggggtatacaggttcacaatgaagatcacctgcttgccggcaaggagacattgagtgcttcttagtttgaggtctaagaactgagtttcagttccagstcagcctctccctcattcaatgacaccgccaggcactgctcctctctgagcctcagttttcttatctgcattttgaaaatataaatatgcccctcataaggttagttttacaatttaaataaaatgatgaacacaaagttctgttatcagcattgaggccacacctaccataacattttatatatttttctatcatttttaaaactaaccagggaaaagactactatagcgcttacgatgtaaggcagtcataatttgggaatgac

SEQ ID NO: 756215 - DNA, 515 bp, Homo sapiens
tcctgagaccctgtctgaaaaagggggatgaaaattaccagggtcatctctcaccaaatatggctctacgccggagctggactcattcttcacaatacatggctgcaacatgtcaggtgaggagaaacccacacaattcgctacaaagggctcctgggggaaataagcacgtcagtaaccaagtcggatttttagaaggaaccccagttggagctctgcagtrggaaagcataagtgtgcatttgacaaacagtaagaaggtggatctgcagagcaaagaatcctgcacaaaattcacatttaaggggtggggtgggaagagatggatagtcagatcattaagtgaacattattcttagcagagagaatgccaaaggggaaaaatcttctgaaatcatgatgtaaagacttgcaccagaatcaccaggtgtacctgtaagaactcatattcctgggtgtgacatcagcactctgctgagtcaagcccagcggatcctgaggtggactgaggagtg

SEQ ID NO: 756216 - DNA, 597 bp, Homo sapiens
tatgcacatgtgtgttcactgcagcactattaacaaaagcaaagacacagaatcaacacaaatgcccatcaatgacatattggataaagaaaatgtggtacatatacactatggaatactatgcagccatacaaaagaacaagatcatgtcctctacagggacctgggtggagctggaaacygttatccttagcaaactaacgtaggaacagaaaaccaaatactgtatgttctcacttataagtggaagctaaatgatgagaacactggtcacatagaggggaacaacacacattgaggcctttcggagagtagaggttaatgggtgggagaagggagagaatcaggaaaaattactaatgggtagagggcttaatacctggctgatgaaataatctgtacaacagacccccatgacacaagtttacctgtgtaacaaacctgcacttgtactcctgaacttcaaagttaaaaaaaaaaacacttaaagtaaaaataaaactgtacaattaatgagactttttataagtcaaaaaagccattaaataatattctcttgcacgttacatattgaatttcgctacaaccttttctgtt

SEQ ID NO: 756217 - DNA, 597 bp, Homo sapiens
tatgcacatgtgtgttcactgcagcactattaacaaaagcaaagacacagaatcaacacaaatgcccatcaatgacatattggataaagaaaatgtggtacatatacactatggaatactatgcagccatacaaaagaacaagatcatgtcctctacagggacctgggtggagctggaaactgttatccttagcaaactaacgtaggaacagaaaaccaaatactgtatgttctcacttataagtggaagctaaatgatgagaacactggtcacatagaggggaacaacacacaytgaggcctttcggagagtagaggttaatgggtgggagaagggagagaatcaggaaaaattactaatgggtagagggcttaatacctggctgatgaaataatctgtacaacagacccccatgacacaagtttacctgtgtaacaaacctgcacttgtactcctgaacttcaaagttaaaaaaaaaaacacttaaagtaaaaataaaactgtacaattaatgagactttttataagtcaaaaaagccattaaataatattctcttgcacgttacatattgaatttcgctacaaccttttctgtt

SEQ ID NO: 756218 - DNA, 643 bp, Homo sapiens
atggtcttgagcagctctgcccctgtggctttgcagggtacagcctccctcccagctgctttcatgggctggcattgagtgtctatggcttttccaggtgcatggtgcaagctatcagtggatctactattctggggctggaggacagtggccttcttttcacagctccactaggcagtgccccagtagggactctgtgtgggggctccaaacccatatttcccttctgcactgccctagcagaggttctctatgaggaccctgcccctgtggcaaacttcttcctagagatccaggcatttccatatatcctctgaaatctaggcggaggttcccaaacctcaattcttccttctgtgygctggaagctcaacatcacgtggaagctgccaagacttggcacttgcaccttctagagccacagcccgatttataccttggacccttttagctatggctagagcagctggatgcagagcaccaagtccctaggctgcacacaacagggggaccctggggcctgcctacaaaaccattttatcctcccaagcctctgggcctgtgatggaagggtctgctgccaaggtctgtgacatgccctggagacgtttaccccattgtcttggtgattaacattcaactc

SEQ ID NO: 756219 - DNA, 591 bp, Homo sapiens
agtaatgaccagtggttataataattttgagggagagattaggttttattacaataacctggtagctgtgctttctaccatacttgctataatccttagccccctgcacaggacagtgggcgacctgaaagcacagtctacaccttggtcccgactatgtcgcagatttttagcccagcacctggccgagcagaggtgccatgtacagctgaatgaaggcactttggttgcaacatctgacaaaaatactacggtatttgaaattaggactttcctagacagcccagatatgaagtcatcataaacacgcatcttgacaacctaccagatcctttaatcccgactgccttcccactgcaaccaccagcctggacctacttggtcccaggtatttcccagaatcacgctcttgttttgccttctctgcttacattggcctccttcaytggcctactctgtgttacttcactctgggtcttgggggtcacctctgacctcccttggatctcccttttctggatctcccttctctggggagcccattggatctcccttctctggctcccctgccatcctcttgtttctggttct

SEQ ID NO: 756220 - DNA, 519 bp, Homo sapiens
ataatgaaaactataaaatactgctgaaagaaattaatgaagacatgaataaatggaaccacatcccatgttcacagattggaggacttaatattgttaacatgttaataccacacaaggtgatctatagatcaatgtattccctataaaagttccaatgacattgtttgcagaaataaaaaaaccctcattttaaaatttatatgcaatctcargagacctggaatagcaaaaacaatcttgaaaaataacaaagctggaagactgacactttcttattccaaaacttactgcaaagccacagtaatcaaaacagtgttgtactgtcttaaagacagacatagagaccaatagaataaactagagagatcagaaataaatcctcacatacatggtaaaatcatttatgacaagggtgccaagaccattctatggagaaaggacagtcttttcaacaaatggtggtgggaaaattatacatccatatgcaaaagaatgaagctgaacccttacctaaca

SEQ ID NO: 756221 - DNA, 519 bp, Homo sapiens
ataatgaaaactataaaatactgctgaaagaaattaatgaagacatgaataaatggaaccacatcccatgttcacagattggaggacttaatattgttaacatgttaataccacacaaggtgatctatagatcaatgtattccctataaaagttccaatgacattgtttgcagaaataaaaaaaccctcattttaaaatttatatgcaatctcaagagacctggaatagcaaaaacaatcttgaaaaataacaaagctggaagactgacactttcttattccaaaacttactgcaaagccacagtaatcaaaacagtgttgtactgtcttaaagacagacatagagaccaatagaayaaactagagagatcagaaataaatcctcacatacatggtaaaatcatttatgacaagggtgccaagaccattctatggagaaaggacagtcttttcaacaaatggtggtgggaaaattatacatccatatgcaaaagaatgaagctgaacccttacctaaca

SEQ ID NO: 756222 - DNA, 534 bp, Homo sapiens
gaccattctttaaaatgttaagcatactattaccatataacacctctgtattataattgccctacatctaagggcaatcaaactgaaaaatttattccaatgaaagaaaaataacatttggaggcttaatgaaaatttttttggtactaatgcaaaatcagacctagtacttctaggtgtatagaatttaattgccctgggatatacgacaatttaactgccmtggatatagggcaattataacacaagggtgttaattgttaattgccctatatctaagggcaattccacccttagacatacacaagaaaaataaaaacagatgttcatatcaaaacttagacataaatgttcaaagtagcattatttataatcaccaaaaagtgaaaataatggaaatgtccatcaacacatgtgtgaataaatagaatgtgccaatattcatacaatggaatactactcagaaacaaaaaggaagtgctgatccatgttataatattgacaaaccttgaaaacattatgccaagtgaaata

SEQ ID NO: 756223 - DNA, 568 bp, Homo sapiens
catcctgaaggctgtctcagggcccacggtgactgcttttcagagggaaaggaggaggaaagaaggacaaaggggccgcacagctgtgtcagttccacctaagcaccctccccaaagaccctctcagtccttctgctcacagctcatcagcttgaactttgtctggtccctcttagctgcaggagaagttaggaataatagccttttagtttgtktggcaaattgtgttcctaataaaactgagtctctgtttcgaagaaagagacaagaatgaaaaccgcgtgtacacgaacaaagctctctccctaccctaaactccaagctgaaggaggcaggagggattgacttcttttcggctgaattgggcattccttcacctaccacggcctctcttttcttggtgattattcattctcggagaggggacaaaagccgtgattccaaactaagacattggagtgggaaacccgctttcagttcctcagcagaatgatgagaacctctgtgtcgtctttcatctgtctgcgcattggcagaaggtctgagaaaaccctcttttatatcctaa

SEQ ID NO: 756224 - DNA, 568 bp, Homo sapiens
catcctgaaggctgtctcagggcccacggtgactgcttttcagagggaaaggaggaggaaagaaggacaaaggggccgcacagctgtgtcagttccacctaagcaccctccccaaagaccctctcagtccttctgctcacagctcatcagcttgaactttgtctggtccctcttagctgcaggagaagttaggaataatagccttttagtttgtgtggcaaattrtgttcctaataaaactgagtctctgtttcgaagaaagagacaagaatgaaaaccgcgtgtacacgaacaaagctctctccctaccctaaactccaagctgaaggaggcaggagggattgacttcttttcggctgaattgggcattccttcacctaccacggcctctcttttcttggtgattattcattctcggagaggggacaaaagccgtgattccaaactaagacattggagtgggaaacccgctttcagttcctcagcagaatgatgagaacctctgtgtcgtctttcatctgtctgcgcattggcagaaggtctgagaaaaccctcttttatatcctaa

SEQ ID NO: 756225 - DNA, 568 bp, Homo sapiens
catcctgaaggctgtctcagggcccacggtgactgcttttcagagggaaaggaggaggaaagaaggacaaaggggccgcacagctgtgtcagttccacctaagcaccctccccaaagaccctctcagtccttctgctcacagctcatcagcttgaactttgtctggtccctcttagctgcaggagaagttaggaataatagccttttagtttgtgtggcaaattgtkttcctaataaaactgagtctctgtttcgaagaaagagacaagaatgaaaaccgcgtgtacacgaacaaagctctctccctaccctaaactccaagctgaaggaggcaggagggattgacttcttttcggctgaattgggcattccttcacctaccacggcctctcttttcttggtgattattcattctcggagaggggacaaaagccgtgattccaaactaagacattggagtgggaaacccgctttcagttcctcagcagaatgatgagaacctctgtgtcgtctttcatctgtctgcgcattggcagaaggtctgagaaaaccctcttttatatcctaa

SEQ ID NO: 756226 - DNA, 568 bp, Homo sapiens
catcctgaaggctgtctcagggcccacggtgactgcttttcagagggaaaggaggaggaaagaaggacaaaggggccgcacagctgtgtcagttccacctaagcaccctccccaaagaccctctcagtccttctgctcacagctcatcagcttgaactttgtctggtccctcttagctgcaggagaagttaggaataatagccttttagtttgtgtggcaaattgtgttcctaataaarctgagtctctgtttcgaagaaagagacaagaatgaaaaccgcgtgtacacgaacaaagctctctccctaccctaaactccaagctgaaggaggcaggagggattgacttcttttcggctgaattgggcattccttcacctaccacggcctctcttttcttggtgattattcattctcggagaggggacaaaagccgtgattccaaactaagacattggagtgggaaacccgctttcagttcctcagcagaatgatgagaacctctgtgtcgtctttcatctgtctgcgcattggcagaaggtctgagaaaaccctcttttatatcctaa

SEQ ID NO: 756227 - DNA, 612 bp, Homo sapiens
cattgttgaccaaaacattgttattggcacaagactaaatatcaaaatcttcctttagggaaagtttacccaaaataaaattaactcattttatatgtagcacttcttgagttttaaaaaatatacacacctatgtaatcataccacaatcaagatacagacattcccatcatccaaaaaaattccctcatgtggggtacataatatatgtaaaagtaaaatgtacaaaggtagtacgaagaatagaaccaatgraaggttcttacactacacatgaggcgctgtagtgtcatttgaaagctgactatgataaagagggatattgtaaaccatatggcaaccactaaaattttttaaaaaggtataataatatgccagtagtaaaggtaaaatgtaataagacaatacctatgcaagcagaagttaaaaaaaattagacaggaaaaaggagaaaaaaaagggtagagaaaatagaaaacatccagcaaaatggcaggtttaaagccaatcatatcaataattacattaactgtaaataactgaaatagccctataaaacattaggggttggcagagtggataaaaaagcaagacttacttatataccacctt

SEQ ID NO: 756228 - DNA, 531 bp, Homo sapiens
actgggggacagagtcgtgcactcatggcagaaaaagcagcacatagacaaccagagacctgctctgaggatcagagccaggcgaacgcttggaaccacgctctccacaaactgttccaattctgacttttcatactttaaacacagaaaaccagtttctgtgctacgatcaaaaraagcaagtgaggccgaatgcgatggctcacacctgtaatcccagcactttgggaggctgatgtgggcgggtcacttgaggtcaggagttttgagaccagcctggctaacatggtgaaaccctgtctctactaaaaatacaaaaattagccgggtatggtggcaggtgcctgtagtcccagctacttgggatgctgaggcagtacaatcacttgaacccggaggcagaggttgcagtgagctgagattgtgccactgcactccagcctgggtgacagagtgagacttcgtctcaaaaaaaaaaaaaaaaaaaaaagcaagtggaaagtcaaacaaaaagtggttgttcagggggca

SEQ ID NO: 756229 - DNA, 616 bp, Homo sapiens
catttactttaacctaaagtcatcagctgcattagtccctaacaagagagtcagcctcttttttgaagcttgaagccggactctcacttctctctagctgtgaaagtcctaggtggaaagtcctagaggtatcagtcaggagagtctacatgatgccacagtaacaaacaagcccaaaaatcttagtgggctgaaacaacaaagtgagttatttctcagtcacattaagtgttcacatttgatggagatgggtgtgaggasggctcaacttattgtggtcaatgaggagcaaaggctgagttgaaaaagactccatttctctgctcctcactgtcagaggtgggaggaaggggcacagcacaagccacacatctgcctttaaagcttctgtccggaagggacccatgccattagccaaatggactcacataaccattcacaatttcaaatacatgaagtacaagcctaccaagtgtgcaaagtgagaagagagcaagaatacttgtacagcgcctctaatgcctaccagtgaggtgctaagtgttaccctatattctgattgtgtcaaaggaagtagctttgagcttggagggagtccttgggttttaggtaaaac

SEQ ID NO: 756230 - DNA, 616 bp, Homo sapiens
catttactttaacctaaagtcatcagctgcattagtccctaacaagagagtcagcctcttttttgaagcttgaagccggactctcacttctctctagctgtgaaagtcctaggtggaaagtcctagaggtatcagtcaggagagtctacatgatgccacagtaacaaacaagcccaaaaatcttagtgggctgaaacaacaaagtgagttatttctcagtcacattaagtgttcacatttgatggagatgggtgtgaggacggctcaacttattgtggtcaatgaggagcaaaggctgagttgaaaaagactccatytctctgctcctcactgtcagaggtgggaggaaggggcacagcacaagccacacatctgcctttaaagcttctgtccggaagggacccatgccattagccaaatggactcacataaccattcacaatttcaaatacatgaagtacaagcctaccaagtgtgcaaagtgagaagagagcaagaatacttgtacagcgcctctaatgcctaccagtgaggtgctaagtgttaccctatattctgattgtgtcaaaggaagtagctttgagcttggagggagtccttgggttttaggtaaaac

SEQ ID NO: 756231 - DNA, 616 bp, Homo sapiens
catttactttaacctaaagtcatcagctgcattagtccctaacaagagagtcagcctcttttttgaagcttgaagccggactctcacttctctctagctgtgaaagtcctaggtggaaagtcctagaggtatcagtcaggagagtctacatgatgccacagtaacaaacaagcccaaaaatcttagtgggctgaaacaacaaagtgagttatttctcagtcacattaagtgttcacatttgatggagatgggtgtgaggacggctcaacttattgtggtcaatgaggagcaaaggctgagttgaaaaagactccatttctctgctcctcactgtcagaggygggaggaaggggcacagcacaagccacacatctgcctttaaagcttctgtccggaagggacccatgccattagccaaatggactcacataaccattcacaatttcaaatacatgaagtacaagcctaccaagtgtgcaaagtgagaagagagcaagaatacttgtacagcgcctctaatgcctaccagtgaggtgctaagtgttaccctatattctgattgtgtcaaaggaagtagctttgagcttggagggagtccttgggttttaggtaaaac

SEQ ID NO: 756232 - DNA, 616 bp, Homo sapiens
catttactttaacctaaagtcatcagctgcattagtccctaacaagagagtcagcctcttttttgaagcttgaagccggactctcacttctctctagctgtgaaagtcctaggtggaaagtcctagaggtatcagtcaggagagtctacatgatgccacagtaacaaacaagcccaaaaatcttagtgggctgaaacaacaaagtgagttatttctcagtcacattaagtgttcacatttgatggagatgggtgtgaggacggctcaacttattgtggtcaatgaggagcaaaggctgagttgaaaaagactccatttctctgctcctcactgtcagaggtgggaggaaggggcacagcacaagccacacatctgcctttaaagcttctgtcyggaagggacccatgccattagccaaatggactcacataaccattcacaatttcaaatacatgaagtacaagcctaccaagtgtgcaaagtgagaagagagcaagaatacttgtacagcgcctctaatgcctaccagtgaggtgctaagtgttaccctatattctgattgtgtcaaaggaagtagctttgagcttggagggagtccttgggttttaggtaaaac

SEQ ID NO: 756233 - DNA, 694 bp, Homo sapiens
tgccaccatgcccagctaaagctttttgttttgtagaaatggggacttgctatgttgcctaggctattcttgaattcctggcctcaagggattttgccttggcctcccaaattgctgggattataggcatgagccacrgccccggcccacatacagctatttaaaactaaatttaaattacttaatattaaataaaattaaaaattcagttcctctgttgcactagccaaatgccaattactccatgtgtgagtagctaccatgttggatggcacaggtataaaatatttttattgtctcagaaagttctatcacacagtgctgacatagggttcctgcatctctgtaaagggactatattctaatcttagtaactggtccattccctccactccacatttacttttaactcatataaaatcgtgcacacactcacacacacaactacccaaaccactaatcactttgattttataaaaagaacatctattgattttaactaaaaagacacttgttgcaagaggaattttatatatcatagtaaaaatgtcctatttgagggaaactttcagacaattggattttaactgggccatttattttgtgccattaccacaaggatgccacacatttagcatctgttccctggtgcacaactttaaaagggagctggttggatcctctgaccatgagg

SEQ ID NO: 756234 - DNA, 567 bp, Homo sapiens
ttgctggtgggaatgtgaaacagtacaaccgtcttggaaaagtctgccaatttttaaaataaaggtaaacatacacccaccaattctgttactagatatgtatcaaagaaaagtgaaaacaggttgggtgcagtggctcccagcactttgggaggccaaggtgggtggatcaaacacctgaggtcaggagtttgaaaccagcctggccaacatggtgaaacccctgactctaccaaaaaatacaaaattagctgggcccacactggtgggtgcctgtagtcccagctactggggaggctgaggtgggagaatagcttgaacccgggaggcggaggttgcagtgagctgagatcatgccactgcactctagcctgggcaacagastgagaccctgtctcaaaaaaaaaaaaaagtgaaaacgtgttcacagaaaggcttgtacataaatgttcatagcaggtttatttattcacaatagccagagaaataggaaataacccaaatatctctctgtaggtgaatgggtacaaaaatcgtggtacatataaatagtggaaagttatttag

SEQ ID NO: 756235 - DNA, 541 bp, Homo sapiens
gctgactcacagagataaggtcgagctctattgttccagtattctcgggatccagctgcttaaatatctctgtggagggagaaaaagagggtgtcacaagtgagtgagctgaaacagatcacattatcctcttttcagttcagcaactgacttcaytgaccaccatacatgctttcttcctcaccctcaaattagtaaagagggaatttcattctcaactcctggaagacatgtctctagtttagatgatttcaccgaggtgaaaggcaggccactttaataccaagagaactgaaatgagtcattccccaaatatccacttactgaatagcgtttccagccgaaccaaacaccgaacaaaattatcaaaatcgatgatgagctggtcatctgcaaaccgagcaacgatgacttggtggagttgacagggcatcttgaaacctgaagttacatgaacaaacaaactcattgctaagcattagattgttccatttagctgcgctcacaggctatgaaactaatgtggtgatttaaatgaggt

SEQ ID NO: 756236 - DNA, 672 bp, Homo sapiens
  misc_feature 112: n = A,T,C or G
gccatgatagaggatagcctggttttatctttttgcttgtgagcaggatccaacaattctcataaaattttccccagcctgttcagtggaattgtcaaagcatcattttcanaaagtgaaaatatgattcttatataagtctatagggagtgtgtataaagatctatatacttcacaaaagaaagaaccagaagatggtaaagctgtttgaaaagagaattggaaggagaaagatttggatagaccatcagaaacagcatgctgacataagtttgctaatttggaaacctcactcrttaatgtcctgtagagcaataaaatctttttacaggacaaaaatcatttgtatctctaccagacaaaaattaacatgtaacttggcagagtctgggccctaatcaatagtaaatagtaagtcaaacaaaagtacattcccttagagagttaaaaaaagctttggtggtttgttaggcaaccttccagtatggcattagaaagacgtgcagtcatcctatttttacttccgagtttgggatactgttttttttttgagatggaattttgctcttgttggccaggctggaatgcagtggcgtgatctcacctcactgcaacctccacctccccggtccaagcaattctcctgcctcagccttcccagcagctgggatt

SEQ ID NO: 756237 - DNA, 570 bp, Homo sapiens
aatttttggggaagattcacaccatagcagactgtttggggtaagactggacagctactttgcttggggaatgaagaatctaaagaataccgtggagacctgggcttcagagccaagggagacgaggactctggacagagagattcagactttcccaaagactttgctttactaatcaataccaacagcaagtagtcctgagtggggaggtgtctgactctaatactgtgtaaaaatagttgcagctaccccttatggaatgcttactatgggccagggtcttggccaaatattttacatataccatctcctttagttctcacagtaaatgttttcctcattttacagatgaggaaatagaggcttccagagattaaatacattgtccaataccacctggctattaagtggcagaggtggcytccagtagggttctgtttgacattgcacccataattttagccactctaattcttttcagggactgatgttcttgaacaccaagtgggctttatttcaggggcacagcgaggtggacttacgttgtccctaaaggagctaattttctcc

SEQ ID NO: 756238 - DNA, 617 bp, Homo sapiens
attattactgagccctccttcccctcataacctatcctcatgttctctctcctccctcctattcctgaagggactgaaaatttagtttatgccaatgggatagtggttaaagagatttcatatgtaacccctcccaatggcattagatggagataatgaaagaagtaagtggagtgtttatcaaatgaattccagctataagtcaaccactgcaacagctgtttaggaaatgtgacaacccctaaaatcactawgccaaagagaatgcctccttatttgatctggaagaagtatgccaaggaagtatggttaatatgcttgctctagcagtcagttctagtgtgggagacctcatgattggtctccataatggtaaagtgtcagcacttttatattagtccggagttacaggcagtttctgggtaagtcatttaacttgtgggcctcagttcctctgcctttcaaatgggtttaagtgtctatttttttttttcaaatgagtgggtatgtgtaattttctgtcaagtttcaagtactagatgccaagcactaggaataaggatagaattttcaagcagcaagatatagagaaaacaaaaaaacagacagatatctag

SEQ ID NO: 756239 - DNA, 634 bp, Homo sapiens
gggagttaaaaatcgatataataaaatctaatgatgaagaagggcctctcttatctgaaaaaatctgcttccatgttccttaaatgaatatttattaagctgctgtactctaaggaaagcaatgttgtattaagactctgaaaatctacttcctcccatagtactctgtgatactggatgaatggcatcaattgtatgagccggtgttatcatctgaaagtgtggctaatactccgccatctcaaacatactaccaactatttagtacaaacacagatcaatttaatttaaaygttaagagatctgattctggaaccagacagactggggttcaaaccacttaccaggagcatgaccttgggcaagttttaaaacttctatgcgtttagtttcttcttttgtaaaataaagataataatattatctgattcaacatgttattgatttggataatttatctaaggaacttaaacatgtgctgagagatgtagtaaactttcaaatgatagttgttagtggctgttgcagcagcataaagggattagttgctgaaaaacttatagagtaatgaataagaatttctgaagtataagaactgctcagaagccaaacattttgtggaagcaatgttttt

SEQ ID NO: 756240 - DNA, 578 bp, Homo sapiens
cacaaggggtactctaggttagttgaccttaggaatgttgaggtcagtaaagtttttaagaggctcatgaaatatgttgatccttccctaagaaaactccctacacatacatataaatacagttgtgtatttgatccttccctaagaaaaatccctacacatacatataaatacacatacatataaatttcagttcagttgatatatcctctgatttccactcattaaccctagattaagcatatccactctggaaagatttttgcatttgggttacatttttaggtccttagaggtgtgatagtccacgttttaccacgccacatttcctctacctaagatgcacttatttattccctccattctcatattaatgcttctaaaattgggatgagtttaccaatcaaygtgtacacttaatgcagttaattttttgtttgttttctaaaaagcttttattaaatcaatggtgcagtcacacaatcaatagcatctttgatgtaagaaaacacagtgcagcatttattggatgatgtatttgtcattgctaaaaataaaagtaaaaacaagatgtctgc

SEQ ID NO: 756241 - DNA, 630 bp, Homo sapiens
tcacttatgtggtctgcttggattcctcagaactagcagaaggaaagactaagtctgctggtccatggagactagtcaccccagtccttaggggcttagaccccgggggatcagagttctgtccttgagcctctggctagagttgcggaagttcagcctctgactggagtttcgggaggtcccacctagtgaggaaggatgggtcagggtcaggcctgaagaggcattctgtccgcagtctgccacagccggtgtgttgggctgtgggggatacctcttggaacaaagtcctccagcctctctggctccagcaggtgaaaagcaccacctggagctataaagatggctgccacccttcccccactctgggtgcttagcatgttattggctgtcgcccctctcccaatgagctcaaagygcttagacagtagacagccacagctgtggtgctggtcacccctcctcccaggaactcagcaggcttaagaagattctagctcagtggctgttgagaatctgcacagctctgtggttgggaccctaggccctggtggtgtgggctcacaagtgggagcttccaatccatggaatgcacagttccatggaaaaagtatgtttttctaggctggg

SEQ ID NO: 756242 - DNA, 608 bp, Homo sapiens
gagaatgttctgtaccttgtctgtatcttctcctgttcaagtataaagaattgtatgatactgtctatattctacatggctggaaagttcataatcagcaaatagtgcttattttaacaagccaagctgaagggagaggaaaagctttgttcaggatattatagcttatagtatggtccttcagagatgttcaccattaattatccaaatctttcatctgcctgaattcttcatttacctagtattccttgtccttggatgagaaacttctgttgttactctcattcctamccatgccacacacattttgagatgtgggaccatgccatgggtggggaattaagcatatttcttgttctgctctgtgtcctacacagtccaggactgtgtttattttttggttaattcaacaaacatttattgaatatttcttgttctactctgtgtcctacatagtccaggactgtgtttattttttggttaattcaacaaatatttattgagctcctactaattcctgaggatggcactgacctagacagaaacagtcaccatctacataaagttgacagttcatcaaggaagatagatattaatctaataattac

SEQ ID NO: 756243 - DNA, 501 bp, Homo sapiens
caacttcaaactgtcctacaaggttatagtaatcacaacagcatggtacaaaaacagacatatagtccaatggaacagaacagagaaccaagaaatcaagctgcacacctacagccatctgatctttgacaaagttaacaaaaataagcaatagggaaaggactcactattcaataaacagcactgggttaacttgttaaccatatgcagaagattgaagctggacccatacctatcaccatattcaaaaattaactcaagatggattaaatattttaatgaaatacctaaaactaaaaaatcctagatgagacctaggaaatactcttctgacaytggccttggcaaagaatttatgactacgtcctcaaaagcaattgcaacaaaaccaaaaattgacaagtaagagctaattaaaccaaagagcttctgctcagtaaaagaaactgtcaacagagtaaacagacaacctacagaatgggagaaaatattcacaaacta

SEQ ID NO: 756244 - DNA, 516 bp, Homo sapiens
ctccctgttaaggctttccggtcctctgaaaagcgaaagtgggccgtgaccatcttctaaaaacgccaaaaaatatggaatggagcccgggatttcagagcgtagtcgctgggctcccaggctgagcccgctccgggagcctccagccgccctttccgatgctccggggcctccgagcaacccagcgggcagtcccaagccsagggctgaactccagggaggagcgctcgtcacgcccacactggaggccgtggcaggcctggaaacccgccctgcggggtcctaagaagccattcgagctcccgaagagcgagtcttcgcagcccttcccggcgcgctcgcatctggcgctgtccggagcccgctcgcgacgcacagggacgggaggcccggtttccacgggagaggctgcggactgcgggccccgtcccgaggccgggggagtgggagacacccggcgacccccgagaggcgattctggcagtggtggcggtggcggtggcggtggcggcctac

SEQ ID NO: 756245 - DNA, 624 bp, Homo sapiens
ttggtcaggctggtctcgaactcctgacctcaggttatccacctgcctaggactcccaaagtgctgggattataggtgtgagccactgcgcccggcccacaagagttttaaatgctagtggggaaagcagtggatttttatttttcttaaaacttgaatacatcatcttataactattatatcatagaatttaaatttgttgagaacaaattttgtggggattatttatttaaggtctggaagacttctattttaatgagaaatgtatcagagaaaataaagaaaaatgtttctagattcttcaaggaatgaagttgttttcttaatgagtcacacttagggtgatacattaaatgagagaaacgtggttgtcaatctattctattctggaacagtttagcaacttgtgaaatatcagaccgtttggaccaatatccccacttctatgcattttccctatggggatgatcatacaagagtgaaaagacrtaagcacatgaatgtttcttataaatctgtttttaatatagaaaacttggaaacatcccaaatattcaccagtaggggaatgattaagtaaattactgcacatacaaataataaaattctcaagtcattaaactt

SEQ ID NO: 756246 - DNA, 610 bp, Homo sapiens
ttggattgcatcttttagaaacaccacagttgtgcttattaaattgaacaagttaacaaatataaagtacttagaatagctcctggaacattgtaagttctcagtaaatattaattatattgtaggtccccaaacccttctcttaaacctttggagtcagatgtatttttgggattcagaattttttggattttggaacagtatgcatagtatctctagcaccccaaartcaaacacattgaaatttctgcattgaaacacatgaatattcacacaaagtatagtatatactatataacaaatagtctcatgttaattcaggtcagattttaccactgaatacattatttgaaaacttagggcttttggccgggtgtggtggctcatgcctgtaatcccagcactttgggaggccgaggcaggtggatcacttgaggtcaggcgttcaagaccagtctggccaacacggtgaaaccccgtttccactaaaaatacaaaaactagccaagcttggtggcatacgtctgtaatcccagctacttgggtagctgaggcatgagaatcgcttgaacccaggaggtggaggttgcagtgagctgagagcatgcca

SEQ ID NO: 756247 - DNA, 545 bp, Homo sapiens
aaaacaaaattgaacagtaaaaaaaaattcaattaatccaaaagaaggtagaaaaataggaaaaatgaacaattattagatggacaaatagaaaaccaatggcataatggatggtctatttaaatccaaccagataaataattacattaaatgaaatgatctaaacatgccaattaaaaggcagaggttgtcagtctgcataaagaataaaaacacaactatatgctatgtacaaggagccactttaaatataaaaatagataggtttaaagtaaacagataaaaaagatgtacaataaaaccctgcaaaggaacatgargaaacattctggtgtaattgaaatgtccatgtattgattgagtatacatggtcaaaccttattaagctgtacccttaaataagtgtgttttgtttgtataaattatacctctataaaattgatgtttaaaaatttaaaagatgattgtagaaatttaaaatagcagaaagactaaaagaaataattgccaggcacagtagctcaagcttgtaatcccaacagttt

SEQ ID NO: 756248 - DNA, 565 bp, Homo sapiens
gcctggcctctgcatttaaactttagtggcatgccatgcagtgttttcctcttaggcatgcctttccagttcctacagagtctaccctggctctcaacttgcctgccagctatgcaagatattgcctattgaccctcagcattgattttcactccttttctaagtttttttaatcacaggggcaacaaggcaggcaastacatttcccacattcccttgctacaaatgattttgttagtaaaatagacttatgcaagatttggtagatagaaaggaagctgaggcttccttacagtagaagcacttcatgcacaaattgcagcaggctccgtttttgcagcagccatactttattctactgtctagtccaggactgtgtatcagctgtgacactggtagtggttttacactgttcccagccatcgtgcagcagcagcattctccccatcctctgagtagcagccacggtggcatgatccaaaaacatttcacagcagccccttaacttccactttccctcccttcctacaattgtgtaagcacctaattccctgtattaaaacct

SEQ ID NO: 756249 - DNA, 528 bp, Homo sapiens
aaatatttttattttattttatttttggagacggagtcttgcactgtcacccaggctagagtgtagtggcccaatctcggctcactgaaacctccacctcctgggttcaagcgattctctgccccagcctcccgagtagctgggactacagccgtgcrccaccaggcccagctaatttttgtatttttagtagagatggggttttgctgtgttggccaggttggtctcgaactcctaacctcaggtgatctgcctgcctgccttggcctcccaaagtgctgggattacaggtgtgagacaccgtgcccggcctcaaatacatatattttaaatgaactctcagcagaattcagaatgctcaatcaagtccttcacttcgtactctagattgctggtaaatacggcctaaaaaaaaaaaatcactgctaggtcatacattgaaaagagaaaagtgtgcaaaacattaaacaaaagaaaatagtaataaaaatctgacattttttataggaataacattttgaactgaaa

SEQ ID NO: 756250 - DNA, 528 bp, Homo sapiens
aaatatttttattttattttatttttggagacggagtcttgcactgtcacccaggctagagtgtagtggcccaatctcggctcactgaaacctccacctcctgggttcaagcgattctctgccccagcctcccgagtagctgggactacagccgtgcaccaccasgcccagctaatttttgtatttttagtagagatggggttttgctgtgttggccaggttggtctcgaactcctaacctcaggtgatctgcctgcctgccttggcctcccaaagtgctgggattacaggtgtgagacaccgtgcccggcctcaaatacatatattttaaatgaactctcagcagaattcagaatgctcaatcaagtccttcacttcgtactctagattgctggtaaatacggcctaaaaaaaaaaaatcactgctaggtcatacattgaaaagagaaaagtgtgcaaaacattaaacaaaagaaaatagtaataaaaatctgacattttttataggaataacattttgaactgaaa

SEQ ID NO: 756251 - DNA, 549 bp, Homo sapiens
attgtaaacaatctctctacctttgtgtagtcaactatttagtaaacgtcatgaggcattttggtgctgatgtaaggaatactgagacaagatggagtctccgaccacaaagaacttaaaattttatggggaattagctaagtacaaataatcattcaagacacaatgaagtrcagacacagcaatgcaagaaatctgttgtgggagaatagagaaacagacagttattttcaggtagagactgagagacttcatgaaggacgtcctactttagtcagatttgagtaaatgaataggatttcagtggccaaaaaggaggaaagagaattccgggcttaggcaaataataggaacaaagattgagaggtgcctgagtccatggggagtttggatgttgttgtatagtctgatctggctggaagcctatggagaggagacagtgtgcaggatgctgggagaggtaaggcttggaggacaggttgagtctgagccttggtgggcatgggatgcactgcaaatttctctcaggattatgggaaaaggtagatg

SEQ ID NO: 756252 - DNA, 532 bp, Homo sapiens
cggatcatactcctgccccttggtgggagggcggggcatctttattgacagtctcaacagaacagcatccagtggggaatagatactttttataaaaggaaaatgggagcactgttgtcagaagaaatgggagttgatgacaggcaggcaaaagcagcagatgttcagtacaaacaacccaaacacatagtccacgtcttcattccccttcatctagagaagtatgcatcctctctaatctcctttttctgcagcgctgtcagtatgatcttccaaaacatgcaactggttgtcttactttcctgattgcaacccctagcaaacccaatcccacatacaaaataaagatcaagcttcccaacaacgctcacagcytgcggtgaactgacccctgcataccacttcagtgtcatcttttgctgcttcccctttcccaccccctcacccaattccctttatgcttcagtcataaaactatttataattcctcaaatgtgctatactgtttgatgcctttgtattcatttattct

SEQ ID NO: 756253 - DNA, 601 bp, Homo sapiens
tggggatctgagcatgccactgttttcccataggcttttcctttgggaataaatttccttgtataagacaggcaataattttaattgctcaatatatcatgggaaaatagaaacattttgttatattaatgtcagtggtcttaattattgccaagtgagtctctaaaatgaagcagcttttttttaaaaaaagagtatcaagatgaagcagsttcaagaaagggaataaactccaacattgcaggaagaatcttacaatggaaaagacctgttactgcaggataatgaaaaatacaattatctgataaataaatttaaatattctataagttcccttagggcatttgtaccagaaggtccagcccttaacagtcaatgtctcactaattgtatactggaatcctgttcttcttttctctgagaaatctatttcacaatatcttccaaatcatctcttgtctaatgtggtgctctcaactcagactgtgcttttactcagggccctcataggccttggcaatggccctctttctcagttactctaacccttcctgcctagcgtatgtactccttctgtctatcctctgtttgaagtgggtca

SEQ ID NO: 756254 - DNA, 589 bp, Homo sapiens
gcctgataaacatggtgaaaccctgtctctactaaaaaatccaaatatcagccgggctggtggcaagtacctgtaatcccagctactcaggaggctgagacaggagaatcacttgaacccgagaggcggaggttgcagttagccgagatagtatcattgcactccagcctgggcaacagagcaagattctgcctcaaaaaaaaaaaaaaaaaaaaaaaaaaaaagaawtgctaaaggaaattcttcaaacagaaagacagtagcaccagaaggaaacttggatctcaaaaaataatgaagagcattggaaatggtacatttgtggctaaatataaaaggctactttttccccaatttatttacaaaataatgattcatgcaaaaatataaattgtattatggggttgataacatatgtagatgtaaaaatacatggcaataataccacaaaggatgagaaaaagaggagtcagtaaatggaattatagtgttacaacattcttttatataagtagtacaatacttactctgagaagactgataagcaagggtgaaaattatattactacagcagtccctttaaaaataa

SEQ ID NO: 756255 - DNA, 601 bp, Homo sapiens
ctccacagcctcaccagcatctgttgtttcttaactttttaataatcaccattctaactggcatgagatggtatctcattgtggttttgatttgcatttttctaatgaacagtgatgatgagttttttttcatatgtttgttggccacaaaaatgttttcttttgagaagtatctgttcatatccttcacccattttttgatggggtttgtttttttcttgtaaatttgtttaagttctttgtagattctggatattagccctttgtcagatggatagattgtcaaaattttctcccattctgtaggttgcctgttcactctgatgacagtttcttttgctgtrcagaagctctttagtttaattagattccatttgtcaatgtttgctttagttgcaattgcttttggtgttttagtgataaagtctttgcccatgcctatgtcctgaatggtattgcctaggttttcttctaggattttcatggtttggggttttatatttaagtcttcaatccatcttgagttaatttttgtataaggtgtaaggaaggggtccagtttcagttttctgcctatggctagccagttttcccagtacca

SEQ ID NO: 756256 - DNA, 633 bp, Homo sapiens
gatattagatcctaaagttcctctcctactttctattcgaaatactggaattcttatatcttattttaatgattatattagatttaggaccttgaatgattttctgatatgcaaagtaatgcctgaatatactgtcatcatcggacttacataggagataatgtagggcttagcacttggggttygatggattataattctaatatcaaatatattaaaagtggactactaatctctactttatataatttggtaaaaattactttcttaaggagatactgcaaatcagaatttaaaaatcaatttttaagagtttattctgaactccttctgaaaaactaagccataagctatattattttttaataattctaaggaattactcagattacagataaaaaataaaataatagtttgagttttttccttcccctttctcttatacttgtttttaagtaagatctctcacagatatctaaattttttttgagagaattgccaaataatgggggattgatcacctatcataggtatgatataggctgaagctttgtatttctttaggcaaaaatattattcctaaagtgctcatgcttcccttttcctgacattatctgtttacaaatatgattt

SEQ ID NO: 756257 - DNA, 596 bp, Homo sapiens
tggagtaaaacagaattcacacatcagcaagtatatagtgatgcctgttaggtgcttggcactatgcgaaaccaccatcttagtccaatggcgtgcttcgtgacatctgagtaccagacgccagaggacacgggcttcaggttggttggagaagctgaagatcatctcattgtgtaatggaattcagagcaggttctttactctgtatgtcttcccatcatctagaaagggagagttgggctctagttaatccaaggtacctcccaagktggattgttcaaaggacaggatcggcactctgcattaacaggaaggtagaaagtacacgctggagtggagctggtggacacgcgaatcagggagcataccagtccggcttgctgggagggctttgtactgggaggagaagcaaagctgagcacactgagtttagatggcttccacaggaaacacaagacccagggcaaaggcaatgggctcaattgtttcatgctgaaacaatccttgtacaaaagcttcatggagaggggagagcccaaggtcagggaaactcggtcaggaaagccttggagcaatctgtgcaagaggtgttgagg

SEQ ID NO: 756258 - DNA, 485 bp, Homo sapiens
  misc_feature 312: n = A,T,C or G
tacagccaaagaaatcatacaaagatgctgggtgcagtggctcatgcctgtaatcccagcactttgggaggccgaggtgggcagatcacgaggtcaggagatcgagaccatcctggctaacatggtgaaatcctgtctctactaaaaaaaatacaaaaaaattagccaggcatggtggcaggtgcctgtagtcccagctactcgggaggctgaggcaggagaatrgcatgaacccgggaggcagaggttgcagtgagctgagatcgcgccactgcactccagcctgggcgacagagcaagactctgtccccnaaaaaaaaaaaaaaaaaaaaaaaaaggaaatcatacagagactacactactgcgctcacccaggaacaaagccaaagcactctactcaaacaacacaatagatacatctacaggaaaaagtactggaagtactagccagagcaattaagcaagagaaagaaataaaaggcatc

SEQ ID NO: 756259 - DNA, 640 bp, Homo sapiens
aaaaagaaaataattttcacttgacattttctttttctttttttttgttttgagatggagtcttgctctgtcaccaggctggagtaccgttgcgcaatctcagctcactacaacctccaactctgtggttcaaatgatyctcctgcctcaggctcccgagtagcttgaactacatgtgtgtgccaacacgtccagctaatttttgtatttttagtagcgacggggtttcaccatgttggccaggatagtctcgatctcctgacctcttgatccacccacctcggcctcccaaagtgctgggattacaggcatgagccgccgcgcctggcctcacttgacattttctaatgatatcaatgtgtggacaaaatgacagtattatatgacatcaagaataaactatttccttggttcactgatactcagctgctgcagaaaagtaactacagaacaaagggggaaaaaggtaaacatcattgaacccttagaaagatttgtcctaatttcaaataagctgtttgttataaagaaatcctataaaatcttccaaggtgctgataggtgtttttgtcattgttaattttgtttttttttaattaactgattagaaaaaaaagatgattcatctttgataacaaat

SEQ ID NO: 756260 - DNA, 554 bp, Homo sapiens
atgcatattacaaataggtgtgatccatcatatacatgggacagatatttcatgtaaaatttgtacctcatattttcacttaacgttattgcataagtagtttcctgtgttactgaaaattattgacaaatattttcatggcttccaaatatttaatcttggatattcattccatcactcatataatcatttacccatttgggggaatttacattttttaaatttgattattaataggtgttttcaaaatccattcattttcatttcatttcattctaagtgaagtaatttcatattcattagtcatttgtatgtttgcttttttaaaatttatttatttatttatttattttgagatcaggttatgagactggctaatttttgtatttttgttagagacggggtttcactatattgccraggctggtctcgaactcctgggctcaagcaatctgccctcttcagcctcccaaagtgctgggattgcaggcatgagccgccacacctggcccattttctcttttttttaaacttaacttttattttaagtttgg

SEQ ID NO: 756261 - DNA, 514 bp, Homo sapiens
gtgaaatcacagctgtatttctccatgccaccaaaagtaggatcccatcttcaaaaggcttgcaaattatctatactattggctaacaagcatgtcagatattttaataataggaaaatgatgatgtacatacacacacacagtgttgtatttttatttcggtaggtgggaagggaratgaaaagaaacttagaaaccgataatttctctcatgagcaggtggaaaagaaggatttccaaacgttagcaagaagaaacaacattaaagaaagagctaggccttaccccacagttccgcctgaaccttgaagtgatggttttgagaagagtagtcaatatcacctaggagatcacactgggtaagaatgtggagtccttctcaggtgatcaaggcaaagaagacagcagactttgaaggcacataggtgtccaggggcttgttttcctggctcactctcctggctcactcagtccttccccactccttagtccctcagcactaacatgggtctgt

SEQ ID NO: 756262 - DNA, 602 bp, Homo sapiens
tggatctactacaatagaacttatagaaatattataaagtctttagtcaacattttattttcagaccttaccactggataaaggagaacaagaccagttacatttcaggcctcaaatcatacttggttttcttaggtttccctgcatataaaagttccaagtaatttttcataacgatctggtcaggctgctgaacctgggcatgaaagcytggctatctgtcctcagtgggatctgtatcatcaccccattcaaatttcctatccagttgatagtttcttcctgctaaggcaatgcttagacataacggcggtcgcggaaaaagaaatataatcaggttgatgcaaccactctaagaaaaaataaatatttttggctgggtgcggtggctcatgcctgtaatcccagcactttgggagatggaggcgggcggatcacgaggtcaggagatcaagactgacacggtgaaacgccatctctactaaaaatacaaaaaaaaagttagccgggcatggtggtgggcacctgtagttccagctactctggaggctgagggaggagaatggcgtgaacccgggagacggagcttgcagtgagccgag

SEQ ID NO: 756263 - DNA, 600 bp, Homo sapiens
tgaaaggaacttcgaatttcccactccaaacatcctaagggctgactaatctaaggctatacagccaatcagtaactgagctgggcagatttaggtgaaccattcacttaatgttactgactatactgctctaatgatatttaatacagcytagttagaccttcatccacaaacaaaagttactagtcagtggttctgcagagaggaacagagaagctgagttatgcacttatgatacctaaatataaaacagtttacaaaaaaagtctctaatcaatgctacatgatcaaattatacagattatcaatgctttgcatgctaagtaaccctgcctattattttttgtatcagtatcagcgatacttagtcctttcactgtttctttagaaaaagtcacatatattttacagattaaagatagaatgaacaagtaggaaactgatgaaatcctgaatgctactgccaaatttccaatatggtttggaaagtataatattcaaattatcataaaataaaatatacatagtcaattttcatttttaatactccatttttcttatagtttgcatgtcaaaagtttatagtttgcatatttttca

SEQ ID NO: 756264 - DNA, 600 bp, Homo sapiens
tgaaaggaacttcgaatttcccactccaaacatcctaagggctgactaatctaaggctatacagccaatcagtaactgagctgggcagatttaggtgaaccattcacttaatgttactgactatactgctctaatgatatttaatacagcttagttagaccttcatccacaaacaaaagttactaktcagtggttctgcagagaggaacagagaagctgagttatgcacttatgatacctaaatataaaacagtttacaaaaaaagtctctaatcaatgctacatgatcaaattatacagattatcaatgctttgcatgctaagtaaccctgcctattattttttgtatcagtatcagcgatacttagtcctttcactgtttctttagaaaaagtcacatatattttacagattaaagatagaatgaacaagtaggaaactgatgaaatcctgaatgctactgccaaatttccaatatggtttggaaagtataatattcaaattatcataaaataaaatatacatagtcaattttcatttttaatactccatttttcttatagtttgcatgtcaaaagtttatagtttgcatatttttca

SEQ ID NO: 756265 - DNA, 474 bp, Homo sapiens
cccacaagcttttgtttcaatgagcaattttagattgtccataatttgtagttgatttatgattacatttgtatgtctagcaggaagcctttaatggtccttaaaataatttgtttataatttgctcataagtaaaaaaaaaaaaattaactgaagtgcatattttttctcacaattttagtatttaaagtatatttatgyaattataacagtatgcatataattgtgaaatctaatcaggttatgaagaatctgtatccaacttttcaacttgcaaaatgtgtataattgatgaatacacttactacattgtttcataattaaatagtcttgttcagctaaaatgaactataatagttctaatttacctcaagtttttctaagatagcaaataaattgtagtgtcacattagcttcctaagtaaggcaaattgacctgcaataaaaggttctagtgtgagacaaattaaacct

SEQ ID NO: 756266 - DNA, 611 bp, Homo sapiens
atggtgaattgacactcaaaataatcaattgttttatggggcctcacataaaatgtgaggcttattcaactacagcaatgtagtaaaaaaacctatataactaaagaccagaatgtaatggaaaccttcaracaatagtaatacttgtacaatttaaaccaaagcaattcagtatatgctttcaaatttttttaaaaaattattttgatggctaattaaaacttacataaataccatgaccactaatcaagctactgctaattcttcactttgaaagaggccctagagttttcagggtatggggagtaagtaccaggaatacctccccctacttctattctttataacatattatttatccagttcaaacatctatgagaattttaatatgaaaccatttattttaaataaaacattctgaaagcctttattaaatgatgaaggcagcatctttactataagaagttagtctgggctagataaagtggctcatgtctataatcccagcactttggaagaccaagacaggaagatcacttaaacctaggagttcaagaccaatctggccaacacagcaagacctcatctctactaaaaaaaaaaaaaaaaaa

SEQ ID NO: 756267 - DNA, 649 bp, Homo sapiens
cacatggcctcttacctgcaacacaacctgattagaacggtatgtggatcctttctagaaaacttaagatgggtcctttccaaggagtagctgtggcactattgtctgaaatctgaaaacaaatactaaggagaataaagctgctcctgggataggccagtgcataaaagcctggatgaggtctgcttctcggtcgattctctattccagwctttgggtctggctgttccctccctgatctgtacctctacgatcccaaccatcttcccacagatccctcacctgtcctgtgcttctaactcagatccagtctttcgactctgagtctccccttgcttatttgtctataaaattcttggccttgatttatatcttgattcaaatggtgaatattattaccgaaggcaatgttaggtcttacttttaggtaaggccagttatatatcgttttaacctactgacttctccagggtcaccaatttgtgttgatcctgtggtataggtcagatgtacacggcagatgagtggctagactatatggacactttcaatgctttccatgccaaagtaatgatactatcttgaaatattacattttaaaatagctttatattttatgtgaaaaaagaccaccttaaattaccttaaa

SEQ ID NO: 756268 - DNA, 520 bp, Homo sapiens
aaaaactacagaagcaggtatgcaaaggatactaggtccttcaggttcacatagagagaaaatagtcttggaatgacaatgccaaagaaaatgattcttcaatcttacctgttttcagtgatattctcattttgatatggattactggtgttttccagggtaaagaaacataggggactttgactcttaaatacatatgtatcttaacattaatagtaaatattcaaagaatgagyattatagaatttgaacatactgggtcacatggttgatttattgtaacatgggattcttacacaaaatagaaattacttttttggtgatcgcattatgtccacagaatggctcaacaaattaacaagtgaatatcaggttatgaaaaaacgtgctttacatttaggcataataaattgtctttcaaatactgtaaaaaatggaataccacttcagttggaatatctgaagcatggctctctaaattgagcatttagaataactagctatcagtttaacctttcaa

SEQ ID NO: 756269 - DNA, 648 bp, Homo sapiens
gacatgtttatagagcagttcattctcttgatgaattcaaatacagttttctatttgagactactgtaaagatatgatcacccagaatttgtaaatcttggtcaattataaatggaaacaactcaggaattattcccagtgcttttcctagcaaaacaaaaacaaaaaccaaatagtgaaacttactaatcaattagagaacaaagttggaggatggcaggatttggttcagtgaatatgcaggttctttctgttgagctgtttttaatttcctattgtcttctgtattcaaaacctgtaagcacagccagcytaaaggaccaatcaaatctctctcatataaaatgatgaactggaagcagggttcaccaaaaagctgagcaaactactgtccagattgtctctggttcctattgaagaatgcacaattaatttcattcataaagcctgattacctttctaagacaggaaactcattctccaaacacaaaaacttgctgatcatccatatgaatagtttgcatatccattttggtactaagttaatttcaaatttgcatttcatcacgtatcttattagtctttaactttatcaggtgtccaagttattttccccacctagatttcaatttccctaagagtaataga

SEQ ID NO: 756270 - DNA, 571 bp, Homo sapiens
agcaaccaagtcctaaaatgtccagtttgctgagaaccatctttgcatttacttactatgaatattttattcatgtatttatttttaatgattgacccactgttctgtacctgcatggagtcaatgttagtttgtaaattcctataggtcagagaatatgttattttaactctatcttatccccatctcatctttcaattttgtatttaaagaatgagtacttaataaataatgctgtcaatgggttcagtaaaataccttagtaagcttttggagcacactatattcttctaccttagttaactgccaatacattaaactctctttttatttatcttgaattgatcatttccccccatttccyataaaatacttagcaaaaggcttgctaatagcaaggggcccaatatatgttaatcattcttttgagaaggtatccagttcttggacttcagattctgtcatttctatattataaacctgaccatatcactcttggtcgtttgagcttgggcaagtcatttaatctgtctacagataatagtacatttttcatagcctttgctatgaa

SEQ ID NO: 756271 - DNA, 592 bp, Homo sapiens
tgagcttgggcaagtcatttaatctgtctacagataatagtacatttttcatagcctttgctatgaattaatgcatgtaaaccacttagcatagttcttgccacataacacaaacttaaaaaaaatactaccattctaattacttttggcaggtcatttgacactagcattccctttggagactcatgcaaactttgccctttcttggcataacctggcctctttgctctctttctgcctacgtccacccactgttactctgctgcacatatttttcttcytcccctgactctttaaaggtgaatatgcttcaaagtttctgatctgagaatgttattacttttacaatacattctagacttagactatctcatttactctcaaaggtttgcacttttatctcatcacttcagtgtatggcattgcctcataattttcagagtaaaaaaagaggccataaggcaggaataccttcatcttgccactgtcaaatctctaaacccacctgtatctgtcctgtcctcgttgtttcacctcttttgcaacataggatgcatctttcctacaaaaacaaaggccgattccttcacct

SEQ ID NO: 756272 - DNA, 498 bp, Homo sapiens
ctgagatgggggtaattattagcacttgaggacacagtagatcagtatataggtatgaaaatacttttaagatgattttaaaattgaactacttatttatttatttttgagacggaatttcactttgtagcccaggctagagtgcagtggcgcaaactcggctcactccaacttccacctcccaggttcaagcgattctcttgcctcagcctcagagtagctgggactgcagacatgaaccaccacgcctggctaaatttttagtatttttagtagagatggggtttcaccacgttggtcagggtggtctggaactcctaacctcaaatgaattgmccaccttggacttccaaagtgctgggattacaggcatgacccattgtgcccggccttaaacttgaacaatttaaaacgtagactgaatgtataatcagttggttctcgaaaaaagttaatctaattcatgcaatgcaaagcattttttggatttagacaaaa

SEQ ID NO: 756273 - DNA, 458 bp, Homo sapiens
tggccaacagacacatgaaaaaatgctcatcatcacttgtcatcagagaaatgcaaatcaaaaccacaatgagataccatctcacaccagttagaatggcgatcattaaaaagtcaggaaacaacaggtactggagaggatgaggagaaataggaacatttttacactgttggtgggagtgtaaacttgttcaaccattgtggaagacagtgtgacgattcctcaaggatctaggactagaaataccatttgacccagccatcctattactgggtatatacccaaagggttataaatcatgctrctataaagacacatgcacacatatgtttattattgcagcactattcacaatagcaaggacttggaaccaacccaaatgtccatcaatgatagactggattaagaaaatgtggcacatatacaccatggaatactatgcagccataaaaaaggat

SEQ ID NO: 756274 - DNA, 619 bp, Homo sapiens
tggtctctgctttgcaattgctgggagaaaaatgaattctgctgctgctgcactgccacaggtacatgtacatatgcctgcacagggcaagggggatggaaacatttgccattattactatccttgaaggggagacctgtctctgtctcccagcctggaggctcatggagggcagggcccctctgggtccccagcgtgattgtctcctcataatgtgggttctccgttctggagggggtgggtgtctgatgtctccagtcagtcatcttgaaccagaatcctactgtttattatgtttataatctgtctctctcacttgacagtgccagccccggtctccagcgtcacgtatcagacactcagtgaatgrtaaacaaaatcaccatcatcatcatcctaaaaaggggtctcagctgttagagaagactcttctgtgtgttttcatggaataatatctatatggttcagaaatggctgtgctgggcactggatcaggtatctttcctgatcctgccctgggaacagcggccccgtacctgtgtacatgtgacatatacatgtgcacatacagtattgtgcgtatatgcataggacatggtgcattgcacataccctctgg

SEQ ID NO: 756275 - DNA, 536 bp, Homo sapiens
cagaggtggccctggctccccttttacccatggatcctatggaccccttaccgccaaggtgcggtgtggccagaggtggccctggctcctgttgcccaggtctcagggtggtgcagacttgagcacagggaaagacaccactccttccgcatcattcaatctgaaaatggactgtggagcctagcagcttcatattggtcggtcatccctttggattgaacattggccctacaaaacttctcttttcaaatgcaactctctcttgctgtcctccccatccctcttttcccatgcagggagtgggacaatataccaggcccatttctggcattgaggatggaaccggggcagatgggaggtaaagaaaaaggagaaaaygtgttttttgttttttgttttttgttttttttttgctaactctgagttgagcgtttcaggagtggcttgggttgccagcattggggagtgtgacggagccaatgggccatgaaatttcagagcatcttgtggttgaagtggaggggcacaccaggaag

SEQ ID NO: 756276 - DNA, 477 bp, Homo sapiens
cacacattcagattttttttttttttttaaaaagaaaaatctaatttctcctttgatccgctattccacttttagcaggaccgccattcaagtcaattcaaggctttccccttctcaccttctcccagaggatggattcagttgaggtggggaaaacatcacatcagtgcatctggggaagcaggcctggctctctgccgtcagctgtccaccctggscgccactggactggccattgcccagctggtccttggtggcggccaccccttgtggactggtggggaatcctcattcctgcccttggtccacacctgcacctgctcttacatcctaccatcccaggctcaaggccctccaggttttctggctctcaggaccatcagatacactcagaaacattctgttgttcgctacacaacaccggggggatgagggcttgtgatgcgtcctgaaccccccggaggttgcttcctgcct

SEQ ID NO: 756277 - DNA, 610 bp, Homo sapiens
aaagggattgggaacactcattgtcttaaataaatcaggattgttatctgagattaaaggtaaattagccctcttctgagtcatgaagaaagaagtgaatgtatgaaccaaatcaagcctcttcaaagagtgcataccaaactcaaggtctttgggatattaaggcttgatattacaccctggaactcttgagaaatcactacctaagccatttaaattaaaccatcttgaccaggctcccctcccattcctctagggagaagagcatatatatgtaactgccagaatcatattactacgttgaatgacasggtcagggcagaacatatgcatcctgaggcttgagccgtaccctaaccctgaaatagtttctttgaccgcaagccgtcagtgattcttctctgcaataaatagtggagacaagactagttttttgactaaattctccaaaggggtgaaacaggcaatcaggtaaaatataaaacaccttactgaaaattaatacaaaaatgccctgattttagcatcatacaatagacaaatatgtttgaaaacacatgctgtctgttatactttaacacggcacaacaggagaattgggagtgaggct

SEQ ID NO: 756278 - DNA, 622 bp, Homo sapiens
tgtctgttatactttaacacggcacaacaggagaattgggagtgaggctggagacaaagatgggaaaaataaagaaataaccttaatgacagaatgctgtcttgcttcacaaaattaattaagtcctccattgcacgagagccacataatctctgctcaaaaagattaacccaatttataccaattaacccaaagcaaatctagctttttgtatgcttaayaggagcatacatataagaatgccacacatcaggattaaaggggagtcacagtaattctactttactgtataagcattaaagcagcagtagtacattatctattttgttgtttagcataaatgttgatttttaagaagtgaagaaggtaaggtggagtccacggtcttggcttttatctacatgccaatcctatgagaggcttggtgtgaagtggaaagtgttgaagtggttgaaaggttagcctttctagcttaaaaaaatctgtcaattattgccattgtgacatttagtaattcaatcaaactttcttaagttcagttgctgtgtctatatataaagtaacaacaatggatatattcccataaacttcatagagttaagtaaaaatcatcacaaagtca

SEQ ID NO: 756279 - DNA, 622 bp, Homo sapiens
tgtctgttatactttaacacggcacaacaggagaattgggagtgaggctggagacaaagatgggaaaaataaagaaataaccttaatgacagaatgctgtcttgcttcacaaaattaattaagtcctccattgcacgagagccacataatctctgctcaaaaagattaacccaatttataccaattaacccaaagcaaatctagctttttgtatgcttaacaggagcatacatataagaatgccacacatcaggattaaaggggagtcacagtaattctmctttactgtataagcattaaagcagcagtagtacattatctattttgttgtttagcataaatgttgatttttaagaagtgaagaaggtaaggtggagtccacggtcttggcttttatctacatgccaatcctatgagaggcttggtgtgaagtggaaagtgttgaagtggttgaaaggttagcctttctagcttaaaaaaatctgtcaattattgccattgtgacatttagtaattcaatcaaactttcttaagttcagttgctgtgtctatatataaagtaacaacaatggatatattcccataaacttcatagagttaagtaaaaatcatcacaaagtca

SEQ ID NO: 756280 - DNA, 622 bp, Homo sapiens
tgtctgttatactttaacacggcacaacaggagaattgggagtgaggctggagacaaagatgggaaaaataaagaaataaccttaatgacagaatgctgtcttgcttcacaaaattaattaagtcctccattgcacgagagccacataatctctgctcaaaaagattaacccaatttataccaattaacccaaagcaaatctagctttttgtatgcttaacaggagcatacatataagaatgccacacatcaggattaaaggggagtcacagtaattctactttactgtataagcattaaagcagcagtagtacattatctattttgttgtttagcataawtgttgatttttaagaagtgaagaaggtaaggtggagtccacggtcttggcttttatctacatgccaatcctatgagaggcttggtgtgaagtggaaagtgttgaagtggttgaaaggttagcctttctagcttaaaaaaatctgtcaattattgccattgtgacatttagtaattcaatcaaactttcttaagttcagttgctgtgtctatatataaagtaacaacaatggatatattcccataaacttcatagagttaagtaaaaatcatcacaaagtca

SEQ ID NO: 756281 - DNA, 543 bp, Homo sapiens
tgcttgctggtggagcaggccctagcacccaataaactggtcttaatttcagttgccttatctgcagtgtttgatgtaacaaaattacctaatacttctcaactcaacacaacatttctggaataccactgtcttctattattactcatattgtggtttactccttttcattgtgtcttttcaaacacgttaatacccttgacctctagatgtcagaggtctytattgatgtgccttttttttcccttccatctatattttcacttgaacatctccttcagacctttaaatttaaaaaccctttgtatatccaaataacctgtccaggttttcctcaaaaggtttgaacaccggaactcacatttcaatttctctattcagtatctccacctagatatttaaaactgaattaatgtccaacaataaactccaggcattgttttcccaagtctgctccagctacagtgattagcattcttctagttacctcatctaaataccataaataccattcttctagttacttcatccaagtaccacttt

SEQ ID NO: 756282 - DNA, 666 bp, Homo sapiens
tcttgcttgctggtggagcaggccctagcacccaataaactggtcttaatttcagttgccttatctgcagtgtttgatgtaacaaaattacctaatacttctcaactcaacacaacatttctggaataccactgtcttctattattactcatattgtggtttactccttttcattgtgtcttttcaaacacgttaatacccttgacctctagatgtcagaggtctctattgatgtgccttttttttcccttccatctatattttcacttgaacatctccttcagacctttaaatttaaaaaccctttgtatatccaaataacctgtccaggttttcctcaaaaggtttgaacaccggaactcacatttcaatttctctattcagtatctccmcctagatatttaaaactgaattaatgtccaacaataaactccaggcattgttttcccaagtctgctccagctacagtgattagcattcttctagttacctcatctaaataccataaataccattcttctagttacttcatccaagtaccactttctgcaaagtgtcatttctgtcttctttttaattctcacatccatattctgttacttccatgcccccatcagcaaatcctgtcatcttttctttaaaaatatattcagaatctaccacatc

SEQ ID NO: 756283 - DNA, 615 bp, Homo sapiens
aaataccataaataccattcttctagttacttcatccaagtaccactttctgcaaagtgtcatttctgtcttctttttaattctcacatccatattctgttacttccatgcccccatcagcaaatcctgtcatcttttctttaaaaatatattcagaatctaccacatctcaccatctccactataaacwtcttgctccaagtcattatcatatattacatagattatttccacttgttttctggtctcactgcttccaccctatcccctaaactctactattaaaacagaaacaaaaaccaaagtggatatacttttgaatagtgtatcccacattatcactgttctgctcaagcttttaaatgtctttgcagctcacttaaaattaaatcttttcattgcactacaaatttctatacggactccctccctgaagtttgataacatcgtttaccgtcactctcctcttcactcagtcagcctcactcacactggcaccttgttgctcaaaacatgctatcaggaaaaggcctgaaatgtttttcctcacatatctacatgattcaatcattcatttcatttaaatatttgttcaaagatgaaatcctcattgat

SEQ ID NO: 756284 - DNA, 616 bp, Homo sapiens
gagctaaagtcttaactaacctataataataaagctcatagaaaagataaattttgctcaatgtcattgtaattgttagagtatattattattattattattattgtaagaccatttaacacgagaactacccttctaaaaaaattttaagggcacattactgcatggataactataggcactatgttacacatgtggtctctagaacttacttatcttgcgtggctggaacttyaaactttatattcattgaacaactcattttcttttccctcagtccctgacaactgccattctaagctttccttctgtgagcttccactgtgttagaggcctcatataagtggaatcatgccgtatttgtatttgtcctttcgtgtagtttatttcactcagctaatgtcctcaagtttcattcgtgttgtcacatattgtaggatttcatttttttaaggctgaataatgtttcattgtatgtatacatcacatttttaaaaatccacttctctttcagaggacttttaggttgttttctcatcttgattattgtaaataatgcttcaataaatatgacagtgctaatatctctttgagatcctgatttcaaattgtttga

SEQ ID NO: 756285 - DNA, 580 bp, Homo sapiens
cctatctttccctcttctgacctaaattctggcaattactgattattttcctatctaagaagatttgacttttccagaatgacatatgtttggaatactacagtatatagccttttctgattgacttctttcactgagtactatgcatttaagttttctccatgtcttcccagaaatctatagctcatttttttattgttgaaaaatattctgttttctttatgtgccatagtttatttatctattcacctagtaatrgacatcttggctgcttccaggttttgacaattatgaataaatatggtataaacatttaagtacaggttgttgtgtgaacataagttttcaactcctttgagtaaataccatggagtgaaattgctggatcatatggcatgagcacatctagttgtgtaaggagcttccatattgtcttccaaagtggctatagcattttttctttctcaccagcaatgaataaaagttcctcttgctccacatccttaccattatttgatttattacttacccattggagatgagaattacttaatatgatactttcccattttggaagact

SEQ ID NO: 756286 - DNA, 607 bp, Homo sapiens
aagatatccatgccctaattcttggaactagtaagtattaatttatatggtaaaacagactttgcagatgtgattaatttaaggatcttgagatggcatgaccattttatgttatctaggtggactataaaggcaatacaaaatatctttaaaagaggaaagtagaggaggatttgacatagaragaagaaaaggtaatatgaccacagaggccagaattgaagtgatgcagccagaagacaagtaatgccaacactcatcagaaactggaataggaaaggaatagattcttcctagcgcctccagagggagcacattttggccaatagcttgattttgactgaattaaactgatgactttggacttcaaaacttaaaagaataaatttttgttgctttaagctagccagttcatggtaatttatccacagccaccttaagaactaataaaatgtccaaatatagtctaaacaatatggtgagaccccatctctacaaaagatacaaaaattaggtggtgtgtgcctgtagtcccagttacttgggaggctgaggtgagaggatcaactgaacccaggaggtcgaggctgcagtgagcaaaaatcat

SEQ ID NO: 756287 - DNA, 607 bp, Homo sapiens
aagatatccatgccctaattcttggaactagtaagtattaatttatatggtaaaacagactttgcagatgtgattaatttaaggatcttgagatggcatgaccattttatgttatctaggtggactataaaggcaatacaaaatatctttaaaagaggaaagtagaggaggatttgacatagagagaagaaaaggtaatatgaccacagaggccagaattgaagtgatgcagccagaagacaagtaatgccaacactcatcagaaactggaataggaaaggaatagattcttcctagcgcctccagagggagcacattttggccaatagcttgattttgactgaattaaactgatgactttggacttcaaaacttaaaagaataaatttttgttgctttaagctagccagttcatggtaatttatccacagmcaccttaagaactaataaaatgtccaaatatagtctaaacaatatggtgagaccccatctctacaaaagatacaaaaattaggtggtgtgtgcctgtagtcccagttacttgggaggctgaggtgagaggatcaactgaacccaggaggtcgaggctgcagtgagcaaaaatcat

SEQ ID NO: 756288 - DNA, 617 bp, Homo sapiens
tcagcctcccaaagtgctgggattacaggcgtgagccacttgcacccagccgagactctactcttaaagtcacctaagtttaggaggaaaaaaagatattgagtatatactcagggtataatactgtgttagatgtagtctcctttacacactattgctgctgataatgacagtaaaagctctctgcctccacagctgtctgaccttttataaattatatgaagttttgatttgcatttctctgatgatttcagtgatgagcatttcacaccagtcagaatggcaattattaaaaagtcaaaaataacagatgttggcaaggctgtggagaaaaagaaatgcttatacactgctggtgggaatgtaaattagttcagtcactgtggaaagcaatttggagattcctcaragaacttagaactaccattccacccggcaatcccattactgggtatatacccaaaggaaaataaatcattctaccaaaaagacacatgcacttgtatgttcattacatacaattgaaacccaaccttcaagccaaagacagtttaaagcctagctacaagtcctggataaatccatggactgaactgagaacctctcttcccgtttgg

SEQ ID NO: 756289 - DNA, 677 bp, Homo sapiens
aacttttgactgtccatttcactagctaagctgcctccattgtacatgtgttcctgataatgaactattctcaaacatctctgcctgtcatgtatgtatcagggacagaaacactttcatagtttagaggaaagatgttcttttcatggtctggcaaaatttttcaatgaaagtttaatcgttcctgatccaaatataaaatttttatatacagaagactaattttgagcaatgtatagaaactatccaatataaaagtataaaaaagtggccgggagtggtggctcatgcctgtaatcccagcactttgagaggccacagtgggtgggtcacctgaggtcagtagttcgagaccagcctgaccaatagggcgaaaccttgactctactaaaaatacaaaaatgagccaggcgctgtggcgtgcrcctgtagtcccagctactcaggaggctgaggccagagaactgcttgaatctgagaggtggaggttgcagtgagccaagatcgtgccaccgcactccagcctgggtgacagatcaagactccatctcaaaaaaaccaaaaaccaaaaaaacaaaaaacctctaacatcacacggtcaggaccttggtgatcagatttgtatatttatgtcaaaccatttacttaacaaatatatactgagtgcctaggatgtc

SEQ ID NO: 756290 - DNA, 677 bp, Homo sapiens
aacttttgactgtccatttcactagctaagctgcctccattgtacatgtgttcctgataatgaactattctcaaacatctctgcctgtcatgtatgtatcagggacagaaacactttcatagtttagaggaaagatgttcttttcatggtctggcaaaatttttcaatgaaagtttaatcgttcctgatccaaatataaaatttttatatacagaagactaattttgagcaatgtatagaaactatccaatataaaagtataaaaaagtggccgggagtggtggctcatgcctgtaatcccagcactttgagaggccacagtgggtgggtcacctgaggtcagtagttcgagaccagcctgaccaatagggcgaaaccttgactctactaaaaatacaaaaatgagccaggcgctgtggcgtgcacctgtagtcccagctactcaggaggctgaggccagagaactgcttgaatctgagaggtggaggttgcagtgagccaagatcgtgccacygcactccagcctgggtgacagatcaagactccatctcaaaaaaaccaaaaaccaaaaaaacaaaaaacctctaacatcacacggtcaggaccttggtgatcagatttgtatatttatgtcaaaccatttacttaacaaatatatactgagtgcctaggatgtc

SEQ ID NO: 756291 - DNA, 658 bp, Homo sapiens
gtgtggcggcgacagcacagagagaccactctaactctcctatacgctgcgatgaacgttgcaggcggccggccagatccttggactcttctgtaatgacagagttgacatggggctcaaaggactccgccttacagacctgtcaaagtgccaggttgaaggatgacagggtgcccagattcccaccttcaaagtatctgagagaatgtttcatgtgatacaggtccgtatttagtttctttttctctgtgttcaatctctggatttgaccctttgggagaaaagccaagcaagtgctgaaatagaaggaaagaaacattctccggaggacaggaggaaacttcacaccctccactcacctctagctccctttcagctttctgtttctcattgtttgctttcttttcctataggaagaggaagacagagctcttaccagggggaggcagagaaggcacagcaagagatatgcccccagaatgccaccaatgccccaggacaggcccacccatgggaccmggttatcagggaccctgtggggatggggtggaatctgaggggtgagcctccttccccaggctgggagtgggtgagacgagactggggcctctacatctgagtgtcccccaaacccagcagtcatgtcgccagcaaacaa

SEQ ID NO: 756292 - DNA, 592 bp, Homo sapiens
ctaacaaaacggcatatgcctcaacagcagcacatcagtgttaaaaagtctggagtcaaggggaaaaagtaaaattggaccatttccagaatctcaccaaaaacaacaaacggatgttgcaagtggcctacatgagcaaattagaaccttaaataaaggtcactcttaatgcctatcccagcatagatgcagcaccaagtacagtgtcattttactggkttacctttttcattcttgaaagtaggagctatgaaaaaaaaaaacactaaaatttcttgaagagaaccttctacttacaacctaacttacgtaatcgaaacactctattgagggtgaaaattgagtattataagaaaataatcacctgttttgtgagaagttcaatacgtaatgctcctccacacaatacataccttagaaagaaaaaaggaaacatacaaaactatctcgagaattattcctgcttaaacaatttctacatgccattactaagaaagtatgcacacagtaaacatgagaagagaacatgcaagcatgaacatacttgttagggatacaggactatgggtaacttaaaaactctgttggtatt

SEQ ID NO: 756293 - DNA, 592 bp, Homo sapiens
ctaacaaaacggcatatgcctcaacagcagcacatcagtgttaaaaagtctggagtcaaggggaaaaagtaaaattggaccatttccagaatctcaccaaaaacaacaaacggatgttgcaagtggcctacatgagcaaattagaaccttaaataaaggtcactcttaatgcctatcccagcatagatgcagcaccaagtacagtgtcattttactgggttacctttttcattcttgaaagtaggagctatgaaaaaaaaaaacactaaaatttcttgaagagaaccttctacttacaacctaacttacgtaatcgaaacactctattgagggtgaaaattgagtattataagaaaataatcacctgttttgtgagaagttcartacgtaatgctcctccacacaatacataccttagaaagaaaaaaggaaacatacaaaactatctcgagaattattcctgcttaaacaatttctacatgccattactaagaaagtatgcacacagtaaacatgagaagagaacatgcaagcatgaacatacttgttagggatacaggactatgggtaacttaaaaactctgttggtatt

SEQ ID NO: 756294 - DNA, 592 bp, Homo sapiens
ttatgcagctgatcataataggaaaagggtatgtatgacttggtgaaaatccaatagcatcatcttgaaatgcaaagaagaacatatttcaaagagcagcagtccagccaatttggaccaattagaagacagaaggaaaatagctagataatcaatagtcagctgatcataatattaatcaaacctttcatgcttcagttctgcaagctgatgttgaatataagataaaatcactcccatttgggctcagctgggattttgagcttattaaacaaaaagaatgagttaaattaacattctaactcagcattaaactcctagaagcaagagaattcatcataaaatgtccatcatctcatcatgattctgtattacaaccccaaaggtaagatcacccagtgttatgygtttctccaacagagaactaaatgtatgagattaaaaaacaacacggtgagctcagtgcagcattgaatactgtcacatttgcagatttaaggtatgctttattattattttaatgtggttttggtcattcttcctttattttttaatatggtggtgtgacttgcattgagctaccttgaaaatt

SEQ ID NO: 756295 - DNA, 617 bp, Homo sapiens
gctaaggataatggtctccagctcaatccatgtccttgagaagggcataatcttgttcttttttatgactgcatagtattccatggtgtatcatgtaccacattttctttatccagtctattattagtgggcatttaggttgattccctgtctttgctgttgtgaatagtgctgtaatggacaaaagcatacatatgtctttacaayagaatgatttatattcctttgggtatatacccagtaataacattgctgggtcaaatttctgtccttaggtctttgaagaatcaccacactgtcttccacaatggttgaactaatttacgcacgacacaaaccagcagtgtataagcattcctttttctccagagcctctccaggaacccttccttacatcatgtacaaaagttaactcaaaatggattaaagacttaaatgtaaaatccaaacctatataaactttggaagacaacctaggcaataccagtcaggacacaggcatgggcaaagatttctggatgaagactccaaaagcaattgcaacaaaagcaaaatctgacaaatgggatttaattaaactaaagaaactatcaacagagtaaacagacaacctacaa

SEQ ID NO: 756296 - DNA, 638 bp, Homo sapiens
agttcttttatcctcaccattcagtgggtcccaagttcttgtcctgtgaaaaggaagaatgaggtacgcagacaagtagagggtgagcaagatgaaggggagccttactgagtgatagaacagctcagaggaaaaccacaggggcagctcctttctgytcccagggtgttccaaggagtgttcggctcctagcagagagggtagctcctctcggctacacaattcatcctgacagatgttcagctatcagcagagcagagacggtagctcctttctgcagctggttgtcccattatctgtgcagcactcagcagagaggagaccctagagggaatggcttctctctgcaggcatgtcatcctgatatctctgcaactgtcagcagagaggaggccctaggttgggttgctcttctctgcagctggttgtcctgaagtctgctcagctctggctgagtccagggcttctatgggccacagaggggaggcagtgcatgcctattggtccatgggcaggcccagaaaaggcacctcaagttcccaatctggtctgtgggactggcagcctggcacccaattttcaggccctccctggcctgaagatggggccttagggggcccgcccccttccacccagga

SEQ ID NO: 756297 - DNA, 501 bp, Homo sapiens
agacatcctagtttgtccagaatattccaggtttattacggaaagttccatgtccctggaacaatccctttccccaagttcctggcaaaccaagacacttggccaacctaacaaaaaaaaatccatttttattataatatgcagcataaaaatgtattgcrtatcaatggacataattatatttaatgccaaaatgttaacatgatggaaaccatcaatatattaattttgcattaagtttgtggttaagtacacatgtaagactttatactaaatgactcctgctatttctatgtttatatttaaacattttattaaaggtgtttccaatttcccagattattgcccttccattttctctatttttaaatttattcctgagcaagtctgttcacataaaattatatgagtgagcacagtgctctagcaaaagtgtgtcatgttcaatcaaatgctgagaaggtttaagcacatttgctcagtgattgctcttttaatggc

SEQ ID NO: 756298 - DNA, 461 bp, Homo sapiens
atgataaaatgtgatctttcaaagcaaaaaatcagaattgtggaagacttgtatccaccacagtgaacctggcagcttcccaatatgtaaaaaaaaaaaaaaaaaaaaaaaaatctaatgagtgacagcattaataaatgtgatttttaatactgtataataaaatttgtcaacatttaaacctgtataactcagtgaatcaatwttttccaaatgactaatatatgatgttataaaatcaggcatgagtaaaagatcaaaaggcaagttaggctaatgccttataatgtaacacaatgctccccaccctttgtggcatcaggagccagcttcatggaagacaatttttccacagatctgggagtgactgttggtggtagtggtttcagaatgattcaagcacattacacttatttgtgcactttatttctattattacattgtaatatataatgaaataa

SEQ ID NO: 756299 - DNA, 569 bp, Homo sapiens
ggactttctcagtattattcccatctttttttttccttttgacatctaatatttctattgcgaatatcagacagaaaaacatagtgttacacaagtcaccagagacaaaaagatagaaagtaatgactttacattttggttcatttaacagtgaattccttgacaaggaagtgatactagaaacttagacagcaacagtgagacaatgtaaaagcatcataggaacataacaatttgaggatgacagggtaggaagtctttgcacaagctggggaagaaagctcaaagtgatctcaatagcaagaaacaatgaaccttggcacattataaaagctattatccccttgctgtggataacgggaactggatggggcatactactgttactttcrgctcctttttgctctgacccattggaatgtacttttttttttttttttaaggagttcaatgtgtagtggagtgttactcaatttttttgaaaactattgatttgccatccacacactttggcgtgacactttgcatttcagaattatgaaatcttaccaatatccaggtgaggttct

SEQ ID NO: 756300 - DNA, 600 bp, Homo sapiens
ttttcaggacctcaggctaagccagagttggaagactgggcccctctaagatctttcctgggcatgtgaaccaccttcaatgtcttcaggagtattatagaattttttaaattcttatatagacatcttatttgccaaatattttacttaagttttgtttttttcagaatctagttgctccaagtggttttacagcttcaggaagcrgtaatattagacaacttccactgattattctcaacaaacttcctggagatagggctttcccgatattggagggaactttgcatcaagtcaaataatggcaatattctataaatgaggatgttctaagcagttataagaaaggtgaaatcatgtcatgctctgtggataaaaatctttgaagaactccaaaccaatcttccctgtcaattgctgcaagtctggttttcacagccactatggttgtgaggttgcttctcttcaaggtttgtatggagatggggagaggaagatgtgactaagtcaagttaaaaggccatgaagttatctgtacttagtggccatgcaatctttctttagtaaacacctctcagaatttaccaagcctttgtataa

SEQ ID NO: 756301 - DNA, 637 bp, Homo sapiens
cttttcaggacctcaggctaagccagagttggaagactgggcccctctaagatctttcctgggcatgtgaaccaccttcaatgtcttcaggagtattatagaattttttaaattcttatatagacatcttatttgccaaatattttacttaagttttgtttttttcagaatctagttgctccaagtggttttacagcttcaggaagcggtaatattagacaacttccactgattattctcaacaaacwtcctggagatagggctttcccgatattggagggaactttgcatcaagtcaaataatggcaatattctataaatgaggatgttctaagcagttataagaaaggtgaaatcatgtcatgctctgtggataaaaatctttgaagaactccaaaccaatcttccctgtcaattgctgcaagtctggttttcacagccactatggttgtgaggttgcttctcttcaaggtttgtatggagatggggagaggaagatgtgactaagtcaagttaaaaggccatgaagttatctgtacttagtggccatgcaatctttctttagtaaacacctctcagaatttaccaagcctttgtataacttctagagtatagtaaaagttgattttgataattt

SEQ ID NO: 756302 - DNA, 637 bp, Homo sapiens
cttttcaggacctcaggctaagccagagttggaagactgggcccctctaagatctttcctgggcatgtgaaccaccttcaatgtcttcaggagtattatagaattttttaaattcttatatagacatcttatttgccaaatattttacttaagttttgtttttttcagaatctagttgctccaagtggttttacagcttcaggaagcggtaatattagacaacttccactgattattctcaacaaacttcctggagatagggctttcccgatattggagggaactttgcrtcaagtcaaataatggcaatattctataaatgaggatgttctaagcagttataagaaaggtgaaatcatgtcatgctctgtggataaaaatctttgaagaactccaaaccaatcttccctgtcaattgctgcaagtctggttttcacagccactatggttgtgaggttgcttctcttcaaggtttgtatggagatggggagaggaagatgtgactaagtcaagttaaaaggccatgaagttatctgtacttagtggccatgcaatctttctttagtaaacacctctcagaatttaccaagcctttgtataacttctagagtatagtaaaagttgattttgataattt

SEQ ID NO: 756303 - DNA, 637 bp, Homo sapiens
cttttcaggacctcaggctaagccagagttggaagactgggcccctctaagatctttcctgggcatgtgaaccaccttcaatgtcttcaggagtattatagaattttttaaattcttatatagacatcttatttgccaaatattttacttaagttttgtttttttcagaatctagttgctccaagtggttttacagcttcaggaagcggtaatattagacaacttccactgattattctcaacaaacttcctggagatagggctttcccgatattggagggaactttgcatcaagtcaaataatggcaatrttctataaatgaggatgttctaagcagttataagaaaggtgaaatcatgtcatgctctgtggataaaaatctttgaagaactccaaaccaatcttccctgtcaattgctgcaagtctggttttcacagccactatggttgtgaggttgcttctcttcaaggtttgtatggagatggggagaggaagatgtgactaagtcaagttaaaaggccatgaagttatctgtacttagtggccatgcaatctttctttagtaaacacctctcagaatttaccaagcctttgtataacttctagagtatagtaaaagttgattttgataattt

SEQ ID NO: 756304 - DNA, 614 bp, Homo sapiens
cggaatttacctgagaatgctggaatacttcacattttcagcgtgagaacaaatcgcaggcaaagaaataacacaggacataaatgagagtataaccagctttgtatcaagcagagcctaactccaaaaactagtgatgcaaacakgggtaagaaactgtactgtggaaaagcagcactggcatgaattagaattccagctccaaaactaattaattgatatctttattcattcattcaaaaaagcatttttgatgttccagacactggattatatgatgttgagctaatattaataatctttctaattcacactttcattatgtataagtaggtgttgataataattgtctacctgaatatattttaaaaatctgagatactatgttgtcaatatctgaaaaatctacaacactatgaacaaaatggttattaaataatatccaaaacaatgtattaagccaagttgggagggagagtttattcatctaagaaaatgctctgtgtcaggctacaggctagaaattgcaagctttcttcgattggaagtaacataatcataattcacatttaatcttttattccttacctcttacaatacacatacaaaccaca

SEQ ID NO: 756305 - DNA, 614 bp, Homo sapiens
cggaatttacctgagaatgctggaatacttcacattttcagcgtgagaacaaatcgcaggcaaagaaataacacaggacataaatgagagtataaccagctttgtatcaagcagagcctaactccaaaaactagtgatgcaaacaggggtaagaaactgtactgtggaaaagcagcactggcatgaattagaattccagctccaaaactaattaattgatatctttattcattcattcaaaaaagcatttttgatgttccagacactggattatatgatgttgagctaatattaataatctttctaattcacactttcattatgtataagtaggtgttgataataattgtctacctgaatatattttaaaaatctgagatactatgttgtcaatatctgaaaaatctacaacactatgaacaaaatggttattaaataatatccaaaacaatgtwttaagccaagttgggagggagagtttattcatctaagaaaatgctctgtgtcaggctacaggctagaaattgcaagctttcttcgattggaagtaacataatcataattcacatttaatcttttattccttacctcttacaatacacatacaaaccaca

SEQ ID NO: 756306 - DNA, 502 bp, Homo sapiens
aagagacctaggagaatttgagataagtaaaatcctgtgacattaataccttcatatacatgtatgtgatgaaaaccaccacacttccacaagatcctcagggtgtcacttttccagctggaaacctctgtggccagtgaagcctttgctcgagttttgctcaggcccactgggcttgttccatccactcagcctagtaagctgtgcttggcttgcactactggcttggatcccatgcctgccaagggcaagacaggtgtggagcagtgaggrgtgtgtgagcaaatgagcacggggtctggccactgtggacaaccaggcacactggctgctgtggaggggcaggcagctccaggcactggcacaggtgccagctccatgcaagcctgcagctggatcagacgcaccacaagtggcttctgctatgggcacctgcatcagggtgaagggaacgtggtggtacccagaagctttgagatggcagaaactgcagacccccaaa

SEQ ID NO: 756307 - DNA, 633 bp, Homo sapiens
aaaaaaagaaaaaaggagaggttgcaatcctagtctctgacaaaacacactttaaacgaacaaagatcagaaaagactaagaagggcattacataattgtcaaggcaacaattcaactagaagatctaactattctaaatatatatatgcacccaatacaggagcacccagactcataaagcaagttcctaaagacctacaaagagacttagactcccacacaataatagtaggagactttaacaccccactgtcaatattagacagatcaatgagacagaaaattaacaaggatattcaggacttgaactcagctctggatcaaatggaactaatagacatctgcacaactctycaccccaaatcaacagaatatacattcttctcagtgccacatcacacttattctaaaattgaccacataattggaagtaaaacattcctcagcaaatgcaaaagaatggaaatcataacagtctctcagaccacaatgcaatcaaattagaactcaggattaagaaactcactcaaaaccacacaactacatggaaactgaacaatctgctcctgaatgactcctgggtaagtaatgaaatcaaggcggaaatcaagaagttctttgaaacccatgag

SEQ ID NO: 756308 - DNA, 493 bp, Homo sapiens
cttagtttacaccatggatgaaaggcccaaaagtaagatcagaaactataaaatttctagaatagaacataaagggaaagctcctagacattggccttggcaatgattttttggatatcacaccaaaagctcaggccgtaaaagcaaaaataaataaatgagactataacagactaaaagcttctgcacagaaaaaaaaaatgaaatggcaaactacatgtcaaaaaataatatttgcaaaccatatatctgataagaggttaatatcatacaactcaataatagaaagccaaataacccaatttwaaaaaaaaaatgggcaaaagacctaaatagacatttctctaaagaaggtataaaaatgaacaatagataaattaagaagtgctaaacatcattaatcatcagggaaatgtaaataaaagccactatgagatacaacttcatgtgcgttaggattattgactgttatcaagatttcaaaagataacaa

SEQ ID NO: 756309 - DNA, 571 bp, Homo sapiens
aaaaaaaaatcaaagatacagagacggagaacaaaacagtggttaccaggagtgggggtgggaggggatgatggggaggaaatggagagatgtagatcagaagatacaaagtagcagatgtgtaagatgaacatatgtagatatctaatgtacaacataaggactacaggtaataaaattgtgcttttttgcgaattcatgctaaattagtagattttaactgcttttgccactaaaacaaaagaaaatggtaatggtgagatgatggatatattaacttgtttcactatagtaacctttttactatccatgtgtattctataacatcatgttgtataccttaaatacacacaataaaatttattttaaaataagtttttaaaaaaagatttcatggrgctttacttactaggttttagatttctttgaaacccaccactttttttttttttctatttttcccttttggaatgaaaatgtctgtctacacctgtttaccatcgtattttgcaagcacataacttgtttaatttcactggttcacagatggagataaattttacctcaggat

SEQ ID NO: 756310 - DNA, 599 bp, Homo sapiens
  misc_feature 1, 2, 3, 4, 5, 6, 7, 8, 9, 10, 11, 12, 13, 14, 15, 16, 17,18, 19, 20, 21, 22, 23, 24, 25, 26, 27, 28, 29, 30, 31,32: n = A,T,C or G
nnnnnnnnnnnnnnnnnnnnnnnnnnnnnnnntaggacaatgacacaatcctgcacatttgtatttaaggctggccatgtgatctaagccacactgatgagaattggccctgggagttttagaagttttgctggaaagaggttgcctttatctgccactatctttgccatgatgatgtaaagcctaagacagaaaccagcacgctgcaaattggagccaagcagggagaattagatagattcttataagttttatttgtttgactagcctgaagctagcatagctctggacttcttagtcacctgagacaatcattaaacttctgccacttgcaaccaaaagattccaggttaatgtatgcctgtaagagagaaggaaatttagtagtcaatgatatagatgaggagaaagtcaagagtgttagcggaagtgacsaacggcaggagtggctgagaggcttggcttttcaacagttgtttgggaagtcattctgagtttaaaaggtgtcttcctaaaagccagacattaaatatttctaagaaagccagagatcggcatcagaatcatattaaaacctcaatatattgaatggattttca

SEQ ID NO: 756311 - DNA, 620 bp, Homo sapiens
atggtagaactgctttggaaaacagttttcagtacatcaaaagtctaaacatagagctaccgtatgatctggcaattccacactaaggtgtatactcaaaaaaaaaaaaaaaaagaaaagaaaacatatccacattaaatgatatacatgaatgtagcaacattattcataatcaccaaaaagtagaaacaacccaaatacccatcaacagatatatagataaacaaaatatggtatatccataaratggaacattttccagtcatgaaaaggaatgaaatactgatacatactataagggaattgactcttgaaaatattatgctaggttaaagaagtcagatacaaaatacctcatattataagattccattacatgaaatgttccagttaggcaaatccataacaacagaaagtaaattagtggttgctaggagctggtgggagtgaagaatgaagagcgattgccaacaagtataggatttcttttctgagtgataaaaatattcctgaatttgatataggagatggttgcataattttgtgactatattaaaaaacaatgaattgcacaccttcaaagtgtgagtgttatgctgtgtgaattccatatcaatgaa

SEQ ID NO: 756312 - DNA, 620 bp, Homo sapiens
atggtagaactgctttggaaaacagttttcagtacatcaaaagtctaaacatagagctaccgtatgatctggcaattccacactaaggtgtatactcaaaaaaaaaaaaaaaaagaaaagaaaacatatccacattaaatgatatacatgaatgtagcaacattattcataatcaccaaaaagtagaaacaacccaaatacccatcaacagatatatagataaacaaaatatggtatatccataaaatggaacattttccagtcatgaaaaggaatgaaatactgatacatactataagggaattgactcttgaaaatattatgctaggttaaagaagtcagatacaaaatacctcatattataagattccattacatgaaatgttccagttaggcaaatccatamcaacagaaagtaaattagtggttgctaggagctggtgggagtgaagaatgaagagcgattgccaacaagtataggatttcttttctgagtgataaaaatattcctgaatttgatataggagatggttgcataattttgtgactatattaaaaaacaatgaattgcacaccttcaaagtgtgagtgttatgctgtgtgaattccatatcaatgaa

SEQ ID NO: 756313 - DNA, 549 bp, Homo sapiens
tcccccaggctggagtgcaatggtgctatctcggctcactgcaacctccacttcccggtttataagcaattctcctgcctcagcacctcagcctctcaagaagctgggactacaggcatgtgccaccatgcctgactaatttttgtatttttagtagagacaggttttgccatgttggccaggctggtcttgaacacctgacctcaggtgatccaaccaacttggcctcccaaagtgttgggattacaggcgtgagccagcatgccctgccatcttaatcattcataagcatgcagatcgggggtattaaatacattcatgctgttgtgcgaccatcaccaccatccatccacagaagtcttttaatcttataaaacygaaagtgtgtccccgtgaacagaaactcctcatttccctctctccccagaccccagtaaccaccatcctactttgtagctgtatgaatttgacctctctaagtaccacatgtaagtggtatcatacagtatttgccttttctggcttatttaacttagcataacgtcctca

SEQ ID NO: 756314 - DNA, 679 bp, Homo sapiens
ggctagggagaccctgcttcttggagcagggagaatgttttgttctatgcatactgccatgcatattcaggaaagcagcagaaggaagccaggagagggatgctaagatgctttattcacctagaaggaaaagtaagaaaggagaagtagcattgtcctgacttaaaccagattagcatgctcctaacacagtgggcttgaaaattctgtgtgtgacgccactgtgcccagaaagaaggtgaacagatcagcaatctatctggttgatccgtcccacattcataggctccttgcctgataccaaccccattctcctgtctgggcccctggggctactggggtgcagtttagattttgccactagaaggctctgaggtgggttaacagcaaggaggcttcatctgtcgaggctgaacttgactcatttctctcttcctgctctgaaagatctccagctgcgttgccaaaccagcasagaccctacagggagatgaatgacccaggaagacaggaaggtaacaagcacacaaggtcactccactgagcaaacggcaacatttgagcctccccaaatttgaatataaacctctcctattatcaaggtcccactgagaaggtacaatttgaagattacatccccttgcaagttggatcccaaagaaattaaggactgatatcg

SEQ ID NO: 756315 - DNA, 620 bp, Homo sapiens
cagaatactaatcattatttcaggctctgtagcaataagactccaaatttcaacctgattctagtatagcatcacataacagatagcaggccctgagagaagtcaaagtaacttacctcaaaatatatttatttggccaggtgcagtggctcacactagtaatcccagcactttgggaggccaaggcgggtggatcacctgaggtcaggagtttgagaccagtctggccaatgtggtaaaatcccatctctaccaaaaaatacaaaaattagcctggcatggcagcacccacctttagtcccagctacatgagaggctgaggcaggagaattgcttgaacctagtaggcagaggctgcagtgagccaagatctcaccactgcattccagccttgtcgacrgggcaagactccctcttaagaaaataaataaataaataaatgaaggtctgaataggaaacatttgccatctattgcttttaagggtggccacctatgagacttcatctgcattaataagaaccttggcctccacaattcctcattttaatccagatattcccttctattgattccaggtctttagataataacttaactcttttaaccaattgccaatca

SEQ ID NO: 756316 - DNA, 620 bp, Homo sapiens
cagaatactaatcattatttcaggctctgtagcaataagactccaaatttcaacctgattctagtatagcatcacataacagatagcaggccctgagagaagtcaaagtaacttacctcaaaatatatttatttggccaggtgcagtggctcacactagtaatcccagcactttgggaggccaaggcgggtggatcacctgaggtcaggagtttgagaccagtctggccaatgtggtaaaatcccatctctaccaaaaaatacaaaaattagcctggcatggcagcacccacctttagtcccagctacatgagaggctgaggcaggagaattgcttgaacctagtaggcagaggctgcagtgagccaagatctcaccactgcattccagccttgtcgacggggcaagactccckcttaagaaaataaataaataaataaatgaaggtctgaataggaaacatttgccatctattgcttttaagggtggccacctatgagacttcatctgcattaataagaaccttggcctccacaattcctcattttaatccagatattcccttctattgattccaggtctttagataataacttaactcttttaaccaattgccaatca

SEQ ID NO: 756317 - DNA, 620 bp, Homo sapiens
tattggagtcttacaaccaaagaacttcgtatacattttaatttatttaaatcttaatctttaatttttcaaaacaaacttttataatttttaccatggaagtctgcacatattttgtttagctaattcctgtatactatataataatatgctatactatactatattaataatatactataatatataattaattatataataatataatataatataaaataatgcaattcatatattattttcatgttattgtatataggrttcttttaaaaattaatttaattggtgctattttgttaaaatacaattgatttttgtatattattctagaattctgtaatcttgataaattcacttattttttctaatagtctttaatagattccacagaatttctacaatgcaattatgtcatctgaaaaattttatttattttatatacatttttaaattcttgtcttataagacaagctaggacctctgtctggtacattgctgaataagtgtgctactgaaactataagttatcttagttttttctttggtatgaaaaatgtctttatttaaacttcatttatgaagaataattttactggatatgaaattctttcttggtt

SEQ ID NO: 756318 - DNA, 620 bp, Homo sapiens
aatgaaactaaaagtaagcagaaggaaaaaagtaataaagactggaaatcaatgaaataaaagccaagaaaaagagagaaaatcaatataacaaatagctgattctttaaaaaaaatcaataaaattgattagactgtaataaatatgataaaaacagaatgaacacaaataattatgaatacctaggataaaatctgatgtgtgcagatcttgcagccattaagatgataataagatgacaataaaaacagctttgtgcacataaattcaacaacttgaaacaaatggactaattcttcaaaaaacaaaaaactactaaaagtcwatcaaaatgaagtaaataatatgaataacttcagccataagaaaaattaaattagagatttaaaccttcccagtaaaggaaccttgtggtacatatgatttcactggacatttaaaccaaatatttaaataagaatcaacactaatttataaataatcttttccaaaaaataaaagagaaagaaacactttccatcccaatttatatgaacaatattaccataaccaataataccacaggaaattctaagactctactaaaaaaaaaagtagagcaatatctcacagaacttag

SEQ ID NO: 756319 - DNA, 620 bp, Homo sapiens
aatgaaactaaaagtaagcagaaggaaaaaagtaataaagactggaaatcaatgaaataaaagccaagaaaaagagagaaaatcaatataacaaatagctgattctttaaaaaaaatcaataaaattgattagactgtaataaatatgataaaaacagaatgaacacaaataattatgaatacctaggataaaatctgatgtgtgcagatcttgcagccattaagatgataataagatgacaataaaaacagctttgtgcacataaattcaacaacttgaaacaaatggactaattcttcaaaaaacaaaaaactactaaaagtcaatcaaaatgaagtaaataatatgaataacttcagccataagaaaaattaaattagaratttaaaccttcccagtaaaggaaccttgtggtacatatgatttcactggacatttaaaccaaatatttaaataagaatcaacactaatttataaataatcttttccaaaaaataaaagagaaagaaacactttccatcccaatttatatgaacaatattaccataaccaataataccacaggaaattctaagactctactaaaaaaaaaagtagagcaatatctcacagaacttag

SEQ ID NO: 756320 - DNA, 623 bp, Homo sapiens
agaatcacttgaacccgggagacagaggttgtagtaagccaagattgcaccactgcactccagcctaggcaacagagcaagactctgtctccaaaaaaaatttttttaatacataacttatcaaaatttgcaggatacaagaaaataagcacttagatggaaactcatagcataaaatacatatattagaaaagaataaagatctaaaattaaaccaattgtttgagatgatcaagtggtatgatacaattattttaacatctgtcccaaatgtcttagaatcacaactcactattgtcagaacaaggaatcatacatacaaaaaataatcaagaactacaatttttaaaagctgtaaaggacaaaaaattatcytaatttaattgtcattttggaaggaaaaaataaagagaaacaactagagccaagaacaaaattaaataaagtaggtgatcagaaaatagtatacacttgccagtaataactcactatataatataatagattgatattcatattttcaacagcaataaaaaataaatatagaaataatttaacatgattttcaaaaaaattcttttctaagatttgtaaagagtttgaataaattaataaaagagtca

SEQ ID NO: 756321 - DNA, 606 bp, Homo sapiens
acggcaactttacaagtcacggtggcggccagacaggttctcatgatgctgccaccagagaaggctcaagcaggttgctaggtcttcatcccggtgtaagcagtgaaaatgactgccttagaaatgcaggtatccatatgaaaagatatttaaatataagaaaaaaatayaaaaagtagaggaagaaccatacaatcaaagaatatgttggcctgggagtagtgataataagagtagaaaaaacaaaagtcataaaagtatatatataatgttactattctacaaatgtaaaaatatacaaagatggtaacatatttttacagtttcatatatatgcatgtgtgtatgtgtgtgcatatacctcaactttaccactggtaaggtggactggaaaccctgggacctgcagccacagctggactccctcaaacccctcaacaccataatgtcttatgtaagatgttacaagacgtaattcaaggtcatggtgacctctagaaagaagagaggggactcaaccttggaaggctatgaaagacaatggttttgtaacgttttattttactagcaattagagaagcaattatgtttattatgtcttatatg

SEQ ID NO: 756322 - DNA, 564 bp, Homo sapiens
ctttcctctaatcacagtggatgtctttgaaaaaatagttcgctgtcagtggccttgtctcattatccacttttgagtcttgaatgaggcttctgcctccaccactccactcagttgataaagcagtggcaggttttgagaggtttgtctccaattttgaaagaagttcctctatggaaaatatgctagcaaacagtattgcatgctacagagaattctttttgtgaaaggaagagtcaatcaacaaagcaaacttcattgctgtcttactttaagcaactgccacagccactccaaccttcagcaacaaccaccttgatcagcagccctcaatattgaggcaagaccttccacagcaaaaacactacaactcacagaaagctcagatgattgtttgcactttttagcaataaagtatytttaaattaaggtaggtacttttttagatataatgttatagcattcagtataatacatgacaatttaaatataacttttatatgcactgggaaacaaaaaatattgtttgacttattttattggtctcataccaaacccacaata

SEQ ID NO: 756323 - DNA, 553 bp, Homo sapiens
tcactcataggtgggaattgaacaatgaggacacatggacacaggaaggggaacatcacactctggggactgttgtggggaagggggaggggggagggatagctttaggagatatacctaatgctaaatgaggagttaatgggtgcagcacaccagcatggcacatgtatacatatgtaactaacctgcacattgtgcacatgtactctaaaacttaaagtataataataataaaataaaataaaataaagaaataaaataaataaataaattaagcctggaccaacactgtggtagtcagtaaaacagtttaattagctgatgactactcttcagtgcatgatcttggaacactaaataggctttatggatcctttaataagttgtgctttatttttactccactgttttsaagatgattttggatttttaatacttcaccttcttttataagagcttctgtggattaaattagtaaatcaacgtaaaaataaatatcaactaccctgtacaataattatgttcagtatataataatgggcaacacaatagt

SEQ ID NO: 756324 - DNA, 535 bp, Homo sapiens
cccttcaaggttttgttttactttggtttcagttttttgttaagtacaaggaggaaggtatttttgcatgatttctgcttgtgtattttaattattctgtaaattagctggttagccaaaagatgcatataatatactcttcaaaaatctaattgttttaaaaacaaaaatatctactttaaaatgtaatgtgaaaatggggagtctctgaacctattctagtttggggctgcctgattaaaaataaaattttttttaaaaagtaatgggaaaatggtagcctctactgataacatctcagttcctaarcaagtactgtaaaaaggtatcagaactctgtctctctctctctctctctctctctctctctctgtgtgtgtgtgtgtgtgtgtgtgtacttcatcagctgtttcctatcagtctcaataacaagccatttcaaaatcatttcagggaatgaaacttgaagggaggaaaaggtgagcctgcctaaaaccctgttgataagtggctttgttccttagaaaacaaaccc

SEQ ID NO: 756325 - DNA, 677 bp, Homo sapiens
tatcagaaaattattttattgctcagtaatattccatagatgaaccatagtttatttatctatattcaccagcaaagaacatttaagttgttcactgtttttggcaattatgaagaaagccactgcacacattcataaacaggcttttatgtcaacataagttttcatttctcttgggcagacacctattaagtggggtcactgggmcacacagttaagcatatttctaattttataagaaattgcatccccaccagcaatgtataggagctctagctgttccacatccttgacagcccacaatttgaaatccagcatctgaaatctcatctgtatactttcttcagtgaaacatttgttcaagtctttttgtctattttattttgttgggctgtttgttttactatgattgaagtcttttgtcagatatgtattgtccaaatattttgtcccagtttgtggcttccctttttgttaactgtcttttgtgaagagtttttaatttgtaagaagtgtattttatgactgttttccttaatggagtatgcttagtgctgtatctaagaatactttgcctaacccaaagacacagagatattctatattttcttctatttttaagaatctccatttagattacctactttgagttcattgttttttctatagtgagatat

SEQ ID NO: 756326 - DNA, 634 bp, Homo sapiens
ttcaagatggagaaagaggtcacaagccaaggaatgcaggtgatctttagaacctggaaaaggaagtgaaactaattcttccctgagtttccagagggagcatggctctgctgacatcttgacttaagccaaatgaaactgacttcacacttctagcctccaagactgtaagataataaatttctattgttttaagccactacrtttgtggtaatttattattataacaatggaaagccaatatgataggattttcatattttttaatatgtcacattatcccatggaacactcagaagtctttgtataattcatcccaagctgtatttttgtcctgaaaatgcaaatctttaaagactagcctccattcttctttctcttttctaaggaaggtccaggactttacctcttaaaattccttgaaagttcagtattcaataaatataagactattcaggcaggtagaaagcaatagagcaggaatgtcatcttctaagaattatatttaaatgaacagtaaagtttcaggatccaaattcaatgtgcaaaaatcattagcatttctatacaccaataacaataaagcagagaaccaaatcgagggctcaatcccatttacaatagctacagaaaa

SEQ ID NO: 756327 - DNA, 696 bp, Homo sapiens
aatgtcatcttctaagaattatatttaaatgaacagtaaagtttcaggatccaaattcaatgtgcaaaaatcattagcatttctatacaccaataacaataaagcagagaaccaaatcgagggctcaatcccatttacaatagctacagaaaaaagtacctagtaatacctttaagcaagcaggtgaaggatctctacaaggagaactgtaaaatactgtgaaataaattatagatgatacaaaaaaatggaaagaatcacatgctcatggattggaagaatcaatatcattaaaatgaccatatcacccaaagttatctatggattcaatgaaattcctatcaatttaccaacatcacttttccacagtattaaataaaaaggactaatatccagaatatacaaagatctcaaacaactcagtaagaaaaaaacagcctcattaagaagtgagcgaaggacaggaacagacattttcaaaagaagacattcaagtggccaagaaacataygagaaaatgctcaacatcactaatcatcagagaaatgtaaattaaaagcataatgagatatcatcttataccattcagaatgactactattaaaatgtcaaaaaaataacagatgttggcaaagatgcagacaaaaggaaacacttatacactgttggtgtgaatgtagatcagtactgcctctg

SEQ ID NO: 756328 - DNA, 638 bp, Homo sapiens
acactgttggtgtgaatgtagatcagtactgcctctgtggaaaacaaagtttctcaaataactaaaagtagaattaccattccatgaggcaatctcactgctgggtttctacccaaaagaaaacaaattattatgtaaaaaagacatcagcaatcatatgcttatagaagcgctattcacaatagcaaagtcatggaatcaacctgtgtccatcatgtatgattgaataaagaaaatgtggtatatataaaccatagattactactcagccataaaatgataaaatcatgtcttttgcagcaacgtgaaactggaagctattatcgtaagtgaaataactcagaaacaaagtcaaatatcacatattcttacttttaagtgggaactaaacaatgtgtacacwtgtacatacaaagtagaataatagacattgaagactccaaaaggtggcaggtgagagaggggtaggggatgagaagtaaactgcctattgggtataatggacactatttgggtgatgattacactaaaagcccagacttcaccattatgcaatataaccatataataatagaactgtacttatgcctcctaaatctataaaaaaattaaattttaaaaaatgaagagactggacc

SEQ ID NO: 756329 - DNA, 623 bp, Homo sapiens
gaaatgaaacttctaggctaacacacattctccctttcctgcatcattctttcccattgttccccagacaatcattgtcctttacacatttccgaagtcagattccctactccatctctgattcttttatcttttatttttcagctggcatatagcatctgtataaagaaagtaggttatattacttttaggaagccagaacacaatttgtagaaaccaattactttcatytccctaaaagcatttttcaacagcaagagctcaagtctctaataaggtataccgcatcaataaactgaagagtttggttcagaattttaaatttttaacaagaaagttatacaatattatagttattatgttaatttggcactgattttaaaatctggtatagtatgcactcaataatttagagatgaatttgtaaattgtccatatttcaccagttcttttatctattggatagtggaaaactaattcagatatccctttataggtgactttcaaatttatagaattatttctttgggaaacaaattcttttttctgacttatattgaaaagtataaattttgcttttgaaatgtgatctctaaagacagaagacaaggttgccaggacag

SEQ ID NO: 756330 - DNA, 605 bp, Homo sapiens
agaaacttctatgtccctcctgccccaaggactaagaagtttacttcgttagatcacttactgtatattacttaacatttcaatggttctaaatgtgtttactttttcaaatccaatttgaaaaactttaattaaattgccttgaagaagctcacccaagaacgactataaatagacatgggaaatatactttaccactttttaaactttcgcaacataagaatacaatgcacttgatgagttaatgtcaaataaaacttggaacttggcgacttgcaacttcttaagatccatcatttccttcctatcgaatgagtcataatttttagaaccacctttgttatcaggaagaatagaagtaatgtgtaggcattgtgtttatakaatttcaaagattgctgggttctgtggtaggaggtagaattttcttttctttaaataaaacttattagcattggtaaatgttcacaaaaatatttctcctagctttcttttatttgtgctatatacactgaggattcctaaattcagttatttcctacttaggaatatagtttgagtcttaaaaaatatcttcagctatgtgtctgtgtgtgctatgttct

SEQ ID NO: 756331 - DNA, 642 bp, Homo sapiens
aagttgaagttttcttttaattgaataaagtaaacaaacaaataaacttggcttgaaaatgctttttttttaatgttcctgtacttgagttttttgtttctaatttatcaagattgattgtttagtaatatggtttggctgtgtccccacccaaatttcatcttgaattgtaactcccraaattcccacatgtcataggaagaaccccatgggaggtgattgaattatgagggtgggtcttttctgtgctgttctcatgataatgaatgagtcttacaagatctgatggttttaaaaagaggagatcccctttacaagctctctctctttgcctgctgccatccaagtaagatgtgacttgcttctccttgccttccaccatgattgtgaggcctccccagccatatggaactgtaagtccattaaacctctttcttttgtaaattacccagtctcgggcatgtctttatcagcagtgtgaaaacagactaatacagttagcattaatgatctggtaatagttttcttagaattataagaataatgaacaattattattccatacataattgataatatgattagaaagaaaaataattgttccaatttagttcctactgggcagacatttttatacaacaa

SEQ ID NO: 756332 - DNA, 588 bp, Homo sapiens
tagctgcaactttcaactgttcttacaaataaaaacatttttaaaaaaccagttttatccacttccaaatcctaagacaaagaattaattaaactaccttcatggaaaagagacaaacatttttaaaaatcaaatgcattctgacataaaaacattacaaacacttgcttacttaagattagaaaaaccaaccaaagtgatgcccataaaaatggtgaaattacattatgagcctatggaagagctgatcttaactatcatattcagtattaattttttgaaaacaatattyatcttaaagacttttcactattaaatataatccaaccttaacaaacatttaaaacaaatgcttgtgtaaccaccatgcacgttatgaaaaataatactgctgcctctccaaagcaactccataaccctcccccagagacaacttagcctgactgtggcaatcacttccttgcatatcttttacttaatatataaatatgcacctaaatatgtgttctgaaatactattgtgtgagttttgccaatggctactggctactacattgaaacatgcagatacagaacacctcgtcatct

SEQ ID NO: 756333 - DNA, 626 bp, Homo sapiens
ctgtgctgtttaggaagtttccaagaaagaataataagaaaaagtagattttttttcaacatataggagactaatttttcactcagagttattatttatgtgctcactgtggaaaatttggaatatatgatgaaaaccaataaaaaattgagaaaattcaaccatttataattttactagccagccatcatgtttaacattttcatatgctttcataataccaaacatttggtatttatgtagttgaaaatgttctcaagtatttcaaatgtgctcttgcagagcacagaagtatactagcgtaatacttgattttgcytctgtgcaggctctggtcacgcctcctgttctcttaagagttttcatcaggattacacttagagcgggtttgtgctagtgcaagaggctttttgtagagaaacaccagaggtctatcccctcgtctttctacaagactctttccttctacagttgagataagtgggctgatctaacacgtccataaaattggtaataccacagtgaaaaatatccatgtacccagtttaaattctacacaagccctgtaagaagccacttctcttttctatctgattagatcatactttggcctttgtgttaaacct

SEQ ID NO: 756334 - DNA, 571 bp, Homo sapiens
cggctaatttttgtatttttagtagagacagggttttgccatgttggccaggctggtctccaattcctgacctcaggtgatccgcctgcctaggcctcccagcccaaagtgctgggattacaggtgtgagtcactgtgcctgcctggcttgkttttttttttttggtttttttttttttttttttttttttctgagacagtctcaagcaattctcacgttttggcctcctaagtagctgggactacaggcacgtgccaccatgcctggttaatttttgtatttttttgtaaagatggggtttccatgttgtccaggctggtctcaaactcctgggctcaagcgatctgcctgccttggcctcccaaagcaaagtgctgggattacaggtgtgatccactgcacctggcctatctgacacatttttaagcaagtgtgttaaaggtggacaagaatgaagagttaccattttcacgccaatcctgagctttaaacttcacagacatagtgacaagtattgatttcttgcatatgcagaattttactgaagatttcccatataattttcaacag

SEQ ID NO: 756335 - DNA, 571 bp, Homo sapiens
cggctaatttttgtatttttagtagagacagggttttgccatgttggccaggctggtctccaattcctgacctcaggtgatccgcctgcctaggcctcccagcccaaagtgctgggattacaggtgtgagtcactgtgcctgcctggcttgtttttttttttttggtttttttttttttttttttttttttctgagacagtctcaagcaattctcacgttttggcctcctragtagctgggactacaggcacgtgccaccatgcctggttaatttttgtatttttttgtaaagatggggtttccatgttgtccaggctggtctcaaactcctgggctcaagcgatctgcctgccttggcctcccaaagcaaagtgctgggattacaggtgtgatccactgcacctggcctatctgacacatttttaagcaagtgtgttaaaggtggacaagaatgaagagttaccattttcacgccaatcctgagctttaaacttcacagacatagtgacaagtattgatttcttgcatatgcagaattttactgaagatttcccatataattttcaacag

SEQ ID NO: 756336 - DNA, 526 bp, Homo sapiens
ctgtctcaaaaaaaaaaaaaaaaaaaatctcagaacacaaggaaaaaagtcttatgtaaaacattactagtggcctacctaaaggcctttttatttatttattttttcttgctaaaagtccattctagtttacctagcccaaggaacaaatgtggtgccctaagccaattatctcatttttcgttccaaattgatctgaggtgtgcttttcactgaatccctgccaatgagggcaagaatagtcagctaggagtttctgggaaagatgatacggaagatctctcttaccctttctccttgtatgagggtgkaatgcttggagctgccccaaccatcctatgacttgaaggaagacagagggtgatccagcaggaaaatagaaaaaggctctacaccatcctgacattttttatgcagacttttggttaggtaaattaaagaactctattgtttaagtacgtttgagttgaggattttgttacatgtagccaaaagcattcaaagggtgtgtgtgtgtgtgtgtgtg

SEQ ID NO: 756337 - DNA, 669 bp, Homo sapiens
tgtcccacagttgagtcaggacccataatttcttcctgctttcccatgctattcctttccttattgacaaatgccatcatcttttctctcactgcctacatcatccatccatttgtttgttaggtctatcaatcacctaatatgtgtcagcaattttccctttttttttttttgactcttgctctgttgcccaggctggagtgcagtggcatgatctcggctcattgcaacctccgcctcccaggtacaagcaattctctgcctcagcctcccgagtagctgggattacaagcacctgccaccatgcccrgctaattgttttgtatttttagtagagacggggtttcaccatcttggtcaggctggtcttgagctcctgacctcgtgatccaccaccttggcctcccaaagtgctgggatgggattacaggcgtgagccactgcgcctggcctatgtcagcaatttttctacaaataagattatagtggtgtacaaaacaaacacagtttctgttcttgtagaattatgttttagtggggaacaaagaaataataatgcttaaataaaggagagacatgagaagataagagttgtatgcatactttggatttgaataatttgggaaggcctctctgaggacttgacatttaagctgagtcgtgaatgac

SEQ ID NO: 756338 - DNA, 669 bp, Homo sapiens
tgtcccacagttgagtcaggacccataatttcttcctgctttcccatgctattcctttccttattgacaaatgccatcatcttttctctcactgcctacatcatccatccatttgtttgttaggtctatcaatcacctaatatgtgtcagcaattttccctttttttttttttgactcttgctctgttgcccaggctggagtgcagtggcatgatctcggctcattgcaacctccgcctcccaggtacaagcaattctctgcctcagcctcccgagtagctgggattacaagcacctgccaccatgcccggctaattgttttgtatttttagtagagacggggtttcaccatcttggtcaggctggtcttgagctcctgacctcgtgatccamcaccttggcctcccaaagtgctgggatgggattacaggcgtgagccactgcgcctggcctatgtcagcaatttttctacaaataagattatagtggtgtacaaaacaaacacagtttctgttcttgtagaattatgttttagtggggaacaaagaaataataatgcttaaataaaggagagacatgagaagataagagttgtatgcatactttggatttgaataatttgggaaggcctctctgaggacttgacatttaagctgagtcgtgaatgac

SEQ ID NO: 756339 - DNA, 703 bp, Homo sapiens
tggcaggcaggagagttaatacagtctgttaatacttaaagagacgagggttgtctaaaggttccattgtcaaaggaagcccggggatggattctggctacaaaccagggagggacatttctatccagccttgcactagtcctaattggaagtggcatgacccactggactcagagcaggagtatctacttgctgctggcttgttctgtgagttgaggcaattccctgatgtctgatacctttatttccccaactgtaacatgaactaactgagtgattgcctacmtaggcttgttataaatagaacaaatggcatgtctgtgcagctgctttcattctcctactctcagaatggttaaaaccagggtatttaatttcccttagaaagaaagattttcaggagcagcttggagttataggcactgaaaaggaggatcggtgcccatcactctattggctctcagacactgcccacctctagagcaacacaatatcacacaactctggtagatcatgatacaggatctgagaagacttgaagattacaggaaaaattaaagctgggaatgtctatttggattgaaaatggttcatggggactcctatcaggactaagctccagttctgaacatttaacaaactgttttctgcctgcatcttctgcatccaaacattcaattgtattttcaacctgaaaatgcct

SEQ ID NO: 756340 - DNA, 703 bp, Homo sapiens
tggcaggcaggagagttaatacagtctgttaatacttaaagagacgagggttgtctaaaggttccattgtcaaaggaagcccggggatggattctggctacaaaccagggagggacatttctatccagccttgcactagtcctaattggaagtggcatgacccactggactcagagcaggagtatctacttgctgctggcttgttctgtgagttgaggcaattccctgatgtctgatacctttatttccccaactgtaacatgaactaactgagtgattgcctacctaggcttgttataaatagaacaaatggcatgtctgtgcagctgctttcattctcctactctcagaatggttaaaaccagggtatttaatttcccttagaaagaaagattttcaggagcagcttggagttataggcactgaaaaggaggatcggtgcccatcactctattggctctcagacactgcccacctctagagcaacacaatatcacacaactctggtagatcatgatacaggatctgagaagacttgaagattrcaggaaaaattaaagctgggaatgtctatttggattgaaaatggttcatggggactcctatcaggactaagctccagttctgaacatttaacaaactgttttctgcctgcatcttctgcatccaaacattcaattgtattttcaacctgaaaatgcct

SEQ ID NO: 756341 - DNA, 612 bp, Homo sapiens
tagcataagttggattcagtaatctggctttgtttctcgatgattttagggggccaagactcagctcagcattcctgcgctttgctctctatccctggagggctgagaccaggcccaaaactttgttctctggcacctcaaagttaagcacctgctgcacttgaggaacctaggtatacctggtgtgctggcaacaacactccaacaggcagtgccggcaaaagcactttgtcagagcagtgacagtggcatctgcagtgtgtactggcagggttgagatgactacagtgaagtccatgcatgcacaagcacactgmtagcggtggggcagtgaggtctgctcatgcagtggcaaagcagtgttgagagtctgtgggtgggtgcctgtcagcaaaatgatgtgggaagctatgcatgggtgcatgttgtggggtaccatctgcagaagctctccaacagttaggcaggacctacctgcaaatgagctatggtggctgctgccaggaagtaccccatttgggcatccagggctgtgcttcaagcagacttggccaggcaggaaccctaggagaggctggtagacagaggtgcactcagatcagactggctctt

SEQ ID NO: 756342 - DNA, 458 bp, Homo sapiens
tatatgacttgaaaagaaactatactgactttacaacagctggaaagtgttattccctcattgttgtcctataagcagaggcgaagatcctagtcctctcttacactaaccctgtctgtcaaggcctcaactcatggttcctaatattcccagtcacatttacctaagagcctagccacatagtttgtctctgaggcagatagctagttaaagttagattcatgtraataaaacaactggactttccaatacttttgcaggggtgaaagtagtgtgacactaggctcaggagtaggaatgggtttcagcttgcataatcacaaatgtaagtctgactaaaaaatagatattaacattaatttactctgagaaaaagtcaaatgtttttaaactcatataaataatacctcttgacaaaagtatataaaattctttctgctgctattaaaataaataaa

SEQ ID NO: 756343 - DNA, 613 bp, Homo sapiens
acctagttctgatcatgccaccatcctggaccacgtgaccggaaggtagataaccaagtttaccagcaataaaatcctgggcccagacagcctccaacaccacagcttccaggcagtgagggagtccctggtgcagggcaagccacagcaactgttttagaggccatccacagccaaggccgttgagactctggacaatttcctgggatgaccgccagcttgagtctgcatggtgctgctgagacagggtggaagagggagctgggtggcccttactttcctttgcttaaaggtggccctgactttccttttcacagagtggtttcctgaatgtgtaaatgtgaaagtaaaatacaatttaaaatatgtgcctatatatatatatatatatatatatatatatatatatatatatatacacacacacatacatacacacacagacacataaatcccttcagccaagagtggaaagcatattggctcaaagcaattaagaaaatatctgtccagtcattccaatcattagcagatctctaagctaactgagcagtatcttttaamcggtacacacaacagggaataaaacctggaaagaattactccagaaatg

SEQ ID NO: 756344 - DNA, 582 bp, Homo sapiens
aatctgaatatacttttttagttattttaaaatgtacaatatatgagtgttgactggtcaacttgtgctgtcaaatactagatgttattcattctgctttttaacccatttagcatcctcacttcttccctcctcaccactctgctactcttctcagcctctggtaaccatcaatctagaccctatttccatgagtttaattgtyttaacttttggcttccacacataagtgagaacatgcaaagatggtctttctgtgcctggctaattccatttgacataatgacctctagttctattcatgttgttgcacacaacaggatctcattcttttctttttttatggctacacagtactcaatggtatatatgtaccacatttgtttacggctacatagtactgcattgtagatatgtatcacattttctttatacattagtcttttgatgcacacttagtttatttccaaatcttggctatagtgaatagtgctgcaagaaacataggagtatacatatctctttgatatattgatttccatccttttgggtatatacctaccagtgggactctcagatcat

SEQ ID NO: 756345 - DNA, 582 bp, Homo sapiens
aatctgaatatacttttttagttattttaaaatgtacaatatatgagtgttgactggtcaacttgtgctgtcaaatactagatgttattcattctgctttttaacccatttagcatcctcacttcttccctcctcaccactctgctactcttctcagcctctggtaaccatcaatctagaccctatttccatgagtttaattgtcttaacttttggcttccacamataagtgagaacatgcaaagatggtctttctgtgcctggctaattccatttgacataatgacctctagttctattcatgttgttgcacacaacaggatctcattcttttctttttttatggctacacagtactcaatggtatatatgtaccacatttgtttacggctacatagtactgcattgtagatatgtatcacattttctttatacattagtcttttgatgcacacttagtttatttccaaatcttggctatagtgaatagtgctgcaagaaacataggagtatacatatctctttgatatattgatttccatccttttgggtatatacctaccagtgggactctcagatcat

SEQ ID NO: 756346 - DNA, 582 bp, Homo sapiens
aatctgaatatacttttttagttattttaaaatgtacaatatatgagtgttgactggtcaacttgtgctgtcaaatactagatgttattcattctgctttttaacccatttagcatcctcacttcttccctcctcaccactctgctactcttctcagcctctggtaaccatcaatctagaccctatttccatgagtttaattgtcttaacttttggcttccacacataagtgagaacatgcaaagatggtctttctgtgcctggctaattccatttgacataatgacctctagttctattcatgttgttgcacacaacaggatctcattcttttctttttttatggctacacagtactcaatggtatatatgtaccacatttgtttayggctacatagtactgcattgtagatatgtatcacattttctttatacattagtcttttgatgcacacttagtttatttccaaatcttggctatagtgaatagtgctgcaagaaacataggagtatacatatctctttgatatattgatttccatccttttgggtatatacctaccagtgggactctcagatcat

SEQ ID NO: 756347 - DNA, 641 bp, Homo sapiens
gaatggaatgaaaaaatattcaactctgtaatatctacaagcgactcacttcaactttaaggacaagaacacacacagattgaaagtgaaaggattataaaagayattctatgtaaattgtaaccaaaagagagagacagtagctacgcttatgtaagataaaatagatattaaattgaaaactgcaaaagaaacaaagtcatcatataataataaagtggcaaattcagcaaaataatatacaatagtaaatatatatgtacccaacatatatgaatagatcatccagacagaaaatccatgagaaaacatcaaacttgaaacacactgtaaaccaaatgcacctaacagacatatacagaacatgctatccaacaactgcagaatacaaattcttctcaagtacacatgaacattctctaggatagatcatatgttacatcacaaaacaagtcttaatgaattcaagaaggttgaaattttaccgagcttgcttacaagcagtcttactgctgagtatatcccaaagaaaggaaaccagtacatcaaagagatacctgtacttccatgtttattgcagcactatttgtaatagccaattgaaatattaccaagtataaaactagaaactaatatagcta

SEQ ID NO: 756348 - DNA, 576 bp, Homo sapiens
tggtatatagaatagttacatgagaagaaatgtgtattttattgtaagtctgagaaattattgattatggtaactgcattttggtgttctacagttagagtatattttatttcagtgaaattaaaattcttatagttcatatacaaatttaatattttattyttttatgctactttaaggttttaaaacttagccacatttattattaacataatccaatattgcattctataggtttctttagagacgcgggctcaggcaatggaaaaagaccaattggcccaacttttggaagaaaaagatttgcttcagaaagtacagaatgagaaaattgaaaacttaacacggatgctggtgacctcttcttccctcacgttgcaacaggaattaaaggtaaaattaaaagatgacagcttaaacttgatgtacagagaatagaattggtatttctatatgtttattatatagtatgcactttctatcctttgatacagtatattcaagaaacccagaagattttgtgtttcatagtacctaagagattcattaaaaatgccaatttctgattcctatttg

SEQ ID NO: 756349 - DNA, 594 bp, Homo sapiens
gcttttttttttttttttttttttttttttgagaaggagttgccctctgtcgcccagggtggagtgcagtgtgttatgatctccattcactgcaacctctgcctcccagattcaagcaattttcctgcctcattctcccaagtagctgggattacaggcacgcacacactcctggctaatttttgtatttttgatagagacgaggtttcaatgtgttggccaggccgatcttgaatccctgatctagtgatccgcctcctcggcctcccaaagtgctgggattacaggcgtgagccacagcacccagcccagcttttctttattgctataaccttaaagttggaagtgatttcaaagtttctctagcttaattgctcctttccacaacaatacatcacatctttgaatatctttgactattaraaaattcctgctatttgaactaaaatctgcctatttgtaacatgcatcctttgaatcttgttcagttatgttttatatgttcagaaagaatattttaagaaaaaaatgaactcggagaaaagatcataaagcagaatttaagaacttaaaaattgcttcaataaaggaaat

SEQ ID NO: 756350 - DNA, 611 bp, Homo sapiens
tatcaacagtttctttgtgttcttttgatagcatacgagcagtttttagttcctgttgtatttccagatcctttatggttagaagaaatcaagaaatgtaatgatataaaggcacgttacctttacttaatgattgagtttaaacaaaatcttaaaaattatacactcacagttaaaaacaaccattatacaacctcctaaattagaagagtaaagtaaaattttctgctggtagcctcacccatagccttctcctttcayaccacttggacatctttctaaatcaatatcacaaaaagaataccccattcttatgcttagttttccattatacagatagtgccttattattggtggacacttagattatttctaggttttagtcaccagacacaacgctgcagtgaacactgtatttttgcccaaatatgtgaatataatggtagggtaaagagagaacacaactcactctagctttggtttcttgcaggctttccttgagttggtctctctccagtttgagtgtctcctctactcttcttagattatctctttctttcattacagatttcatttcttcaaggttttcatgaagtttctgagccaaattt

SEQ ID NO: 756351 - DNA, 658 bp, Homo sapiens
tatatatttgatgtgtataagcagaaaagttctaggtcaagtaaacaaaagtctaatctgaaacagaaaaacagagacacatgttccttaatctgtttttctactttagccagtttacagactcagaacacctcgggtgaaagggtagccaattccccttgaggaagagccctggtacattgccaaaaatttgtacagctaatctttctcccacccttccccaaagggacatacagttatcagggtaactgttcattgaggaaaggggaataatcagaacttttaggggctcctgggcactggctctaaactgacattaattcctggagacccaaaacatcactgtggcctactagtcacagtagaagtttattgagtcagatgatcaatggagtttgagctcaggtccatctcacagaaggtcctcaaatacaccctgtggttatttctttagttctgagaaagcataattagaattggccaagcayggtggcccacgccagtaaacccagtgctttgggaggctgaagctaacggatcacttgagttcaagaccagcgtgaccaacatggcgaaaccttgtctctactaaaaatgccaaaacttagtcaggtgtggtggtgctcacctgtaattccagctactcaggaggctgagg

SEQ ID NO: 756352 - DNA, 681 bp, Homo sapiens
gacaaaatctctgaattgccagaaaaagaattcagaagatcaattattaagctatcaaggaggcaccaaagaaaggtgaagatcaactaaatgagtaaaaaacatgatacaggatatgaaaggaaaaaaattcttcagtgaaatagagcgcataaataaaaaacaatcacaatttctggaaatcaaggacacacaagaagtttaaaatgcactgggaagtctcagcaatagaattgaaaaagcagaagaaagaacttcagagctggaagacaaggctttctaattaacccaatccaccaaasacaaagaaaaaagaactttaaaaaatgaacaaagtatccaagaagtttggaactatgttaaacatctgaacctaagaataattggtgttcccaaggaagaagagaaatctaaaagtctggaaaacatatttgagggaataattgaggaaaaaatccccagccttgctagagacctagacatccaaatacaagaagctcaaagaacacctgggaaattcattgcaaaaagatcatcacacaggcacatagtcatcaagttatctaaagtcaagatgaaggaaagaatcttaagagctctgaggcaaaagcatcaggtaagctacaaaggaaaacctagcagattaacaacagatatctcagcagaaaccctacaagctag

SEQ ID NO: 756353 - DNA, 694 bp, Homo sapiens
gatattgtaattgtgttgttagctggttattatgctggtttgtttgtgtggttgctttatagtgtcactggtctgtgtacttaagtgtgtttttgtattggctagtaacaatacaaaactctatggtaatgaactccctcagcacttgctcatctgaaaaggatcttatttctccttcgccgagaaagcttagtttggctgaatatgacattcttggttgaasatttttttctttaagaatgttgaatataggcccccaatctcttctgtcttgtaaggtttccactgagaggtcaactgttagtctgatgtggtttcctttgtaggtgaactgccctttctctgtagctgcctttaacattctttcacttcaactttgaaaaatctgatgattatgtgtcttggggatgaccttctggtgtagaatcctgcaggggttctctgtgtttcctgaattttatttttggcccctttagtgaggttggggaagtttacatggatgatatcctgaaatatattttccaagttgtttgctgtctcatcatccctgtcaaggataccagtgatttgtagatttggcctctttatataatcccacatttctgaaagtttttgttcattcctcttcattcttgtttattttcatctcactatcttacttcagagagctagtcttcaagttccaggatcctgt

SEQ ID NO: 756354 - DNA, 580 bp, Homo sapiens
ggtgccatattatttgtgtgaaatgtattttctaagcattttgttaaatatgatactcttttgatatgcaaatggaagaagtgagaactccatatggaaattaatgatgaacaagtggtattcttgtttgcactgtattctgaggctatggtaaggcacactttatttttggatatggaaaaattgtgttttaccaatgtcaaaatgagatcccatagatcaagactattacagaatagggtatactagaaagcaaccaggattaatgtaaagatcaaatcggaggaaagaatatacaatgactgtttkcaacatgagaatgaatgtagaacattttgcctcatcttttgaaaattctgagagaactattttatggaaaaaaatgtattgaaggacacagcaagcacttcaagttgtccccccaaaaaagacatagttggattttgtaatggtaaaagactaccttcaatgactaatttctgagctgtcttgttagttttctttgtttacttgatcatttatttttaaatagaaactagcattcagtgagtagctactatgtgtgagcttctacatgagc

SEQ ID NO: 756355 - DNA, 521 bp, Homo sapiens
gctcagagaactcagggaaacacatttactggtttatgataaaggatattacaaaagatacaattaaagagatgcatagggtgaggtgtgggaaaggatgtggagcttccatgccctccctgggtgtaccattctccaggaatctctatgtgttcagctatttggaagctctctgaaccctatgtttttgggtgtttatgaaagcttcattatgaaagcgtgactgattaaatcattggcyactggtgatcaacctggctctagcccctcttccctccctgaaggttgaggggtggggctgagtgtctcaatcagctaatcacgcctttgtctttctattgtctagccccaccctgaagctatgtcatcacttagcatacaaaaaagacagcactttggagattccaaggattttaggagttaatatattgcacagtatcacattgagcttgccaggaagtgacattccttactcgcctataagcctggaaacgctgtaagtcaggtgataggtcagtttt

SEQ ID NO: 756356 - DNA, 521 bp, Homo sapiens
gctcagagaactcagggaaacacatttactggtttatgataaaggatattacaaaagatacaattaaagagatgcatagggtgaggtgtgggaaaggatgtggagcttccatgccctccctgggtgtaccattctccaggaatctctatgtgttcagctatttggaagctctctgaaccctatgtttttgggtgtttatgaaagcttcattatgaaagcgtgactgattaaatcattggccactggtgatcaacctggctctagcccctcttccctccctgaaggttgaggggtkgggctgagtgtctcaatcagctaatcacgcctttgtctttctattgtctagccccaccctgaagctatgtcatcacttagcatacaaaaaagacagcactttggagattccaaggattttaggagttaatatattgcacagtatcacattgagcttgccaggaagtgacattccttactcgcctataagcctggaaacgctgtaagtcaggtgataggtcagtttt

SEQ ID NO: 756357 - DNA, 658 bp, Homo sapiens
atagaaaatgtattaaagtttttcaagtactaagactactcaaaggcttattatgatctggaaaaaagttctgaaagaaaatccatacttagatattacttgaaaaaaattgcttggatcacaaaaataaagaaaaaataayttataaatatttagaaagaaacatataaaggaaacatattagaaacattaagaagttaaaaatgtaaaacctaagaaaaattttatgagtcaaactttcctcagcagagcacaaataacaacaattgcctcaaatgctttttgtggcaagatgggtgggtgaaagcaaatagattattagaaaatatagaaacaatagagaatgtaaaatataaagcattaagcagaatagaggatcttttattttactaaaatattccatcatagtaagaaaagaggtgtcctgcattattcataagtcacctgccataacaaaccatttcagtggtttaacacaataaacctccttaatgttgcacatcaatgccaggatacactccaaggtactaggtgttctttattctgggaaggctttttctaccatttagttgctctgttatcttctagagtcttgccatcctctactgaattttcaagatacagacaatgcacagtgaagagaaactgtgaaaaatta

SEQ ID NO: 756358 - DNA, 649 bp, Homo sapiens
atattaatatagcttttattaatatttgaacattatgtaaaaacaatgctgtgtttcaatcactctatggtccagcatatacagagaagagaaaacttagtttcataattaaactattttttgttaacttccatcacaatattctggattattaataacaggataagaaatgaatattttaatgatttattatgcatttttataactatgaaaagaacacaacacatgatgcaaagagcatatttgtaaatctgttttaaattttaaatgtttttctttatttttcccaccatggcatataaagtactttttgtttattagataactcaataaatatgtgttaatttgaatttttatttagagcacctaagagccactatgtcaatataattataaattcaatgctatatagattaaaaataagtaagtttttaaaagtaaaattgtacttcgtttgargtagtacaatgttgcatgaaagtagtcatttatcttatcttatttctcctggaaatttttttttatcattcagatccctagccatatcaaataatataatacattatttttgagattcatcttcttaagtacataaaaaataagaatatggttttattgctagttggtcaatagaagacaaagaaactaa

SEQ ID NO: 756359 - DNA, 597 bp, Homo sapiens
tagcattccacatgtttcaatagtccctggtggtgaagaagggtttttggaaagcgcttactctttgaggcttctgtacaggtatgtactagacaaatgtcttgacttttgaaaagtctggattagaaaagattattgaagtcagtttgttccaagagttaaaagtgttggtataaaagtagctgctaatgccattggttgttaatgggtagagtttatatacctctgccatgggttctggctttgttcaattgatagaagttcttatgtgggaagttttaaatgaaaggcctttgtggagagggaaaaaatgaatggctgtttaaaggatttaaagaggaaatatattgctatatgcatttagctccttatattaacatctcacatggtcagggmccaataaacctcaaaccttaatttattcattcatacattaataagcttattattttattaatttaattcagattttgttaatgtttactgtaccatgcaacactacgctaggtacatggaataaaatgggtaaaggattcattattatatatgtgtgtgcatgtgcacatgggcacatgtgtgttgcaaggcataagtcta

SEQ ID NO: 756360 - DNA, 649 bp, Homo sapiens
ctcagagtaaatctaaagtccttgtaggggcctcatagccctttcatctggtctctggcttcctccttatttcctgccagtctccccccactcatggtgctccagccacactgactgcctttctttccttgcatccagatcctatctgcctcaagcgggaattccctgccctgttctccagtcttggcacatactgttctccctggagtccttcccacctgcccagagcttcctctactttcaagctcacgtaaactcactttccccatgaagactcccttgacatccagtgattttcctttgtctccaaacgccagtgttctattttgagmcttgtgctcatctcctcactggtaggaggctgcctggtttctcttcctgatgtgatacagctggctgtgtgcccaccagccaatgggatgatcactttcctgaagccaaggaccatttagtttgttttgatatcctgaagagcctcagtatggtccacctgtacataagcctcttaaggattctgttagtttgcttttgcctctgcatcaagctagaaaaagggcacaggggaatggagaaacatggttcttactctggttctgacatcaccctcaatgaagaggagtgaatcactgatacatccaaccacatgggt

SEQ ID NO: 756361 - DNA, 635 bp, Homo sapiens
aatctactctccatcttcatgagatccacttttttagttcccacatatgagaacatataatgtttgtttttgtttttctttgcctggcttatttctcttaatacaattacctccagtttcatctatgttgctgcaaataacaggatttcatttttcatggctgaatgatattccattgtatatatatcacatttttattatccattcatccaatgatggacacaacggttgatttcatattttggctattatacatacaactccaataaatatggaagtacagatatctctttgatatatggatttcctttcttttggatatatacccagctggatatatgktagctctagttttagtttttaaaggaaacttcatactgatttccttagtggctgtattaattaaccttcccaccaacagtatacaagggtccccctttctccatatccttaccagcagctgttactccctatctttttgataaaagccattctaattggggtgagacgatatatcattgttgttttgatttgcatttctctgatgcttagtgatgttgagcatttttttacatacctgttggtcatttgtacgtcttttttatgagagatgtctattcatgtcctttgtccac

SEQ ID NO: 756362 - DNA, 635 bp, Homo sapiens
aatctactctccatcttcatgagatccacttttttagttcccacatatgagaacatataatgtttgtttttgtttttctttgcctggcttatttctcttaatacaattacctccagtttcatctatgttgctgcaaataacaggatttcatttttcatggctgaatgatattccattgtatatatatcacatttttattatccattcatccaatgatggacacaacggttgatttcatattttggctattatacatacaactccaataaatatggaagtacagatatctctttgatatatggatttcctttcttttggatatatacccagctggatatatggtagctctagttttagtttttaaaggaaacttcatactgatttccttagtggctgtattaattaaccttcccaccaacagtatacaagggtccccctttctccatatccttaccagcagctgttactccytatctttttgataaaagccattctaattggggtgagacgatatatcattgttgttttgatttgcatttctctgatgcttagtgatgttgagcatttttttacatacctgttggtcatttgtacgtcttttttatgagagatgtctattcatgtcctttgtccac

SEQ ID NO: 756363 - DNA, 431 bp, Homo sapiens
tcctaagcagattaattcaggaacagaaaatcaaataccgcatgttctcatttatgagtgggagttaaacaccaggtattcatggacataacaacagcaacagtagacactaggaactcctggagaaggcagtgaggragggaggcaagtgttgaaaaacttaactattggaaactattctcagtacccaggtgttgggatcatttgtaccccaaaccttagcatcacacgatatgcccaggtaacaaaccggcacatgtaccctttgaatatctaaaataaaatttgaaaaggaaaaataaaaaggattcttactttatagcaatgtttcttaaacttgagttgtaccaaaaccacctggagaccttgttaaaacacagattgtttggccccaccttcggaatgtctgattcagtaagtttctaaaattt

SEQ ID NO: 756364 - DNA, 567 bp, Homo sapiens
ttactgttcctctcactcacccttgctgactccagctagcccatgtacttcaactctcttcctccttgaatgtattgtttctaactaatatctggctctggtaggggtaaggttaaaagggggatcctttcaaaattgggagtcagttatgaccaaagtatcctttacttggcctttccataaaacctgttaagagagcataccactgyatgaatgcctaacatatgttcactgccaatgtcagactttgcagtagacaaggccagggccaacaaaccaagatactcaattattggtgcttactgttgtatagtttatgaaatattctcaccaaggttaccttactgaagccttcacctccctttacgctccatccaatccacgagataactcagactaaagaaaaaccattaacacaggttttaaatctgaaaaaaaaaatatgaacagagttgctgagaaattgagtaacaattacctttctaattattttaaaaaggcatatttattgtaaaaaaaattatagaaaagtataatgatgataactatatcataatttacttaacc

SEQ ID NO: 756365 - DNA, 574 bp, Homo sapiens
aacttcgtggatggacttagatcagtcccttgtagactgagtactgtttacttctgttttcaggccaatctctaaacctttctggatattgttttccacttagaaaatcactggattgacttggatgatcttcaggatccatcctatctttaatatttaatcacaattgttgctaagtttacacttggaatcagtatttatttataattataagcattgcctccacatttttaaagttcaaaaatatttatttattgttggtcagtggtaataggaataattcatgtcttatttcctaaagtgaaaatttttctgagaaaatatacagactctgktgactctcatttgatactccaatttgaatgaagaaaatgcctcaaaagcctcttgggtggggagtggtttgggtgctacagctgcctactttagtctccacagtcttccctgacttgtttccctctgaccaatttaagctactcctaattgaaccatggctgccttttgagtctctccattaattaacaaacaatattttctcattatttttctaagatcaaagaaaaaggaataagac

SEQ ID NO: 756366 - DNA, 566 bp, Homo sapiens
gagaggtttccctgcagactgacatgacaggcaccacagagggagatataattgttattacacctaataggaaattcataaatataaactgatatgaatgaaatctacaattttagagaggtgggcattatttatatggtacagtgagcaaaaatgtaacttcccatataattctttatgaagcccttakctaatgttggtagaagaaaaaggaaaacttgccaatttgaggtaactttcttctagcctttagccatctatttccctctgacttaacattgtggtgtaaaccctcggcctctctggatttcttccatctctcttctcctttatgcctcttttttctccaactgtggagaaggcttgtggaaagcagcctcactgtggcaagggaggggagtctaggtcatgttagtgctctctgtgggctctggctgactctcattgcagccattgcagcacagcctgggcttgcatatattctagcttgatcttttcacacagccaaggcctaatggagctccacactgatttttcctgaaggcatgattgacccttggaggcct

SEQ ID NO: 756367 - DNA, 637 bp, Homo sapiens
ctttgcctaataacaagttctccatgattttccctgatgctttcttataatagtttgatagttttagctcttacatttaggtttataagtcattttgagttatgtttgtgtatggggaaaactaagggtctaaattcatccataatactaacaatttgtgccttcactctttttcttggtcagtttttgttaattttgctctttttttattgacttcacaatcaataaaaccaatattctttggaaaagaaatctaatgttttcttatatctatttaatctacttggtctctaacctttattgctttcccttttctgtttgctttttgttttgttttattctttttgtagtttctaatggtggaatcgtargttattgacttctgattgttctacttttctaagatagggttttaaagccatagacttctcactgagcattgctttgtggtgtcctgcaaatttttatctgttgttttcatttttatttaattaacaattgtgttacttgtaatttcttcttcagcctatgtgttatttagaattgtattatttaatttgcaaatatttggaactttcctcattttgtcctattgtttaattataatttaattctgttgtgattggagaatttacat

SEQ ID NO: 756368 - DNA, 543 bp, Homo sapiens
aacaattcaaatgcagatcaactgatgaatggttaaatgtaatgcagaatgtccatacaagtgaagattgaccataaaaggaatgaagaagtacatggtacaacatctatactttcttccaagataaacatggatgaacctgaaaatattaagtgaaataaaccagtaaaaaaaaaaaamaaacctagatattatataatttcatttatatgaaatgtctagaatagtcaaatgtatagagatagaaagtagattaaaatgcttaggactgagggatgggtagtctgcgggataggaggtgatacctaaagggtacaacatttctttttgaggtgatgaaacgactctaaaattgaccattgaggtgatggttgcacatgtttgtgactatacagaaaaaaaacactgaattgtacatttaaataggtgacttatacattatttgcactatatctcaataaggctgttaaaaagttctttatacatggttgaaaaaatttcattgaatatatttataatagctactttaaagtttttatttgc

SEQ ID NO: 756369 - DNA, 621 bp, Homo sapiens
cttccttttttccctgccaacaagtctctagaaatggaaggagggaaatactcagataaggtatcccacgcttatgtattatttgtttcttacactgttctgtaagttccaccttctccactaggattttgaagtgaatttctggaataaaattctcactagacacatcttctttacagctataagyagcagacaaatttcagaatttcatcatatgctttttggattagctatttacacaagcattcatggggtggctgaagtacatttaatctaaatgtcatgtagcaatcaacagttttactgcctaaataattcctttatagctcttttcttattcttctccaatggcatttttaacttgtgtcttatcttaatgttaactatgtgtctatcttttcaggttttgagctccttgaggctctgtgtcttattgcccctgcatcccttgcatagttccttgaatataaaaagatgctcaataaatatctattggaaatatgaaaaatatcaaagttagtacttcagtattgtctttatcacaagttaatttctgtcactttctttgttctctgtcagctagaatattattagcaaacagtttggcattatttagcaaca

SEQ ID NO: 756370 - DNA, 637 bp, Homo sapiens
ccttttatggttgcatagtatttcatagtgtatatgtaccacattttctttatccagtctaccatcgatgggcattaaggttgattccatgtctttgctattgtgagtagtgccacaataaatatatgcgtgcatgcatctttataacagagtgatttatattcctttgggtatatactcagtaatggaattgctgggttaaatggtatttctgcctctaggtctttgaggaatcgcaacactgtcttccacaatggtcgaactaatggttttttccttgtaaattttttaagttctttatagagtctggttattagaccttggacagatggataaattgcaaaaattttctctcattctgtaggttttctgtttactctgttgacagtttcttttgctgtgcagaagctmtttagtttaattagatctcatttgtcaatttttgcttctgttgcaattgcttccactgtcttcaccatgaaatctttgctcatgcctatgccctgaatggttttgccattcatttcttctagatttttatagtttttggttttacatttaagtctttaatccattttgagtttatttttgtatatgatataagaaagggatccagtttcaattttctgcatatggc

SEQ ID NO: 756371 - DNA, 576 bp, Homo sapiens
tttctatttctgtgaagatgaagtacatgtatgtttcctattcttctagccaaacacaactaaaaactatggacgttatatataaaagaaatgttaagaatcctctgaaatttggagagaaggctgatcagctagggatctttggattcaaagaacgacatgatggtgaattttctcagttttatgtttgccccatatatccaagactgggtgctggaaaagccagcaacctacataggtcaatggatacagacaaaaaaagcctgaacaatattttgctctctagctgaggaccaaaacttgtaaaaacagccactctattccagccaaacatcacaggaaaaactgtagcctcattatcraacacattagcaaaggctaagtggatagccacatttccaccagcatcagattaaaataaggttgtccaacgacaatattggggtggggtcagagaagcctgaatagagggcctggatttatcctcacaaggatgaaaaccctcctcactttggtgtcagtggagaccacatggagttcttgaatttccatctctaaaaggtagcaacaactgcc

SEQ ID NO: 756372 - DNA, 601 bp, Homo sapiens
tcccataataatgacattcatccattcttgaaagcagggccctcatgacccaattactttgtattaggccccacttcctaacactgttgcactggggattaagtttccaacacatgaactttggggctgagtaggaaaaaacattcagtttcttctactatacactcaaaacacatgtctgaccagatgtctggggttttctctctaccggcaagcaagcaattaattctgcagtggacaccagttgggtgtcctctaattcaattcaattctgacactatgtacctgaagacagcattatatccccctggttgaaagttcagtctcacagagccccgtttccaatgctaattgcacagctcaggttattatgtctaygttctgatccactggctataaactggggttcccacaaccccttttatgggttggattaatttgctgaagcagctcacagaactcagggaaacactttacttacatttactggcttactataaatgatattacaaacgatacagatgaagagatgcatagggcaagagatgtgagaaatgacgtggagccaccctccccaaatctctacatgttcagctatctg

SEQ ID NO: 756373 - DNA, 566 bp, Homo sapiens
ttaccctcaaagggaagcccatcagactaacagtggatctctcggcagaaactctacaagccagaagagagtgggggccaatattcgacattcttaaagaaaagaattttcaacccagaatttcatatccagccaaactaagcttcataagtgaaggagaaataaaatactttacagaaaagcaaatgctgacagattttgtcaccaccaggcctgccctaaaagagctcctgaaggaagcactaaacatggaaaggaactaccggtaccagctgctgcaaaatcatgccaaaatgtaaagaccatcaagactaggaagaaactgcatcaactaactagcaaaataaccagctaacatcataatggcaggmtcaaattcacacataacaatattaactttaaatggaaatggactaaacgctccaattaaaagacacaggctggcaaattggataaagagtcaagacccatcagtgtgctgtattcaggaaacccatctcacgggcagagacacacataggctcaaaataaaaggatggaggaagatctaccaagcaaatggaaaa

SEQ ID NO: 756374 - DNA, 396 bp, Homo sapiens
tacctaaggatacacaactaataaacagcaagactccagtctttaggatcctagactaggcttacttcctcatatccgaaaggaaaaaatggaaacaaactcacaaaggaggaatacagtacagcatcacgtgactatcccatgcgtataatgggtgaatttyctcgggcagacagagggctcacttattatgggaagtcttatgactgtttggctccagctggaaggagatactaaatttctgaaggacttttggcttaaatttaagacaaatattttattagagttaccattgaatatttagcattattgaatttctcccagagtctaatttgtttgacagattgttttgggaaagtagccagtgaatgcccaagactaggggatgaagaacaa

SEQ ID NO: 756375 - DNA, 497 bp, Homo sapiens
atttgatttttgtgtatggcaagagatgtggtctaggttcattcttctgcatgtaagatatccagttttcccagcaccatttattgaagaaactatcctttccctaacttatgttcttggcatctttgttagaaatgagttcactgtagacgtatggatttacttctgttccattggtatgtgtgtctgttattatgcaagtaccatgctgttttttttactataactctagaataattggaagtctgccaatgtgattcctccagttcctttcttttctcaraaaactttggtattctgggtattttgtagttctatttaaatattagaattgttttcttctatttctgtgaagaatgtctttgggcttgcattgaatctgtagattgctttgagcagtataaacattttaacaatattgattcttcctatccataaacataaagtatctttccattttttttggtgtcctcttcaatttcttgcatccatgtttt

SEQ ID NO: 756376 - DNA, 506 bp, Homo sapiens
aaaggacgcatgcacccacatgttcattgcagcacaattcacaatagcaaacatgtggaatcaaccctgttgtccatccacagtaaactgcataaagaaaacgtggtacatatataccataaaacactatgcagccataaaaagggcaaaatcatgttctttgyagctacatagatgcagctggagaccagcatcctaagtgagttaacacagaaaaagaaaatcaaataccacatgttgttacttataagtggaagctaaacattgagtacacatggacataatgagaggaacaatagacaccgggactactagaagggggagggagggaaggaaaaggatcagggttgaaaaactacccactgggtactatgctcattacctgggtgatgtgttcagtcatactccaaacctcagcatcatacaataccttcgtaacaaacctgcacatgtaccctgtgattctaaaataaaagagtgcagtggcgcgatcttggctcactgca

SEQ ID NO: 756377 - DNA, 506 bp, Homo sapiens
aaaggacgcatgcacccacatgttcattgcagcacaattcacaatagcaaacatgtggaatcaaccctgttgtccatccacagtaaactgcataaagaaaacgtggtacatatataccataaaacactatgcagccataaaaagggcaaaatcatgttctttgcagctacatagatgcagctggagaccagcatcctaagtgagttaacacagaaaaagaaaatcaaataccacatgttgttacttataagtggaagctaaacattgagtacacatggacataawgagaggaacaatagacaccgggactactagaagggggagggagggaaggaaaaggatcagggttgaaaaactacccactgggtactatgctcattacctgggtgatgtgttcagtcatactccaaacctcagcatcatacaataccttcgtaacaaacctgcacatgtaccctgtgattctaaaataaaagagtgcagtggcgcgatcttggctcactgca

SEQ ID NO: 756378 - DNA, 597 bp, Homo sapiens
cacagatttgttgctaagcactatagacgggtgaacaaaacgtgaacacaagtaaccaacccagggaaccgacaaagtctatgagctgcgaacacaggtctcctaacacttctccctggtaacatagatttagcaaggttttaaatttccttacactaccatccgtaatagcagaggataagcactttggtttcctttgaagtctcatacattggatggggaggtaaggagggtagaaattaactttgtcagctcttcctcttcccttctcttcccttcctgaamaattcagtcctgaagtcattaggtggagttgagcaaggtagatcagagcctggagcatccatttgccagaaagctaaggaagagcttgaaaaatgaaaggggcatatcaaaaggacacagagcatcaaaatacatgaggacaggaaagaattataacccaataaacacaggaaaatatgagtcaatttataaataaactaaaagtatggaaagagtagggtatttaaatagtttcaaagtacctctccacaaaatacctgttaattaaaaagggaaaaagagtaaccttaccatggataaggcagactttaa

SEQ ID NO: 756379 - DNA, 622 bp, Homo sapiens
agccatgcaaacaggattttaagacaagtatcctatccctttccaacaagatagccactcctagaatatttctatgttcaaattctagaaccgagatgatcaccctgggaaaggtaggaagctcctggctgctgttcaggagagcttctccaattccaaagcagatcttggcaacccacccctcccccactgcgcctccctggagctacttgagggcaggcaacacgtttacctgattcactgctatatcctcaaaacctagcccagaaaatcaagagcaataaaaagagtgaaatttgtttagtattttatgatgtgctaagtaccattctaagcatgtttgtgactctactttaagtcttataacaacccrgcaagaaaagaattaatgttaatgccattatgctccaagcaaggtcaccaggccatcttcaccagaatcacctgaaggcttctcagaatgcagatttccagagtctaccccagatctgaaacaggacctctggggtagagccaagaagctgcatttttaacaaggtgtccaactgcctcttcttacccagaagctctgaagtctaaccccgactcaacttccttttgagatcccaactgacccatccta

SEQ ID NO: 756380 - DNA, 622 bp, Homo sapiens
agccatgcaaacaggattttaagacaagtatcctatccctttccaacaagatagccactcctagaatatttctatgttcaaattctagaaccgagatgatcaccctgggaaaggtaggaagctcctggctgctgttcaggagagcttctccaattccaaagcagatcttggcaacccacccctcccccactgcgcctccctggagctacttgagggcaggcaacacgtttacctgattcactgctatatcctcaaaacctagcccagaaaatcaagagcaataaaaagagtgaaatttgtttagtattttatgatgtgctaagtaccattctaagcatgtttgtgactctactttaagtcttataacaacccggcaagaaaagaattaatgttaatgccattatgctccaagcaaggtcaccaggccatcttcaccagaatyacctgaaggcttctcagaatgcagatttccagagtctaccccagatctgaaacaggacctctggggtagagccaagaagctgcatttttaacaaggtgtccaactgcctcttcttacccagaagctctgaagtctaaccccgactcaacttccttttgagatcccaactgacccatccta

SEQ ID NO: 756381 - DNA, 600 bp, Homo sapiens
ctcttcttacccagaagctctgaagtctaaccccgactcaacttccttttgagatcccaactgacccatcctacagtgatgtgcattattcgtctccaagtgagaatatttcctttaaccattaaccctctgctacatatagagaagttgagtgatttgccctatgatgtggggttaataccaaacagacaggcagtcacagctctagaacccagacagcaattctttctaacacataataatgtattagatacatctatgagattccccagattctttaagttctaagacttctggcccaaagtaagcttgagtagggagtcatccaagctagattcagaaaggtttagatacttgagttgctgttgtgttgttagatctctacagcaactaatgactatctatccaggcaccagtgcagccacggggtggattcccgcattcctacttcatragcctgacactaagccccctggaggaaggaatagagggtgacttgatctgcagaatccctcctgactcctatcctcaacagatcagagttcatcccctgtggagtttcatataccacactttggggttccatcacctggccctttt

SEQ ID NO: 756382 - DNA, 610 bp, Homo sapiens
tctgaaaggggctgtcagttcctcccgagcaggaggtgctcacctccgaagagaatggcaggcgggggaggctttgttggtgatgcagctgtcacatcttattagtgcataggtgggtgtcatagggtacaggaggtatgtcatttatagacagaaattgcataattaagcttgatagaattttgacgatttcttggcatgcaatttgttcgtcaagtgaaaagccttgaggaagtcgatcatgtggaatttggaactccaaagttcaagactaggtatttttcacagtggaatgggagctcgagagcagatgtgacttagagcaatcataaaggctcctggaatgtcctgctcttgcctttgcgttctggccttatacactcaggaaaagaggatgaagacaaagccacattttttcccaaattgagaatatggacatatgmatggactttagttcctccctattcattttctctttaaaaagtcattttttattgtgaaatataactcacatgtgaaaaaacaggccaaacacaaatatatagcccaattatcgatggcaaagtgaacactagtgtatctgtcactggtcatgactttgacctttgtt

SEQ ID NO: 756383 - DNA, 630 bp, Homo sapiens
aaatgaaacaaatggccatgaagcactcatgacaaaaatcaaaaagttgatgagtagtacagagcgacatgatcaaaggcatgctggaaacaaacctattaaaaatgagcttggatcaagctttcattcgcatctgcctgaagtgcacatatttcaccccgaagggaaaattggtaatcaagttgagaaggctatcaacgatgctttctcagtttcagcatcccaacgaatttcctgtaggccaaaaactcgtatttctaataagtataggaataatttcctccagtcttcattactcacacaaaaacgggaagtacacacaagagaaaaatctttccaacgtaatgagagtggcaaagcctttaatggtagctcactcttaaaaaaacatcagataatccatttaggagayaaacagtataaatgtgatgtatgcggcaaggactttcatcagaagcgataccttgcatgccatagatgtcacactggtgagaatccttacaagtgtaatgagtgtggcaagacattcagtcacaattcagccctgttagttcacaaggcaattcatactggagagaaaccttacaagtgtaatgaatgtggcaaggtttttaatcaacaatcaaacct

SEQ ID NO: 756384 - DNA, 542 bp, Homo sapiens
tcctgggatcctgcagaccccacccctgtccgaaggcgccatcgcccaccacctccctcctcgtgccggccctgcttctccccagttccaaccccaggaaaacgtgcttctcctggaggcaaccctctttttccaccctcgccctgttgttcccggaaggcaggcctggaatgtgaagtttccaggtagatggatattaaacatagaattgaagaaaaaaaaaaaaamccccacaaagtaacaaaagaatgaagcggcgaaagcagaaatttactcaaccaagaaagcaccccacagggtgggggtgggcccaagcgagcgtctccagggccccatttacaaagtttttggaggttatttttttttgaggtccctatgggctaccccttatctggatgaagaatttggcccttggccaaggaaataactgaggtaaattggcctgaggccagagcagatgggtgccctatgcagatgaaggggtggccggtgcttggccttggccactcctgggctctttctctttccacctgcgacctggt

SEQ ID NO: 756385 - DNA, 632 bp, Homo sapiens
gttctttcacatgcctgctttttttttttttcttttaagacggagttttgctcttgtcacccaggctggagtgtaatggcacgatcttggctgactgcagcctccacctcccgggttcaagcagtttttctgcctcagcctcccgagtagctgggatgacaggcaggtgccaccactcccasctaagttttgtatttttaagagagatggtgtttcaccatgatggccataatttcttttggcttctgaaattagaaatttttggccattaatatcttccaacaggcttttctattcctttcttcctctcactgtcttctgggacttctggtactttaaaaaaatttttttgagatgaagtcttgctctgttgccaggctggagtgcagtggtgcaaactcagctcacctccagcctttgtcacctgggtttaagtgattctcttacctcagcttcacaagtagctgagattacaagtgcgcaccactacacctgcctaattgttatatttttcatacagacagggtttctctatgttggtcaggctggtctcgatctcccgacctcaggtgatccacccaccttggcctcccaaagtgcagggatttcaggcatgagccaccgtgcctggc

SEQ ID NO: 756386 - DNA, 632 bp, Homo sapiens
gttctttcacatgcctgctttttttttttttcttttaagacggagttttgctcttgtcacccaggctggagtgtaatggcacgatcttggctgactgcagcctccacctcccgggttcaagcagtttttctgcctcagcctcccgagtagctgggatgacaggcaggtgccaccactcccagctaagttttgtatttttaagagagatggtgtttcaccatgatggccrtaatttcttttggcttctgaaattagaaatttttggccattaatatcttccaacaggcttttctattcctttcttcctctcactgtcttctgggacttctggtactttaaaaaaatttttttgagatgaagtcttgctctgttgccaggctggagtgcagtggtgcaaactcagctcacctccagcctttgtcacctgggtttaagtgattctcttacctcagcttcacaagtagctgagattacaagtgcgcaccactacacctgcctaattgttatatttttcatacagacagggtttctctatgttggtcaggctggtctcgatctcccgacctcaggtgatccacccaccttggcctcccaaagtgcagggatttcaggcatgagccaccgtgcctggc

SEQ ID NO: 756387 - DNA, 562 bp, Homo sapiens
gagccaccgtacccggtcttgtttcttattttctattttttatttttttgagaggcaggagaatggcgggtgaacccaggaggtggagcttgcagtaagcccagatagcaccattgcaactccagcctgggagacagagtgagactccgtctattaaaaaaaaaaattataaataaaaaaatgtattttaaccagttagtctggttttcagtttcctttccttatgtcatttgttaaaatcttcagctgggagctatttattgcgtgtttctctcaaggccctctggaccattytggaaaaatgttgaaacatgggctggagtggcatagaatgctcctccaaaagcacccatgtattcttttgctttgtttgtttgtttttttttaaatggagtctcgctctgtcgccttggatggagtgcagtggtgcgatctcagctctgcaacctctgcctcccggcatcaagtgattctcctgcctcagtctcctgagtagctgaaattacaggcacctaccagcacacctggctaatttttatatttttagtagagacagggtttc

SEQ ID NO: 756388 - DNA, 585 bp, Homo sapiens
gaagatagttaggatatattcacttttgaatgggaagattctcactctgggtgaaaacaacaatactgctggacagtcttaccccaaggatttacagattctcctaacttgtttggccaaattcttgaggaggtgttagaaaagatgagcatcccaaagtgtatatctatgctccagtatgtggatgatatactagtgtcagggaaagctgtagaacaagtatctggcttttccatcagccttctcaaccatctctgtggagagggactatgtggtgtggtggcacacatctgaaatccyagctacttgggaggcttagaaaagagaattgcttgaatgcaggaggtggaggttgcagtgaaccaagattgtgccattgcacgccagcttgggcgacaagagaaagactctgtctcaaaaaaaaaaaaaaaagaaagaaagaaaagaaaagaaagaaagaaggaaagaaaaaacaggctgggcaaactggttcaggtctgttggcccagctggtctcaaactgctgacctcaagtgatctgcctgccttggcctcccaaagtgctgggattataggtgtgagcaa

SEQ ID NO: 756389 - DNA, 635 bp, Homo sapiens
cgcccgcctcggcctcccaaagtgctgggattataggcatgagccacagcgcccggctaccctacctcgttttaacctaagtgactctcctagagagagagccggacagactccattttagcttcttcacttgcagtgccctttatccgccttaagggaataaatagtgcaagctgactccaagcacatccaggaatgcacctgctgataagatattcaggcaggctgtacaagcagcccctgggaatgtgctcggtggaaggtacctaaaagccgctgcatttatctcttagtgatagttcaagcccctgtgcctggaactgtttgtttttctgtaactatctctgtaaccattaattttttactttttgcctattctgtttctgtaaaattgcttcggctaggctatcccctccccttcttagaccaaggtataaaagaaaatctagccccttcttcagggctgagakaattttgagcgtgaagccatctcttggtcaccagctaaaaaaggacgcctgaattcgtctctaagtatggtgtttctctaactcgctctcttacaacattctgagctgcttcctcatgtaacacgagtctttagaaatcaatcctgtatgtgaaaaatgaagggg

SEQ ID NO: 756390 - DNA, 489 bp, Homo sapiens
gaaaaaaggtccttgatatcattatcaagtacacactgaaacaacctaacaacatatatcacatagtagaaaatgttttcgatatatgataaagactagaaagcacacagacctcaatgtaaactcaaaaaaatttcatagagaaacaattttaaaatggttaaaaaatacagatctaatgaaatcttgggccaaaggagawatatttgaaaatatatcatactttgaacacaatgaggacaggcatagtgactcacgcctataatcccagcactttgggaggccggggcaggaagaccacaatgttaggggttcgagaccagcctggccaatatggagaaactatgtctctactaaaaatacaaacattagcagggcatagtggtgcacacctgtaactccagctactcaggaggctgaggcaggaaaatcgcttgaccccaggaggcggagtttgcagtgagacgaggtcgtgccactagactccag

SEQ ID NO: 756391 - DNA, 593 bp, Homo sapiens
gaaagcagagtggcaattcctcaaagagctaaaaacagaactactgtttgacccagcaatcctgttatgggtatatacctaaaggaatataaatcattctaccataaagacacatgcacgcatatgttcactgcagcaccattcacaatagcaaagacatggaatcaacctaaatgcccatcaatgacaggttagataaagaaaatgtggtacatacacaccatggaatactatgtagccataggaaagaatgagatsatgtcctttgcaggaacatggatggagttggaggccattatccttagcaaactaatacaggaacagaaaaccaaataccacatgttctcacttataattgggagctaaatgatgagaactcctggatgcaaagagggaaacaacagacactggggtctacttgaagatggagggtgggagaagggagagggtcagaaaaaacaactactgggtacctggcttaaaacctaggtgatgaaatagtctgcacaacaaacctcatgacatgagttaacctatataacaaacctgcacatgtacccctgaacctaaaagttattttaaaacgtactagt

SEQ ID NO: 756392 - DNA, 549 bp, Homo sapiens
atgtcccaaagctgtgtccgttagtgaactagcaagtctccaggatccccgtgtgagtgagttagggtgtgtgtgagccactctgccatgctttggcatcctggcagtgtgggtcctgtctggttccttaagggctctagccacctgtgaccctgaactggagtaagcaggtaaatacttattttacaygttttatctttcttaaatgtatgtatagctcacatttattttaatgtttattatgacaactattttaggtcattatttagatatttggtgatatttttgtgaccacaaatatgccctggaaatttaactctggttgatgtcaattagcctaaagaaaaattggtttcttatagttgttttgcttttagttgcagtttccaataacctattatatagagcacctttgagataagtaactataatacatcttgaaaaaagactccatcttacatttctacaggcatcatgtcaacagggacaagatggttcacctaatcaataaagactacatccagccagataaggacacaaccaggtata

SEQ ID NO: 756393 - DNA, 623 bp, Homo sapiens
gctttcttcaaggtatttttccctcatctttacattatctttacaaaaaattaaggccaattacagagattaaaagagtgagagtggagaaagtacacaaatgcaaatatttatactttaaggattcatgatattaataaaattttagcctatgttttcaaatatcaatgccagcccattcaatacttcytctgagtttaattttttgatgtagcacttactgctgtgcaattttaatatattaacccattctcctgtttattatctgcctttccccactggaatgttggcccacatggacaggaagttggtctgttttgttcattgctctatgcacagtaactaaaagagcacctgtactttatgggaactcaataaacatttgctgaattcagccaggaagtcagcctcagaatggtcattggaaaaagaggagtttcagtatgggagctcaggaggacagtttacaaagaaagatctccattctcctcctcacagatcttcacgatctgtcataaatattctacgtgcccagatctttataagtatctgtaatgaatgatgtttacagtaagatagatatttttcaaagacaaaaatccaattttattagaaacttcatg

SEQ ID NO: 756394 - DNA, 640 bp, Homo sapiens
agattataaagcaatttaggctaaaaagtaaactttagtatttcattattattattttttttgtttggcaaacatgtcattgcctcctctctggccaaaatacttggtaaattttagtttaactaaatagacacatttcaattagtgagtccaaaatcaaattttaacctttcacaatctcaaatagcctactgaaataaagtatttagaataagaagctagctccrtcatttcagtgtttagaagatttgtaaggcggtgatttctagtattcttaatccgttttattcaatttgtgaaaggcctaataataaaattctttctcttgcatttttttaatttcaggaataacacatattatattcatgttatcaaggtattaatacattttgtcactaagtttcagtttccttattttccaaatatagatcacggttttacctggctgtttggctcctagagatattgcaggtagtgcaagttgactttcagaacatttgtaaatgactgattctctgttccttgtacctcactgtgttgttctgagtactgataataggaaaatgctttgaaactggaaacattttatactaatgatattatctctgaattgtgaatcccgttaaattgatgacagaat

SEQ ID NO: 756395 - DNA, 640 bp, Homo sapiens
agattataaagcaatttaggctaaaaagtaaactttagtatttcattattattattttttttgtttggcaaacatgtcattgcctcctctctggccaaaatacttggtaaattttagtttaactaaatagacacatttcaattagtgagtccaaaatcaaattttaacctttcacaatctcaaatagcctactgaaataaagtatttagaataagaagctagctccgtcatttcagtgtttagaagatttgtaaggcggtratttctagtattcttaatccgttttattcaatttgtgaaaggcctaataataaaattctttctcttgcatttttttaatttcaggaataacacatattatattcatgttatcaaggtattaatacattttgtcactaagtttcagtttccttattttccaaatatagatcacggttttacctggctgtttggctcctagagatattgcaggtagtgcaagttgactttcagaacatttgtaaatgactgattctctgttccttgtacctcactgtgttgttctgagtactgataataggaaaatgctttgaaactggaaacattttatactaatgatattatctctgaattgtgaatcccgttaaattgatgacagaat

SEQ ID NO: 756396 - DNA, 588 bp, Homo sapiens
atgattcacccgcctcagcctcctgaagtgctgggattataggcgtgagccactacgccaggtctattcttgctaaatttctctgtagtaatcctgtcaaatatttacaatgagataccaaaatcctcaaaaattggtattaaattgtctatttcttctttcaatagtgtcagtttttgcattatgtttctggagcagtgttggtagttgcacatacttttataattattatatttttctgattgacactttcatgattataaagtttcttctttgtctctagaattatttcttattgtagagtctattttattwgacattaatttagtcatgccagttcttattatgacaacttcttctatcctgttactttcaatctatttgtgtttatgaatctaaattatgttttttatagaaagcatacatctggaaacttttaaaatccagtttgtttatttctctcttttgataggagtgtttgagccattcatgtggaatttaatgatattaatttaatacaattaatatctacttttagatgttgtgattagacttaagtttgtcatttgtaatttgttttctatatat

SEQ ID NO: 756397 - DNA, 508 bp, Homo sapiens
gaaaacagaatgtgtgtttgtgtatacatgtgtatatatatagagagagaaaggaagttacaaatagttatacagcaaacattcatgttttgaaacaaactcaggtcacaaaataaaacattgtcagcacctcagaagctcctgccccattacagtccacacctcctttttagaggtaatctgtatcctgacttttaaatcaccttttcatttttctttataatttcactattgatatactcataaacattctactgctgaaacaggagacaccttccctccagggccctccagccttcattccaggctccctgctgctctcagggctgctgctcacacttccctgtggccttcytggcacatcctctgctttctggatcccttgctcaatcacttcttgagaaacagggcatggaaagtaaaaagaaaaagaagtcaaaactgcatctctgaaatgtctttattgtatcctcacattgattgatagtttggctcagaatagaattct

SEQ ID NO: 756398 - DNA, 476 bp, Homo sapiens
tggatgttttcaggatcagttctttctttctggttctggagtttcagagtgatgacagctatgctgcactacccatccccctttgggaatatgggacttattcccctagcttctgtcaatgctgctgtaacccgcagctgacaaccctctttagagaatgccttggctgaagaaaacttccagagccagcctgcatccagctaccagcagcatgcggacatgaaggcccagctccctcayctcaactggcaacaactctgaagggtcctccttgctctagagctccccctgggaggcaggctgagatcccccactggccctgcatcacagcccaactttttcctctgctcagacctgttcccatcccctttcttacacaggtgattttcccaagagtactttcttataaatgtcctgcctgctactctccagcttgagtctgcctcccggagaacccaaccggcaacttacaacgt

SEQ ID NO: 756399 - DNA, 536 bp, Homo sapiens
acaataattttaatctgtaaaaaacaatataagtacatatgtgtaaccaaatacccacctaactataaagccaaccttgttatacagcagatgtgttttaacaaatctcatttcctgggcatatggccctctttcattggtaaacaaaaacctctccccagcccccttgawgttgggcaaggcaatctaattgtcattcatcgatgaaatgtgattggaagtgatatgggtcatttatggcttgaggcaatgaaaagtccccagataactctccaatcttcctcttctcttgttaggataatactggagaacacctcaggttgggatcatagaataacaagatccttagattgccaagtaacttcctgaaagatcgacatccctggggaatcacccagacatccagcagacttcaaaaaaagtaaaaataaacttttgttacgttaatcactgaagaattgttactgtagcatgagtttagactatcataactaatacagcatccatataaagtatagttctctgatgaataccca

SEQ ID NO: 756400 - DNA, 475 bp, Homo sapiens
gattattttagttgttttatttttatttgtttcagttgtacagagacaacatggtctcagctttcagacatgctctagattttaaaaccccagtgtcctgagctctgttgtgtgtgtgtgagtgtgcgtgtgtgcgcacggacctgacatttctgacacaaatcaataatttggcaagtattttacgtacatcttctatgtgcctaatgcggtgcttggaactcttgggaatgcagtgttccttgctaattttttatgaggttcttctttttcattgtaaggaytggctttggattttgatgttatatgtaaagtcaccaagattcaatttaggattacatcaggaaagccggatgaagaaacttacaaaattaagcataatcattaccttcatcaacaccgacaactgcaaacatttactagatgcttagtatgtatagggcataaataagtaggccaaatttgtgcttataag

SEQ ID NO: 756401 - DNA, 637 bp, Homo sapiens
ttatatgtctccacaattatacaccttttcatcaaatttaagcataaaaacacagaagtttacctatttttttgtatcttcttttaagattttccctgttatagaaaacttaaaatagatatatttctatgtttttttcttgttaacctctcttttttatagaggcctcagccatgaacctaatgatgggcaggaaaagacatttttttcatttgctacataagtctgaattttcctagagcgatgaattttccacagataaatygaatgaataaagtgtcatttctgaaataccattaatattctaatgtgataaagacataatggagcaaagatgcaaggaagcaggaaaccatttatgatgatactaaagtaagattaaagtatatagtgtcatggactaaggaaagtgagggtggaaaagaagaaaaactaaggaagtagagatatgcaggagaaagagttatcaagccagggcatggtaactgagttagattcgttgaagggacaagaaacaatcaaatgcaaatcccaggtttctgtctaaagaagctcggcattgtttagtgtcatacattgagattggaaacatatgaggttaaaaagtaaagaggagatagtaagtttatctttggac

SEQ ID NO: 756402 - DNA, 586 bp, Homo sapiens
cttgaacttattcttcctatctaactgaaattttgtattctttgatgaacatctcgccaattcacccactaccaaccaccctgccccagctaaccaccattctactttctgtttgtactatcatcttatagttgtctattttcttttagttttgtcaagttttactttctatattttgaagcgatgttactgactctactagtttagaattgtttagaatttagaatcttctcgatggataggccaggttattattaagagatatttgtctatctttaatgatgcttcttgtcttaaagtatactttttatactattagtattaaaaaacacatattttgttagtatatccatggtatacattacattcattattttacttttcaccttactccattcatacctttaaagtctatctcctattgaaaagcggcacacagtttttattktttgttctagtttgtcaacattagtctttgtattggagtctttaaaatagtttcatttaatgtaattagtcaaggttttggaattatatatactgtgtaattgtttttgatttagcaatgtaatatgttctttcttcc

SEQ ID NO: 756403 - DNA, 605 bp, Homo sapiens
taataacatattaataatataaatgaagtacacaataaatgtaatgtgcttgaatcatcctgataccatccccaccataccaccagtctgtgggaaaactgtcttctacaaaaccagtccccggtgtcaaaaatgttggagactacagtcttactgactatattacctggaattgcattgtactttatataaatgaaattatagaaagtgtactcttttttgatggggctgctttatctcacctgcatgtttgtgatatatatacatagccaaatgtagttgtagatcattaactctcattacctcataatattccagtatgtgattatactatgatttatgcatccatattttccatttattgtgttgttatatatatatatatatgctatatatatatgtgtgtgtgtatatatatgtgtgtgtgtrtgtgtgtgtgtgtgtgtgtgtgtgtatatatatatatatatatatatatatatacctgttctgatggctctatacctacaaatgaaaattctgagtcacagtttgtgtatgttcagctttagtacataatacctaatattctcccaaaatgattctacaaatttcctcttttcatc

SEQ ID NO: 756404 - DNA, 605 bp, Homo sapiens
taataacatattaataatataaatgaagtacacaataaatgtaatgtgcttgaatcatcctgataccatccccaccataccaccagtctgtgggaaaactgtcttctacaaaaccagtccccggtgtcaaaaatgttggagactacagtcttactgactatattacctggaattgcattgtactttatataaatgaaattatagaaagtgtactcttttttgatggggctgctttatctcacctgcatgtttgtgatatatatacatagccaaatgtagttgtagatcattaactctcattacctcataatattccagtatgtgattatactatgatttatgcatccatattttccatttattgtgttgttatatatatatatatatgctatatatatatgtgtgtgtgtatatatatgtgtgtgtgtatgtgtgtgtgtgtgtgtgtgtgtrtatatatatatatatatatatatatatatacctgttctgatggctctatacctacaaatgaaaattctgagtcacagtttgtgtatgttcagctttagtacataatacctaatattctcccaaaatgattctacaaatttcctcttttcatc

SEQ ID NO: 756405 - DNA, 657 bp, Homo sapiens
ttatgtgtcttggagttgctcttctcaaggaatatctttgtggcattctctgtatttcctgaatttgaatgttggcctgccttgctagattgggggagttctcctggataatatcctgcaaagtgttttccaacttggttttattctccccatcactttcaagtatgccagtcggatgtagatttggtcttttcacatagtcccttatttcttggaggctttgttcatttatttttattcttctttctctaaacttctcttctcacttcatwtcatttatttaatcttccatcactgataccctttcttcccattgattgaattggctactgaggcttgtgcattcatcacattgttctcgtgccttggttttcagctccatcaggtcctttaaggacttctctccattggttattctagttagccattcatctaattttttttcaaggtttttaacttctttgccatgggtttgaacatcctctttagcttggagtagtttgatcttctgaagccttcttctctcaactcgtcaaattcattctctgtccagcttttttccattgctggtgaggtgctgaattcctttggaggaggataggtgctctcatttttagtttccagtttttctgctctgttttttcccatctttgtggt

SEQ ID NO: 756406 - DNA, 657 bp, Homo sapiens
ttatgtgtcttggagttgctcttctcaaggaatatctttgtggcattctctgtatttcctgaatttgaatgttggcctgccttgctagattgggggagttctcctggataatatcctgcaaagtgttttccaacttggttttattctccccatcactttcaagtatgccagtcggatgtagatttggtcttttcacatagtcccttatttcttggaggctttgttcatttatttttattcttctttctctaaacttctcttctcacttcatatcatttatttaatcttccatcrctgataccctttcttcccattgattgaattggctactgaggcttgtgcattcatcacattgttctcgtgccttggttttcagctccatcaggtcctttaaggacttctctccattggttattctagttagccattcatctaattttttttcaaggtttttaacttctttgccatgggtttgaacatcctctttagcttggagtagtttgatcttctgaagccttcttctctcaactcgtcaaattcattctctgtccagcttttttccattgctggtgaggtgctgaattcctttggaggaggataggtgctctcatttttagtttccagtttttctgctctgttttttcccatctttgtggt

SEQ ID NO: 756407 - DNA, 657 bp, Homo sapiens
ttatgtgtcttggagttgctcttctcaaggaatatctttgtggcattctctgtatttcctgaatttgaatgttggcctgccttgctagattgggggagttctcctggataatatcctgcaaagtgttttccaacttggttttattctccccatcactttcaagtatgccagtcggatgtagatttggtcttttcacatagtcccttatttcttggaggctttgttcatttatttttattcttctttctctaaacttctcttctcacttcatatcatttatttaatcttccatcactgataccctttcttcccattgattgaattggctactgaggcttgtgcattcatcacattgttctcgtgccttggttttcagctccatcaggtcctttaaggacttctctscattggttattctagttagccattcatctaattttttttcaaggtttttaacttctttgccatgggtttgaacatcctctttagcttggagtagtttgatcttctgaagccttcttctctcaactcgtcaaattcattctctgtccagcttttttccattgctggtgaggtgctgaattcctttggaggaggataggtgctctcatttttagtttccagtttttctgctctgttttttcccatctttgtggt

SEQ ID NO: 756408 - DNA, 596 bp, Homo sapiens
acgcgcgcactcgcacggacgggcgcgcgggaaaaggctcgtccccgcgctcaagcagcccggactggcgcggggggggcggggcggatgaagggaagcgagggggcaggaaatgccgttaattgagggaaacgcgcatgcattgcacgggcggcctttgatgtgcgcctccgggccagcccggcccctccacgccggcgagcccacccggcgtgcgcccctctccgccggcgctcccgggagcgcagggccagcttgagcgccgaggacgcgtggcacttccaacgagcaggaggctgtgggctcactctgtctctaacgsgagacagtgcgtggagccctttttgtttctcccccaacccctgggcctcccggggtgggtccggagaccgagcgctgcgggggatgaccacgctgaccgcggctcctcatggggagaggccgccttgtcttgacctaatgtatgtacacatataaatacagtgctcgtccaaatgacattccactcactctccctccccctctttttcttttcatcatcagcaaataaagattagccgggaagattatagaaagcgttttcaggctggcgctga

SEQ ID NO: 756409 - DNA, 612 bp, Homo sapiens
tggaggcataattttctgttgacattacaaaagggcaagcttcatgtgttttcatcactgacagagagacgaaggtgagttgctctcctatccacacctcctcctcctctccagagcccactgcactcaagagcgggacccaggctcctcggggcgtgtcctcggcggtccctcggcctcacacaacagtcaaaagcagctgctaactttcraccttacgtgaggagtggcgaaagcatcccatttgctaccagggcagattatttttggagttaaaataaaagaaacaccattctcaactcaccgttgcccgtggattccagtgggtaggaattaaagcctctaaaaagaggctgtgtgatttcccgggtgaagtgtcagattgtaaagggattcagaactactcattccagttcagcagattagtaagaaccagaatgcatggcctcgaacaacctcccggtgccaggagagtctctttgaagaactctgagtaacaaaggccaccccacgttgaaccccagttatgagctacagtcttattgccaaattaagttgagaatctgtgatcgtttggcttcagaaagagaaagcaaaaaacttttttctctg

SEQ ID NO: 756410 - DNA, 613 bp, Homo sapiens
ggcctgccctggctgggagagccgagggacccagctcacagtgaaaggcccgccccggttgggagagccgagggacccagctcagatgtaactctgcctcccgtgggggctttggaggcttcattaaaatgagcaagctggcagagatcatttcaaatgatgctgtcttgctttaaaacmtctataattccaatttacaaagggccaaccaacccacagaaaaaataaataatagacgtttactctgggaaactaacccagtgacccatatgtcacgaggccgccatctacagaaagtccttcatgggcgggtgtccacatcattaaaaccacagtttaatggctgctcattggcatccttgttagcatttttagaagaaatattcaaatgaatggatttccctttccacgttgaaaatcagaacaacctctcatggagactccacttttgtttctaaacagacaccatgagtgtcttctccagcctggcggccatctgacatcttcatgctccaaaccacttacacattctttgaaaattaaagcctaattctctcttttgcaatgatgttttttgctacctattaatgagtgaaattgctagtccagacat

SEQ ID NO: 756411 - DNA, 585 bp, Homo sapiens
gtcatgagaaagagatcccggggctgcccaaaccagcatcccagccacaatagccaggcatcaggtgccctctggcctactgggcgcacagcaggggcagggccagctctgccttggtgcagggcagtctcccctttaaaatgtccgtccccgggaagcgagaggctcccctgtcttggtcactgctccagcccagtgtctagcatgcagtaggaacttggccagtacagagtgaacagaagaacccgccaatcccttgccttggcctcctatggctccatttcctctaatcctgtgtccccattgtatttttttttttttttttttttgkattttgtttagtagagatggggtttcaccatgttggccaggctggtctcaaactcctgacctcaagtgatccacccaccttggcctcccaaagtactgggtttacaggcatgagccactgcacctggaccccactgtctttccttaactgcctgtctgctctgtcagacgctgtctctccctgcccccgtggtggccggctggtcctatgtctaggcctcagtctccctctctgactgtctttctgcctcaggt

SEQ ID NO: 756412 - DNA, 577 bp, Homo sapiens
ctgttttcagccaacataatttagatagcactttccagaatgtcaaatatgtggaatcatacaaaatatacctgtgtgtgtttatcttccttggctcaatatattgttttgaggctttcatgcctctgttcttttctacagataagtcctaatctggttgcaggtatatactacatttttaatctattmatctattttgttgggcatctgccttcttttcagtttaagctgatttgggggtactggcataaatatttgtgtgcctttatgttttcttttttctttttgagtaattatcaagaaaaagaattactggattatatggtaaattaatttaaaaatgtgtgcatactttcagtctgttccaaccagcaataattgacatattaattggcaatctctgaattggattcttccaatcaagaaagtatggtagatctttcagtcttctcaatttttgcagattttaaaaacatttttgttttatgtctctctctatcatctatttattattcatccatctattgtctatctatgcatctatcatttatccattatctagctatcatctatctct

SEQ ID NO: 756413 - DNA, 635 bp, Homo sapiens
ccaactatcgcatcttgctttgaccatggcagcactctcctacctggcttccccatatcctctctgccatactctccaatccactgtccatgctttaaccaaaactatcccttcactcaccagctctcaacctgtccatggctgctctttgctctctggctaaaaggccaacctcttggtgcatgtgtccaactgtgcggtctgcctgacctacctcctctatgatgctgagcscctcttccctcaccctggctcccaccacacctgggacactcagccattctctctcccataccatgacctttgtcattctatttcttctgcctgaatgctgtctctcccactcttttctctcactgagttgacttctactcagcttaaaaataacttccctgacttcccaggccaagtcatgtgctgctatttcatgctttcataacaaaagcataaaatactccacttgttttctttagcagctatcccaaattttcaataatatagttcattaacatctgcttccactctggcaggagacgtccatgaaaataggatgggatctgttttgctcttcttgaaatcccagagcagggctaacccagagcagatgaccaataagtactgttgaagcaggaaga

SEQ ID NO: 756414 - DNA, 579 bp, Homo sapiens
aatctctgacttttaattcgagtgtttagaccacttacatttaacataattatcagtatggctgaatttaaatctattatttgctattggttttctattagactcatctctccttgctattgtttgtttctttttttctgcttcttttgatttaattagtgytttttaatatttcattttatctctattgctggatatatatatgtatatacacaaacacacatatatgttttatatataaaacttattttatttttcataattttcctactttttataatacacatttctaactcattatacatgttcaactaatattatgctacttaatatgtaatgtaaaactcttatagctacaggcttaccatggtttgactttatgatggtaggaaagcaatacacattcagtagaaatcatactttggattttaaattttgatcttttccttggctagcaatatgcagtgtgatagtctcttgcaatgctgggcagtggcagtaagccacagttgccagccagccatgcagtcacgaaggtaaacaacagatactctacagtgtactgtgttgccagtgttt

SEQ ID NO: 756415 - DNA, 679 bp, Homo sapiens
tgaaggatccactcccatgacccgaacacctcccatcaggccccatctccaacgctgaggatcaaattttgacacgagatttggaaaggacaaatatctgaaccatagcaaagaggaaggggggtatgttttaaattgtgtggtcaaggaagtcattcctgaggaggcaacatttgagctgaaaacagaatgacttgaaaaaaaaaaaaactatccacatggaaacggaaacgttggctttctctcacgaatacaagatggctactacagcttcaagcatcacatcctcacctaacagcttccaaagcaggtctggggatttccttgtatcaggaaaaaamccccagcacacttcccttcatgtcccacttgctagaactaggttgcatacctaccctccaaccagtcactggcaaaagacactgggattggctgggagtaaccagggttcctctgctgggaccaggcatgggtatcctccactgaggataggcttcccacacctaaaccagactggcctgctgtcagcaaggaaaaagcgcaaagcagctaccacaaagatcacacttgagattgtcatgtaggatttactgaacacctgaccatgttccaggcactgtgctagtgttaggaattttaaaaagacccaggcatcgcttttactatctcactctgttgc

SEQ ID NO: 756416 - DNA, 639 bp, Homo sapiens
gtagatgggtacttagggacatccctgtgcctgtgttattccatctttccatcttgtgacatcatttttattcttccctagtctgggacactctcagcagcagttcttggcttttttgtgtgtcgttgttgttgttgttttgagtcttatcccttttctctggccggcattcttccaaaatacaaatatgctcatatacaagcaattctgcaaagaatttcgaggacatgaaacatctcctargagagagcccaggtaaagaagatctaaactaaggtaggagtccagatatttgcagaaacaataaacttgacgggtgtaataaacattgatagtagctgcaaaataaagccaaacttcatatttgagtattggaaaaaagaactgcttatcctgggttggtcttttcagatacattcgtctctatatggataacaaaagtaaccatatgtgatatcgtttggacatttgttcccttcaaatttcatgttgaaatctgatccccagtgtttggaggtggggcctggtgggaggtgtttgggtcatggggcccaaacatgaatcttggcttggtgcctttctcttggtaatgaatgacttctccctctattagttccctccagatctgattgttaaaaa

SEQ ID NO: 756417 - DNA, 613 bp, Homo sapiens
tcattttcctgcatgctgaaattgaagataattgggctatttttcaaagccaatggactgtggttttaccaggaggcattggccacatccagattcttctttacctgatctgaatcctggcttagctatttccttcacccttgaataatgtcaggttcctcgcctcttgggagacggatttacagtaattctgagggaagtctttctgggatcctcagtgtaaactcaaagcattggcatgtctgtggtccaggccagaacatgtcaaggcacaatcaaagtgcatctggcctattggtaccatgttgctatcacttaatagggccaaacctgcaaagcctgcctgagacatacagccacttcttcccagacacaaagcctctgattccaggaattgcctctgaggaatctgtcatgccagtccataagccacyttctctttcaatcttggaaactgagaaaccaccatcttgcatgatatatttgggtttctttctaatcttgaaacttgttaaggagactgtagagactaagctctaaaggcagacaaaactggtttcatatactggttttacctcgtagtcactatttaaacgggttggcttaaacctat

SEQ ID NO: 756418 - DNA, 530 bp, Homo sapiens
atctctcatttcatttcatttcaagacagagtcttgctctgttgcccaggttggagtgtagtggcatgatcatggctctccatagcctcgatcttctaggcgcaagcgatcttcccacctcagcctcctgagtaactgggacgacaggtgcacaccatcacacccagctaattttaaattttttgtggagacaggatctctctatggttcccaagttggcctcaaacttctgggctccagcaatcctcctgcctgggttccccaaagtgctgggacttcaggtatgagccactrcacccagcccaacctctctcatcttaaacatcacccaaacacttaaggaaaaaagaatcagaaatagaaagtcaaccttcatccgttttggagacagttttaactgtgaactaaatcataagatggcagaaagcaatagagaagtagatgggtcaccagagagaagccgggacacagctaagtgcttccaaagggaggcactgatgagaagtgaattggaaatgctcacagaatcc

SEQ ID NO: 756419 - DNA, 576 bp, Homo sapiens
ctaaacaaaagacgccaatctgaaaatgctacataccgcattattccaactatgtgacattctggaacagaccaaacaatggagacagctgggtacggtggctcacacctgtaaggtcagcactttaggaggccaaggcaggtggatcatttgaggttgggaattcgagaccagcctggccattgtgttgaaacccygtctctattaaaaatacataaattagccaggcatggtagcaggtgcttgtaatgccagctactcagaaggctgaggcagaagaatcgcttgaacccaggaggtggaggctgtggtgagccgaaattatgccactgcactccagcctgagtgatagagcaagattccatctcaaaggaaaaaaaaaacaaaaaacaaaaaaaaaacaatggagacagtaaaaacatcagtggttgtcaggagttgaggggagcggagattagtaagcagagctgaagagtattttgggcagtgaaactattctgttcgatactacaatattagatagatacatgtcattatacatttctcaaaacccctagaatgttcaccaagagtgaa

SEQ ID NO: 756420 - DNA, 513 bp, Homo sapiens
ctgggtacggtggctcacacctgtaaggtcagcactttaggaggccaaggcaggtggatcatttgaggttgggaattcgagaccagcctggccattgtgttgaaaccccgtctctattaaaaatacataaattagccaggcatggtagcaggtgcttgtaatgccagctactcagaaggctgaggcagaagaatcgcttgaacccaggaggtggaggctgtggtgagccgaaattatgccactgcactccagcytgagtgatagagcaagattccatctcaaaggaaaaaaaaaacaaaaaacaaaaaaaaaacaatggagacagtaaaaacatcagtggttgtcaggagttgaggggagcggagattagtaagcagagctgaagagtattttgggcagtgaaactattctgttcgatactacaatattagatagatacatgtcattatacatttctcaaaacccctagaatgttcaccaagagtgaacccaaatgtaaactactatggattc

SEQ ID NO: 756421 - DNA, 576 bp, Homo sapiens
ctaaacaaaagacgccaatctgaaaatgctacataccgcattattccaactatgtgacattctggaacagaccaaacaatggagacagctgggtacggtggctcacacctgtaaggtcagcactttaggaggccaaggcaggtggatcatttgaggttgggaattcgagaccagcctggccattgtgttgaaaccccgtctctattaaaaatacataaattagccaggcatggtagcaggtgcttgtaatgccagctactcagaaggctgaggcagaagaatcgcttgaacccaggaggtggaggctgtggtgagccgaaattatgccactgcactccagcctgagtgatagagcaagaytccatctcaaaggaaaaaaaaaacaaaaaacaaaaaaaaaacaatggagacagtaaaaacatcagtggttgtcaggagttgaggggagcggagattagtaagcagagctgaagagtattttgggcagtgaaactattctgttcgatactacaatattagatagatacatgtcattatacatttctcaaaacccctagaatgttcaccaagagtgaa

SEQ ID NO: 756422 - DNA, 640 bp, Homo sapiens
agtaggaagattcctagatgtcatggttcaaagactcccagttgagtcagaccatgacaccaagagtatagaccaaattggacagacagtggttcagaatagagctgcttaagatataatattggcctctcaagggggatgtgctgttttacagaaagaatattataggtacatccatgctgacctgtcttggatctttaatagcaygaaaaagactcagaagcaaataaaaaaaatttgggtaatgtagctaataaccccatatgtagtgctgtgggctcttctcatttggtatgagatctcatctcttcgtttaatatgggctgtctcagctcctagatgaggatgtcactacaaactctgatcataatccttctcttggtatttttgccacagtgttcagatgagtgatctccagagtctaaaatgctgctgtgcagtctctgtcccatgatgtgatctaacaaattatcatcaaacagaaagagcaagaaaacttgaacttacagaggtagaaacaaccacacccagatacttatatgcaattgtgacacctcagacactggtgaatatctggattgatccatcacacccctggatgtaaatgatctatcattcaactcaggctaaagaatggcca

SEQ ID NO: 756423 - DNA, 683 bp, Homo sapiens
tggagtatttaggatatccatcaccttgaacatttatcatttctttgtgttgggatcattttcaatcttctagctaccttgaaatatacaatatatacaatatattaagtactatgctattgaacactagaacttattccttctatctaactgtatgtttatactcattaaccaacctcacttcaacacccccacatacataaatgccctttccagcctctggtaactatcattatattctctacctccatgagatcaatgtttttagctcccacgtaggaaagcatgtgatatttgtctttctgtgcctgacttatttcacttaatataatgacctctagttccatccatgttgctgcaaagacaggatttcattcttttctatggctgaattgtatgtaagtaccacattttctttatccattcatctgttcatggacacttaggttgactccccatatttgtgaatagtgctgmaataaacatgggggtgcaggtatccctttgatatgctgatttcctttcctctggataaatacccagtagtgggattgctggagcatatggtgatcctatttttagttttttgagaaatctccatactctaaaaacaatatttttatcaagaagacgatacacctgtgattctggctgacagatttttttattttttcattttcaga

SEQ ID NO: 756424 - DNA, 580 bp, Homo sapiens
gataagaggtccgaaaagtggttgtcttactggggggcacgaaggagtctgccacggtacttggaaagttctagatcagatatggatggtgaatacatgggaatatacaaaatgtattgagctagtatacttaaaagctgtatattttctaagtgtaggttatactttaatttaaagaaaaaagagatgtaaattttttaaaataagataattatgagtatacctatcaacatatraaactgactggaaaccaaagaagaaagccaactaagtttttgagagagctagagagcctaagatgaaatggactgtggctgttcaatgagcagggagtaggctaggaaagtagctcctcccctaggaagggcatattctccagtgccatcttcacatgtggccaaggagaagaatagtaagagcaagccctctcagaggaagaaccagtggcctgggaaattatctcctggaaacagaagtgagacctaatcaagggtcattggcctgcacaggtatcaggactgtacaaccagcagctgctgcaaatgtctaaatttcccctttctgatgggagtaattccac

SEQ ID NO: 756425 - DNA, 610 bp, Homo sapiens
taggagattatagcaatcatcaaagggtggaattaaaataataaagaaaaacaataaacaggaggagaaaaggagggattgcttttgctccacagatcatttatgtaaataaaagaaaaatcacagcgctaagccactaaatcagaggttgcaattagctcaattgtagagtgatttggtgccattttgagcaacaatagccagagtgatcactcttaactgaggtaaattaagtattctgattactccacttttatgaaaaagagttgccggccattacagagatctaatttacacgaactctgctccatttctcatactgactcatcttttacgtttttttctgcttcttttcacatctagcacattttgctgtagactaagaaaataagggttctgcatccacagattccatcaacagtrgattgaaaacacagtatttgagggatgtagaacccctggattctaaagatcaattttcatagccatggtttcctcagggtggactgtggaacttgaacctcagtgaattttgatatctacagaggtcctgcaaccaatactgaggaatgactgtatctctatgaaagctcaccctccagaatacatt

SEQ ID NO: 756426 - DNA, 647 bp, Homo sapiens
ttaggttaggttctcctggcatgggatcccatgagctctcaacttaaaaaaaattatatcatcaatcacaattttgctaattactttattaatatctataagttctatgagggtaaagatcatacatatgtgatttgttcatcatgacagtccaatgcatgtcacatagcagatgttctgtgaacacttgttaactgattagatggataaaattgaagtcatagaaattgactatgctatgttgatttgtgcatgacattgaactgggagaaatagtgaataagccyaataacagaattggataattcagaaaattaattgatcaaaatttttaaaaaccagtaggaatagctaaatgtcctatcttcatattcaaggaatcatttacataaatataaaagaaagtcctgttttaacagcagctcatgtgaaaatgccttaaggccacgcacaagacttcaaacttcacatagccaacagaaagatatggctcataagtagaaactgatgccatcttacactgtagtggtgctacacttaagaaaacctgtagcttgccttcacatcatagcccacaccttataacatacctggcatacaccaggtgtgtaaacaaagcttgctgaatgtagagtgagaagtcccgt

SEQ ID NO: 756427 - DNA, 544 bp, Homo sapiens
caagaatttgaaataaaataaaaagcctcatggcttgtcacttggccttccttcccagagtgatcactttgacgatggatggatggctctgaataggtgcaaatagttttcattcaatggttttcaaccagataacacataatagagtcattatgtcccttaagagattgaaagttaaatatatcatttcaaaattgcttcagcatatatagtatcatctttaagccaaagaaattttaaacaatggtaatcaactcatgccttggtgatctcaaattttcagctattatttcctgtacatgttgcagtcatatgcccactatttgagaaatcattgtgaaatgggacaacagaatatttatcatcataagatcctaagttgctgatataaaaagtatttctatartaaaccccaagacaaatgaatggaacagaaccgctgacagattgctaatgtttcatttttagatttacaaatgaggggaacctgtaaaaggaggattgaaaatggaaaacataagtacatcctgtagacaacaaatgc

SEQ ID NO: 756428 - DNA, 564 bp, Homo sapiens
caaccagtgatctttaatggtgggcctcatcttcttgtgcaccaccacctcctgcagctcctccaacgaagggtgctggccaatctcttcctcaaagggcagcatgtactcatccacgggtcctaggagaaagagagagcctggcaggatcactctaaggtcccactgctccctatcactcaatctaggatgcccagggctgccatcctacttaccgtctgcagccttgcagcgagacacaagctcccwcagcaccaaccccatggcatacatgtcaatgcgcaggaaggcatctctctggaagttgatggctccctcgagcacctcaggagccatgtaccgtctcgtgcctacctatgtgaggacagaggagggcaggatttacagtgactggccatacacacacagctgggacatgggagttacagcctctgtgcaccagatggcgggcaagacagagcaattcagacaggttatcaatgatagcaaacctcgattcaccacattcacaacagttacaagaggtcacagcatcaattatacttggataataatttttaaata

SEQ ID NO: 756429 - DNA, 633 bp, Homo sapiens
acacagaggttctactgtggtgagccattcctcagagggaacacagacattgtgggatgcactttccaggctctctccctcatatgtcttctgaccccttccattccacctcgactgccttaagaggagtatgcttggtcatgctaccctggtgataatagagtcaggatgagctgggggaggtccgtagtggagagccacagctccccaggctgtccctgtactttttagccatttcaccaaagacaaggcagaagatttaggaagtatgtttagcaaatggcactgacctagggctggagacagctgggtattagactaacattaacaagcccaaacaaacccaagctaacaagagcatgtttcatgggsataatggtgaagtttcccatttaggttcacaaataaattgcatacatttcaaatggaggacctgtactaagaggagttcacatggaaagaacttgggggaggtcttagttgaccagagatattgtagtagatgccactgatgccgacccagatccccctcactggaccattgtgcatcctgccccagctgctgtgagtactggctactaatggcttgcagcactacctcctcaagaaagctgaccttggctgagcataggc

SEQ ID NO: 756430 - DNA, 552 bp, Homo sapiens
tttacatttccttttttgcatgaagcttttgaaatttggtgtgcatttaacacttatagttctgggcatgcttcaagtatgcaaaggtatacatggcttgcagctactgtattggatattgcagctctggatgtgctccacatggtgacaggacagctatagctgccccaaacatcatgtcttcacagctgtattcgaaggcagggatcagaaggtgacattgggcagagagtctctcctcacacacctcttgctcatcagggagaaaaatactggcctatccctcccctatcccacacacgcccaacaggctaccacttggtcatatggtcaattctggttgtaggaaagkctagggtagggtctggctctttcattctatctagaaggaggccagcaaggaggaagataattggggaaagttttagggcagcacagcagcgtctgcctcatctagagtacggagtggccaatcctctgagctgtatgtgcctcatcactctccctggcctgcccatggccgaaatcactgacaactcatggaacccttta

SEQ ID NO: 756431 - DNA, 559 bp, Homo sapiens
atgtgcaggtttttgttccaacataagttttcagtttatttgggtggatatctgagaatgaaattgctagattatatgataagagccggttagttttgtaagaaagtgcaaaacggtcttccaaagcggctgtaccactttgtagcccccagcagcaatgaatgagaggtcctgttgctccccatcctcctcagcatttggtggtgtcagtgatttggattttggccattctagcagtgatttctcattattgtttcaatttgcgattccttaattatatatgytgaatatattttcatatgcttattttatgttccgtctttatatcttctttagtgaggtgtcggttcacgccttttgctcattttttaattgagttatttattgttgagttttaagagttgtgtattttagatagcagtcctgtatcaaatgtgtcttttgcaaatattcattctcagttggcagcttatcttctcctcttcatggtggctgtgatgagcaaaagtttccaattttaatgaagcccaggttatcaattattttcttcatagatcat

SEQ ID NO: 756432 - DNA, 585 bp, Homo sapiens
aaaggaatgcctgagactagataatttaaaaggaaaggagctttattttgttcatggttcttcaggttgtaccagcatggtaccagcatctgctcggctctggtgaggcctcaggaagcttttacttatggcagaagccaaagggggagcaggtgtgtcacatggcaagagagggggcaagaaagagaggaagaggggccagcctttttctaaacacagctctcacatgaactaatagagtgagagctcactcattaccacagggagtgcgccaagccatttatgagggatccatcctcaagacacaaactcctcccatgaggtcccacctccaacgttgggggttacatttcaacatgaggttttggaaggcaaaacatccaatctatattatgaggkttctggccttataagtgcattaaatcctttattatgagagtggggcagctaccacagataggtaggatgagtttggttctcttcatcactaaaatgatggaaaatacaattttaaacttcaagtactccgatattcctatgactcaatatattaattccttttaagttcgattgtatgacataatt

SEQ ID NO: 756433 - DNA, 612 bp, Homo sapiens
actatatatacatgtatattttcttatttttgaattaatgcacagtgcgtttatcaacctatatgtgtatatatgttcttactttgaatgaatgttcaaatatataatatcacgcagattgagattattttgcttttrtgtttgtaaaattgcttctgttgcaggtaaaaaacatgcttcactctgggttatccaactggaatatacagcacagccagacaaaaataagccacatatgacagaattttgtcagcatctctacatgtttgccttttccaactctatgtaaaagaatatcgtctctaccagtcaaacagggcccacttagttcactaatccataacataacattatctcgagagatcatttaacttagacatttctaaaagtggcacagaatattgaacctctaacctgaaatgaaatggtgtatacattactagaactgtaaagacataaatttaatgtaataactgaaaccattgtacagtggtattatgaaataacttttccttccaccctattggaagtaggtgataatctttgttaattatgaacaaaggaattccctggtgttacctgtgtctttttttttggttgctgaaaatcctt

SEQ ID NO: 756434 - DNA, 564 bp, Homo sapiens
aatttggggtgagggaatgatgtaatggttgattagtgcattactaccaataatctcaaaacaattatataacattgtttatccgagtagaggagaagcaacaggaaaagaaagacaagaaggaccagttccttttattaagtgaatggcatttctgccatatggtattagataatgcaaagataatgccagtgactgggagaccatcatgtgggctttttggaaggaagcatgyatgcctgacacctgtcacatagctcaaatgtgatgctggcatatttgcaactaaattagaataatttaaccttcattaaccccttcctgtgtttatgaaagtagagcgtaattgacaaaattctgggggaagggtggctccttgacttagattcggtggaatttttgtgagtagacgcaaatactgttgtgtcatacttctatgctatcaggctttctgcccaggattccatttatttggagactgtgaacctgaagtcaaggatatctcatgttccagtgttttcagtagaaaaataaggcgaactgtcaattgacagatttttcata

SEQ ID NO: 756435 - DNA, 584 bp, Homo sapiens
gcccttgattttaatgagaattacattgaatatttagatctgtagatagttttatttctttctcttaaatttgtattcctttaatgccttttcttgactaagttctctctctagaatcagtacaatactgaatagaaagagttagagtggacatgcttgtcttgttccttatcttaggtgaaaagaattgtctttcatcattcagtaagatccaaaattttcttagatcaatttgaggaagctcctttctattcctagtttgttgaatgtttttaacatgaaacaatgtgaagttttgtcaaatgcttcttatgtatctactgagatgataacatgttttttttttccctttgttctgttaatatggcatattaccacaattgtttttcttatgttaggccaccaatcttgcattcctagcttgkggcgatgcataatcctttttatatattgctagatttggtttgctagtattttgttgatggttttgtttctataatcatcagagatattgatttctaattttcttgtaatatcttggctgagttttggcatcagagtaatactggcttcataggatgtgt

SEQ ID NO: 756436 - DNA, 586 bp, Homo sapiens
aagtgaaagggtgaactgaaaaaagttgaggtgattaattcactatagttttatgtttaacaaacctatccatggtttattctcatatgggtttaggtcttctccaataatcctcttcttgccctgataaagtcctgagttaaaatccaccttcagggttggtatttgagtctacatttgtggagttcagattaagattccagataaacaacmcccatgcaatgtttctcaaaatgcgacccgcaggatgtgcaaaacaagaaactggagtacttgtacttattaaaagtcagattcctgggcctctcattagaacagggcccctttctcgtctttttttttttcttcctttttgtggagaacggggtctctctatattgcccaggcaggtctagaactcctgggctcaagctatcctcccgcctctgcctccctgagagctgggattacaggcgtgagccactgcacctggccaggcccttttctcaatggtcctctccccaccaaagtccaagaactgagtctcatcagttccagtttccgggattgagttgtgtgccacccctgaatccatcactgtggccag

SEQ ID NO: 756437 - DNA, 634 bp, Homo sapiens
  misc_feature 501, 502, 510, 521, 530: n = A,T,C or G
aaaaaaaaaattttttttaataataaattaaagctattccaggaaacgagtgaaggattttatatccacacaaattgagtcaagtacaaaggctgcagacaaacttttgaacgtgtaagaaacccttacgaatccttcctgaggaatccactagaaattaactaagacaattgaaatgagtggagtgacggcaattaagactagtgcgaggccaggtgcagtggcacatatctgtaatcccagcactttgggaggccgaggcaggcagatcacctgcctggtcaggagttaagagaccagcctggccaacatggtgaaaccccatctctactaagaatacaaaaattagctaggcatgatggcagacacctgtaatctcagctactcaggaggctgaggcaggagaatcgcttgaacctgsaaggcagaggttgcagtgagctgagatcttgccactgcactccagcctgggatacagggcaagactctatcttaaaaaannaaaaaaanaaaaaaaaaancaggacttntgctgagtattgcatatatatacatgtatttaatacataaagatctgcttaatatacaaggtgttttgggcctaaatttaaaaatacagccaaataatcaacat

SEQ ID NO: 756438 - DNA, 588 bp, Homo sapiens
ttatttttttattgtggagttaagccttctaattttcaagaattaagagttcattgttatgtgctatacgtatttattccccttgattatatttctgtacctacttacctttttattttagattctggtcacttctattccgaaagttagttatgaagtacaatccaggattaaggtggcatctaaatttggttaatttctgtgctaccttttatgctattagtctaaatcattaagaaagcatttaagaaacttttgtaagcgtttctttttttttcttgtcatatttgggaataggataaatagcttaaaatagttgagctgatttttatttgtattctttttttattataaagaaacatttgctaggaaataagctggatataaacatagttgtatctcctttagtgctacccagcactaaamacttagacacgtatagggctgagcagctggtataatagagtgggctccgtctcattttctaagcctgtgagtcctagctgcctactgcagctcgatttgagtgggagttgatataatgtctttttttttttctcacttcagcagtaagtatctggtttgctc

SEQ ID NO: 756439 - DNA, 602 bp, Homo sapiens
aaaaatgcatttggtaatcgttggtttaaaatgaactttattacttcataggatgaaaggttaatttaggacataaacaaacagtagatataatgggggttggtagagcctgaataaaacttagtgattttccttctmgataaaaggtatagttaacatactgatgaaccattcagaaataacaaacaaaaactcaatcttaaaaaaaaactacatctctttattgcagaatttatacttgtttgaaaaatacaaaatgtagcgttgataagattgaagcatgttgaaaggtaagtacagggaaaggtcctttcagaatgactgcaacagtgcagcaaggattcccattccccgcctaaaggacaatacctttttaatagaaataaatgagttagttagttagatttttattacagattgaattaaacagttagttacaaagacattctctgatacattcattcatagaggtcttaacgtataaatacatagtaaatatcctataaaatggtaggcaatctcatcgtgcattatctttttgtgctcagacttgacttcacattcagtctctacatacagcttgattagaatcataaaaacaa

SEQ ID NO: 756440 - DNA, 624 bp, Homo sapiens
aaaattgcagaacatcagataaagaaaatttaaaagatgtttatagaaaaaagagtcccccaaaataaataaaaattggaaaataatattttctttttttctttttcttttttattgtactttaagttttagggtacatgtgcacaacatgcagattagttacatatgcatacatgtgccatgttggtgtgctgcacccattaactcgtcacttaacattaggtatatctcctaatgctatcccttcccctccccccaccccacaacaggccctggtgtgtgatgttccccttcctgtgtccatgggttctcattgttcaattcccacctatgagtgagaacrtgcggtgcttggttttttgtccttgcgatagtttgctgagtatgatggtttccagcttcatccatgtccctacaaaggacatgaactcatcattttttatggctgcatagtattccatggtgtatatgtgccacatacacaatgtctatcattgttggacatttgggttggttccaagtctttgctattgtgaatagtgccgcaataaacatatgtgtgcatgtgtctttatagcagtatgatttataatcctttgggtatatacccagtaatgggatggc

SEQ ID NO: 756441 - DNA, 534 bp, Homo sapiens
attaaacatgtttccatgactgcataacattccttcatgcttcttcccctattctaatccccaggcaaccactgatctgctttctatcatcagatccatcagatacacaccattctgtctcttccagaatatcacacgaatcatacagtatgttctcttctgagtctaggttctctcactcaggatgtttttgagattcatctatattgttgtgtgtatcagtggttagtttctttttattgctaagtagtatttaattgtttggatataccacaatttgtttatgcattcaccagttcatgggcattttgttgtttccaagttttgactaytgtgaaattaaagcgctattaacattgttatacaagtctttgtgtgggtatgtttattctctctctctgttgaaatacctggccatgtgcagtggttcacgcctgtaattccagcaatttaggagggcaggattgcttgagctcaggagtttgagactagcctggacaacatggtgaaaccccgtctctgaatctaaaaaaa

SEQ ID NO: 756442 - DNA, 637 bp, Homo sapiens; identical to SEQ ID NO: 742466

SEQ ID NO: 756443 - DNA, 476 bp, Homo sapiens
ttttttaagaatttttgcatcaatgttcatcaaggatgttggcctgactttttgttgttgttgttgtatctctaccaggttttggtatcaggatgatgctggcctcatagaataagttagggaggagtcactcctcctcagtgttttggaatagtttcagtaggaatgataccagctcttctttggacacctgacagaattcagctgtgaatccatctgatcctgggctttttttggttggtaggctatttattactgcctcaatttcagagctcrttattggtctgttcagggattcaatttcttcctggttcattcttggaagggtgtatgtgtccagacatttatccatttctcctagattttctagtttatgtacatagaggtgttcataatattctctgatggttgtttatatttctgtagggtaagtgataatatccttcttgtcatttctgattgtgtttattttaatc

SEQ ID NO: 756444 - DNA, 476 bp, Homo sapiens
ttttttaagaatttttgcatcaatgttcatcaaggatgttggcctgactttttgttgttgttgttgtatctctaccaggttttggtatcaggatgatgctggcctcatagaataagttagggaggagtcactcctcctcagtgttttggaatagtttcagtaggaatgataccagctcttctttggacacctgacagaattcagctgtgaatccatctgatcctgggctttttttggttggtaggctatttattactgcctcaatttcagagctcattattggtctgttcagggattcaatttcttcctggttcattcttggaagggtgtatgtgtccagrcatttatccatttctcctagattttctagtttatgtacatagaggtgttcataatattctctgatggttgtttatatttctgtagggtaagtgataatatccttcttgtcatttctgattgtgtttattttaatc

SEQ ID NO: 756445 - DNA, 579 bp, Homo sapiens
aagtcacatagtgttaggaaaacattcctgtgttttgaatacgatgaatccataggatagagaaaaatctgcttgttctattctgagagttctctgagatatcccttcactctgcttggcatttggccattgatattcaacaggtcactgaccaagcttttctaaatttttcagagagagttacttaccartaaggtctgttcttaaacctacctagttgattttcatatctttccataaagtgtcatgattctgtcatagaccctgacttaacattgtaaggactatgagtcctccattttttaattaatttttttttagcaaattaggacttcggcaggttttcctctcctaaactcattctttcctccacaggattgctttgtccatctcctgctttcatttcaagtgcataaacaaaacctcaaagggcctgggaaggtgaggcaggccagagtctgtgttctgtgttgagtgtcaagctatttgttaagaaggtctgcaacaggcctttggtgtgggctctgccagagactgttctgaacactttgcttgagatccgtgccctgtaaaatggat

SEQ ID NO: 756446 - DNA, 579 bp, Homo sapiens
aagtcacatagtgttaggaaaacattcctgtgttttgaatacgatgaatccataggatagagaaaaatctgcttgttctattctgagagttctctgagatatcccttcactctgcttggcatttggccattgatattcaacaggtcactgaccaagcttttctaaatttttcagagagagttacttaccagtaaggtctgttcttaaacctacctagttgattttcatatctttccataaagtgtcatgattctrtcatagaccctgacttaacattgtaaggactatgagtcctccattttttaattaatttttttttagcaaattaggacttcggcaggttttcctctcctaaactcattctttcctccacaggattgctttgtccatctcctgctttcatttcaagtgcataaacaaaacctcaaagggcctgggaaggtgaggcaggccagagtctgtgttctgtgttgagtgtcaagctatttgttaagaaggtctgcaacaggcctttggtgtgggctctgccagagactgttctgaacactttgcttgagatccgtgccctgtaaaatggat

SEQ ID NO: 756447 - DNA, 682 bp, Homo sapiens
aagtgtgggattaaaggtgtgagccaccacacctggccgtctgttgccatttttaattggattatttttctttttgttgtttagttgtaagagttctttttatattctagatacaagtctcttattgaatatatgatttaccaatatttttctcctcttctttggttgttttttttactttcttgaaacacaaaagttttttaactttgatgaagtccaatttgtctmttttttcttttgtttatgattttgattttatagctaagaaactgttgtctaatgtgaggtcatgaagactcactcctatgttttcttctaagagttttatagtttcagctcttacatttaggtctctaattcattttgagttaattttttatgtagtataaggaaagaactcaatttcattcttttgcatgtgaatttcagtacatcttatagggcatatctgctagcaataaattatctcaatattggtttatctggggatgtcctaatttcttctttgtttgtaaggatagttttgctggattcttggttgacagtctattccttcagcactttgaaaatgccatcccactactttctggccttcatgatataagataagaaataaactcttcatattatagaggatcccttgcacatgatgagtcacttttttcttgctgctttacatttc

SEQ ID NO: 756448 - DNA, 682 bp, Homo sapiens
aagtgtgggattaaaggtgtgagccaccacacctggccgtctgttgccatttttaattggattatttttctttttgttgtttagttgtaagagttctttttatattctagatacaagtctcttattgaatatatgatttaccaatatttttctcctcttctttggttgttttttttactttcttgaaacacaaaagttttttaactttgatgaagtccaatttgtctcttttttcttttgtttatgattttgattttatakctaagaaactgttgtctaatgtgaggtcatgaagactcactcctatgttttcttctaagagttttatagtttcagctcttacatttaggtctctaattcattttgagttaattttttatgtagtataaggaaagaactcaatttcattcttttgcatgtgaatttcagtacatcttatagggcatatctgctagcaataaattatctcaatattggtttatctggggatgtcctaatttcttctttgtttgtaaggatagttttgctggattcttggttgacagtctattccttcagcactttgaaaatgccatcccactactttctggccttcatgatataagataagaaataaactcttcatattatagaggatcccttgcacatgatgagtcacttttttcttgctgctttacatttc

SEQ ID NO: 756449 - DNA, 541 bp, Homo sapiens
cttccccctccccgtcgtcacatgctaaaagcagaatctgagaaacagttggctgaattttagcacctaagacctcgacaaaggcaaaaacaaaagcaagaaataatgattccttagttgtcaccaattaaatgtattttgaatgtaattttttaattactggagacctggccaggcagagattcatggttcttcaacagcagagcacacctgaatcacccctgcagcttcttaaaaaaagatgagtacttgtgccctaactctggatttcgaattcaggaagcctgaggaggtgccaggtaactgtgccaaacacacacacacacacaygcacacacacacacacacacatacagttctcatctcagacctgacacttcaaagcatggactttgaagtatctctctccatctgtgaaatgatgataatgatagtaccaaccacacagagctgttgagatggtggcataattcaaaccttgtgcttagcacagagcccagcgtagatgcggcttcagtttccattagctgatgttgccatt

SEQ ID NO: 756450 - DNA, 632 bp, Homo sapiens
gtttccagggttgtaatattatactttttccaacatctagatttcattccaaataatgagacaggaaaacaaatagaaaagtatggccaatacacaaggaaaaaaagcattcaacataaagcatacctgaggaagcacaaatgttggatttataagaccaagtctttattttaatttttttaacttttaaattcagggctacatgtgtaggtttgttacattggtaaatttgtgttatggaggtttgctgtacagattattttgtcacccaggtactaagcctagtatccattagttattcttccttatcctctccctcctcccaccctttaccctcaggtaggccccagtgtgtgtcattcccttatatgtgtccatgtgttctcatcatttagtttccactgataaatgggaacatgtggtatttggttttctgttcctrcgctagtttgctgaggataatggcctccagctccatccacatccctgcaaagtacatgatctcattcctttttaatggctgcttagtattccatagtatatatgtaccacattttctttatctagtctatcactgatgggcatttaggttggttccatgcctttgctattatgaatagtgctgcaatgaa

SEQ ID NO: 756451 - DNA, 662 bp, Homo sapiens
tgccttcttattgatatatatttgtcagagagagtggttcttgcaggcacttaaacgctagtagaagaaagttagctaaatgtgcagtcatttctggtggctctgcccttcaaggatggctttgattatagtaaaaccatgcaaatgctggaatgggccttgtcctctttacagtgttgagctttagtttttttatctgaagtttgttctataattaaaatctaaagcacaaggcaatcccggtgagtaagagttgctacagtgagcatacaacaaaagatagtgttatccatcaagaagttctgaagcaaaatgaagtacagtcaattcccccaaaatgggggccagggatacccaagaaagggagagttgctttctgtaaataaacatttgaagagtttgatggagttgtctaaggcctcaaaagtgctgcaaagctaggctcttggttcccaattccctgcctatgctcctggacatgttkaatggaaaatatggcctgagacccacctgcatctgaataaccagggagtttgtacagacttagactctgggctctgccctaagcacgttgaatcagaacggggtgctagggaggttgggagttcatttttagcaagcttcccaggtatatgctcattaaagcaagctagagttggaca

SEQ ID NO: 756452 - DNA, 587 bp, Homo sapiens
ttttttactgtccaggggtcagcacccctaacccctgcgatgttcaagggtcaactgtatatattttttaaggcgctttatttagataaaattcacttatacaatttacacatttaaagtatacagttctgttttttaagcatcttcacarggttgtaaatagcatcactacaaatctaattttagaatattttcatcacccgaaaaagaaacttcatacctattagcagtcactctcttcctcttccaagctcttgacaagtactaatttactttccatcttcatagatttgtgtgttatggacatttcatgtaagtggaattatacaatctgtagtcttttatgatttgcttcttgcacttagcataatgttttcaagattcatccatgttgtagtattgtattagtccattttcatgctgctgataaagacataccccagactgagcaatttacaaaagaaagaggtttaattggacttacagttccaagtggctagggaagcctcacaatcacggtgagagacaaggaagaacaagtcacatcttatgtggacggtggcaggcaaaaaatgagagagcttgtg

SEQ ID NO: 756453 - DNA, 587 bp, Homo sapiens
ttttttactgtccaggggtcagcacccctaacccctgcgatgttcaagggtcaactgtatatattttttaaggcgctttatttagataaaattcacttatacaatttacacatttaaagtatacagttctgttttttaagcatcttcacagggttgtaaatagcatcactacaaatctaattttagaatattttcatcacccgaaaaagaaacttcatacctattagcagtcactctcttcctcttccaagctcttgacaagtactaatttactttccatcttcatagatttgtgtgttatggacatttcatgtaagtggaattatacaatctgtagtcttttatgatttgcttcttgcacttagcataatgttttcaagattcmtccatgttgtagtattgtattagtccattttcatgctgctgataaagacataccccagactgagcaatttacaaaagaaagaggtttaattggacttacagttccaagtggctagggaagcctcacaatcacggtgagagacaaggaagaacaagtcacatcttatgtggacggtggcaggcaaaaaatgagagagcttgtg

SEQ ID NO: 756454 - DNA, 609 bp, Homo sapiens
aaaatatatacagactctgaccatctcccaccacttccattgctaccaccctgattgtggtcactgtcatctcttgcctggattccagcaacagcattccttttatcccagcccccagaggggtccttggaaagcatgtcaggtctctaatcaaaaccctccagtggctcccccatctccctcagtcatcatgtgatcaacagctcctttcttcacccccagtttctttcatttctcatctagtactgtactctctcaggcccactgtgctccagccacaccgggctgttcgtagttcctggagcatgcccctgccacaggacctttgcaccagctgttccttttgcctagaatgccttcacttccttcaartcgtaccctggtctactttgacaatctatttaaaatttaacactctttccccggtgtgctcaattcccccagtgtactgcttttctttatgcagagtacttactacattctaatatatttagcatttacttattttttgtttgtctgcccctgctaaatatagtcactccctccctcacgaaatgcaaggtcaggaatctttttgtgttaactgatgtatcccaaggacctagaaca

SEQ ID NO: 756455 - DNA, 609 bp, Homo sapiens
aaaatatatacagactctgaccatctcccaccacttccattgctaccaccctgattgtggtcactgtcatctcttgcctggattccagcaacagcattccttttatcccagcccccagaggggtccttggaaagcatgtcaggtctctaatcaaaaccctccagtggctcccccatctccctcagtcatcatgtgatcaacagctcctttcttcacccccagtttctttcatttctcatctagtactgtactctctcaggcccactgtgctccagccacaccgggctgttcgtagttcctggagcatgcccctgccacaggacctttgcaccagctgttccttttgcctagaatgccttcacttccttcaaatcgtwccctggtctactttgacaatctatttaaaatttaacactctttccccggtgtgctcaattcccccagtgtactgcttttctttatgcagagtacttactacattctaatatatttagcatttacttattttttgtttgtctgcccctgctaaatatagtcactccctccctcacgaaatgcaaggtcaggaatctttttgtgttaactgatgtatcccaaggacctagaaca

SEQ ID NO: 756456 - DNA, 560 bp, Homo sapiens
attaaggggataacagcatttatggaaggacctgtgtggacagtgagattgcacagccggatcctaagagcccactctcattctttaagatgtcaggaactgaaggcatctggaaacacttctcaaacacgagtcttggccagaggtgggggagggactccacctggggagaacatgtttgtcagcaaatgtgtgagtaggcgctggcagacagagtgcacatcttttcatggcggaatattaatctgtgtgctggcacttggctatttttgtatatgaatgatgtctcttcatttggaccagatagaaatgttccgcttcatggttcagacttctgcaattgccagacgccctcatgagacatccctgctatccacatattaacagacaaagtgaaacagactggyaaaatttttagtatcaattgatgaaaagtataccagaaaccacttattctatgatgcttctgatgcctgatgtgtctgtcatttcctatgacgagcaagatctattattacagtggtaggaccagaattagggcttgtaaaaaagaaaatcag

SEQ ID NO: 756457 - DNA, 625 bp, Homo sapiens
attgcttaatgatgggcatacattctgagaaatgtgtcattaggcaatttcattgttgcatgaacatcataggatatacttacacaaacttagatggtgtaacctactacacacctggctatatagtatagactatgctcctaggctataaacccatacagcatgttactgtactgaatactgtaggcaactgtaacataatagtaagtatttgtgtatctaaacatagctaaacatagaaaaggtacagtaaaaatatggtataaaagacaaaagatgctacatctgcataggacacttaacatggatggaggttacaagatgaaagttgctctgggtgtcagtgagagagtgctgagtgaatgggaargtctaggacattatgccactgtagactttataaacactgtacgccagcagaccccaaccttcctggcaccaaggaccagtttcgtgaaagacaatttttccacggacaggggtggggtgatggtttggggatgaaactgttccacctcagatcatcaggcattagttagattctcataaggagataacaacaacaacaaaaaagaaacaaacaaatattctcataaggagtgcacaacctagatccctcgcatgc

SEQ ID NO: 756458 - DNA, 591 bp, Homo sapiens
agtgctgagtgaatgggaaagtctaggacattatgccactgtagactttataaacactgtacgccagcagaccccaaccttcctggcaccaaggaccagtttcgtgaaagacaatttttccacggacaggggtggggtgatggtttggggatgaaactgttccacctcagatcatcaggcattagttagattctcataaggagataacaacaacaacaaaaaagaaacaaacaaatattctcataaggagtgcacaacctagatccctcgcatgcacagttcacaacagggttcgtgttcctatgagaacctaattctcctgctgatatgacaggaggcggagctcagacagtcatgcttgctcgcctgccactcaccttctgctgcatggcccggttcctracaggccatggaccagtactggtctgagacccaggggttgaggacccctgctgtacactatactaaatttataaaaaacaattatgttataatgttatgacagctacgatgtcatgaggataggaatttttcagctccattataatctcatgggatcactggtgtatatgtggtatatcattgactaaa

SEQ ID NO: 756459 - DNA, 622 bp, Homo sapiens
ttcccttttccagccagacaggatccctgaaggagggagaagagaggacagagaaaatatttgaagagataatgactgaaatttttccaaacatgatgaaatctataaacctacagatttaagaatctcaatgaacctcaaatgcaacaaatgtgaaaaaacaaaaagccagcatcgaggaacatcataaacaaattgttcaaaatcagggctataagagaaaatgttcattacccaaagaaaaaaaatgttccatacagagaaagtcaaggatgacagtaaatttctcattagaaacaatgtgttcaagaagacagtgaagcaatatctttaaagtgctgaaagaaaaaaaacaaaaataaaccaaaaaaaggtccacttagaattctayatccagggaagatagcttttgaaaaacaaaggtaattttttttttttttgagatggtgtcttgctctgttgcccaggctggagtgcagtggagcgatcttggctcactgcaacctccgcctcctgggttcaagcaattctcctgcctcagcctcctgagtagctgggattacaggcccgcaccaccatgcccggctactttttgtatttttagtagagatggggtttcact

SEQ ID NO: 756460 - DNA, 543 bp, Homo sapiens
cactgccaagttccacatctgtccaactggaccaaatatgactgtacttcaggggcattatttttgagctttatgtcctctgcccctaacatagaccctggcatggagtaggttgttgagtgaatgaaggacggaatacatttactaatgaatgtattagagggaaaaatgaggctttagcctctgctctctagaagctcatggcccagtagtgggacaagagtcacacaggaaacatttcagtgactacaggctgcatatgacaatggccctgwgaccctggggatctgggcgaaacagaagggaacgctccccagagcagagaagaagtgattacaattggaagggtgggttgaagcctgccagcagatgggagtcagggcagcagcaggaccacacctggtatggtgggaaacacaggggaacctgaacttgaccacaaggcaaagctatgctcagttgacccgctattataacacaggcttcaatctcagggccatgcaaggacacctgaaagacacctgagcctaacgagctgctgct

SEQ ID NO: 756461 - DNA, 627 bp, Homo sapiens
gtcttttgctcactttttaatcagattacttgttttattgctactgagatgtttgagtttgttagatattttggttattaattgcttcttggatggatagtttgcaaatattctctcccatactgtaggttgtctccttactctgctgattgttttcttygttgtgcagaagtgttttggcttgatgtgattcaatttgtctattcttgctttggttgcctgtgcttttgagccaaaaaatctttgcccagactaatgtcctatagcattgtccaatatttccttttagttttttcatagtgccaggttttacatggacatatttaattaattttaagttgatttatgtgcaaggtgaaagataagtctctagttttatacttctgcatgtggttacccagttttcccagcaaaattttttcaagactgtcctttccccaatatgtattcttgacaccttcgttgaaaatgagttggctgtggatgtatggatttatttctgggctttctattcagttccattcgtctatgtgtctgtttttatgccagtaccatgttgtcttggatactatagctatgtagaataatataagatagtgtgatgcctgcagctttattatttttgca

SEQ ID NO: 756462 - DNA, 614 bp, Homo sapiens
taagaagtttttaagaactggtaccaactttactttgatttccaaaaataatataaccaagccaaaagaaaaaaaactaatactgtacacattaactcccttcttcccccacattttgaatttttggtgttatgatttacactaatatattgcctctcaacaaattgttattattatttttaatagttttagctctcttagtaaagctataagaggcttacataacataattacaatattagtagcattcttttttaaaayttttttgttttaaagaactccttttagcatttcttgtaggacaggtctggcagttatcaattccctcatgattttgtttgtctggggaaatatttatctttccttcatttctgaaggacagctttgctgagtacaatattctttgttgacagttttttttgtttttttattttcttcagcattctgaatacatcgtcctactcctttctagcttgtaaggtttctattaagaagtatgctgctaggcattttggatctcccttatatgttatttgcatcttttctattgctgctttcaggatcttgtttttgtctttgacctttgaacctttgattataatatgtcttggggt

SEQ ID NO: 756463 - DNA, 563 bp, Homo sapiens
gagatgatttagggtatatggcagaagagatttctaagcagcaaagcattcaagaggtgacttgggtgctgttaaaagcattcagttgtaaaagggaaacagagcataaaagcttggaaaatttgcagcctgacaatgtgatagaaaagaaaagcctattttytgaggagaaattcaagacagctgcagtaatttgcaaaagtaacaatagctgcagaaatttgcataagtaacaaggagcagaatgttaatccccaagacaatggggaaaatgtctccaggccatgtcagagggcttcacgacagcccctcccatcatggccaagaggcccaagagaaaatggtttcatgggcagggcccagggtccctgtgctgtgtgcagtctagggacttggtgccctgtgtcccagctgctccagctgtggctgaaagaggccaacatagagcacaggttgtgtcttcagagggtgcaagccccaagccttgggagttccatgtggtgttgagcctgcgagtacatggaagtcaagaattgaggtttgggaacctccatctagatttc

SEQ ID NO: 756464 - DNA, 588 bp, Homo sapiens
agagatgatttagggtatatggcagaagagatttctaagcagcaaagcattcaagaggtgacttgggtgctgttaaaagcattcagttgtaaaagggaaacagagcataaaagcttggaaaatttgcagcctgacaatgtgatagaaaagaaaagcctattttctgaggagaaattcaagacagctgcagtaatttgcaaaagtaacaatagctgcagaaatttgcataagtaacaaggagcagaatgttaatccccaagacaatggggaaaatgtctccaggccatgtcagagggcttcacgacagcccctcccatcatggccmagaggcccaagagaaaatggtttcatgggcagggcccagggtccctgtgctgtgtgcagtctagggacttggtgccctgtgtcccagctgctccagctgtggctgaaagaggccaacatagagcacaggttgtgtcttcagagggtgcaagccccaagccttgggagttccatgtggtgttgagcctgcgagtacatggaagtcaagaattgaggtttgggaacctccatctagatttcagaagatctgtggaaatgtctgaa

SEQ ID NO: 756465 - DNA, 560 bp, Homo sapiens
gatgatttagggtatatggcagaagagatttctaagcagcaaagcattcaagaggtgacttgggtgctgttaaaagcattcagttgtaaaagggaaacagagcataaaagcttggaaaatttgcagcctgacaatgtgatagaaaagaaaagcctattttctgaggagaaattcaagacagctgcagtaatttgcaaaagtaacaatagctgcagaaatttgcataagtaacaaggagcagaatgttaatccccaagacaatggggaaaatgtctccaggccatgtcagagggcttcacgacagcccctcccatcatggccaagaggcccaagagaaaatggtttcatgggcagggcccagggtycctgtgctgtgtgcagtctagggacttggtgccctgtgtcccagctgctccagctgtggctgaaagaggccaacatagagcacaggttgtgtcttcagagggtgcaagccccaagccttgggagttccatgtggtgttgagcctgcgagtacatggaagtcaagaattgaggtttgggaacctccatctagattt

SEQ ID NO: 756466 - DNA, 582 bp, Homo sapiens
gaaaagccacagacattcaatgccagcctatgaaagcagcgaggagggaggctgtaccctgcaaagccacaggagtggagctgtccaggaccattggaacccacctcttgcattggcataacccagatgtcatacatggcatcaaaaaagaacattttggagctttaagatatgactgccctgctggatcttasacttgcatggggccagtagccccttagttttggccaacctctcccatttggaatggctgtatttatacaatgcctgtatccagtgtatctaggaagtaactaacttgcttttgattttatgggcttataggtggaagggacttgctttgtctcagatgagactttggactgtggacttttgagttaatgctgaaatgagttaagactttgggggactgttgtgaaggcatgattggttttgaaatgtgaggacatgagattcagaggggccaggggtggaatgatatggtttggctgtgtccccacccaaatctcatcttgaattatactcccataattcccacgtgttgtgggaggcacccagtgggagataatttgaatcatggga

SEQ ID NO: 756467 - DNA, 590 bp, Homo sapiens
aaaagccacagacattcaatgccagcctatgaaagcagcgaggagggaggctgtaccctgcaaagccacaggagtggagctgtccaggaccattggaacccacctcttgcattggcataacccagatgtcatacatggcatcaaaaaagaacattttggagctttaagatatgactgccctgctggatcttagacttgcatggggccagtagccccttagttttggccaacctctcccatttggaatggytgtatttatacaatgcctgtatccagtgtatctaggaagtaactaacttgcttttgattttatgggcttataggtggaagggacttgctttgtctcagatgagactttggactgtggacttttgagttaatgctgaaatgagttaagactttgggggactgttgtgaaggcatgattggttttgaaatgtgaggacatgagattcagaggggccaggggtggaatgatatggtttggctgtgtccccacccaaatctcatcttgaattatactcccataattcccacgtgttgtgggaggcacccagtgggagataatttgaatcatgggagtggtttcc

SEQ ID NO: 756468 - DNA, 589 bp, Homo sapiens
gaaaagccacagacattcaatgccagcctatgaaagcagcgaggagggaggctgtaccctgcaaagccacaggagtggagctgtccaggaccattggaacccacctcttgcattggcataacccagatgtcatacatggcatcaaaaaagaacattttggagctttaagatatgactgccctgctggatcttagacttgcatggggccagtagccccttagttttggccaacctctcccatttggaatggctgtatttatacaatgcstgtatccagtgtatctaggaagtaactaacttgcttttgattttatgggcttataggtggaagggacttgctttgtctcagatgagactttggactgtggacttttgagttaatgctgaaatgagttaagactttgggggactgttgtgaaggcatgattggttttgaaatgtgaggacatgagattcagaggggccaggggtggaatgatatggtttggctgtgtccccacccaaatctcatcttgaattatactcccataattcccacgtgttgtgggaggcacccagtgggagataatttgaatcatgggagtggttt

SEQ ID NO: 756469 - DNA, 508 bp, Homo sapiens
gtgccatgtggcactgagaacaatgtatattccattgtttgggggtggagagttctatagatatttattatgtccacttgatccagagcagagttcaagtcctgaatatccttgttaattttctgtctcagggatatgtctaatactgacagtggggtgttaaattgtcccactatttttgtgtgggagactaagtctctttgtaagcctctaagaacttstttttagagacttactggtctgggtgctcctgtatttggtgtatatatattttgggtaattagcttttcttcttgaattgatccctttaccattatgtaaggcccttctttgtcacttttgatctttgttggtttaaagtctgttttgtcagagactaggattgcaacccctgcttttttctgttttccattttcttggtaaattttcctccatccctttattttaagcctatgtgtacctttgcacaagagataggtctcttgaatacagcacactgataggtctt

SEQ ID NO: 756470 - DNA, 578 bp, Homo sapiens
tattatgatataacaataattatatatttggtctctacccctgcttcctggcacacagcttctaaatttcttggaatttcctggatgataggaatatcttttattttcatgaggcagctcttggtggaattctggatagtctcaagatgcggacttgtggccaggggaacaaaccgtgtgattagagaactggaactttcagcctcacaccccaacctttggggacaggagaaaggttaaagtcctgagagttggccaccttygcctatgatataatcaaatcaaccatgactgtgtaataaagcctccataaacccttaaaagaacaagatttggagagcttctagattgttggccacatgaggtggcgttcccagagagggcatggaagctccacaccctttccatcttaccttgccctatgcacttcttctatctgactgttcatctatatccttcataatatcctttataataaatttgcaaacccaagtaaagtgttttcctaaattctgtgagccagtttaacaaatgaatgcaactcaaagaggcagttgtatgaatcctgatctatagcc

SEQ ID NO: 756471 - DNA, 629 bp, Homo sapiens
caaactacttacttggcatcgccacttggatatctgttggacaattcaaatttacacacatcctaaacccgtctttccccttcaaaagacaagcaacaacaaacaaaacaaaacaaagcaaaaataaaccttgttgcacttgaacsccttttcatctcatttgatggcaatgtcatcaaagcccccgttgctcaatccaaacatctctttctcaatccatcaggaagtgcgagtgactctaaaaactctctccaggactcacttcccactgccaaggtgcagctctgagacggtgtcacttctcacctggatcactggcttctgtccccccatttctatcattggccctcaagattgtttttcttacagcatccagggtgatccttttaaaatgttaagtcagaccataacagttctctgctaaaaatattctgagatgccttcccatttcacccagagtaaaagctggagtctttacaatggtccttaaggaccaccccaggcgccccacccacccctcacgtctcctgccctgtcctccttctgcccttgcacttgtcaccactctgacttcatctcctgtgctctccactggcctcctgaccattcctgctgctttagagcattgt

SEQ ID NO: 756472 - DNA, 609 bp, Homo sapiens
gctgatgctgcggataggcagagcacatcttgaccagcacatagcttgcttgcttgttctccatcttgtttgcaaactgaaatcagtggaggaatttaaaaaatactgattctggtttccaccccgatagattatgattcaatwggtatggggtacagcttggacatctagatatttctaatgatctccaggtaattctaatgtgaagcaaagtttcagaaacacagctagactgacctgctcctgcatgtagaaaatccaggttctggtcattggtggctgagcaggctgggggagccacattcagagtgtggtcactctggcctggcaagaagcctggcctggcaagtgtttttcctcgtatcctgacacccacatagcagggatccagccacggtgcccagaatacaggacaggaccgtttctctggagagttagtacaagcaaggctgcctcttagttctaaaggactgagatacaaggcagagacttaggcacaggagcatcacaccgggatccaggcagaaggcctggatgtaaagctaggggcttggttacaaggatagaggcaagaggtcagttactagaattggttatggtgtcagagtc

SEQ ID NO: 756473 - DNA, 462 bp, Homo sapiens
agcaattagtgagatgtgggagatatgtttgaatcctacaggtaaaccatatgtgtagggagaaaccaggggtaaggaatttgagcttgaggcagaggcaatgtgaaattattatcaattcttttttttttttttttttttgaggagtctcactgtatcacccaggctggagtacagtggcatgatcttggctctgcctcccaagttcaagcaattctcctgtcttarcctcctgagtagctgggactacaggcacaggccaccatgcctggctacttttgtttttttttttgagacggagtcttgctctgtcacccaggctggagtgcagcggcgcaatctcggctcactgcaagctccgtcttccgggttcacgccattctcctgcctcagcctcccaagtagctgggaatacaggcacccgccaccacgcccggctaatttttttgtattttttttagt

SEQ ID NO: 756474 - DNA, 647 bp, Homo sapiens
cctgaaaacattcatcatttaacaagacatccttgccttgtcataaggctctggacacaactttattttaaaatgcagctcccaggaattgaatagagaactctaaatgttttctgaattgtcaagaacgtagtgaaaatatcacacccctgttttagttattcagccttagcaagcattcacttttctgayagtaaacttagattactaactcaggttggggtagcaagcaacaaaaaacaaaaatgcctttctccaggtgaactgctactgactgcagacttcctctaacctggatggatatgggtgatttgtttaaaaaccaaagtccagtacttttaatttgtaaaatagccatgcaatacatgtgtgtaaatggacctctaaacgtgtgtgtgtgtacagttgacccttgaacaacacgggtttaaactacataggtccacttataaactaatttttttgtgtgcttctgccacccctgagacagcaaaaccaacccctcttcctcctcctcctcagcctactcaatgtgaagatgacaaggatgaggaccttgatggatccacgtccacttaatgaatagtaaatatagtattgtctcttccttacaattttaataacaatttcttttctctagcttactt

SEQ ID NO: 756475 - DNA, 628 bp, Homo sapiens
taaaagaatagcttattttgctagactactggtaagaacaaaatattattgtgtccggaattggtgggttcttgatctcactgacttcaagaatgaagctgcggaccctcgcggtgagtgttacagctcttaaggtggcgcgtctggagtttgttccttctgatgttcggagtttcttccttctggtgggtttgtggtctcgctggctcargagtgaagctgcagaccttggtagtgagtgttacagctcttaaggcggcgcatctggagttgttcgttcttcccggtgggctctgggctcgtggtctcgctggcttcaggagtgaagctgcagacctttgtggtgagtgttacagctcataaaggcagtgtggacccaaagagtgagcagtagcaagatttattgcaaagagtgaaagaacaaagcttccacagtgtggaagaggacccgagtgggttgccactgttggctcgggcagcctgcttttattctcttatctggccccacccacatcctgctgattggtagagcccagtggtctgttttgacagggtgctgattggtgcatttacaatccctgagctagatacaaaggttctccacctccccatcagattagttagatac

SEQ ID NO: 756476 - DNA, 464 bp, Homo sapiens
catataggctgggggcggtggctcacacctgtaatgccggcactttgggaggccgaggtgggcggatcacttgaggccaggagttcaagaccaggctggccaacatggtaaaaccctgtctctactaaaaatacaaaaattagccaggcatggtggcacgcacctgtagttgcagccacttgggaggctgagacaggagaattgcttgaacctgggaggcagaggtcgctctgagccaagattgcaccmccgtactccagcttgggtgacagagagagactccgtctccaaaaaaaagacaaaaaaaaaaaaaaaaaaaaaaaaagacccaaatagaggctgggcacggtggctcactcctgtaaccccagcactttgagaagctgagatgggaggatcgcttaaggccaggagttcgagaccagcctggtccatatagtgagacgcccatctctgttgaaaga

SEQ ID NO: 756477 - DNA, 552 bp, Homo sapiens
ttttattttggtgaatgttccatgtgagcttgagaagatgtgtattatgttgttggataaagtagtctctagatggctgttgtgtccagttgattgatggtattgttgagttcaactatgttcttactgactttctgcctgctggatttgtctattcctgatagtagggtgttgaagtctctaattataacagtggattcatctttctggttgcarttctatcagtatttgcctcacatagtttgatgctgtattgttaggagcctatacgttaaggattgttgcctttttggagaattgacttctttatcattatgtcatgccatttatccctgataagtttattgcttggaagtctgctctgtctgacattagtatagctatttttgctttcttttgattagtgttagcatgatatattttttatcaaaccactttcattaatttatgtgtctttatattgaaagttggtttattgtagacaacatacagttgggtcttgttttttgatccactctgacaacatctcttttaattgatgcatttaggcta

SEQ ID NO: 756478 - DNA, 659 bp, Homo sapiens
tggggttattttctaggaatagggttactgggaacatatgttaagggtatatttaactttgagaaactccccagttgttttccaaatcagctcttccaatttgtgttcttgccagcagtgtatagagttcgagttgcatcccatcgtgtcagcacatggtattgtcagtcttttaattttagccattctagtaggcatgtagtgataccctactgcagttttaatttgcatttccctaatgactgaacatctctacatgtgcttatttgccattcatatatcttctttggtgaaatgtcttcaagtcttttgtctctcttttgaaattgtgttgccttagtaagttctamgagttctttgtatattctgaatacatatccttaatcagatatattttgctaatactttctcccaatctatggcttgtttttattttgagtgtctggcaaagagcaggtatcttaaattttgaagtctgatttcaatcacattttaggtaatttatatatgtgtcgtatctgataaatctgtgattgacccaaagtcacagattttctcctatgttctcgtccagaggttttatagttttagcacttacaatttgggctaggatcctcttcaccttaatttttgtatataatgctaagtaagggtcaagg

SEQ ID NO: 756479 - DNA, 614 bp, Homo sapiens
tacaagaacagaactacatggtctcagatcaaaagatctccttcccctcacattattttggtttctagtctgtgtttataagtagtctattaaatatgtagatcagatgattccacagttatgtcatctgctagcaaaatctatattcacatatagaaatacaggattttagaaatctataaatctaacaaaattgttatttgttctatctgggatctatacatgttgtaactaaagcaattggacaatattttgaattcttgccttattcgaataatcaaatgwttttattcaatatgatagtgttaactatttggttttatattttatcctctaaatataaactatttcatagcaccaataactacacatattatacttttcaaatcaggtttgatctttgaatacttaacattttgctgatgtgctttttcattttctttatggtttctaagaagaggtaatatatgccagccttttcatccatttgcataatatcgttgatttttttcatctccagacagtttttaataaaggcagactccttcaaggtacaatgaagtaaccagaatctagtaactttttactgtttgaaaaactttgtgtttaaaaaa

SEQ ID NO: 756480 - DNA, 480 bp, Homo sapiens
agaaaacagtagtgcaaaggcacataaatggaaatgagtttgttgttttcaagaaacaaaaaattcaggatgactggactagagtgagcagggtggaaggcaataagagaaaaagtcacacaagaagattctggattatgtaaggcctcacaggacagagtcaggaggtagattttaccctgaatatgaaagaaagaatacagcaagtcctcacttaacactgtttatgttgataagttcttggaaactgcaaatttaagtgaaacaactactatataacaaaaccaattttgccataggctaattgatacaaacaagagttcagttcctaaggcataaagaaygccatttttcttaaagtcaaagtttccagtaatccatttatgatgttaagtgaggactttactgtgcaagttttgaccaagatacatgacataatcttgtttactttggaaggtgggggttgcctgctatgaagat

SEQ ID NO: 756481 - DNA, 481 bp, Homo sapiens
aaggaaagtgaaaaagaaaaccaactagaaggttattttattggccgggtgtggtggctcacacctgtaatcccagcactttgggaagccaaagagagcggatcacctgaggtcaggagttcaagaccagcctggccaacatggtgaaactctgtctctactaaaaaacacaaaaattagccgggcctggtggtgggcacctgtaatctccactacttgggaggctgaggcaggaaaatcacttgaacctgggaggcagacgttgcagtgagccragatcgtgccactgtactccagcctgggcgccagagagagactccctctcaaaaaaaaaaaaaaaggctatttttattggtctacacacaagatagagggtttgaattagggcagtaagtgaacaatgtggtagagtctggatatattttgaagtacacaagactccttaaaggggtagatctgggagataaaagatttagagaaa

SEQ ID NO: 756482 - DNA, 544 bp, Homo sapiens
tattattttaataggttagagattaaaatgtcatccatctttgatttatctaggcctatatgtatatacacccctaccctgaccaacagacaattgtataattctctctatactttaagtgccacaagagttatttaatgtgtcacttagattaatccacatatttaccctttttgttgtttcttcattccctgaatcttcatgtttcttttacaaacttcaagttttttcttctgcttaaacaaaaactttagtatttcctttaatgtaggtattctggtaagaaagtccataaatttgtctacaactgtccttgtaactttatccttgaaggcattttcactggttatggaaatctargttggtagttattttgtttcagccctgtgaagatgtcattccattatcttctgtcttctattgtttctgtggagatggtagctctcagacaaattgttggttgctcgtttgtacatactccccactcccatcctgccctgggtactctaacattttttcactttgtgtttagtttcagcagttt

SEQ ID NO: 756483 - DNA, 536 bp, Homo sapiens
gtaggactgccttgtaagaaatgatttttttctttttttctgagacggaatcttgctctgttgcccaggctggagtgcaatggagcgattttggctccctgcagcctccacctcccaggtccaagcgattctcgtgcctcagcctcccaagtagctgggactataaatgccaccaggcccggctaatttttgtatttttagtagagacggggtttcaccatgttggccaggctggtctcgaactcctgacctcaagtgatctacccacctcagcctcccaaagtgctaggatcacaggcgtgagccaccacaccyggccagaaatgttaaatgatgttctttaaagaaaaagaaaattttatatgtcagaaactcagatataaataaaggaaatgtatcaaagaaagaatacgttgaaggtaaaatacaaacttttattttccttattcctaattgttccaacagataacagtttgttcaaaataataacagcaacagcatatttgattatatatgattatgtgtatatatgctta

SEQ ID NO: 756484 - DNA, 493 bp, Homo sapiens
tgacccctgcactagcccaaagagaaaatgtaaaacattgctttaaaaaagctctaggctaggctgggtgcggtggctcacacctgtaatcccagcactttgggaggccgaggcgggtggattatgaggtcaggagttcgagaccagcctgaccaatatggtgaaaccccgtctctactaaaaatacaaaatatgtcgggtgtggtggcgtgcacctgcagtcccagctactcgggaggctgatgcaggagaatcgcttgaacctgggaggcagaggctgcagtgagccgagactgaggcactgcactccagcctggcaacagagcaagactccgtctcaraaaaaaaaaaaaaaaaaaagaaaaaaagaaaaaatagctctaggctgggtgcagcggctcacgcctgtaatcccaacactttgggaggccgaggtggacagaagatcacttgaggttgggagtttgagaccaaccagcctggccaacttggt

SEQ ID NO: 756485 - DNA, 554 bp, Homo sapiens
gttatattctctaattttttaattttattttttagaaacagggtctccttctgtcgcccaggctggaatgcagtgatgccatcatggtttactggagccttgacctcccaggctcaagtgatccttccacctcagcctcccaagtagctggaccctaggcacatgccaccatgcccagctaattttttattttttgtaragacagggtcttcctatgctgcccaggctgttctcaaactcctgggctcgaacaatcctcctgcctcagcctcccaaagtgctgggattacaggcatgacgcactgtgccaacccctaatgtttttagtcattaagggcaaccacctacacaatggcccttgatgtttcgattagcaagaggttcagatgcttggtctagaggatgtttgggttttccaaccatattcaatatgttaaattacaaaacaataaaaaagtccatataattttttttaatgtatgtctttttttgagacagtctctctccatcacctaggctggagcgcagtggtgtgatcttggctcactgcaaca

SEQ ID NO: 756486 - DNA, 642 bp, Homo sapiens
cgatttcatgctaaatattttcctctcagcagggtgcagtggctcacgactgtaatcccagcactttgggaggccgaggcgggtagatcacttgaggtcaggagttcaagaccagcctggccaacatggtgaaaccccgtctctactaaaatataaaaatcagctgggcgtggtggtgtgatcctgtaatcccaggtactcgggaggctgaggcaggagaatcatttgaacccgggaggcaaaagtagcagtaagccgagatcacgccactgtactccagcctgggcgacagagtgagactccgtctcaaaatatatatatataaataaacatatatatatatwtttttttcctctcttggataaaggaagtcttcaatgtacttctcttggtgatcaagtaaaacattttttccctcttatatctgtgcaaacctacaaattgatgccatgttgccaaattcttccactatctccatgcttaaaagtgtgcatttgtaggactaatgactggctttctatcctgttttaaagttgatcaaaaaaataacattttctaggtaactaaaacaggaccagagcagccgtacgaatttaaagaaaagaacttgttactcaaaatgtaacagaaatataaacttta

SEQ ID NO: 756487 - DNA, 619 bp, Homo sapiens
ttgagattacaggcatgagccaccaggccagcctgtatttagagcacatttctaaatgttttctgctttaatatgtgaatcacttgatatataaaaaggaaattaggccaggtgcaatggctcatgcctataattccaggactttgggaggccgaggygggtggatcatttgaggccatgagttcgagaccaacctgcccaacatggtgaaacgccacctctacaaaaaatacaaaaattagctgggcatggtggcacgcacctgtagtcccagctattcaggaggctgaggcagagaattgctggaacctgggaggcgaaggtcgaagcaagccagggtcaaagcgagccagggtcgaagcaagccgagatagcaccactgcacttcagtctgggcaacatggcaagtctctgtcccctcacaaaaaaagaaaaagtaaatcagcgtggttatttctgttttccttaattcagagaaatgtcttcagagttgtacacaagcagaaaagaattctatcgaatagacatattatgatttacacatattataatgattagacatattgtgaaaataaagaggggtaagtttaatttttgtaaaaaagatgtttatatagag

SEQ ID NO: 756488 - DNA, 619 bp, Homo sapiens
ttgagattacaggcatgagccaccaggccagcctgtatttagagcacatttctaaatgttttctgctttaatatgtgaatcacttgatatataaaaaggaaattaggccaggtgcaatggctcatgcctataattccaggactttgggaggccgaggtgggtggatcatttgaggccatgagttcgagaccaacctgcccaacatggtgaaacgccacctctacaaaaaatacaaaaattagctgggcatggtggcrcgcacctgtagtcccagctattcaggaggctgaggcagagaattgctggaacctgggaggcgaaggtcgaagcaagccagggtcaaagcgagccagggtcgaagcaagccgagatagcaccactgcacttcagtctgggcaacatggcaagtctctgtcccctcacaaaaaaagaaaaagtaaatcagcgtggttatttctgttttccttaattcagagaaatgtcttcagagttgtacacaagcagaaaagaattctatcgaatagacatattatgatttacacatattataatgattagacatattgtgaaaataaagaggggtaagtttaatttttgtaaaaaagatgtttatatagag

SEQ ID NO: 756489 - DNA, 558 bp, Homo sapiens
aaaaaaaaaaaagaagaagaaagaaagaaaaagaaaaagaaagaaaaggaggacaacagaatctcaccaatgactctctctctctctctctccatatatgtatatatccttccccttctttgaatgtaatccttcactcttttacctttgtctcatcccattatccacctcccaataatcyttatttgctgaaactggccttggatgatgatctacaaatataactaatacagaggatactaacaccttctaggaattatctgcagctctaaagattagtctaccaagtcaaaataatatctgttgggtggaaggtacagtggagacttttgagcaaaggattttattctgtcacagatattctaccaattcatttagtcttcctcagaaacaaaaataatttgtcccttttttcctttgtaagttgctctgccccacaagggttaattttaaaacagctatcattcctgtgggctaatacagggatataaatatcagtatcagttaaagtgaagacaattttaaaatgttggtagtcatgtatgaaggaatgaggag

SEQ ID NO: 756490 - DNA, 646 bp, Homo sapiens
ttatgattaaaagcagacaataagtctatttgaaaccattttgcccctactttataatttgccccatttttaattgcattcccttttgtagtttattatttaaaaatgtgaacaaatatccaatttgggtagtaaagagacttaagataccttggagcaagaagattcatcaaaatattatttgatatagctccttcctgaaggcagctaatggtgtataattcctttatattaaaaattcttcaaatattcattaaatatcttctatatacgtgacactaaattagctactaaaaggatgtagtggtcttcacaatatttgtgtgtaccctttgcacaattagatttgtcatcataagttttaagcggttgtaaaagatgtctattgtactatcttgtcaatttttacattttaagtaaatagtgttacttatacccagtagaactgaaacattataacaactttccctgtactattattcrcttaaaattactttaacagttagacattgcatcattactttttctctttaaacttctatttccataataccacctcacacaaactcattacaacgtactatatttttatccccattatagttctttgcaacaaactacatatacttaacacatttacatatct

SEQ ID NO: 756491 - DNA, 570 bp, Homo sapiens
caggcatggcatataagcaagctttttttaaggctgagtgacttatgtggctgatagaggaaggataagaggaaaggaaatatagtgaaaaggaacagagaggaataataaagctggcaagtcacagacaacataattagactatcaaaagaaaatytggaagaaaggcatggacaggaataaagacctccttctaaagcaaggtagggagagcaacttgatgtagattgaagagaaaaaggaaagaaaaatgaatgttcatatttgatggcctatgattttctgggtcatgtagaaggcaaagtaacatgttcaagtgatgaatttggtaactttaggataatgatgacagttcagacaacaaatacagagaataaaagagaacactgactatatgaatagaaggattttagagacattacgactcagccgagtttaaatcaaagattgtaaggcattcagtcatcaaggttatacatttttctccagcagctctagccttctatgaaatagaagcagaaaaaaaacccaaaacagatgggttaactacctgtaaatctggatttgaac

SEQ ID NO: 756492 - DNA, 628 bp, Homo sapiens
  misc_feature 628: n = A,T,C or G
atagaggaaggataagaggaaaggaaatatagtgaaaaggaacagagaggaataataaagctggcaagtcacagacaacataattagactatcaaaagaaaatctggaagaaaggcatggacaggaataaagacctccttctaaagcaaggtagggagagcaactygatgtagattgaagagaaaaaggaaagaaaaatgaatgttcatatttgatggcctatgattttctgggtcatgtagaaggcaaagtaacatgttcaagtgatgaatttggtaactttaggataatgatgacagttcagacaacaaatacagagaataaaagagaacactgactatatgaatagaaggattttagagacattacgactcagccgagtttaaatcaaagattgtaaggcattcagtcatcaaggttatacatttttctccagcagctctagccttctatgaaatagaagcagaaaaaaaacccaaaacagatgggttaactacctgtaaatctggatttgaactggtagaatgaagcttcctgcaaatgttggatgtaaaagtgcagatctaatcaggtaaaatctcaagcattaattgaatatgatccatcacactggcagggcatcgagcan

SEQ ID NO: 756493 - DNA, 600 bp, Homo sapiens
ttgctggctccatcattatagccctctcaggaaaaccataattgagacttagacatattaaggacattatcacaccattgatctagttaataacaattacaagggaacatcttaaaatacaatgcttgtttctgattaacggggtcattatgctttgattttaaaaaattgttttgaactttaatttagctcttgtttgggggcataactatactcataatgtatatctttaaaagtactcacttcactagattatattgtaataaatatagataaattttactagtgtagactctcaacttactgtcgtataaacatgaaatcgtttttatcataagygtcctattatatcaacctcattttcccacttggtgacaggattctttgagcacaactcagcccttttacattttcttttcatttatttttagcaattaaaactatctttcagttatttaagacttggtccatttatttaaaaatttcagtctcatattcaatttatatctccatttacctttctacctcagttcccattccaagttaggttggtagcggagaagaggtgtggtctagctctcacaaactcccctccacccc

SEQ ID NO: 756494 - DNA, 627 bp, Homo sapiens
catttcactcaataaactcttccttgaatttaattcctgaaagtataacacacacttcaagctttccgtgtgtgtgtgtgtgtgtgtgtgtgtgtgtgtgtgtatgtgatggttaattgtaggtgtcaacttgactgagccatggggtgcccagacatttggccaaacattattctgtgtatgtctgtggtggggcaggggtggggtggttcttgatgaatttcacatttaaattgataggctgagtaaaccatattgcccttgctaacgtggatggacgtcatcctatcatttgaggacttgaatacaacaaaaagatttagtaaaagggaacccctcttgcctgactgcttgagctgggataataatcttttctggctttcagactctgactgaaacacccagttttcttaagtctccartgtaataactgtggactagaacttacaccatcatggttcccatgcctttgatctcagactggaactacacatcagctctcctgggtctccattggcttgcttgactacagatcttgggattctcagccttcataattccattagccaattccttataatagattctgtactaataagaaggggctgctgtaacaaatacttaaac

SEQ ID NO: 756495 - DNA, 627 bp, Homo sapiens
tagatttcctctacctgtgtgtcttcatattatttgctctctgtgtatgtttgtgtgtccaaaattctttttgtaaggacaccagtcatattggattagggcccatgggaatgacctcattttaattttaatttttttttttgagatggagtctcactctctcgcccaggctggagtgcagtggcacgatctcagctcactgcaacctccgcctcctgggttcaagcaattcttccaccttagccacccgagtagctgggaytacaggtgcctgccaccacgcctagctaattttgtgtatttttagtagaggtgaggttttgccatgttgtggtcatgagctcctgacctcaagtgatctgccctacttggcctccccaaaatgctgggattacaggcatgagttacctcgacctctcctggccctcattttaatttgattacctttgtgaagaccctgtttctaaataaggtcacattctgagttactttgtgattaggagtttaacatatcttttttggggtacccagttcaacccataacagactctgaatagcccctcaaaaattgaaaaataaagaataaagttagaggaatcacatttctcaatttaaaaatttacatca

SEQ ID NO: 756496 - DNA, 580 bp, Homo sapiens
gccaggctgacatttcatttttaatcattgacttaatattcagtaagtaaacctgatatgtgaacttttctctccctttcctttctattctgtaactggaagactaatggaaaaatacagttttctgttaactttgcaataagccctgtgtttcatgtattaatagttggattttttagaccccacttaaaagagtatatctgggttcktaatgtggtggcagtggtcccaaaccttcttggcaccaggactgcttttgtggaagacaatttttccatggacgagcgtggatggttttagcatgattcaagtgcattacatttaatgtgcactttattattattacattgtaatgtataatgaaatagttatacaactcatcatagtgtagaatcagtaggagccctgagcttgttttcctgtgactagacagtcccatctgggggtgctggggagacagtgatagattatcaggcagtagattctcataaggaatgtgcacctagatccctcgcatgtgtgctttacaatagagttcacgctcctatgagaatctgatgctgctgctgatcttacaggc

SEQ ID NO: 756497 - DNA, 637 bp, Homo sapiens
aaaatcctactcaacacttaagagttcccaaccactcttgaaatcaaatacaaccaaaatgaactcatgacttccctcccactccattttcccaaaacaaacctggtcctctttcagatgtcaccaccatctcttcggttttgcaagtcaraaacctggaagccatcatttttctctcctgcttcttcatcccctccaatcattccccaagtgattattacctcctaaagagccctcaccatttctactgcctattctctaattcaagccattctcatctcgtcccactacttgctgactaactggtctcaatgccagatccctctaccaatactaatttccacacagcacccaaaccgatcttttcaaaagacagatccagtttatcttcacctcacagccctgttctcttccaggttgacttcttgagctccaggtgttggaaaaatggctgccacagctccaagcctcacatcctttgcttttgagtcaaactgtctcttatccagaattcccttcaaagtcccatagcatctccatggctgtgatcaaactatgtgcctatcctcaaaccagttattgtggcccaggggatgcaatgtcatgagtggcttagcatgggttatgtgctcactgc

SEQ ID NO: 756498 - DNA, 622 bp, Homo sapiens
gtggagaggccatttgtagctactctggaaacagccctagcagagttccctgactatagacagtgtcaattgctatgattggcatccatcccagctgggcttgcagatgacaccagccccagccatagtctgattgtaacagtatgagtgaccacaaatgagaaggacctagccaattctagtcaacccacagaacatgagagataataataaattgttgttataagccactaagttttgggctggtctgttatacagcaagagacaaccaaaacattattcatatatttattatgtctgtttctctgcattcccccataactctgacttgcatgtgaaggggagtgtgtcccaggagcaggtggataagytggagcatctactttggccccaactctacatgactattccattctagtgcccaataccatcttactgatttagtccctgtgtctatgttccaaatgctaaaagaataagtctgattggtcaagtggagctaggcgctcacccctagtaaaaccatttgtgatcaagaaaaaaggtcatgtgctccttagtactgtatggagtgggggtgggaggattgtaggtacagaagaaatagtatgtgtctcttgca

SEQ ID NO: 756499 - DNA, 633 bp, Homo sapiens
actggatccaatcagcataacatcatcaatgtaatggaccagtgtgatatcttgcggaagcaaaaaagcaatcacggtctctccgaataagattatgacacaaagcgggaaagttgacatacccctgaggtaggacaataaaagcatattcctggccttgctggctgaaggcaaattgcttctggtgggccttatggacaggaatggagaaaggcatttgccaagtcaatggctgcatrccaggtaccaggagatatgttaatttgctcaagtaatgaaaccacatctggtacagcagctgcaattggagacaccacttggttaagtttaatccactgtcattctccaagatccacctgtcttctgcacaggccaaatgggaaaaccgaatggggatgtgttgggaatccccacccctgtgtctttcaagtccttgatggtggcactaatctccgcaatccctctagggatgcaatattgttttttatttgctatttttctaggtagaggctgctctaatggcttcaatttggcctttcccaccataatagccctcaccctaccagtcaggaagccagtgtgggggttctgccagctgctaagtatgtctctgccaattacgcattctggcat

SEQ ID NO: 756500 - DNA, 633 bp, Homo sapiens
actggatccaatcagcataacatcatcaatgtaatggaccagtgtgatatcttgcggaagcaaaaaagcaatcacggtctctccgaataagattatgacacaaagcgggaaagttgacatacccctgaggtaggacaataaaagcatattcctggccttgctggctgaaggcaaattgcttctggtgggccttatggacaggaatggagaaaggcatttgccaagtcaatggctgcatgccaggtaccaggagatatgttaatttgctcaagtaatgaaaccacatctggtacagcagctgyaattggagacaccacttggttaagtttaatccactgtcattctccaagatccacctgtcttctgcacaggccaaatgggaaaaccgaatggggatgtgttgggaatccccacccctgtgtctttcaagtccttgatggtggcactaatctccgcaatccctctagggatgcaatattgttttttatttgctatttttctaggtagaggctgctctaatggcttcaatttggcctttcccaccataatagccctcaccctaccagtcaggaagccagtgtgggggttctgccagctgctaagtatgtctctgccaattacgcattctggcat

SEQ ID NO: 756501 - DNA, 591 bp, Homo sapiens
aaaggagcacaaaaaatagattattacctctgctttgggctaaattttgtcccattaaagttcatatgttgaagccctaacatgctgaagccctaacatgcaatacctcagaatatgactatgtttggaagtagggcctttaaagaggtaattaaattaaaatgggattctcagtgcggaccaatccaatatgactaatatcttgttgagaaaagattaagatacagacaacgcagacagagggatgaccgtgtgagcacacagcaagaaggcagccatctgtacaccaaggaggactccttgatctttgacttctggcctccgaattgtgagaaaataatttttttttttttgagayggagtctcgctctgttgcccaggatggactgcagtggcacaatcttggctcactgcaacctcttcctcctgggttcaagcaattcttctgcctcagcctcccgagtagctgggagtacaggtgtgtaccaccatgcccggctaatttttgtatttttagtagagatggggtttcaccatgttgaccaggcggatcttgaactcctgacctcaggtgattggcctgcctctgcc

SEQ ID NO: 756502 - DNA, 478 bp, Homo sapiens
caaatgatggtggctgcctcctttgctagagcaagctctgaataaacaggctttgcttgtcctcatataaatctttcgggtaaaagagccaaatgaagtatcaactcaaaactagtgtctgtttctaggattgacttycaatagctgactctatacaaccttaagtactcaacatatgtaactcttaaataacttatttacaatggaatacagggaaatagaatgctaaacttatataattctaaacttattcatttgtctgtggagataatgtagatagcataagatatattccacgatgagcaataattgagatgtgtgaacatgttcactttggcacagattgaagacatctataattcttttctaaagacaaaaaaattgctgcagtattttattctacaacaaacaaggtatggaagtaactggtgaatgattacaagtatgtcacgtacgcattcaacttactgatactaag

SEQ ID NO: 756503 - DNA, 668 bp, Homo sapiens
actttggaggtcaaggtggaaggatcctttgagctcaggagctagagaccagctggggaaacattgtctctacaaaaaataaaaaatttgacatgcctctagtcctagctgttcaggaggctgaggtgggaggattgcttgaggccaggaaatcgaagctgcagtgaaccttgtttgagccactgcactccagcctgggtgacagagaaagaccttatttaaaaaataaataaataaataaataaataaataaaagaaaaataaaagagtttctgttgttattacttttatagttaccagtataagtttaaattttataattctatttactattttataacatcctataacatctgttggctgccaactatgaaaggtgaacaattgatacacytacactagaacaattgaagcacttacactatctcttactgcccttttccaccacagcttcaggttgtggttattaaatttcattttctgtggcagtgtttaagattttaaatttagtacttatatccatattctatgattaattaatgttaatgattatgtgttaactccctactataaaatgtgatactattataatttctgtattttctaataactctccttttaatatttcacttttagttacttttaaattttaaaggttattttaaggg

SEQ ID NO: 756504 - DNA, 668 bp, Homo sapiens
actttggaggtcaaggtggaaggatcctttgagctcaggagctagagaccagctggggaaacattgtctctacaaaaaataaaaaatttgacatgcctctagtcctagctgttcaggaggctgaggtgggaggattgcttgaggccaggaaatcgaagctgcagtgaaccttgtttgagccactgcactccagcctgggtgacagagaaagaccttatttaaaaaataaataaataaataaataaataaataaaagaaaaataaaagagtttctgttgttattacttttatagttaccagtataagtttaaattttataattctatttactattttataacatcctataacatctgttggctgccaactatgaaaggtgaacaattgatacacttacactagaacaattgaagcacttacactatctcttactgcccttttccaccacagcttcaggttgtggttattaaatttcattttctgtggcagtgtttaagattttaaatttagtrcttatatccatattctatgattaattaatgttaatgattatgtgttaactccctactataaaatgtgatactattataatttctgtattttctaataactctccttttaatatttcacttttagttacttttaaattttaaaggttattttaaggg

SEQ ID NO: 756505 - DNA, 543 bp, Homo sapiens
gagccaaatcttaatacccaagacaatggggtaaatgtcttcaggtcatgtcagagacctttgcggtagcccctcccatcacaggcctgcaaacctaggagtaaaaaatggttttgtggaccagaaccagaggctctttgctgtatgcagtctagggacttgatgttctgcatcccagcctctctggccatgactaaaagtggccaaggtacacctcaggccatggcttctgatggtgcaagccccacactttggcagcttccatgtggtgttaagmctgcaggtgcacagaagtcaagaactgaggtttgggaacttctgcctaggtttcacaggatgtatggaaatgcctggatgtccaattggaagtttgctgcaggggcagggtgctcatggagaacctctgctgggagagtgtgcaagtcaaatgtagggtgggagctcccacacagagttccccatggggcacagcctagtggagctgggactagaggggcactgtcttccagaccccagaatggtagatccaccaacagcttgcac

SEQ ID NO: 756506 - DNA, 551 bp, Homo sapiens
taaaaagatatccagtagttgaagagcattttaagtaaatgaaaatgcactagaaaaactcaacagcagatttgaactggtagaaggaagtatccgtgaatttgaaaaataagtcaattatacttatttagcctgaggacacaaatttaaaagtaataaataaatataaataagcaaaagctcagagacttgtggataccaacacattcataatgagaatcccagaaggaatggctattatttaaaattttatagccaaaacttctcayatttgatgaaaaacgttaatctacacattcaagaagctcaatgaacacccaatagaataaactgataaagatcaacacagacatatacaaatccaaccataaagagctaaaaaagaagagaggatcttgaaaagtgcaaggaaaaagtgcctcaacacaaaaaaagagatgtacaataagattggtgtatggtttctcattagaaacctggaattcaaaaggcactaagataacatcatcaaaaggttgaagcaaaagactgacaaccaaaaattctatatt

SEQ ID NO: 756507 - DNA, 610 bp, Homo sapiens
acttgtattttaaaaaaatatgagagcatcatggataattagtctttgccttaaaatattaatagatacaatatgagagaggatatcatagtaacaagaattcagaaaaaaaaatgttaacaggtccatcaaccatgcacttttttctatgcaaccacatacacactcacacacacagacacacacaatatagtagacacacacaatacaygagatataatgcatgtgcatacactgatttttgtaatatattatatgaaaaatgtagaccatatatcagaatgttaatgaaggtattttacgtagaaattggtttcatttggcctgattaagtattctaacttttcaaatgttacaataattaaatggaaagctattagaatgaggaagctctaacactctgtgttccttcgctgtctgctgaaataaactcctaaaaactttaatttgccaaagtttatctttaacactacaattatcatcttaaaaccacaaggattattttaaaaaatcaatttgaccacatgttccactgagaagggagttcagtcctggcttagaaaggctgcttcatattttcataggtaattatagacaactgcaacacaaa

SEQ ID NO: 756508 - DNA, 610 bp, Homo sapiens
acttgtattttaaaaaaatatgagagcatcatggataattagtctttgccttaaaatattaatagatacaatatgagagaggatatcatagtaacaagaattcagaaaaaaaaatgttaacaggtccatcaaccatgcacttttttctatgcaaccacatacacactcacacacacagacacacacaatatagtagacacacacaatacatgagatataatgcatgtgcatacactgatttttgtaatatattatatgaaaaatgtagaccatatatcagaatgttaatgaaggtattttacgtagaaattggtttcatttggcctgattawgtattctaacttttcaaatgttacaataattaaatggaaagctattagaatgaggaagctctaacactctgtgttccttcgctgtctgctgaaataaactcctaaaaactttaatttgccaaagtttatctttaacactacaattatcatcttaaaaccacaaggattattttaaaaaatcaatttgaccacatgttccactgagaagggagttcagtcctggcttagaaaggctgcttcatattttcataggtaattatagacaactgcaacacaaa

SEQ ID NO: 756509 - DNA, 577 bp, Homo sapiens
aaatggaaacatgtcctatgctcatgaatgggtagaatcaatattgtgaaaatgaccatactgccaaaacaatctacaaattcaatgcaatttccattaaattaccaccatcattcttcacagaattagaaaaaacaattctaaaattcatatggaaccaaaaaagagcctgcatagccaaagcaagactaagcaaaaagaacaaatctggaggcttcacattacctgacttcaaactatcctataaggccatagtcaccaaaacagcatggtactagtayaaaaataggcacataggccaatggaacagaatagagaacccagaaataaacccaaatacagccaactgatctttgacaaaacaaacaaaaacataaagtggggaaaggacacccttttcaacaaatggtactaggataattggctagccacatgtaggagaatgaaactggatcctcatctcttaccttataaaaaaatcaactcaagatgcacacctaagacctgaaactataaaaattatagaagataacatcggaaaaacccttctagacattggcttgggcaaagatttcat

SEQ ID NO: 756510 - DNA, 660 bp, Homo sapiens
tggaactttgaactttagagacataatttagggtatctggcagaagaaatttctaagcagcaaagcattcaagatgtgacttgggtgctgttaaaggcattcagttatataagagaagcagagcataaaagttcagaaaatgtgtagcctgacaatgcgatagaaaagaaaatcccattttctgaggagaaatgcaagccagctgcagaaatttgcgtaagtaatgaggagccaaatgttaagcaccaagacaatggggataatgtctccagggtatgtcagaggtcttcatgggagccccttcyatcacaggcctggaggcctaggaggacaaagtggtttcgtgggccaggcccagggtccctgtgctgtatgcagcctaggaacttggtgccctgcctcccagctgctccagccatgaataaaggggcaaatgtcgagcttgggccatggcttcagaggttgcaagcctcaagccttgtcagcttccacatgatgttgagcctgccagtgcacagaggtcaagaatttgggtttgggtacctccacctagatttcagaggatatatggaaatgcctggctgtccaggcagaaatttattgcagggtggggatcccatggagaacctctgctaggacagtgcagaagggaaatgtggg

SEQ ID NO: 756511 - DNA, 647 bp, Homo sapiens
tagtttatgcaagccatattaactgggaccaaatcgcaggtcttttggcctcaaacatgttctctttccagtacagcacacttgtaaactggaatagtctcatcatcccttaatattgtcattgatctactattgcaacagccagcattatagagtcaatattataaattgctgtactagaaagatggtttgttaaactgaagaccacaaaccttaaaatyagatgtatttaaaccttgcaaatttctacacgtccccatcctacaatcttctatcaatagcaaaattggcttgttgattaccatttagaaactacctggtaatgcccagaccctgaaagtctctcttggtgggtcacttcaccttgatgaagtggagtattgggcaagtagggtcatatagcaggggatcctgcagggtgaggatccaaagttagttcccaccacggaatccagaagagcaaaggcagttgctccttagtcattgtctcatcacattggcctgtgtgatgtttcaataaaacgagaattctaatttctagaagtttttcctgttttattttctgcaataggggcagcagtcgtagtagagacttaggaaattatttaagttgcagcagggtggcagctgaacgttcctcaaactta

SEQ ID NO: 756512 - DNA, 620 bp, Homo sapiens
gcttttgtgagaaattgcaaatctttccctggtgagatccataccatgactgctgatacatggtcgagagcacttttgtacttaattggtgcagaaatacaagtaaaggcagagctgtgttcacttcctccttcatttcctctctattccttttctgtgatgtcacatactgatacagcatctacacatagccatgtgtctaacaaacatatctgctcaaggcttagtcaatctttgaccttcctccttcctcatgcataccttaagcattratttaaggtcaagcacatttacaggttccccagcatgcccttttccatcttttgctcctctatcctttctcattgtccttggtcagacttgcttgaactatgtttctcagaaaggcagatacgcttacccatggctctagcaaaaattcctttttcatttttccatgggtgctgcagttattttaaactttggtaaaaataagtgtatctagcaccctgttgcccaaaacatctcagatgggctaatggagttttattatggaggaaaaaaccaaagtcacatataaagtacacgtacaaataaaagcataatcacattcatttcttttgtttatttttcctctattt

SEQ ID NO: 756513 - DNA, 620 bp, Homo sapiens
gcttttgtgagaaattgcaaatctttccctggtgagatccataccatgactgctgatacatggtcgagagcacttttgtacttaattggtgcagaaatacaagtaaaggcagagctgtgttcacttcctccttcatttcctctctattccttttctgtgatgtcacatactgatacagcatctacacatagccatgtgtctaacaaacatatctgctcaaggcttagtcaatctttgaccttcctccttcctcatgcataccttaagcattaatttaaggtcaagcacatttacaggttccccagcatkcccttttccatcttttgctcctctatcctttctcattgtccttggtcagacttgcttgaactatgtttctcagaaaggcagatacgcttacccatggctctagcaaaaattcctttttcatttttccatgggtgctgcagttattttaaactttggtaaaaataagtgtatctagcaccctgttgcccaaaacatctcagatgggctaatggagttttattatggaggaaaaaaccaaagtcacatataaagtacacgtacaaataaaagcataatcacattcatttcttttgtttatttttcctctattt

SEQ ID NO: 756514 - DNA, 620 bp, Homo sapiens
gcttttgtgagaaattgcaaatctttccctggtgagatccataccatgactgctgatacatggtcgagagcacttttgtacttaattggtgcagaaatacaagtaaaggcagagctgtgttcacttcctccttcatttcctctctattccttttctgtgatgtcacatactgatacagcatctacacatagccatgtgtctaacaaacatatctgctcaaggcttagtcaatctttgaccttcctccttcctcatgcataccttaagcattaatttaaggtcaagcacatttacaggttccccagcatgcccttttccatcttttgctcctctatcctttctcattgtccttggtcagacttgcttgaactatgtttctcagaaaggcagatacgcttacccatggctctagcaaaaattcctttttcatttttccatgggtgctgcagttrttttaaactttggtaaaaataagtgtatctagcaccctgttgcccaaaacatctcagatgggctaatggagttttattatggaggaaaaaaccaaagtcacatataaagtacacgtacaaataaaagcataatcacattcatttcttttgtttatttttcctctattt

SEQ ID NO: 756515 - DNA, 518 bp, Homo sapiens; identical to SEQ ID NO: 755788

SEQ ID NO: 756516 - DNA, 554 bp, Homo sapiens
cagtcctctccccaccaagccggctgttcttggagtccctcggcttccagcttccacgccaggaagcctgcctaaattgtcctgaccacgtagccaagctgacttcctggacttccagagtacagatggactcagcctgatgctgttacttaactgtgtctggaatgtccgtctcatccctgtagtcacactggtaatctctttagagggattggtaagaaggcatcaagattcaggctgtgaacagaatcagggctctgtcagtggccaggatcagggctcagtatataaggggatcagtgcccagtctataaccagggtaacagttcagcctatgaccagggctcagtctgtgaccagaaccaggactcagagtgtgaccaagggcaaggctgtttccacrgtcccttccaagagtgggacatttctgcaaaactggaagaaaattcgggaccagcaggaccttccaatggccgtgttttctctatgtccactgagggagcaggagcctggctcggcccttctggcagggcctcctgactctcgtcctcctc

SEQ ID NO: 756517 - DNA, 549 bp, Homo sapiens; identical to SEQ ID NO: 755790

SEQ ID NO: 756518 - DNA, 549 bp, Homo sapiens; identical to SEQ ID NO: 755791

SEQ ID NO: 756519 - DNA, 549 bp, Homo sapiens; identical to SEQ ID NO: 755792

SEQ ID NO: 756520 - DNA, 563 bp, Homo sapiens
ggcctggcaggctgcacttgactgacactaccagcctggatcccatgcctgccaagggcaagccaggtgtggagtgaccaggggtgcataagcgggcacctgcagggtctggccactgcacacagccaggcacgccagctgctgtgcagggcagggagctctaggcacagggacaggggccagctctgtgcaagcctgcagctggatcatatgcaccagcaggttccgctgcrgggactcttgtctggacaaggggaatatggtggcacctggcagctcagagatgccagaaactgtgaagccccaaagagggtgtcacagccctggctcagggagcccctaggtgtgggctccccaaaggaccacagctcttctctccttcttgtcacctgcaacgtggcaagctttgggtgtgggcatttcagccctgtttatgttactagctctttcagtcctgccatttggtggttcccgagttcttgtcctgcatccaggaagaatgaggtacacggacaactggagggtgagcaaggtggagagctttattaagcaacagaacagct

SEQ ID NO: 756521 - DNA, 613 bp, Homo sapiens
agacctcagaatagacagaagagagaacaatcctaggaaatttaccttgggagtggtaacagcagtatggaactagaaacgggactttttgcgttcctgggtcagtctgtctgataaacagcattcaaatagagtccctgcttattcttagcacggcatctcattgtgtgctcgcatgttaagcttgctctaaacaagtcagggttgcaagtctgtgggggaatatccagatccagttggagatgagttctagccttgcagaaggacagtatacttattcctcttttcttttttttttttagacagagttttgctcttgtcgcccaggctggagtgcaacctcctcggctcactgcaacctccacttcctgggttcaagcaattctcctgcctcagtaggaggcagtagctgggattataggtgcccgccaccaagctcagctaattttattkgtatttttagtagagatggggtttcatcatgttggccaggctagtctcaaaactcctgacctcaggtgatccgcccatctcggcctcccaaagtgctgggattacaggtgtgagccacctcgcctggcctcctgttttcttagtgaactgaaacttcgtt

SEQ ID NO: 756522 - DNA, 648 bp, Homo sapiens
atgtcctccaggtccatccatgttgttgcaaatgatagcattttctgcctttttagggcttcattgtgtggtacacactttttctttatatatccatttctttcttttttttttgtgtgtgtgtgtgtgtgtgtgtgtgtgtgtgygtgcgtgtgtgtgtgtgagatgaagtttcacttgtgttgcccaggctggagttcaatggtgtgatctcggctcactgcaacttctgcctctcgggttcaagtgattctcctgcctcagactcccgagtagctgggattacaggcatgcaccaccacgcccagtttattttatatttttggtagagacaaggtttctgcatgttggtcaggctggtctcaaactcccgacctcaggtgatccacacacctcagcctcctaaagtgctgggattacaggcatgagctgcaatcccatgggggattacatcacatgtgggcaggttccatgatgccccctgagctgtaaaattagcaaatttttgttagtgattttcaaaagggaagggagtgtatgaagagggtgtgggtcacagagatcacgtgcttcacaaggtaacagaatatcacaaggcaaatggaggcagggtaggatcacaggaccacaggacgggggcgaaattaa

SEQ ID NO: 756523 - DNA, 540 bp, Homo sapiens
gcattggtgcaatttttcactccattccaagtcctcagtttccctccaggttagagctcaccaattaatcctggaatttgactgaaggttttaaagaatcaactttagccgataaatggtcaattaaacttctgatcctgggagcataataaatgtatttaccttatttggaagcccttagaaaattttacattctagcaaaaacttggctttgagtaatcaggataattgtctccactyttcacttccctgggcctttataaacagagattgaatatgcaaactgtggttgtattttaaaatcattaatatttcatttaactgtgagcacctgagtacaagaactactgaaaaatgctctatggttcttaatataaatgtttattaatattcagtgtttatgcagaattatactaaattttgattgcagtcttcactctctgtaacaccttcatagctagagaaacttaattgaaaatcaaagataaaaagaaaagtggagccacacatttaaaagacagaatataaagttgaaattag

SEQ ID NO: 756524 - DNA, 540 bp, Homo sapiens
gcattggtgcaatttttcactccattccaagtcctcagtttccctccaggttagagctcaccaattaatcctggaatttgactgaaggttttaaagaatcaactttagccgataaatggtcaattaaacttctgatcctgggagcataataaatgtatttaccttatttggaagcccttagaaaattttacattctagcaaaaacttggctttgagtaatcaggataattgtctccacttttcacttccctgggcctttataaacagagattgaatatgcaaactgtggttgtattttaaaatcattaatatttcatttaactgtgagcacctgagtacaagaactactgaaaaatgctctatggttcttaatataaatgtttattratattcagtgtttatgcagaattatactaaattttgattgcagtcttcactctctgtaacaccttcatagctagagaaacttaattgaaaatcaaagataaaaagaaaagtggagccacacatttaaaagacagaatataaagttgaaattag

SEQ ID NO: 756525 - DNA, 520 bp, Homo sapiens
ttgtcagtatatatccttgatatggatccactaacaatcccaagatgaagagaatgtttatcattataatacacttcagcagtggcatggtacagcagcagaatcttcccagagttcattatcaaggcctgactctagtctgttcacagcacttactaaccctttgccttagagaaagtcactatttttccaaagcttcagttttcatgccccaaaaagtaaattatttctgactcttgttggtcacgggcattttacatggcccaataactaaacttaaytctacgtattattatagtattagaaatatgttcaagttaagaaacaatatccttaaatctccaaacaatctaactcttattatgcgtaagtttcataatactatattttattctatgccattacagggcaaacacttattgacaaagaatcacacttctgtgcttagggtcttgcacctgaaagcacgataaatagaaccatggtgctatgcaggtgcaaagaaccaaaagccattgga

SEQ ID NO: 756526 - DNA, 621 bp, Homo sapiens
ttctaggaaattccctctctgaaagacacatgggaaccctgttttggtatccagaacagtgctgaaatggtcagaaataggactaaagttggtggactttgcgtatgtacagacagaaacatcctgctttccaaagagctgaacgctgagggtcatttatctgtgggattcagggtacactaaaggtttctagttgaattggttctcataacttttgttgcatgtcttacctttatgaaaaaggccttttccaacaagcttatttcattgaagtgttattgtcagtcagctgagcacgatggaatgaattttgtttgttgtaagggcaaagaagcaggctaaagaggrtgtggtgaaagattctacttcctgtctattcaaaggatgtgaatagacagtttacataacagaaaattcagtaggctcacatatggtaaatcatacagctttgtttgcaaataacaaaatacacattaaaaaagttatagcgtctttgaaaacctattaaactcacaaaaataaacagaaccccaaaattcaattatttcttgtgagcaatgtgtccaggttgtatgctatggtgaaaagaatgctgcatttggaatgcgaagacttaaatgt

SEQ ID NO: 756527 - DNA, 581 bp, Homo sapiens
gcccccctctttggttttctctgcctggaaacttgagttgagaggcgggtgtctcgcctctgcccttgactcaccgacatcacacttcctttcatctgagtgctctctgaagtgaggtcacgttggtgagctcatctatattcaggagccagaagagcaaaggagagcttttgcatgtgaagatctgcctggatggaagctctgatgtgatggaagctcttactaccaattggccaatggttcagattttcttaraactaaactttttttttggtccagatatgctaatcaaatgaaaaatgaattaggctgggatttcctcttcgtagtctaaccttaatgaaaggaataatgagagaatctatattaaataggacccttttcatacaagtaacagaaatgcaacctcaaatgtctccttttagtgcaggcaaaagggaagagcaaaggagagaactgggtctgcaggatcactggaaacagagacttacatgccttccagtctctctctcttttaactttcacttcttttcgacatgttttcctacagacctcctccacaaggttacctccttctcaga

SEQ ID NO: 756528 - DNA, 585 bp, Homo sapiens
tatttcttgggtaatgattatacctgtgttttctttgtgataaattattgagctacatatatattttttttgtgcatgtctttgtgtgtgttacatttctcagtaaagaagcattaataattccaattaaaacaatttaaataattaagttttctgcccaaaaaaatcttaatgcataagtagtaccatcaactctaactgggaagtgggaaaatctcaacaaccagatttgtctgtcatgctatgcaaagatcctttctattctttaaaaccatgaaaatagtgattcatttaaaacaatgcttgggctgggcacagtggctcatgtctataatcccaaagctttgggaggtcagagcagggggattcattgagaccagaagctcaagtttagcctggacaacatagtgagaccctgcctctaaaaaaawgaaacttttttttttaattagcaagatgtggtggcacacacctgtaatcccagcttctcaggcagctgaggcaagagaatcacttgaaccaagaagttctgggagtgagttatgatagtgccactgcacttcagcctgggagaccatctctaac

SEQ ID NO: 756529 - DNA, 483 bp, Homo sapiens
agcttctgagatctaagacataaagtcaccctttggggaaacacacatgcaacatacaactgattttccaaatgttggatatattgacaaaacagagcagaaaggaaattctacacgagagtggtgggagggggtaaactcctaggatcgcattcaatgattgatgataaaatggaaagaacaccgctttaaagatcagatgactatatgtatgaatctctactgtgtaatctcggacacatttccagacttcctaaggctgaatttcctcacctgtaaaatgggttgayagagtttcctgcatataaccaccaaacagccacttctagttatggttcccgggcgtaacccccggacctgcccatcatgaggtggagactttgaagcactcccagcattcgagaaaccgccactgtgcaatgtgcaagagcttgggcctctgtgattcacgtcatggtgtcctgtattactcagctcatcctc

SEQ ID NO: 756530 - DNA, 546 bp, Homo sapiens
cagctggctaattttttgtatttttagtagagacggagttttactgagttggccaggctggtcttgaactcctgacctcacgtgatccacccatctcagcctcccaaagtgctagcattacaggcataaggtgaaaaatatttttctctttttcattcactgttatatccctattttagtctttagtttatcaagttttactgtttatttgtacttagcagtcctttttaactaactcccttactgtacacaccctgaatattgtaagtggcagagataatatagcttgttaaaggagaaagaagaaaacagaccaagtcatagtgttggttaatccatcccacacagagagtccgcgaggcgttgcaragagttcaggctgaaggggttgatcacagtgctcagggagtcaccttcagtggaatatcgtgatgggagcctccacactcttgaactcagccaacaggctgacacggcacgggattctcacttagcaggtatgcgctggatgcagccctaactcatctcagtgtcaaatgtctataa

SEQ ID NO: 756531 - DNA, 566 bp, Homo sapiens
tgtgctccctcccgcaaggggctgagcgtgatgggtcgagttgatgggatgtccctgctgtgagcccaacaaaggggccgagaaaaatcctgtttcaaaactatgggcccagagggtagttgcacactattcttaaagtgttgaaatgaaagaactgtcaacacaaactctacatccagaaaaaatatccttcagaaataaagttgaaataaggacatgctcagatgaagaaaaactaagaaaaatcgtttacaacagatctgccctcaccaaattgctaaagcaagctcctcaagaggaaggaaaatgataccagatagaaattttaaacatcagcaataaagagcaaatgaaagagtaaatagaccattcttcgcttgakaaaaaagatggaaagcaaaaattaaacaccgtttactggggttttcaatatacatagatgtactggatgaaaaattataacctaaagggaagtaaagagatgcttataggagtgttgatattccactggaaatggtaaaatgttgaatttcagtagacagttaaaaagctaaatatgtaattat

SEQ ID NO: 756532 - DNA, 564 bp, Homo sapiens
aatggatggacactggggaatgaatatcaaggacacagttaggtatgaatttaagctagatgttcacttaggtaactgtagcctggagtggaatgacaggttagaagaagtctcctaggctgggtgcagtggttcatacctgcaattccagcactttgggaagccgaggtgggaggatcacttcaggacaggagttcaagaccagcctgggtaacataataagatcctgtctctacataaaatttaaaaagttagttgggcatggtggcatgtgcctatagtaccagctactcaggaggctgaggcaggaggatctcttgagccaaagaggtcaaggctgtagtgaactatgattgtgccattgtactccagcctgggtgacagagcaatactctgtctcaaaaaaaaaaaaaaaaaaaaaaaaargacttcaaatagcttacctatgaaaaagctgcttggtaataccttaaatttcccttctatgcttttacacaaaaccctaaccttgcagttgaggacttgagtcatctcacaattcttttgggtaaaaaaaatgtaaac

SEQ ID NO: 756533 - DNA, 637 bp, Homo sapiens
gctctttctaaagtgttcaagagtaggtcacatagagaggagtgccttcttcctgcattttttcaagtacctgttttcccctattttattcttttggaagggattgattttatggtagtccctttcttttctcacctcttgacagaatgtttttctaaatgattccttcagattattctttaggtcccattaaaagaaacatgctggttcttcattctcattctgtctttatrcttaatgcagatataattcatatttgttttatcaaagtcatttgataacctcttcaatgacaaatccctgattacagatgtattctcttttggtaacccacaggggttgaaattgctctaatttttggtactgtgtattaggttgagattaaaaaaaactttgaggacaatcttttccttatttaatatctggagaaaaaatactacatgtgagaaaggtggaaaaaggatgttgcactgtatgtaataaaagctatgaattttggcacttttgtaaactgtaaagatgtaaatgttccttaattattttcagtagtcagacttatgtttcttccagttgtatttccaggctgagacaatacaaaagatggacagctctaagttgattatcaagctttaaatat

SEQ ID NO: 756534 - DNA, 669 bp, Homo sapiens
aaatgattccttcagattattctttaggtcccattaaaagaaacatgctggttcttcattctcattctgtctttatgcttaatgcagatataattcatatttgttttatcaaagtcatttgataacctcttcaatgacaaatccctgattacagatgtattctcttttggtaacccacaggggttgaaattgctctaatttttggtactgtgtattaggttgagattaaaaaaaactttgaggacaatcttttccttatttaatatctggagaaaaaatactacatgtgagaaaggtggaaaaaggatgttgcactgtatgtaataaaagctatgaattttggcacttttgtaaactgtaaagatgtaaatgttccttaattattttcagtagtcagacttatgtttcttccagttgtatttccaggctgagacaatacaaaagatggacagctctaagttgattatcaagctttaaatatgtttcacttgattaagaacattgaaggtgagaatggaattatgtaggcttcaytgagtatccgtaaagttgggaacaatgatatacaacacagaaaagaagctccataagaaaacagctgcaactaacccatctggaaagagacctcaatcaaaatgatacttagcgaaagaaaaatactttcagtga

SEQ ID NO: 756535 - DNA, 634 bp, Homo sapiens
tcatctcattttatatagatatagctcccaagcttcagggagaaaatagatctaaaaaaatggctcctttcccaaagtgtttgaatataagagaaatggcaggcaactctaggcttatacccagcagtcctgggaagaaacaggacttaaatgaattagatattgattgcttgtgtatttttgaaattttgtttaatcygaactggttccctagacaagggattggatttggacattaaatgacagcaaaagtaatttttgaaaatatagaaaactccaagtttgaaggtcccatataggtcattttattccatacttcaattctctccctatctcctttagggatttttcaggccatcactgagcatctcttcataaaggacattaattagtttattagttactaactgtaatttgcaaagtttgaaaacaaggactcttcacttaacattgctaactccataactcctgttattaaatagaagtttaataaataatgtgtgattgtttgtcaaccagggtgtcacttgttgagagagctcagcagtaggagttatctccgtaactctaggtcagtcacaccattttactagctgaattgtctgaggaaattgagatcaggttgttttctgta

SEQ ID NO: 756536 - DNA, 646 bp, Homo sapiens
tccaaacctcatttatccaatagttttacccagagcagctaacacaggcaaaagtatatgggttttgaatgtcagattattatacatcttttatccctgaaattgctggaaagtcatgagccagatggcacacaaccaatgtcatagaaaatgtatggggacctatgtcatagagatttgggttcaaatcccagttctgctgcttacaaggacccccatcttctcatcatgttatatgaaaaataattgcgaggattaaatcaagtaatcaagtacagcgcttggctcacagaatactttttttttttgagacggagtctcgctttatcgcccagactggagtgcagtggcgcgatctcggctcactgcaagctccgcctcctgggttcacaccattcccctgcctcagcttctcgagtagctgggactacaggggggcacccgccacaatgcctggctawtttttttgtatttttttagtagagatggggtttcaccatgttagccgggatggtctcgatctcctgaccttgtgatctgcccacctcggcctcccaaagtgctgtgatttaccgcacccaacctagaagactcttaatgaaagttagcttctccctccttttcttcccacttacaaagtcaccct

SEQ ID NO: 756537 - DNA, 631 bp, Homo sapiens
aatctaggaaagattcctcttttcagttttattcccatctccacccttaaatttcccaaacaatatgatttactgtctccaaaagacttcacagaacatgaggtaaaaggctacttaaaaagaaatggaaatttttaaaagatagcttcaaacaacccgattacactaacaggcatttgtaactcttaattctttgtctgtattttccactggacacacttatcttttaaattcatccttcttgtcttcagttcagactgtccctgttctatcttgggtcttgcctagagtattacatgtcccctagtgattcagtgtgtctctttattttccccattccaaacctttcttcatacactaaacatgtattaagcaccacctaaggggtsacagcagggtggcagtggatagaaggaaaaagtgggaaaatctggaacggtgggaagataaaatagccaagacatgctaatggatggtataagctttgtgttttaggataaatgaggaatcatagatgacttctagttttcttgagcaactggattgatgatggacaagactggaggaaaaacaaatttgcagatggaaaacaagagttcccatttgtaagaactacgtttgggatactgag

SEQ ID NO: 756538 - DNA, 666 bp, Homo sapiens
tctacttagcaatgtctacaatagcttttttaacactatcagaatatagagcataaattataatgtttatcctgcttttaaaggaaaatttttctcttatgcaatcatggtgggagaaaagaattcttaacgtgattatttgtctcatattttattttaggattctgttagtgtttttaggattctatcaatgcaaggtgtaagaacatgtcctggcagttgaaggaaaggctaaggaaaaagatgaaagagaagtgtcgcatcccttaccctccttttaaagaaatgctgaagttgctgagcagaaggtgccacagtcatgtcccttaatttatccctcaaccttttccagaagtaaagtgactacacctaagctcagacagtgacagtcgtgggagaaaagctttatagraacagtgataggaataaaagtgtgtgcactgggatagatgtattttttaattacagaagtaactactaatctatataagagaggctccttccactctcagagcttccaacttaaccatctgtgaagagtaggtccttcaaaaccaactgtagcggcaaagttctgagatgatatttccagactcagcagataggaacaggcatgctaggtgagatatggcagggaatattagtcagggttctccagagggacag

SEQ ID NO: 756539 - DNA, 666 bp, Homo sapiens
tctacttagcaatgtctacaatagcttttttaacactatcagaatatagagcataaattataatgtttatcctgcttttaaaggaaaatttttctcttatgcaatcatggtgggagaaaagaattcttaacgtgattatttgtctcatattttattttaggattctgttagtgtttttaggattctatcaatgcaaggtgtaagaacatgtcctggcagttgaaggaaaggctaaggaaaaagatgaaagagaagtgtcgcatcccttaccctccttttaaagaaatgctgaagttgctgagcagaaggtgccacagtcatgtcccttaatttatccctcaaccttttccagaagtaaagtgactacacctaagctcagacagtgacagtcgtgggagaaaagctttatagaaacagtgataggaataaaagtgtgtgcaytgggatagatgtattttttaattacagaagtaactactaatctatataagagaggctccttccactctcagagcttccaacttaaccatctgtgaagagtaggtccttcaaaaccaactgtagcggcaaagttctgagatgatatttccagactcagcagataggaacaggcatgctaggtgagatatggcagggaatattagtcagggttctccagagggacag

SEQ ID NO: 756540 - DNA, 690 bp, Homo sapiens
ctgtcgttaagcaccacatgtctatatttggaatccagaatcgtctagttccagagactatttggactacaacagtaattttaaaatgttttcctcttttagcaggtgaattctttggataaaatcctccctgtaagcctggtataatcaacagataaaggaggggcatgtctgagacaagtcagggtgggagatgccctgcgcctccaaccctacctcctttgctcgctcctcatctcctctctacagctctgcagcagcctcggtgcatctctcctgagacttagrtctcaaaacaacaacaaattaagaagcttgaaaaaacactgcattgcatcaagctgccatattctcaccttcagcaaaatttccatatggctccccaagaggaggttctagaaagccactaggaatgtaaatgagtacaaccacaatgaagagcagtttgggatttccccaaaaaactaaatacagagctaccatatgatccagcaatcccactgctgggtatattcccaaaagaaaggaaatcagcatgtcaaagagatacctgcacatccatgtttgttgcagcactgttcacaatagccaatatttggaagcaacctaagtatccatcaacacatgaatggacaaagaaattgtggtacatataaacaatggagtactatttattcatgaaaacaatga

SEQ ID NO: 756541 - DNA, 570 bp, Homo sapiens
cagtcagaagaggcaaatcaaaccacctgggttctgggcccagtgatatgtcacaatgtcttccataggcaaagcccaggtaacagaggagactcacatcaaataattgatggacccagagatatttcacaatgcccgctgtgagcaagagccaggcaagagactcacatcacttttgtgctgggccactatcttttgtgtgagcagaacataggaaaaagagaagcattggccgggcgcggtggctcatgcctgtaatctcagcactttgcggggctgaggagggtggatcacctgagatcaggagtttgagaccagcctgaccaacaaggtgaagccccgtctctactaaaaatacaaaatacaccaagtgtgatggcaggtgcctgtagtcccagctgctcaggaggctgagacagaagaattkcttgaacccaggaggcagatattgcagtgagccgagatcgtgccactgcactccagcctgggtgatggagcaagactccatctcaaaaaaaaaaaaaaaaagagagagagaagcatcacatcagcagagtgctgagcccagat

SEQ ID NO: 756542 - DNA, 536 bp, Homo sapiens
gcacacctttgtggctgtaacttcactaaggcacagagtttgcaagagaaattgaggctcattggcaaatccagtccaccactgagattgtgatttcttgtacttaaacccaacatgtaggaggtgttgactctcattccttgattcaagacaatgtcatatttttttcttttgagatggagtcttgctctgttgcccagtytggagtgcggtggcacaatctcggctcactgcaaactccacctcctgggttcaagtgattctctgcctcagcctccccagtagctggaattataggtgcatgccaccacgccaggcaaatttttatggatttttagtagagatgaggtttcaccatcttgggcaggctggtcttgaactcctgatttcatgatccacccgcctcggcctctcaaatgctgggattacaggcatgaaacaccgtgcctagccctttctttttttttttttttttttttttgagacggagtcttgctctgccacccaacctggagtgcagtggcacgatcttggct

SEQ ID NO: 756543 - DNA, 536 bp, Homo sapiens
gcacacctttgtggctgtaacttcactaaggcacagagtttgcaagagaaattgaggctcattggcaaatccagtccaccactgagattgtgatttcttgtacttaaacccaacatgtaggaggtgttgactctcattccttgattcaagacaatgtcatatttttttcttttgagatggagtcttgctctgttgcccagtctggagtgcggtggcacaatctcggctcactgcaaactccacctcctgggttcaagtgattytctgcctcagcctccccagtagctggaattataggtgcatgccaccacgccaggcaaatttttatggatttttagtagagatgaggtttcaccatcttgggcaggctggtcttgaactcctgatttcatgatccacccgcctcggcctctcaaatgctgggattacaggcatgaaacaccgtgcctagccctttctttttttttttttttttttttttgagacggagtcttgctctgccacccaacctggagtgcagtggcacgatcttggct

SEQ ID NO: 756544 - DNA, 606 bp, Homo sapiens
aggtaagagattcccatcccttaggtgttgagcctagcactatgtcacaatacccaaatatgtgtggcctaagaaaaagaggagacttacatcacctagataggccagtgatgtttcacaatttctctgagcagagaccaggcaggagaagagagtaacatcatcatggtgayaggcattcagttatgtcacaaagatgcctcctggcagggcccaggaagataatgttacatcacctgggtgttggacccagcaatatgtaacaatgtctaatgtgacatattttgccaaaatatggcacaaaatacagggcacaggtggcagagtcacataacaggggtgcaggatccagcaatatctgacaatacccaaaatttgtggggtcccaaaaatagaggagagtcacatcacctaggggctggctccagtgatatatcacaatctcacctttgggctatgaccaggtagaaaagtcaagtcactcaggttctgattagaagtgtatgtcacaatcacatctgcagaaaggtccagtgatgaattaacagtcctgcacaggtcccagttccaggtatgagagtccccacattctctatgttgggtcta

SEQ ID NO: 756545 - DNA, 593 bp, Homo sapiens
cattttctttagcaacaggatgcaactggagaaactgtttgtttgtttgttttaaccaaggctttgactgaaagggtgtgcttccctttaaagagtcaagcttgacttgcagagatgataaaagccccttgaaaaaactgccctcatatccttgtctacacagtctctgtacagcgttcctgacctgtggtcagtgaaaaatatcactttttaacargcctaggagctccaagtttgtcttgggaccttaaaaggaaaggattacccagctcacaggtatttgaggatacaaacacatggctgtgctcagctttagaaggtcttattccttgtggaagatttccatcgaagccaatctaaaaggcctatgtagagatagtcatttttgctcaccttatgcaaataatcagggcaagtataggactaaaggctatgttgcaaacaactcagtcctgttatgattttttcttttcttttttttttttttttttagatggagtctcgctctgtcacccaggctggagtgcagtggcacaatctcggctcactgcatcctccacctcccaggttcaagcaattctctgcctcagcct

SEQ ID NO: 756546 - DNA, 609 bp, Homo sapiens
ggataagctggacatgaggtgcatggatatctatggctcacctgaacatgcagtgcatggatatctatggctcacctggacatacggtgcatgggtatctatggctcacatggacatgaggtgcatgggtatctatgggtaacctggacatgygatgcatgtatatctatgtctcacctagacatgcagtgcacggatatctatggctaacatggacatgcgatgcatggatactatgggtaaccgggacatgcggtgcatggatatctatggctcaccttgatacacagaacgtaagccagtgaccctggcagcagcatcacaaagttcaacctatgaaactaaccagcatccaccgtaaactactaagccaattaatttagaatatactattttgagtagattagaaaggatctttctggatcattacaataatgttttcccatgggaaaaataaatgttaagtattataatacagagtccaagaaaaaaaaaagagtaatgttttatttaaaggaataacttagtcatatgttgagtaaagaaatgtttggtattttagttgtttatttgttgcagaccatttggagtgtagattaactgaaaatt

SEQ ID NO: 756547 - DNA, 611 bp, Homo sapiens
gatggttgcttactaaatatgtatatatgtatatatacagacacacacacatatataggggtagaggtagagagagagagagagggattgtcataatgctcttctacaggactcacaaaggcctatacaatccattatacacctaaagcttaataataataattcatattaactattttaaccaycatatgtaatactacttctacaggagaaaaacatcagtgcaatatgtcagaatattacaaaaatactttcaaaatttgcatattttatgattggaatactttgtatgttacagaatatttgtacccatatcatcttattctcatagccttctgatctcatttccattggtcccactttacagaggatgaaattaacagtcagattgtttaaaggtcacaataaacattacagagcaattaatggtataggagtgtaacttgcttctactgatgctatgtctattgctttacctagtttacttctgtatcatctacattgatagtgtcagagtaaactgttgatgccaggcaaaatccagaatgcagtagccaggaatagtttcaggctatgccagtaaagccttaaaaaatatgaggtataactag

SEQ ID NO: 756548 - DNA, 611 bp, Homo sapiens
gatggttgcttactaaatatgtatatatgtatatatacagacacacacacatatataggggtagaggtagagagagagagagagggattgtcataatgctcttctacaggactcacaaaggcctatacaatccattatacacctaaagcttaataataataattcatattaactattttaaccatcatatgtaatactrcttctacaggagaaaaacatcagtgcaatatgtcagaatattacaaaaatactttcaaaatttgcatattttatgattggaatactttgtatgttacagaatatttgtacccatatcatcttattctcatagccttctgatctcatttccattggtcccactttacagaggatgaaattaacagtcagattgtttaaaggtcacaataaacattacagagcaattaatggtataggagtgtaacttgcttctactgatgctatgtctattgctttacctagtttacttctgtatcatctacattgatagtgtcagagtaaactgttgatgccaggcaaaatccagaatgcagtagccaggaatagtttcaggctatgccagtaaagccttaaaaaatatgaggtataactag

SEQ ID NO: 756549 - DNA, 526 bp, Homo sapiens
cttaagcattttatcaaaattatgccaaatgtcttggcatgtctaatgtaaacattcgtgatgaaaccataagaacttcatatcatctattcaatgagtattgcttacaatggttttattattttcaaaatgtctacatttctctgcttacatatgggtttcttagctgaacaatttatgtgtttatatttttacataaattgaacagttttaaaacataaaaamttgaactggaaattaaatatcattaatacaatgaggtgcattttaatcacaaatttaatgtgtaagattttaactattatatggtactttaaaatattttgtagcaatttatgtatttgcaaactacacacttaatagcgctaaaattaaaataaacagtctatattgttaatgtctgtagaagttgaagaacatttcatttttaaatataaaataatttatgatttaattatagcgtttttttccttcaaatttatctgaaacaactatttctttatatacttcctcaagtttcgccctt

SEQ ID NO: 756550 - DNA, 526 bp, Homo sapiens
cttaagcattttatcaaaattatgccaaatgtcttggcatgtctaatgtaaacattcgtgatgaaaccataagaacttcatatcatctattcaatgagtattgcttacaatggttttattattttcaaaatgtctacatttctctgcttacatatgggtttcttagctgaacaatttatgtgtttatatttttacataaattgaacagttttaaaacataaaaaattgaactggaaattaaatatcattaatacaatgaggtgcattttaatcwcaaatttaatgtgtaagattttaactattatatggtactttaaaatattttgtagcaatttatgtatttgcaaactacacacttaatagcgctaaaattaaaataaacagtctatattgttaatgtctgtagaagttgaagaacatttcatttttaaatataaaataatttatgatttaattatagcgtttttttccttcaaatttatctgaaacaactatttctttatatacttcctcaagtttcgccctt

SEQ ID NO: 756551 - DNA, 577 bp, Homo sapiens
cagagttcactgttaaatatgactgtgtcaaggcagcataccaatgggaagaagcctggtggggcatgtcttcattacctagcactttttgcctgttctatccaccctgagcattagaatcaagacctgagctgtgtaataacattattgaaatgttccagttttaggaattgtagcatatacaaccagactttcttgtacagaaaaaaaatctggtttaaggatttgaagggttatgtttaagaatattaaagtctctccttaaatattttgtttgatttaaaaataataactagcatctaytgactgctttctgccagagactctaagtgtatatatagttgttacaacaaacttgagtatcggtttcaccaacagctcccaattcatggattagatgaagcaatagataacctgttatagtcgtaaagtgaggaagaagtaatttaaaatccgttgtatttgaccaaaatttctactctaaagtattcccctatgctaacttctgttcattatagaatattaaaaaaattaaagtggtaaaaacatgagatagagaacttataatcacactata

SEQ ID NO: 756552 - DNA, 638 bp, Homo sapiens
tctgttcattatagaatattaaaaaaattaaagtggtaaaaacatgagatagagaacttataatcacactatacaactgtactaaaatttttggtgtattttcttttaattttagttatttggtggtcatggtggtcctaagtatcttcaaagttrtaatactaaataaaaatcaatgcctcaccttcaaaaaactgatgatgcagagaagaaaatagataatctatcaatcgtgtagaaatgaaaactatggactcaagtctgactgctgaggactggatcttagtattaataccttatttgtcagctgcatggccttgaacaaacctgctaatctgtctaatctttgatttgcaaatcactaaaagttcatcattatcatcattattagcagcatcatataatacaaacttgaatcagataataaaggttaaagcaaagtttagtggaaacatgaagggaaagaaaggggattaatttcaactgaatagatcatagaaggttttgaattgccggttgagacttactttatataccccaaggtaatagcaatatttaaagagctatttctattctcaatgtggttatgtaagcattttaataaaaaatgcttatttagagaacttggttataaaagt

SEQ ID NO: 756553 - DNA, 632 bp, Homo sapiens
aggaattaataatcatgaaaagtcatcaataactctgtcatctcaaaggttgttttcacatcaatgctttcctggcctcttttaaaattttcgttataatctttcatttgtcctgtctccacatcttgatcttaattaccatttttctttccaaataaattagttaagaatttaaaaatgaggtaacaatatacatactgcactgaaatttaatatttaatttagtatgtcataaacatttctcctgaagatcttaaaggtttttctttaccatcatcatacataaatgcatgatatttctttgtatggatgtactataatcagtactataatagtttgccattcargacgtatcctttttctacccattataagtcactctacgaggaatgttttatatacaaaatctggccccagttggtctctctgtgtattgctctgtttggtttttttctgggtgctgctctgatgagtcctctgtgaatgatgcatttgccatgtggagcatttgcgctgctcaggagcgctgtcagtattggcagttctgcctttcccatacatatcaagagttgcatatccctggtttgaaaaggggccaaaatgtaaccagctcatatacccacagggcagcc

SEQ ID NO: 756554 - DNA, 573 bp, Homo sapiens
aaaactcatcagtgtttatgaaatatgagaagccctttgggggaaaaaacttccttgatgctgcagcacatataattagagtaatttttctccatattagagttttaaatagattttacattatttacaacacttttaatagccttgtaatgtgctgtaatttaaaaaaaaattaaaaaggtcaaaaaactctatctttacttttcctaggtcatttcccttaaaaggaataatagtccaatgttcaggtatttaggtttattttattgaaactgaaataaaatgaaaataaacaacagtaagaaaatcaaaatccaatatattgtagatgccatgtaataaaaggttaggggagaagaatagatggtttacctttctcccaaccattcctgcttaaggaattttartaaacataaattgtatgactttgaaggaaacattgaatgtaaagctgatattagtgagtgttcaagacaatttagctattactattacaactgttttccttcaattaccaccgggacaccactgtcaacatacaagttagataatttggatagggagagtttccaa

SEQ ID NO: 756555 - DNA, 551 bp, Homo sapiens
caaggcagaaaaaagtctgtcccaggtcaggcatggtggctcacagctgtaatcccagcactttgggaggccaagacagaaggatcacttgaggtcaggagttcgagaccagcctggccaacatggtgaaactaaaaaatacaaaaattagccggcgtggtggctcatgcctgtaattccagctacttaggaggctgagacatggagaatcgcttgaacctgggaggcggaggttgcrgtaagccaagattgaaccactgcattccaccctgagggacagagtaagactctgtctcaaaaaaacaaaaagaaaagtgtctcagctctcagagagagaccaattctccttctatatttgttcactctgtgccccctgccgattagagggtgtccaccagcacagaggaaaggatttccccacctagtccactcagactcacacactcatcttctccagaaacaccttcacacacatacccaaaataatgccctaccaggtttctaggtatcccttaatccattcaagttaacacctaaaattaaatccacaa

SEQ ID NO: 756556 - DNA, 551 bp, Homo sapiens
caaggcagaaaaaagtctgtcccaggtcaggcatggtggctcacagctgtaatcccagcactttgggaggccaagacagaaggatcacttgaggtcaggagttcgagaccagcctggccaacatggtgaaactaaaaaatacaaaaattagccggcgtggtggctcatgcctgtaattccagctacttaggaggctgagacatggagaatcgcttgaacctgggaggcggaggttgcggtaagccaagattgaaccactgcattccaccctgagggacagagtaagactctgtctcaaaaaaacaaaaagaaaagtgtctcagctctcagagagagaccaattctccttctatatttgttcactctgtgccccctgcckattagagggtgtccaccagcacagaggaaaggatttccccacctagtccactcagactcacacactcatcttctccagaaacaccttcacacacatacccaaaataatgccctaccaggtttctaggtatcccttaatccattcaagttaacacctaaaattaaatccacaa

SEQ ID NO: 756557 - DNA, 564 bp, Homo sapiens
gtgctctccatctcatgttgtgcttcattcttcccttcagcagtggcttcctctgctcctcagatctcatggcagataacatggcagctgcaaatttttattgaggagtagactcttctccttttctctccagaaggaagcagtattgaaggtgtaagagccaaggtaaaactcttcctttgccctctgaaggtttgctgaacaatcgactgacgaaaggcagattaataggagaaatggcatccaaatttattagtgtgcacaggagaaaaaccacagagtgattacccagtatcccartgggtaactggggaagggaaatggaaaagtgtggatgatttttggagggtagtaactgattttcaggggaattcaatgggcttagagaacatataatggcctgggacaaaatctattgggcctgaagagcctacgatggtttgtgacaaaattctgtccaggtttgttgacagacttcagcttttcttcctgtgtattagttcggttaataaaaattcaaagaagaaaacagtggtcattgtttcctttattgccaggtctaga

SEQ ID NO: 756558 - DNA, 585 bp, Homo sapiens
ttggatgaaaaataaatatgtctttccagtaagtgacattgtaaataaagtaagcaaataaatagcagattgaaagaagtatgtgcaatttgtaaaattgataaggatctaatatctaaaatacacatgaattctttaaaaacaaaaagacacagtttagttatgaacaaaagaaaccaaactcattggtagttagagaaattaaatttaaaacaaggattgtcactttaccaagaattgtcaaaaattagcaagcaggttaccgccatattttgacacggatgtagtaatataagcacccccatgctcggctggcagtagtgcaaacttgtgctgcctttytggagagaaattgcacaatcatacaagtacatagggaacatatacaagaatgctcgtcacagtattgccattttaaaaaattgaagacaatctcactgtcttccaccaggtgaacaggtaagtacaatgtgatagatgcccagtaaaaaatattccatgatatttagaaggatcatgctgtttctacacacagttacaggggtagagcttacatcaagaagctgagctttaaaaaaataaagg

SEQ ID NO: 756559 - DNA, 581 bp, Homo sapiens
atcacagtggagaaagaatgaaacaaagggtaaagctgccatggaatgaaggtgctagagccaaaaggtaacaacatgggctctggagccagacacacctgagttctgatcccagggttactcactagctatgcaaccaaggcagggtgtttaaactctgaggctccatgcctttacttgtcaaacaggcatgataaagtatctcyaccatagggtagttgggagaagtaaataaaataaatcacttaaagtcctttgcataatacctagtgtgtagcatgtataacaagttgttgtagtcactattactagtaccagtttcctcaacaaccatgacttaactatgtcattagaaggctatatttccttagtctggcttcagaaagctgattttggttacttgtaactgatataaaagtcagagtaagtactaaaatagatcattttaaattagtatagtctaggtaataacatcttaaacatctgatttattacttctatgtactttgaaaccacactttatatcaaagcacttcttggatcctatgttcatcttctttgaactgattatatccacttga

SEQ ID NO: 756560 - DNA, 524 bp, Homo sapiens
gaatcagtttgctttttaaaaaaaaaccttgttattactcttttaaaaaaatcttttctacctaataatacgcaaaatattattcctctttactgaaataataaatccataattttactttcagataatatgacaagattgagccacattgagcatgttgtaactaattactaatcatgatttgtctgatcaaaattgtcatactgtatcttgttaaccgtacatgtatatgaactaaagtttcgattaatatgattttcctcaccactggattcacagtatgctggttaactcctactccccattccaatcatggtcaaagaatccatcctcaagaaagccttatttacagcctcagttgatttccattttatcattggtttccayagagctgggctcactttctttatgtgacttcttttagtgcatatttgcactttcctggagtgatgcctgtcttccccattgaattgtaagctccttgagagcaaggaccaaatatctttaggctcaccatttccttc

SEQ ID NO: 756561 - DNA, 563 bp, Homo sapiens
gcttgggctctactccctctatccaaagcacctcacctaaaccttctaaacactgtgcatgaacaaggagatgaatcaactcaagaactcttgaccccagggactcaaagcctgggttatttgcctgattatagactactagctcaattaccacatgactcaatcttagcaaatgttcattaattcactcaaatataatcaatcacctacaattttcaatgtaacatgcattttttaaatagactttattttgtagagtagctttaggtcacagcaaaattgagcagaaggtacagagaattgccatctgcttcctgccccttcacaggcacagcctctcctattagcaacatcccccaccagagtggtacatttgttacaatcaatgagcctacattggcacatcrttatcaccctaactccctggtttacgttagggttcgctcttgctgttatacattctacgggtttggacaagtgtatggtgacatgtgcccatcatgatagtatcatacagatcagtttccaaaaccctctgtgctctgcctagtcgtccctccatc

SEQ ID NO: 756562 - DNA, 566 bp, Homo sapiens
ctgtcctgttctctgtctcttctaggttgggggccgtcccgctcctaaggcaggaagatggtggccgcaaagaagacggtgagtgaggcgggccaggcccggaagacgattcacgtggagagatgtcttggccagggcgggcagatgtgagcccacgggggtgacagcatgcctgctggcatttggagggccccagaaggaatcccagtggccctctcaatgacttggggtcctcgacttcggaagtttaaggggctcggcttcaaaaagctgggtccggttttgaggcggytgcaggcgaggcccttaggtccgtatttaatgtttgctttgtagaaaaagtcgctggagtcgatcaactctaggctccaactcgttatgaaaagtgggaagtacgtcctggggtacaagcagactctgaagatgatcagacaaggcaaagcgaaattggtcattctcgctaacaactgcccagctttgaggtaatcgaagagactgaacgggcttcgcctaccgcgaattcatcgtgaacgaatatacaggagtgtaaacttgtaatctgagta

SEQ ID NO: 756563 - DNA, 619 bp, Homo sapiens
gtatgtatttgaaatatatatatatttaaaacagcaagtggtggccagccaagaaaagcctcccataatatcgttttccaaaaactgaaaatatactttaacttgaagggtactagggcacacttccaaattaggcattttcttttagttaaaaatcataattggccgggcgcggtggctcacacctgtaatcccagcactttgggaggccaaggcgggcggatcatgaggtcaggagatcgagaccatcccctggctagcacagtgaaaccctgtctctactaaaaatacaaaaaattagctgggcatggtggtggatgcctgtattcccagctactcgggaggctgaggcaggagaatggcgtgaacccaggagtcggagttygcagagggccactgcactccagcctgggtgacagaccgagactctgtctcaaaaaaaaaaaaaaaaggaaaaaaaaatcataattgacagaggagatcaggtgataaattctaaaaacaaaccccacttctcaacaaagaggcccttacaatcaggcctttctccatcttaagatgtcttttgacctgattcttttacatatttcctactgattatgctagtagccacatctta

SEQ ID NO: 756564 - DNA, 628 bp, Homo sapiens
acacaaagaatctactcccaagggagttttaaaattctacccatcatttaatacaaaaaagcaggctctctagacaatccatctccccacagaaaaacagaaagaaagggaaagaaagagatacggagacatttgggaatatttttaagaactactcatccctagaaactttagtgaaaattttgagaaaytgaatatggtgcattctttactgttggtggcaacattgtacctcttgccaccttcaaacaaagttgtaatcaataagaaataattgaatattaaggccaggggtggtggctcacacctgtaatcccagcactttgggaagctgaggcaggcggatcacctgaggccaggagttcgataccagcctgaccaacatggcgaaaccctatctctactaaaaatacaagaaacattagctgggcgtggtggtgtgtgcctgtagtcctagctactcgggaggctgaggcatgagaactgcttgaacctgggagggggaggttgcagtgatccgagattgcgccattgcactccagcctgggtgacagagcaatactctgtctcaaaaaaaaaaaaaaaaagttgaatatttatttaagtactgatttgtttgaatagtggg

SEQ ID NO: 756565 - DNA, 523 bp, Homo sapiens
tttctaaagttagcacagaggggatttcacaaagtgtaattctcttggaaaaagggctgatgtcatttttaaattgtgtgaaattaaatcatgctaacttaaagctattagaaccttaaattattctgagccttgaraggaatgtggctatgaggcctaagttacgtgccatgcagctgcaacttctgcatttttttcctgtaagtaattaggaagaccaggcagcaccagagtaagggcccctcagaccattacccctcctcacaaagaaatcatcttccttggaatgtagcaatctgtaatcaatcaaattgctgtaatatatgctctggtcttatataaaaaatgttataatcctgctaaaacttctctgtctctgcctatataagggagacattaacttctccactttatttatttatttgttttagatacagggtcttgctctgtcacccaggctggagtgcagtggtgccatcataactcactataaccttgaacacatgggctcaagtgatcctcc

SEQ ID NO: 756566 - DNA, 567 bp, Homo sapiens
agatgcaggtttcatttctcagcctcaaggctcagctacagaataagctgtggcccgactgcctgcctaccattttacagacgggagactgaggctcagagcagtgacatggcctgcatgggtcactattgcccccactgtcgcgcacatccctgagactgagggaatgaagcgtttgtgggggtaccctgggctcagaggttcctgcgggatcaaaattgctgcatctgggagggaaagcaggcrtgatctgtgtctgatatggaggtgccagcggggcccctgcctgtggggccagagcctgggtaccagaaggcgatgctgaacgctgcagctacaattagagcaagaagctcccctttggaagggcagctctagccttctgaaaagggtcacaccagcagttcttgagtttctcatgtggggataaaaaccctcatatcatctcactactgttaagactgttccaatgacagagagcagtcggagagaaggaatgggaagttctctcgaatgaggagggttgagttctgcctcacgcatactgcaccacaggctggcgaggcc

SEQ ID NO: 756567 - DNA, 628 bp, Homo sapiens
aaaccaaagctggagaagcaactgatgggggttatgtagaaggggttcttgtgacagcaggaggttgtcccaactaacccccacaatccccacaatcacaggctctgacctcttaggtgccagactaattgcccttggtcatgtcctatgcaaggggcaggcagaaagcaattgaactgagaataaggagacccacagtctagtcctagctccatcagctattggccatttgaccttggatggatccccacrtccctgggcctctgtgcacccatctctgtaatcaacaccctgcctccccttcctctcagatcaaggctggtattgtttaccagggtacagtctgcataccactggtgggacataagatgctagcaatgctatatgagatttatctaatgttgtgaatttatgttaatatctactagtgtatgcctgacatttatagcaaatgataacagttttttatgatagtaatatcaactttcttattaaaataaatttataagttaatgtaagttgtaaaaagtgagttaaagaagtagtagtaattaataatgcaagcagtacttgaatcaggcaaacctcttgaagatgaaatgtgagttactgaagtttgagagccccc

SEQ ID NO: 756568 - DNA, 629 bp, Homo sapiens
gtagaaacctttagccttgaacaggaggcccttcattgtgtgtctcttaaccaccttccaggctttgttcttcctacccccaccatctactgccctttctccattgttcttttgagcctctatgaccttgcaaactctgctccccattcctggaatatcctttcaggtgaactttatcttattctctttttcttttcttccccagtgtcccaaatttgctttgtcctaagaatctccagggtctaggggcacgcagcacaccaaatccatcagaatctctagggcagaaatcttagaaactggattttgttatccaggtatactcaagcaagagtaagaaacactggcctcaaaaacactcgagagacaatgggaaagaaaatttcaattcctatgtccatgttgtcttaaacatcacatcttctaactttatgatcaatgcttgtgattctcttcagaatgttttccagaataatctaagkaaaatgtctgtgggaaacaaaacagctgccactgaacctcaacatttatctgtatgcattatgtcaaggcgtgggagggggatgtacgtgtgcacagaaattcacacaaacacacagggtcacatgtatctgaaaatgccaatgtct

SEQ ID NO: 756569 - DNA, 494 bp, Homo sapiens
atgaacaccagtgaatgactagctggaattctgcaatagcttttaattttaaaatgtgcctacaaaatccatcaaaatccattttccattaccatattagggtatgaagaggggaaaaagtatcgagtaaatactggatctgagtcaccatgcctggcattttatacataatagtcacttaatttctaggactctctgaggtcggcatgactaatgytatttcagattaggaaaactgaggttcacagatacaaacacaactcacccaaagtcgcatatgtggaaagtgatcatttctggtttgtctgatccaaaattccctgcatctgtcactccccaccctgatcgctctctggctcctaaggctttcatttggttttcccaagatcgggctcccctgtgacatgtctccatgacaagccgttagtattcactcagagacaaattccaaacgcatctttgatctcactacttcaaggaatccctttagtcac

SEQ ID NO: 756570 - DNA, 610 bp, Homo sapiens
tcctcctatttccttaggactagttccattaaaaaaagagaatactggaaatagacagatcttaaacaacagaaacctactgcctagataaatccaggcctggttggaacttttaatagtttgcacaatggtttttaaacttgactgyaactcaccgttttccttcaataacccaatatacatagatattggatatttttcattcatgtatttaattacaaagatttactgagtgcctacttgaatgcttgatagcattcagggtgatggggaaaacagaacaaaataaagagtcctgcccttatagagtttatgtactagtgggtggaagaaaaaataaataagcaaaacacagaatatgttagctgttgaaaatttctatggagaaaaataacataagaaacagagacataacataagaaacagtggaggtgtagctgggtggatttctcttttaaagagtgtggtaaatgacattctcactgaaaagatggcttttttctaaatgatttttattttacagtaacagtaggcatacaatgtaatgaattagaaaacaaagactagccaaaccaagaaaataaaagcatatccccatcatctagagatg

SEQ ID NO: 756571 - DNA, 430 bp, Homo sapiens
atgcgctgaagacactgcacaatcctactgcaggctttagcttccctctgcgccagccacaggacacgttcatcagccaacatgatgttacttgcaatgtcaaccatcacgtcacctagctagcaggggttcaggagaaaaaagaaagatctttaaaaccaccataaactatttcgtagaatcaaaatcctaatggacagtgagattggccttcagtctcaaattccacatgagaacccaacaggcactttacttgtttctcatgaaaacatcttcagatatgaacagttmtttcaagtatagccatttggtggtatttagctcaaaagagcatatgtaagtggccaccacatcactggtgaaaagactgccaggtgttatctcaaatggaggaaaagaaaggcaattagattaattaaagagaaggaaa

SEQ ID NO: 756572 - DNA, 643 bp, Homo sapiens
ctaaaacaatgaatcttaagttttattagttgctagacttggaataattcatcacactttgaattctgacagaataattagaataagctccctaagtcaaactttcaaaaatattttcatcatattgcctccaatgtccctattattctctgtcatagagaggtacgcattcttcgagttactcttcagtaaggcgatcygcaccatccatttcaaactaaaagtattggattccaaactgtgtacttggtcatgtagtagtctcaccagaaattctaagaacataatgtttgaatcaggtacctaactcgtttgttttttttccttgactatttcaaaagttaaaatgagatggtttaattttaggtgtcaacttcgctggattgagaggcctcaatggctggtgaagcattggtttgggtgtgtctgtgagggcgtttccaggggagattggtgcgggagtcagtggacagagacaggaaggacctgccctcagtatgggtgggcaccatccagtcagctggggccctgctgggacaaacaggcaaaagagagggcttgtctctctctgctctctctctccccttccacagcaggatgtcttctcctcctgttgttggacatcaggctacaggttctttgt

SEQ ID NO: 756573 - DNA, 643 bp, Homo sapiens
ctaaaacaatgaatcttaagttttattagttgctagacttggaataattcatcacactttgaattctgacagaataattagaataagctccctaagtcaaactttcaaaaatattttcatcatattgcctccaatgtccctattattctctgtcatagagaggtacgcattcttcgagttactcttcagtaaggcgatctgcaccatccatttcaaactaaaagtattggattccaaactgtgtacttggtcatgtagtagtctcaccagaaattctaagaacataatgtttgaatcaggtacctaactcgtttgttttttttccttgactatttcaaaagttaaaatgagatggtttaattttaggtgtcaacttcgctggattgagaggcctcaatggctggtgaagcattggtttgggtgtgtctgtgagggcgtttccaggggagattggtgcgggagtcagtggacagagacaggaaggacctgccctcartatgggtgggcaccatccagtcagctggggccctgctgggacaaacaggcaaaagagagggcttgtctctctctgctctctctctccccttccacagcaggatgtcttctcctcctgttgttggacatcaggctacaggttctttgt

SEQ ID NO: 756574 - DNA, 506 bp, Homo sapiens
gcctcctagtttttttcactacactaataaatggtgaaagctatggcctgtggttcaaattgccaaagaactgtatgtcagtcactgcatcacacgcaatattatcacatttatatctcaattattcaatcctgaatattttcctgtttctcgtgctgacagttagtaagttgccatcacttgcttccgaagataacataacttttccgtcctatgttaaccagtaaaagtgacagcaatcttcttcacactaaatttttacagaactaactgaygcactcatgattatttaaaaggacttccttcttagcttctgaggtcataaaaatgttatatttcataacctaataaaatgatatccaagctttgcaactattttgcaaaactgttcgcctgtatttgtgcacatacacttttcaaattatacagagaaaatagcatccccatttgaaaaatgaagaataagcccatggttaattaataactaatgaaaccatgtctacttc

SEQ ID NO: 756575 - DNA, 575 bp, Homo sapiens
gcttagagttcagagatagttaaacagtaaatcataaagtttcataggcagtatggaattttagtaaggacctgatatgatttagttgtgtccccacccaaatcttgaattgtagctcccataattcctatctgtcatgggagggacccagtgggaggtractgaatcatgagggtgggtctttcctgagctgttcttgcgaaagtgaataactttcatgagatctgatggttttataaaggggatttcccctgcacatgcgctctcttgcctgctgccacgaaagacatgactttgctcttcctttgccttccaccatgattgtgaggtctccccagccatgtggaactgtgggtcaattaaacctctttcctttataaattacccagtctcgggtatgtctttattagcagcatgaaaacagaataatacaggtccacagaataacactgggggatacaggaacagaatctccgaaacagtaacaataaagtgagacctgcaaggtaagtgggagtcagcgacatgaagaagaggagaaagactgagaacacagaggagctatcttctacaca

SEQ ID NO: 756576 - DNA, 471 bp, Homo sapiens
atacagttagtgggtatagtaaataggaaacacctggctactccattgacttatatctcaagtggataattcctttgcccaggaaatttcagagaggtgactcccatcccagtgtatcttgtgtcttatactgcaaagactcccactagggagcaaatgtttataaaayaataccatttttggtacataaaaaaataccattacttattattgtgttttatctttctgtactctaaattaaaaacatttctgtcaagaggagtatgtttgttttctatgttgtattaaaaaaaaagccacaatctcagtggcttacaacttcagtttctgtagttcagaagtccaggtgcagtttacctcagttctctgctccagggtcttgccatattgcaagctaggtgttttctagggttgccgtttcatcagggcttaactgtgaagagatctgtttccaacctcactttagttgtt

SEQ ID NO: 756577 - DNA, 465 bp, Homo sapiens
acattctggatattagccctttgtcagatgagtagattgcaaaaattttctcccattctgtaggttgcctgttcactctgatggtggtttcttttgctatgcagaagctctttagtttaattcgatcccatttgtcaattttggctttttcatttcaatcctgaaaataatcctatgaaataagagctattactattacctgaytacagaacagaaaacattaagtttaaacataaagtgacatacccacagtgacgctgctacactactacagaacagaaaacattaagtttaaacattaagtgacatgcccacagtgacattgctagtaaattatactgttggaaagttttactgacaccagagtctgtgctctgaactattctgcatcttctagcaattacttttgcatattctcaatgccacacaattacagatagattgatagaaaacaagaaagcagaa

SEQ ID NO: 756578 - DNA, 624 bp, Homo sapiens
cctaacaattacaatctattaagactccaacctaaccattttattacactggattacttggttttagtctgctgagcattagtgctgcttttaacaccattggtttttatatccttataatgacctcctttgttttagtacacaaaattgtccttttatcgatgtgctgaggtatataccttccatagaaaatcatcaagataaagtgaggttttgtgattcaactctcatgttttgatttcttcagtgattttgttatctcactttctggctgcaggtggttttgcagataaacagttggattatttcagaagccttagagttcttcctattacacattcaagtcaatggtatcaaagaggtccattgtaagaactcattctttcataaatggaaaagtctaatataagaataactaaattaactaaaaaattctgtttcacagtattaaaaagacaaasaagaaaatatatgtgagtgggtgtcttaatccattttctgctgttgtaacagcataacaaaagctaggtaatttataaagaatagggttttatttggtcacagttctagaagtagggaagtccaagagcatggtgctgacatcttgtgaggaccttcttgcta

SEQ ID NO: 756579 - DNA, 515 bp, Homo sapiens
aagcttttaatttttttctcagcaatgttttgcagttttcagtgtcccagtactttacatattatatcagatttattccacagtattgtttttttttttgagatggagtcttactctgtcacccaagctggagtgaagtggtgcgatctcagctcactgcaatctccgcctccctggttcaagtgattcttctgcctcagtctcccaagtagctgggattacaggcatgtgctaccactcctgcctaatttttrtatttttagtagagacagggtttcgctatgttggtcaggctggtctcgatctcctgacctcaggtaatctgcccatttcaggtcacaaagtgctgggattacaggtgtgagccaccatgcctggcatatcccacagtatttaaatacttatgtcaatttaagtggtatttttctatttcagtcctatgttgtgcattgttaatacaaacaaatacaattgatttgtgcatagtgatcttgcatccggcaagtcttgctaaa

SEQ ID NO: 756580 - DNA, 558 bp, Homo sapiens
agcaggacttaactaatactcaccacacatacgagtgctatatgtatgatttgccattttgattaatcactccacacttaactattactggataatgacactcaaaaatctctaccataagaaaaatatatatatatatatatataaagcaactaagtcacctagtaaggaattattttaaagggcaagtcttttattctcactttttgcccaaatttgtatcaagtatagcctcagatcctataataaactccacctatgaatagtatcccagtcaacaaaatactttattgcatttctcaagcatgttgtttgcacacagayttaatgatagtgaccaagcttcagtgttacagtagccatatcttttttcactgagttttactgttttatgtttcagcctgtatgactcacgaagagaacaatttgtttcgtcaaagaatcactctatgctggtgccagcatactttttaaagtgaaatgccaggaaaataagtgtaactgcaagcgttttagggaactatccagactaggaaaaacactggctggatcattagt

SEQ ID NO: 756581 - DNA, 534 bp, Homo sapiens
taatgctaacatagacaccttcattcaaaatttttttaaaataaaaatgttattttcaaaatggcatctttttaacacagatgctcaccacaggaccagggatgccccgaagaccttctggaccaggctttcctgcaggtccctgaggaccgactgggccggtttttccaggaggaccttctgcacctgcttccccctgttagaaagtaaaatatgggagcacattagtgatgagaaaatacttttattattttattaaatgyactgaaaaaagttgatcagtttatgcatgaaattttcaaatataataccttgtatatataatatataatatatattatgtatatattattttttttttaccttagcacctttttcaccttgtcttccctctgcacctgcagctccaggaggaccctatagacataagatttattgtaaaatatgtatcacatataaaagtaatgttaatgagcacttgttttcaaacactaaactttagtttgtaacagatgaataaattgtagttttcta

SEQ ID NO: 756582 - DNA, 534 bp, Homo sapiens
taatgctaacatagacaccttcattcaaaatttttttaaaataaaaatgttattttcaaaatggcatctttttaacacagatgctcaccacaggaccagggatgccccgaagaccttctggaccaggctttcctgcaggtccctgaggaccgactgggccggtttttccaggaggaccttctgcacctgcttccccctgttagaaagtaaaatatgggagcacattagtgatgagaaaatacttttattattttattaaatgtactgaaaaaagtwgatcagtttatgcatgaaattttcaaatataataccttgtatatataatatataatatatattatgtatatattattttttttttaccttagcacctttttcaccttgtcttccctctgcacctgcagctccaggaggaccctatagacataagatttattgtaaaatatgtatcacatataaaagtaatgttaatgagcacttgttttcaaacactaaactttagtttgtaacagatgaataaattgtagttttcta

SEQ ID NO: 756583 - DNA, 564 bp, Homo sapiens
tgttcaacccaacactagggtgggtgttaggtcctctgagaaacagaaaatacacaatttgcccaacgtaatacaggtaataactggtgtagctgggttgaaagccagctattgtgactgcattgttctactaaccacattatatagcatcccaccatctgaggccagaaaaaagataaaaaaaatgatttcctgttgttccaagaagtatttcaactcattctcaaggatgttttttayagttattcttccaaaaggtctgaaatagtataatagacagctatgcatcacagttttatgagcagctggacttacagcagaaagaggcaatggatatcaaaaatcatgtacactttccaattactttctaagaataatagtcccatggttgtttggggataaatctattgacactgagaccatgctttggggttgtagacacaataataataataaaagaaaatgtaagaaaatgtacttggccaatgaagagcaaattgttttcagagacaagttttattataaattaaatatatttttggaaagagaaatgtttgtaaatat

SEQ ID NO: 756584 - DNA, 600 bp, Homo sapiens
aactctttaatccatcttgagttaatttttgtataaggtgtaaggaaggcatccagtttcagcttttcacatatggctagtctgttttcccagcaacatttgttgaatagggaatcctttccccatttcttgtttttgtcaggtttctcaaagatcagatagttgtagatgtgtggtattaattctgagggctctgttctgtgccattggtctatatctgtgttttagtatcagtaccatgctgttttggttactgtagccttgtagtgtagtttgatgtcaggtagcgtgatgcctccagctttgttcttttgtcttaagattgacttggcaatgcgggctcttttttggttccatatgaactttaaagtagttttttccaattctgtgaagaaagcccttggtaacttgttggggatggcattgaatctataaattaccttgggcagtatgrccattttcatgatattgattcttcgtattcatgagtatggaatgttcctccatttgtttgtatcctcttttatttcgttgagcagtgctttgtagttctccttgaagaggtccttcacatcctttgtaagttggattcctaggtat

SEQ ID NO: 756585 - DNA, 630 bp, Homo sapiens
tcaaatatagaagctagattattactcttgtagctgcacttcaaaactgtaaaattaatgatctttggatattcaatacagggagaaaaaggtccccaagggcctgcagggagagatggagttcaaggtcctgttggtctcccagggccagctggtcctgccggctcccctggggaagacggagacaaggttggtattcattattcgtgttagtagatcctgtgaaaaagcttaatttttgtcaagaattctagataattctaatctttatgattaggygccaggtgaaaggttacctttttcaaagtttcacacacattttcatatgctcaaaagttttatttaagaggttcagaattagtatctgttccataaaatagtatgtgatacataaacagaaaactcaattaaaagaacagtggtagtgagaaaaactagtagatgccaaaatttatttatttttaagaatatccttctgaaatgaatataaaataaaaaaattaattacatgtatatggttagtcctcatgtcttggatattgtacaataagacttaagaatgagctacatatttacttcataatcctgttatcatttaccaacatgtgagtacagactctaagctcctaa

SEQ ID NO: 756586 - DNA, 553 bp, Homo sapiens
aacttttactgtttaccattgatatttttatatagtgctacttactttcctagccaatacttataataccaatactacattacctctgcagttatatcattctataattttatatatttgtgaagttttctatttctgtgattaagtaaagtatgatgattgtraggccattatttataactctgctatagcacatgaaagagtaacataatgaaatagtcttttttgtatgattatgagaaattttgtatacatatatttaccaaaattaacagtattactatgttctacatgtatacaaattggtcacttattcccatatgttataaatacttattttaaaatttttcatttaaatcataaaacttcaatataattttggttgttcattcaaatggtgtgttcactcttgtctttatgatgtttttctttggtcactaccagtatatattctctttaaattatgtatttaaacatgttcctacttcttaaatgaaatatgttagatgatgatactgtcacatgcttcagcacttccttactaatttatact

SEQ ID NO: 756587 - DNA, 612 bp, Homo sapiens
tagggttacaattgtgagccactgcgtctggccggcaatatcttctataaatatcaaggccttcaatggaagaagagatggtactctttcccaaggatattaaatgtttctaaggactggagtgaagttgaagtaatacacttaaagttaatccttttttagagtctatataaattattatgcctggtgcctggaagttgcattttcagttcttatctttgatctcatgttttacgattagatcgtatcaggtacttttcctatccccttaaaatgaatgtagtttttccctcttgtcccaaaatgtattctstaaatgaaaatttgagaatagaaaatcttagattttcagcctgtaaatagcttttgtgttcttttttaggaactagtaacctattttcaagaaacatgctgtgttaaaggacagaagtgtgtgtcctttaaatcatgctagctgattaaaagtttgttactctattcctcccaccttttggcttttccctcctcatcccattgacattcttaagatggaaggaaaaaggcctattttttagcttgattaaaacttaatagctgaagtaaccaaaacattcataaaatgaggagattgaa

SEQ ID NO: 756588 - DNA, 733 bp, Homo sapiens
tgcagtgaactgagatcgcgtctgggatccagcctgggagagagagagcaagactccatctcaaaaaagacaaaaagaaaaaacacaagataaaggatgcttaaaacctaaccaagtatcaacagtaaaatcgaaggacacttagaaaattaactgacattatagacaacgtcaagtaatttgacatcatctcttctttgaaattcaccatcccatcatgtgagcctatgtatacagctcctagtagcggataaagtaggcaaacttacatgaagaaagaattccattactataagctatcattaaacaacttaaatatctagagaaaattcatgaataataactgaggtgattcagagtccacagcataaccagtttaattgcatttaccacataactggtccatatacactggaactctgaacgtgctagacgagtgaaagcaaatgtgaaagcttttatttcagttctaatgtactgcataataaaatttaaaaacacacacaactaaaatgtggattaaatccaaaaactataatttcattaaattgcattataagattttcacttactaaamtacagaaaatgttttctaatatgcattggacttttttagttatactttacatgtgaaatgcagagatttttagatacactatttagtttttataaaggctcaactcaaaacagttctatcactccagaaagttctctcaagcactttcccagtcaa

SEQ ID NO: 756589 - DNA, 727 bp, Homo sapiens
taagagaccagggactacccactgttcctggccagtctttggagaatgcacagtaagggttttcctgtcctctgtttcaccttttgatgtccgagggcccaaacctttatcctcagataatgctggtgctaccacagattttgtacaggagtccagtgagggggctgtatttgtcagggttctctagaggaacaggactaataggatagatgtgtatatgaaagggagtttattacagggaattgactcacaccatcacaaggtgaagtcccacaatagacctttcgcaagctgaggagcaaggaggacagagtcccaaaacctcaaaagtagggatgctgacaatgcagccttcaatctgtggctgaaggcccaagagcccctagcaaaccactggtgtaagtccaaaagtccaaagactgaagaatttggagtcctttgtttgaaggcaggaagcatccagcatgagagaaagatggaggtcagaagacttagccagtcttctaccttacttttaccttcttatgcctgcttttagtctggccgtgctgatagctgattagatggtgctcatccagattgaaggtgggyctgcctctctaacaacacctgactcaaatgttaatcttttttggtaacacccttacagaaacatacaggaataataccttgcatacttcaatctaatcaagttgacactcagtattaactatcacagggggataag

SEQ ID NO: 756590 - DNA, 625 bp, Homo sapiens
tacaataaagcccagcaatcgtagttctgggtatatcttcaaaggcaatgtaatcagtatctcaaagaaatatccacactcccatgttcattgcagcattattcacaatagccaaaaaaatggaaacaatttatgtgtctgctgctgaatgagaggataaacagaatgtggtgtgtgtatacaatgaaatattattcagccttaaacaagaaagaaatccttccatttgcaagaatatgcataaacatggcaggcatttatgctaagtgaagtaagccagttggagaaaagctaacactgtatgatctcgcgtacatgtaaaatcttaaaatgtcaaactcaraaagcagaactgtggttgccaagggatagggagtggggaaaactgtgagatgttggtaaaagggtatagactttcagtgatgtgtagaatatattccatggatctaatgcatagtgactataattaataatactgtattgtatacttaagtactcttcctccattaaggagtacaatgtgattatttgatattggtatatattgtgaaatgaacacaacaatcaagttagcccatctatcacctcatgcagttacaattttattagtcaattacacctcaat

SEQ ID NO: 756591 - DNA, 574 bp, Homo sapiens
ctagatacagagtgctgaatggtgtatttacaatcccttagctagacataaaggttctccaagtccccactagactcaggagcccagctggcttcacccagtggattccgcactggggctgcaggtgcagctgcctgccagtcccacgccgtgggcctgcacttctcagctcttgggcggtggatgagactgggagccatggggcagggagtggygctcgggtccgggaggcttgggctgcgtgggagcccatggtgggtttggggggaggctcaggcatggcgggctgcaggtcccgagccctgccccacggggaggcagctaaggcctggcgagaaatcaagcacaacagctgctggcccagatgctaagcccctcactgcccggggcttgcaggcgggccagccgctctgaatgcggggccgcagagcccacacccaccaggaactggcgctggcccacaagcgccacacgcatccccggttcctgcccgtgcctctccctccacacctcctcgcaagccgaggcagctggctccggcctcagccagcccagagaagggctcccatggtgc

SEQ ID NO: 756592 - DNA, 574 bp, Homo sapiens
ctagatacagagtgctgaatggtgtatttacaatcccttagctagacataaaggttctccaagtccccactagactcaggagcccagctggcttcacccagtggattccgcactggggctgcaggtgcagctgcctgccagtcccacgccgtgggcctgcacttctcagctcttgggcggtggatgagactgggagccatggggcagggagtggcgctcgggtccgggaggcttgggctgcrtgggagcccatggtgggtttggggggaggctcaggcatggcgggctgcaggtcccgagccctgccccacggggaggcagctaaggcctggcgagaaatcaagcacaacagctgctggcccagatgctaagcccctcactgcccggggcttgcaggcgggccagccgctctgaatgcggggccgcagagcccacacccaccaggaactggcgctggcccacaagcgccacacgcatccccggttcctgcccgtgcctctccctccacacctcctcgcaagccgaggcagctggctccggcctcagccagcccagagaagggctcccatggtgc

SEQ ID NO: 756593 - DNA, 574 bp, Homo sapiens
ctagatacagagtgctgaatggtgtatttacaatcccttagctagacataaaggttctccaagtccccactagactcaggagcccagctggcttcacccagtggattccgcactggggctgcaggtgcagctgcctgccagtcccacgccgtgggcctgcacttctcagctcttgggcggtggatgagactgggagccatggggcagggagtggcgctcgggtccgggaggcttgggctgcgtgggagcccatggygggtttggggggaggctcaggcatggcgggctgcaggtcccgagccctgccccacggggaggcagctaaggcctggcgagaaatcaagcacaacagctgctggcccagatgctaagcccctcactgcccggggcttgcaggcgggccagccgctctgaatgcggggccgcagagcccacacccaccaggaactggcgctggcccacaagcgccacacgcatccccggttcctgcccgtgcctctccctccacacctcctcgcaagccgaggcagctggctccggcctcagccagcccagagaagggctcccatggtgc

SEQ ID NO: 756594 - DNA, 542 bp, Homo sapiens
gccgctgggggtgacatcacatatcggtaggaccgtgatgcccacctgagtctcagaccagcaagtttttattaagtgtttcaaaaggggagggggtgtaagaacagggagtaggtacaaagatcacatgcttcaaagggcaaaaagtagaactactaataagggtctaacaaagatcacatgcttctgagagaacaggacaaagggcaaaagcagaactactgrtaaggtctatgttcagcggtgcacatattgtcttgataaacatcttaaacaacagaaaacagggtctgagagcagagaaccggtctgaccacaaatttaccagggcggagtttttccccaccctaataagcctgaaggtactgcaggagaccagggcgtatctcagtccttatctcaactgcataagacagacattcccagagcagccatttatagacctccccccaggaatgcattccttcccccgggtattaatattaatactccttgctaggaaaagaacttagtgaaatcttccctacttgcacgtccattta

SEQ ID NO: 756595 - DNA, 542 bp, Homo sapiens
gccgctgggggtgacatcacatatcggtaggaccgtgatgcccacctgagtctcagaccagcaagtttttattaagtgtttcaaaaggggagggggtgtaagaacagggagtaggtacaaagatcacatgcttcaaagggcaaaaagtagaactactaataagggtctaacaaagatcacatgcttctgagagaacaggacaaagggcaaaagcagaactactggtaaggtctatgttcagcggtgcacatattgtcttgataaacatcttaaacaacagaaaacagggtctgagagcagagaaccggtcygaccacaaatttaccagggcggagtttttccccaccctaataagcctgaaggtactgcaggagaccagggcgtatctcagtccttatctcaactgcataagacagacattcccagagcagccatttatagacctccccccaggaatgcattccttcccccgggtattaatattaatactccttgctaggaaaagaacttagtgaaatcttccctacttgcacgtccattta

SEQ ID NO: 756596 - DNA, 574 bp, Homo sapiens
ctcttagcatgctaatgccttataattagagtataatgaacagtcagaatgaccagaggtcactttcggcaccatcttggttttagtgggatttggccagcttctttatcacatgctgttttatcagcaaggtctttgtgacctatatcttgtgctgacctcctgtcttatcctgtgacgaagaatgactaacctcttgggaatgcagcctagtrggtttcagccttattttacccagcccctgttcactatggagtcactgtgattccaatgcctctgacagaagtaaaatatatgataacataacacagaggctgaaaggcctatactgttacaaggttctcatgcaacacatgaagtggtataatattatttgaagatagactgtgatggattaaagatgtatattttaaaccctaggttaagcactaaaaatgtatgtgaatgaagtacaaatagtgagccaataataaagatgaaatggactcattaaaaatacccaaataatccaaaacaatatagaaatagaggaaagaggaatcacagaaccaaaaagaaaaaaaaaactacaaaa

SEQ ID NO: 756597 - DNA, 576 bp, Homo sapiens
attaaaaatacccaaataatccaaaacaatatagaaatagaggaaagaggaatcacagaaccaaaaagaaaaaaaaaactacaaaaaattaaggctgagcacagtggctcatgcctgtaatcccaacaatttgggaggctgaggtgggaggatcactgatgccagggtttgagaccaacttcagcaacataggaaaatcccatctctaccaaaaacaaaaacaagtaaaagaatcaaagaacagatggaataaatggaaaatgactacgagatggaagattttaattcaaccatatcaataattacaaaatagtctaaatgtaccaattaaaagacagaaattatcatttggrtaaaactcaagattgaattttttaaaaaagctcaagaatatactgtctacaagaaacccatttcaaatgtcaagatataactaggttaaaaaaaactagcctaatcccctgtttattagcatcaacaaaacgtctaatattaggcattgctgccatctcttctccacccacaattagactgcacaaaaatataagagcctccaaagtaaacaggagacctagt

SEQ ID NO: 756598 - DNA, 552 bp, Homo sapiens
gagactggaaactcagaggacaaagagcatctttaatatctttgtattcactatatagcatctagtaaataccttgtatattgttcttaactatgttctttaatttaatgttcttatttcattttgggaggctcagaaaacaatatcctaaaatacactgttttggacttcaaactaacagcacctgggagtagcaaatgctgggagggctttctcttatcttcccttrtctgactatgagaagttcctttacaaggaacacaatcatcagccaggggaggttagctcacaggaaaagagactaaaggtctaacacgttgctcagagagacttttaccacaggctacaatctatccttcagagggctgctacctgagagacttcatctacataataagacaaacctttggttttagtgcatttcttcccctcactctctcatagcttgtcaccctcaccctccaggagccccagcccctattcctctctgtatgatataaaaacttcagtcatcttattcttctttgagtcatattttatgaggctcccatg

SEQ ID NO: 756599 - DNA, 629 bp, Homo sapiens
ggtgggcgtgaggctggcccttcagtttgcatgggagctgggtgaggcctgtgactgcaggctttccccgacttccctgacaacctgcatgactcagcaaaggcagccataatccaccatcccccactacagccgcagcatgactagcccaaggagaatctgagctcagacatgcctagaccaacccccacctgatagtccttccctatccaccctggtagtggaagacaaagggcataaaatcttgggagttctagggccctgcccaccaccagtccctctccacgctacagctgatgctttctggaaagtcccacctcctgccrgaggccagccagcacaaaaatagagcattaaaccaccaaagctaaggacccccatggagtccattgcactctctgccacttccactggaacaggcactggtatccatggctgagagacccatagatggttcacatcacagggctcagtgcagacaccccacagtacgagcttggagctgggtagacagctagacccagaagagagacaacaatcactgcagttcggctcacaggaagccacatccataggaaaagggggagcgtactacacagagggaacactttgtgagacaaaagaatctg

SEQ ID NO: 756600 - DNA, 432 bp, Homo sapiens
aggcaactttctctcccaactgtattatcgatttctccctattggctctttttcattggcatttaattttcaagtctcttccataaaacaaagaaacaaaaacgctctcttgctcatacacatttacacctagtttctcatagatcrcttgctttcttttcacagccaagcttctacaaacttgccaacatttgatgacttaatttcttcaccatctactcactcctcaacctactgcaatatcacctttgcctccacaactctggaaacaggtaccaatgacttctttcttgttaatctatgagtttttgcttgttaactggaatggacacttttcagtcactttcctacatggtttctatggcagttcacaccaccaactgtttcatcctctttcaaaagctctacgtttccaccatacctatggtactg

SEQ ID NO: 756601 - DNA, 587 bp, Homo sapiens
gcagagatatgaggttgtggtacttgcccctccgccagaaaagcgggacttgctgctaagggtgaaggagaaggggttgaggggtacttgcccctcccccagaaaagcagagaaggggtagagacaaggagagaaggggttggggtacttgcccctttcccagaaaagtgggacttgccgctaagggtgaaggaccaaggcaggcgtccctgcrtggtctgacacctttgaaatgtgggtgaataatcagagaggcgtccctgcattgattaaacaccaagggaaggctgccttcccagtccgtgaccggcgccggagttttcggtccacggataaaacatgtctcctttgtctctcccagaaaatgaaaggaattgaaattaagagaagggagagtgaagagtggaaaggagaaagtggttgagggacagtgagagaggttggagaagagagtaagaagaggctgcttacctgatttaaaattggtgagatgttccttgggctggtcagtctgaggacctgaggtcgtaggtggatctttctcaccgagcaaagaacaggaggacaggggattgagctcccaaggg

SEQ ID NO: 756602 - DNA, 604 bp, Homo sapiens
ccttacatatttcccttttttagaattttatggtaggaacacttaagattcttctctgaaaactattaactatagttaataataattactattattaactatagtattattaactatactccccatgttcaacattagagttatagcaattatttatccttcataactgaaagtttgtaccctttgacctgcatcactccacttcatcctctctccagtccttggtaaccaccattctactctgtttctatgaactcgacgtttttagattccacatataagggagatcatgcagcacctgacttatctcactcagtgcaatgtcctccaggtttacccatggtgtcacaaatggcaggatttctttcttttttaagactaaataataactacattttctttatstatctattgatggatacttacgttattttcatatcttggctattgagaataatgctgcaataaacgtgagtgcaaatgtcttttcagcatactgttcatttctattgggtatatatgtagaagaaggattactggataatgttaattctatttttaatattttgaggaacttacatattattttctataattgctgtgc

SEQ ID NO: 756603 - DNA, 634 bp, Homo sapiens
tggttgcttctgtgctggcagaggcaagctcaactcactcagaattgctgttcttcacccctcatgggaggggcacacaggtgaacagatgcaggaaaagcatttttgggcgcccgcaggagccaattttgttccggcctcccagcagcatctgaggggatgcccatgaccccagargccacagagggagcataacactgctcttttagctctaccatctgcagacagcttaaatattaacagatcagtggaccctctgccttttcatgtgaggtggctgccttccgccagcaagggcaaagggtcagtgtgacagccctttgcatccccactcatggcacccgagctcttggctggcatccaggagaaataaggtcacatgaataaactgaaggatggtagatatgggagatttcattgctgatgcaggtggctgttagtggaaattacattagtactactaatgtacctttctttaccttttgaaacatgacttactttcattttttgaacatatttaaaactacttccttgaagtctttgttaaatatgatacctgaatacctttattgggagtttctgtggcctgcttttttgtcttgtgtatgtgtcacattttccttttttcatgtca

SEQ ID NO: 756604 - DNA, 634 bp, Homo sapiens
tggttgcttctgtgctggcagaggcaagctcaactcactcagaattgctgttcttcacccctcatgggaggggcacacaggtgaacagatgcaggaaaagcatttttgggcgcccgcaggagccaattttgttccggcctcccagcagcatctgaggggatgcccatgaccccagaggccacagagggagcataacactgctcttttagctctaccatctgcagacagcttaaatattaacagatcagtggaccctctgccttttcatgtgaggtggctgccttccrccagcaagggcaaagggtcagtgtgacagccctttgcatccccactcatggcacccgagctcttggctggcatccaggagaaataaggtcacatgaataaactgaaggatggtagatatgggagatttcattgctgatgcaggtggctgttagtggaaattacattagtactactaatgtacctttctttaccttttgaaacatgacttactttcattttttgaacatatttaaaactacttccttgaagtctttgttaaatatgatacctgaatacctttattgggagtttctgtggcctgcttttttgtcttgtgtatgtgtcacattttccttttttcatgtca

SEQ ID NO: 756605 - DNA, 548 bp, Homo sapiens
agaacttatgaacacaaagaaggaaacaacagacactgggatctactcgagggtggaggatgggagaagggagaggaagagaaaagataactactggttactgggcttaattcctgtgtgatgaaataatctgtacaacaaaccccataacatgcgtttacctatgtaacaaatcttcacatgtgcccctgaacctaaaataaatgttaaagaaatctgcaagaaatgacagaattcytttgactctaatattacagtaaattaaacatgttcaaactcaaatatatatatttttcctttatatatagcaatatgtaaatacatatatttcctttacatagttatatatatgtgtgtgtgtatatatatgtgtgtgtgtgtgtgtgtgtgtgtatatatatatatatttcctttcaaatgctttttgtgcctcattctcaactgtgattttgtcacctagagtttgacaattttttcagtaggtttaatacctgggtgttgaaataatctgtacagcaaacccccatgacatgtttatctatgtaata

SEQ ID NO: 756606 - DNA, 504 bp, Homo sapiens
aggacttattcatctcacataactaagactgtgtaccctctgaccaatacttacctaattccctgttgtccctgaccatggtaagcatcactctattctctgcttctgagttgactattttaatttcctgatgtaagagaagtcatgtagtatttgttcttcgggtctggcttatttmatttagcataatgccttctaagtttctttattttgctccaaatgacaggattttctttctttaaggctgaataatgtttcattttttgtatatatatatatatatatatatatatatatacacacacacacacacacacacacacacacacatacatatattgtatatatactgtatatacattgtgtatatatctacctatttgtctatatatgtatatatctccacattttctttgtccattcatctgtcaaggaacatttaacaacacgggaggcagtatcagtaatccaaaatcctctaagaaagaaaagtccaagacaaga

SEQ ID NO: 756607 - DNA, 504 bp, Homo sapiens
aggacttattcatctcacataactaagactgtgtaccctctgaccaatacttacctaattccctgttgtccctgaccatggtaagcatcactctattctctgcttctgagttgactattttaatttcctgatgtaagagaagtcatgtagtatttgttcttcgggtctggcttatttcatttagcataatgccttctaagtttctttattttgctccaaatgacaggattttctttctttaaggctgaataatgtttcattttttgtatrtatatatatatatatatatatatatatacacacacacacacacacacacacacacacacatacatatattgtatatatactgtatatacattgtgtatatatctacctatttgtctatatatgtatatatctccacattttctttgtccattcatctgtcaaggaacatttaacaacacgggaggcagtatcagtaatccaaaatcctctaagaaagaaaagtccaagacaaga

SEQ ID NO: 756608 - DNA, 700 bp, Homo sapiens
agtaccaagccgttttggttactgtagccttgtagtatagattgaagtcaggtaacatgatacctccagcttgttctttttgcttaggattgtcttggcaatgcgggctcttttttggttccatataaaatttaaagaaattttttctaattctgtgaagaaagtcaatggtagcttgatgtgatagcactgaatctataaattactttgggcagtatggccattttcacgatatcgattcttcctatccataagcatggaatgtttttccatttgtttgtgtcctctcttatttccttgagcagtggtttgtagttctccttgaagaggtcctccacatcccttgtaagttggmttcctaggtatttttgttctctttgtagcaattgtgaatgggagtttactcatcattaggctctctttgtctgttattggtgtataggaatgcttgtgatttttgcacattgattttgtttgtatcctgagactttgttgaagttgcttatcggcttaaggagattttgggctgagaggatggggttttcttttctttttttctttttctttttctttttcttttttttttttttgagatggagttttgctcttgtttcccaggctggagttcaatggtgcgatctcagctcaccacaacctctgcctccagggttcaaactactctcctgtctcagcctcccga

SEQ ID NO: 756609 - DNA, 700 bp, Homo sapiens
agtaccaagccgttttggttactgtagccttgtagtatagattgaagtcaggtaacatgatacctccagcttgttctttttgcttaggattgtcttggcaatgcgggctcttttttggttccatataaaatttaaagaaattttttctaattctgtgaagaaagtcaatggtagcttgatgtgatagcactgaatctataaattactttgggcagtatggccattttcacgatatcgattcttcctatccataagcatggaatgtttttccatttgtttgtgtcctctcttatttccttgagcagtggtttgtagttctccttgaagaggtcctccacatcccttgtaagttggcttcctaggtatttttgttctctttgtagcaattgtgaatgggagtttactcatsattaggctctctttgtctgttattggtgtataggaatgcttgtgatttttgcacattgattttgtttgtatcctgagactttgttgaagttgcttatcggcttaaggagattttgggctgagaggatggggttttcttttctttttttctttttctttttctttttcttttttttttttttgagatggagttttgctcttgtttcccaggctggagttcaatggtgcgatctcagctcaccacaacctctgcctccagggttcaaactactctcctgtctcagcctcccga

SEQ ID NO: 756610 - DNA, 587 bp, Homo sapiens
aacagatgcatcattatgggcatgtataaatccctatatatgcatgtggccttatagataaccagcaataagtagctgctcattaaagcccatataaacttgtcatgaccaagctttcacttttaagcttttagattagcctrttgtttgcccaaacttttatttataacctcaggtcatgccgaatgatattttaaaaattgccactaattattttcaaccaatgtgcctacagaaaaggctgttagtactgggcaagctccaagtcaggtcaaataaagacctgagtcaggaaaccctgaaagtgtgcgcttccagggagccaccagataagtcaaacaaggacaattctctggaaatggtgctttgaagaatctccaacatcattataccctttcattggtttccaagcttttggttttcaacatgattgcaggatgttgattttcaaggctatcattgaaactgtccctataaactataaaattaattagggggtcaggtgtggtggctcatgtctgttatttcagcactttgggaggccaaggaggatgaactcctgagctcaggagttcaataccagcctg

SEQ ID NO: 756611 - DNA, 616 bp, Homo sapiens
agcattacatgcctacatgaaaaagtctgaaagagcacaaataggcaattcaaggtcacacctcaaggaactagaggaacaagaacaaaccaaacccaaacccagcagaagaagagaaataacaatgatcagagcagaactaaatgaaactgaaacaacaaaacaatacaaaagataaacaaaaagctggttcttcaaaaaataaaactgatagactattagtgagattaataaaataagaagagagacgaacctaatacgctcaattagaaatgaaacaggagacattacaaccgatactatagaaatgcaaaagatcgtacaaggctacaatgaacaccttcatacatacaaactagaaamtctagagaaggtagataaatttctggtaatatacaccccttctggattaaatcaggaagaaacagatactctgaactaaccaataataagtagtgaaattaaaacagtaataacaaaattgccagcaaaaaaagtgcaggacctgatagattcacaagtgaattctgtgtggcattcaaataattggtaccaatactgctgaaactattccaaaggatagatgaagagggaatcctccctaaagcattctatg

SEQ ID NO: 756612 - DNA, 616 bp, Homo sapiens
agcattacatgcctacatgaaaaagtctgaaagagcacaaataggcaattcaaggtcacacctcaaggaactagaggaacaagaacaaaccaaacccaaacccagcagaagaagagaaataacaatgatcagagcagaactaaatgaaactgaaacaacaaaacaatacaaaagataaacaaaaagctggttcttcaaaaaataaaactgatagactattagtgagattaataaaataagaagagagacgaacctaatacgctcaattagaaatgaaacaggagacattacaaccgatactatagaaatgcaaaagatcgtacaaggctacaatgaacaccttcatacatacaaactagaaactctagagaaggtagataaatttctggtaatatacaccccttctggattaaatcaggaagaaacrgatactctgaactaaccaataataagtagtgaaattaaaacagtaataacaaaattgccagcaaaaaaagtgcaggacctgatagattcacaagtgaattctgtgtggcattcaaataattggtaccaatactgctgaaactattccaaaggatagatgaagagggaatcctccctaaagcattctatg

SEQ ID NO: 756613 - DNA, 559 bp, Homo sapiens
tttgttaccttgattacttattaccttgaaccacagatgtacccagaacattgcactttacaaagatataatttctatttaaatacagtgaataaatgactggtagaatggtagaaaagtgtcatggttgaatacggatgctatagttaggatttatatccttgttttgacaaccactttatctgtagcctaaagcatttctaagcttttyttatgagaaaagggagaataataataatacgtatcttgtagcattgctgtaaaaataaacagtgttttaaaaaataaaataattcatacaatgtgcttagcattcactaatcagcatcagataattattaataatattagtagtggtacattataataatacccataagcgtctcaattttgtggatttttctgcagcaaattttttgctccagatttgctttcttttactaatttagagttcatttctctgtgtcaccatttgtacatgattcagttttgtaatctaataaataccattctaataaaaatattagtaagatataaaagatacaatataaaattttca

SEQ ID NO: 756614 - DNA, 487 bp, Homo sapiens
ttgctgaggtttttaatcataaagggatgctgaattttgccaaattatttgtctgagagttttcagagtttatttagataatcataagatttttctttttaattctgtttaagtgatgtatcacaattgttaaattgtgtatgttaaaccatccctgcatccttggcatgaaacccacttgatcatggtggattayctttctgatttgctgttgaattcggttagctagtattatgtggagggtttttgcatctatgttcatcagggatactggtctgtagttttcttttttgttatgttgtttcctcattttggtattaggatgatattggtttcatagaatgatttagggaggattccctttttctctatctttttgaatagtttcagcaggattggtaccaattgttttttgaatgtctcgtataattcatctgtaaatccatctggttctggaattttggggcaatttttttattactatttc

SEQ ID NO: 756615 - DNA, 487 bp, Homo sapiens
ttgctgaggtttttaatcataaagggatgctgaattttgccaaattatttgtctgagagttttcagagtttatttagataatcataagatttttctttttaattctgtttaagtgatgtatcacaattgttaaattgtgtatgttaaaccatccctgcatccttggcatgaaacccacttgatcatggtggattatctttctgatttgctgttgaattcggttagctagtattmtgtggagggtttttgcatctatgttcatcagggatactggtctgtagttttcttttttgttatgttgtttcctcattttggtattaggatgatattggtttcatagaatgatttagggaggattccctttttctctatctttttgaatagtttcagcaggattggtaccaattgttttttgaatgtctcgtataattcatctgtaaatccatctggttctggaattttggggcaatttttttattactatttc

SEQ ID NO: 756616 - DNA, 655 bp, Homo sapiens
aggtgcccggtagtgagactctaccgaggaatccggcaacatttctgattcctgtgatcctctcaccgaaaagtcaagttggggccctggaatttgtatttttagcaaatgccccagtgattctcatgatcagacacctatagaaaatagtgtgatggtgaccatcttcaagcyttttccaggagtgaggatgctctaggacacaggactcttatgttaaaattggaaaaccctgggcaaaccagaatgacttgggtggagacttttttttaaatccccgtttaatagatgggaaaactgaggctcaaggcggttcagacagtaattcttgtctgtaatagttttctcccatttctcaaaaaggagaaaaataaatcagatagagtttttcatgataaacgtacaattgaaagagctaactttcatttttgaaaaagaaaaagtttgaatggggtgttaaaatgccctttctttcatgaactgattatatgagtgttttgtctttatgaccttattttacattaaacatacgaagctatggtgggtggaggggtgttgtttttgaaattagacttgtgtttgagggtttggcactttgacactgggggttgattgtggaggttcagatgagaaagccccttcacttccccgcctc

SEQ ID NO: 756617 - DNA, 655 bp, Homo sapiens
aggtgcccggtagtgagactctaccgaggaatccggcaacatttctgattcctgtgatcctctcaccgaaaagtcaagttggggccctggaatttgtatttttagcaaatgccccagtgattctcatgatcagacacctatagaaaatagtgtgatggtgaccatcttcaagccttttccaggagtgaggatgctctaggacacaggactcttatgttaaaattggaaaaccctgggcaaaccagaatgacttgggtggagacttttttttaaatccccgtttaatagatgggaaaactgaggctcaaggcrgttcagacagtaattcttgtctgtaatagttttctcccatttctcaaaaaggagaaaaataaatcagatagagtttttcatgataaacgtacaattgaaagagctaactttcatttttgaaaaagaaaaagtttgaatggggtgttaaaatgccctttctttcatgaactgattatatgagtgttttgtctttatgaccttattttacattaaacatacgaagctatggtgggtggaggggtgttgtttttgaaattagacttgtgtttgagggtttggcactttgacactgggggttgattgtggaggttcagatgagaaagccccttcacttccccgcctc

SEQ ID NO: 756618 - DNA, 561 bp, Homo sapiens
actgcaagctccgtctcccgggttcacgccattctcctgcctcagtctcccgagtagctgggactacaggcgcctgccaccacgcccggctaattttttgtatttttggtagagacggggtttccccgtgttagccaggatggtctcgatctcctgacctcgtgatccgcccgccttggcctcccaaagtgctgggattacaggcgtgagccaccgggccyggccgaggcaggtatttttattgtccccattttacagatgcagaacctgagcccagggaacttaaactcctcacttaagatcatgctatggattgaaatgtgtccttccaaaattcgtgttggattcgtgttgaagccctaacgtgcaatatgactgcatttggaaatgtggcctctaaggaatcaaggctaaatgaaatcagaagggtggaccttgatctgatagaattagtgtcattataaaaagagacaccaaagagctctctctgtctctctctcaaccgtgtgaggacacagcaagaaggcagctgttggctagccagaaagagtggtctcacca

SEQ ID NO: 756619 - DNA, 561 bp, Homo sapiens
actgcaagctccgtctcccgggttcacgccattctcctgcctcagtctcccgagtagctgggactacaggcgcctgccaccacgcccggctaattttttgtatttttggtagagacggggtttccccgtgttagccaggatggtctcgatctcctgacctcgtgatccgcccgccttggcctcccaaagtgctgggattacaggcgtgagccaccgggcctggccgaggcaggtatttttattgtccccattttacagatgcagaacctgagcccagggaacttaaactcctcacttaagatcatgctatggattgaaatgtgtccttccaaaattcgtgttggattcgtgttgaagccctaacgtgcaatatgactgcatttggaaatrtggcctctaaggaatcaaggctaaatgaaatcagaagggtggaccttgatctgatagaattagtgtcattataaaaagagacaccaaagagctctctctgtctctctctcaaccgtgtgaggacacagcaagaaggcagctgttggctagccagaaagagtggtctcacca

SEQ ID NO: 756620 - DNA, 626 bp, Homo sapiens
ccattattccctgattgcacagataaagaaaccaaggctgagcaatgccatcccctcatctcacgaacgtcacctccatgagggtaggcaccttactagttctacttgcccaagagtagcagtcagaaagctatggggaggcacacctggggtttgaacctgggtccacgtgactcaggcactcaaatcctgaactgcttcagggcagggcacttggcttgaagagaagctgcagacacagagacaatcaagtcacatctaatactccagcaggacagatgagcctgcawggtgcaaaggtacccccgcccccaacccaaagcctttttcaattcctctccctccacatctcttgtcatggtaaagcaggcagaatccatgggctttaacgggcccattgcttttcccaaagctcatgcctttttcctaaaaacaaaacccttctgggttccagaactctttggaaaaaaagaatcttctgtgatttgggacattggtttgttcccccaccctcacttaaatgagaaactactttagcatgccccgccccgtctgttgtctttatttaggaggaagcaccctctacataccctgagtatatacacccagggcctgaagctgctgtg

SEQ ID NO: 756621 - DNA, 600 bp, Homo sapiens
aagagagaaaagaagagaagtgaaaacacagaatattgttcttattattagtagcctgagccaatctgaggaccgatgcacttatcacaatgtctcttaaaatactatgtctcttactagattatacactccttgacagacgagaaacatgatttatttttcaaatgccttgcacaaggttagtgcgaaagtaacgattgcaggatttaattacacttttaaaagaaaaaagacattcttcatcttatgaaactctgcatggcaacactttacgcgccccacacscccactcaacacaaacacaactctggaagtactgtgttgataacagaaatgtggtgggttttatttttaaccaataaaggtcaagtttgcattatgtgattttgtgtgtgtgtgtgttgaatcttttaaatgcatatcttacagctctggttcagttgttgtggggagaggaaaaaaacctcatccctgccaacacattggtttgtatgaatcacagctcagtgaaacctttcaggcatataatttatcttttctttggcctatgtagtaaacgcttcatttgttcatgaattcttgccttgttttaattatgct

SEQ ID NO: 756622 - DNA, 663 bp, Homo sapiens
actcaagatttccactcttctctttaatcatatatttcctgtcattcatgtgctacaaaactctggaatatgcaaagctcattcaaatgcaaaaccagcctttgctccaacatgagcatatatyttcatttaaagacaaatcagatgtttcatttgattttttttataaatctgataataatgtacatttaacccgtgtttacaaccaaaataattaatctctctgaaccctttgtttttcctgtctctatcctccaccctcattgccagataaataacatctgcaacctgatgtggcatattgaactttgtttatactcacacaaacacgtataagcatcccagatacacatatacagggactgtatctgtccttgttgtttttatagaaattggatcacattagacatattttctgatgacttttgtacattatagttggtcttcacagtcaatagctccaaatctatcttatcttctaaaatagctgcataatattcctcagtatggatataccaaaagatatttaaaccattgcctaatcaatgaatatcctggtagtttccacattgttttttccatttccactatagtggaataaactttcgtgttcaaaaatcctaaactggtgctatatttctatagaatagaggcacagatgta

SEQ ID NO: 756623 - DNA, 617 bp, Homo sapiens
aggacctgcactcttaacaactaaatttacacatgcatatgtaatatatatgcacacacatgcataaacatatcaacataattaaaggaaaataaaaaatagtaacaaaactcacaaataatctagaaaccccatgcaaactgcattgaatgtggattacttgaccatgcrtctctgtttcaaatctctgattctttaggtcatattttaaaacttacacaacattttgagaactacgttggatgctttctcatggagaatgcatccagtgtagtgcatggagagagtctaatcctcctaatctagttgaagtgtgagaatatcatgcaataaacagaacacagttttgtattcacctctatccctgtccctggagataggatgggggtttactgctgtcatcggcaaagaccatacctgccatttcccctgattcaaaccatgttctccatcatgatatgctgtttactgacctctgtgagggggccagtgatgagcacagtggttaagagaaggccttggaattacaccccagtttgaactctggctcatacttctgtgctgtgcaaaatcaagcatgtgcaaaatcaagttgtgcaaaatcttcttactctaaa

SEQ ID NO: 756624 - DNA, 586 bp, Homo sapiens
ggaagaaatattttaaaagataaaatgtatgggatggagaccacaaatggcctatgaagcctgaaatatttactatctggccctttaaaccacatggctttcatctgctgcctccctggaaagtaccatagagtcaaaggcatcttcccacttgtctttgctgggccagacccctagcttcttggagccttgttcttggtgtcagggggtaggggaaggggacttagttatttccaaaaatatcgtctgctgagaaactattttytttcccatcatacagaacataccattggtttgcaaaatgacccgaattttccaaatcgagaagaacccttagtctctgtattgccatttgattcagggagttgcccatcagtaaatcagcatgcagaacaccccaacatttggcaactaaatcacatttcttaagctaaattaaatttcttaagctactgacacaatttctagtattttcttttttgtaaacaaaaacggaagttggggggttacaaactcaaaagtcctcaggaggcaaggcagagaatatcagcatggattgaccagacctaagaccaaaagtagtgac

SEQ ID NO: 756625 - DNA, 614 bp, Homo sapiens
gtgtatacatatgtaacaaacctgcacgttgtgcacatgtaccctagaacttaaagtagaattttaaaaaaaaatttttaatcaaaaataaataaataaataaatacatggaattcatttgtgtaatgcctaaaagcatccagctctccacaagttacatccccctaactctggggaaaagtgaccaggtcttcagttgccctgcgacctgtcttcctatcctggcaatgatgtctgcaggttatatgaagtgaggaagttatattaaccccacttttcagatggtataactgagcttattaaatttatgcctagtgttccattattggaacgctaagcatgtgggagttarttatatcctgcttctcaaagtctgatttttcaaagttaaaaaattgcaacctcaggcataaatgggttaacctcattgaacccctgctttgctgtctgaaaagtggggttaatatcacttcctatctgatacgcttattattgggatcgaacaaaataatcccacatcagtatttgccaagacgcggtacagcaggcaagaatcccatcagcgcctgctattgcagcgagctattaggataactcctatgaagcattacgtt

SEQ ID NO: 756626 - DNA, 598 bp, Homo sapiens
gttttaagtctggcattataaatattgtctttttcaaaaggaattgctattttatatttttaaagtcagactacttagcaaagcactcattttgggaaataatccagttgagcatctctcaaacttcaatgattttcataccatgttctaattctttttttaatttatttatttattattattatactttaagttttagggtacatgtgcacaatgtgcaggttagttacatatgtatacatgtgccatgctggtgcgctgcacccactaactcgtcatctagcattaggtatatctcccaatgatatccctcccccctccccccaccccacaacagtccccagagtgtgatgttccccttcctgtgtccatgtgttctcattgttcaattcccaccyatgagtgagaatatgcagtgtttggttttttgtggaatactatgcagccataaaaaatgatgagttcacatcctttatagggacatggatgaaattggaaatcatcattctcagtcaactatcgcaagaacaaaaaaccatgttctaattcttgacctgtccatgtaccacctctattcagttgatgtttttctttaaac

SEQ ID NO: 756627 - DNA, 670 bp, Homo sapiens
tttgaactgagaaaattctttttataagaaggatcatagagatgtagagaaataaagccccagaattaaccagaattggtaactttttttttaatagcaaaatagttttatccttcaatttgcttgaatttctcgttttcttttccaggtgacaaacccatggggaaatggagagtatcacacctcctaaaatcatgataatgtcactgagagaatctggctggttatttaaaggccctactttcctatctttagagacaacagaaataatcaaaagagaaaaagaaatgaactatctcaggtgcagaggtaaaagccaatgagctctaacaaactgctgcgtaaataagaattcagaacatttgggaggtgtcccttactttgatttacacttacataaaaaaatacactgaatgccactcaaggcaaaaccctgaagtccttgtgtctgtgttacagaattccagaaggctgttcccgcggcctcttcccactcttccagaatcctrtcttttccccatctacctcagtgacaagatgggaggccaacagtttttgggaagccctaggaatgataacattgaacttgggtggtccctttattggtggcaagagatactgcagacgtaaaattttgtagtgcatgaagtgaatgtcataatgaaaggca

SEQ ID NO: 756628 - DNA, 551 bp, Homo sapiens
tcaactttttaagtggttcttcattgttgctcttccagaattatcctatcaagcttttttttttttttttactttttaactttgaaattattgtagattcacatgcagctgtaagaaatacaacagttatccctttatccagcgtcactcaacggtaacatcttcagacctgtagtgcaatatcacaaccaggatattgacaatgatacaatcaaatagagaayatttttatccccacaaggatactgcatactgactgttcaggtgcatccacttccctctcacccccatccttttcttacctcctgcaaccactagtctgttctccattgctatagctttattatttcaagaatgctatctaaatagtatcatacagtgggtacccttttttacataggcttttttccccttcagcataaatctctggaaattaatccgaatcactgagtgtcttggtagatattggtccttttcgactgccaagtagtatcccatgctgtggaagtaccagtttgatgtttggttgttccaactttgaggctattgta

SEQ ID NO: 756629 - DNA, 591 bp, Homo sapiens
tatgttagaaaatcttaaggtaatatttagaagtaaaattttttcctgtttactgaagaaatatttgcattagttctactatcatttagaaaaatatattctgaaaaagtcatacttcgaaaaagctgtttgggattaaaaatagcarctttatagtagaaacctagacattcaaaccacaactctcattttcagtcagaattgacttttgatatgactttgaattcatctcagtgtcttgatttatccatcgataaaggagaaattaaaattattacctagctacaggagtcttgtaaggaattaatgtatttaaattttgttagcatctaagataaaaggttctagatgagtacaaaatattactcaaaatgaatgttatagttcatcttgcattcaggttaataaacatcactttagatcaaaggtttattttttgcatttctgcagaaatataaagaaaattatttatcttcaatattctgctgacagtaatttttttaagtgtcatgaactgttaccagggactgaaggaaatagttcttggcactttccaattccctattttgtggcattatctacagcatctat

SEQ ID NO: 756630 - DNA, 566 bp, Homo sapiens
aatcagggatattggcttgtatttttttcttttttgatgtgtcttttaatggttttggtatcagggtaatacaggccaaatagaatgagtttggaagtattccctcctaatcttttttcagaatagtttgactagaatttatattaattcttcttcaaatgtttggtggaactcagcagcgaagccatcatgtctggggccattttttgctgggagactattatggcttcaatctcgttacttgttattggtgtactgaggttttagatttattcatgcttcactcttgtagggctatgtatgtttaagaayttgaacatttcttctgggttttccaatttattagtttgtagttgcttattgtagtttctagtgatcctctgaatttatgtggtgtcagttgatagtatcctttttcgtctctgattttatttgggtattctgtctttttttcttcatcttgttgaccctttgtattgttttttgttttgttttgttttgttttaatatcattcatttctgctaatatctttatctcttttcttttactaatattgggtttggtt

SEQ ID NO: 756631 - DNA, 635 bp, Homo sapiens
accactgattttcactgctatgtataacagttatgtttcagatcttgttaaacatacttttttttattgtctatgtcacaggatccttagggtgtcgcttttccagctggaaacctctgtggccagtggtgccttggcccgagttttgctcgggctgctggtcttattwttccacccattcagcctggcagcctgtgctccgctcacactactggcccagatccatgactgccaagggcaagccaggcacagagtggacagggttaagtgagtgagtccagggtccggccatggtgcacaaccaggcatgccggctgtggtggggcgggaagctccaggcgccagtacagatgccatcttcgtgcgaagctttggctggaccaggtgtaccataagcagattccaccacaggcaccaggaacatggtggcactcagaagcttggagattccaggaaccacagagcaccaaagaaagtgacagccctgggtcagggtcgccctaggtctgggctctccaaaaggccgcagctcttctctcctcttgttgcctgcaaggtggtgagtcagggagcagtgggggtggggaagggtatgtgtttcagccttgtttgtgttacagttctttcagccccac

SEQ ID NO: 756632 - DNA, 635 bp, Homo sapiens
accactgattttcactgctatgtataacagttatgtttcagatcttgttaaacatacttttttttattgtctatgtcacaggatccttagggtgtcgcttttccagctggaaacctctgtggccagtggtgccttggcccgagttttgctcgggctgctggtcttattattycacccattcagcctggcagcctgtgctccgctcacactactggcccagatccatgactgccaagggcaagccaggcacagagtggacagggttaagtgagtgagtccagggtccggccatggtgcacaaccaggcatgccggctgtggtggggcgggaagctccaggcgccagtacagatgccatcttcgtgcgaagctttggctggaccaggtgtaccataagcagattccaccacaggcaccaggaacatggtggcactcagaagcttggagattccaggaaccacagagcaccaaagaaagtgacagccctgggtcagggtcgccctaggtctgggctctccaaaaggccgcagctcttctctcctcttgttgcctgcaaggtggtgagtcagggagcagtgggggtggggaagggtatgtgtttcagccttgtttgtgttacagttctttcagccccac

SEQ ID NO: 756633 - DNA, 593 bp, Homo sapiens
actctggacacacaatctttaagaactgtcacactcaccatggaggtccatggcttcactcttgaagtcagcgagatgaagaacccacaagaaggaaccaattccggacacaatgtttttatgaccctcatttaatgtttagaaccagctaacatgttctttatttcacagttgcacagatttaaagaaacagtaaacaaagagcaataattacagattttatttgaggaaacktatttactcctgaacataatttaaataatgacatgctggactgtgagtgaaatctctattgggatgagacttttggggatgtttctgacccttaaaattatgagataataaatgttcactgttgtaagctgctaaattttgagtaatttcttacatagcaattatcactaatgcacagccctgtgagctctctccccctatattgaaatccagtagaaaaatcatcaataatgtaaaacccaagcaggttgctgctactggctcaggcggccagcttttattcccttatttggccccgcccatatcctgctgattggtccattttacagagtgctgattcgtccattttacagagtgct

SEQ ID NO: 756634 - DNA, 598 bp, Homo sapiens
acatgcctcttgaactacatattttattgaatggcttaccttaccttaactttcacatcaactgctccactgacttattcattaggggaaaaagacattcctgggcttttagaataatctctttgtggagctgattcacttttggccatatttctttataaccacagcatgttcatactttacagagttccgatgggctgggttccaaagagtgttagraacataggcaaatgggacttgccaaactgactgctcttaatggccacttccaagagagcttcaggccattaaaagtcacctattctgttttgctgggcacacagccagttagttccacagcgagtgttgtattgaaacccagggcctagctgatactttaggaaattttccttttttcttttctcattccacttctccactctagaaataaacttcaaattacagactgattgtaaagaatcactcaataaaataattaatttaaaggccatagccttttattcacttattatagataataatttcctagtctacatttcattacagcaaaaaaaggtaagcacaaaaacgactgtttatacctgtgcaataagtttgt

SEQ ID NO: 756635 - DNA, 598 bp, Homo sapiens
acatgcctcttgaactacatattttattgaatggcttaccttaccttaactttcacatcaactgctccactgacttattcattaggggaaaaagacattcctgggcttttagaataatctctttgtggagctgattcacttttggccatatttctttataaccacagcatgttcatactttacagagttccgatgggctgggttccaaagagtgttagaaacataggcaaatgggacttgccaaactgactgctcttaatggccacttccaagagagcttcaggccattaaaagtcacctattctgttttgytgggcacacagccagttagttccacagcgagtgttgtattgaaacccagggcctagctgatactttaggaaattttccttttttcttttctcattccacttctccactctagaaataaacttcaaattacagactgattgtaaagaatcactcaataaaataattaatttaaaggccatagccttttattcacttattatagataataatttcctagtctacatttcattacagcaaaaaaaggtaagcacaaaaacgactgtttatacctgtgcaataagtttgt

SEQ ID NO: 756636 - DNA, 598 bp, Homo sapiens
acatgcctcttgaactacatattttattgaatggcttaccttaccttaactttcacatcaactgctccactgacttattcattaggggaaaaagacattcctgggcttttagaataatctctttgtggagctgattcacttttggccatatttctttataaccacagcatgttcatactttacagagttccgatgggctgggttccaaagagtgttagaaacataggcaaatgggacttgccaaactgactgctcttaatggccacttccaagagagcttcaggccattaaaagtcacctattctgttttgctgggcacacagccagttagttccacagckagtgttgtattgaaacccagggcctagctgatactttaggaaattttccttttttcttttctcattccacttctccactctagaaataaacttcaaattacagactgattgtaaagaatcactcaataaaataattaatttaaaggccatagccttttattcacttattatagataataatttcctagtctacatttcattacagcaaaaaaaggtaagcacaaaaacgactgtttatacctgtgcaataagtttgt

SEQ ID NO: 756637 - DNA, 599 bp, Homo sapiens
aaggtgtgtatatgaaccagtgacggggctgggtacatatctgtactcgtggagggcaaaagtccacacagataggaaaacacacagtcagaagaaagcctgaggacctgtctcagcagctcccagagactgtgaggagggctctgtatagtcacagcctgaaattgtgtttcaggtcaggtttaaccagatctccraggatcagaaggattcaagataatgtatgtgtcccttggggcagataaatatatgaaaaatggtttctaggaaagaacaggatggggagtcaactgttggttctggcttttctcctgattaaggagaaggaactccatttaaactataaaatgagggtgggaggagagaggatcagaaaaaattactagtgggtactaggcttactacctgggtgacaaaataatctgcaacaaacctttgtgacatgagttattgatagaaaaaactggcacatgtactcctgaacataaaagtttaaaaaaaaaaaacaactataaaacgagaagcgttttgggactagattaagccaaaatattcttcccctactctggaaccaggaagatattctctgtattatctcc

SEQ ID NO: 756638 - DNA, 544 bp, Homo sapiens
tctcagagccaatatggccaagataaacagtttattagagaaagaccaacaatcagcaggagggagacacagattctaacagttgcaaacatgtgaccctgcctagactgaattattagtacaggccagaaaagagaagaagatttcagattgggcaatagtaggaaaatggaattaggtattgtatagtggattagaattgtttatttggaggacagtgtgtgtttctcttgtgatggtmtgatatatttgacagtgcaagtatttaaatgagaatcaaatttatgtctactttaccctctagaagacaaggcagttttgtaaacataaaaaataagactatttctcgtctacctgtaataacctcttattgctttttttccattagtccctacagatcatcttagttatagctaatttctacataatcaagcttatctctaatactgacagatttaattttaaagggtagtatgaaaatctttttaaaacaatattgcacattacctattactcttcatgattcgggatatcacaatgaata

SEQ ID NO: 756639 - DNA, 616 bp, Homo sapiens
cggaaataaaaactcaaatgtgaattcattttgaagctggtaattacattttgtttctaatgtagttgtaagaaagacttataaaaactggatttcaaatagcttttgcaaaataacctttgcgtttagttaaataatcagggccaggcrtggtggctcatgcctgtaatcccagcactttgggagactgaggcgggtggatcacatgaggtcaggagttcgagactagatggagaaaccccatctctactaaaaatacaaaattagccgggcgtggtggtgcatgcctgtaatcccagctactcagaaggctgaggcaggagaattgcttgaacctgggaggcagaggttgcagtgagcaagatcacgccattgcactccagcctgggcaacaagagcgaaactccgtctcaaaaaaaaaaaaaaaaaaaaaaaatcagaagggaatttcaattttccttgaaatactactagatcttagaaagtaggggcgttatcaccgcaaaaacatgccaaattgtaaggaccatcgatgctaagaagagactgcatcaactaacgagcaaaataaccagctaacatcataatgacaggatcaagttcacacataacaata

SEQ ID NO: 756640 - DNA, 616 bp, Homo sapiens
cggaaataaaaactcaaatgtgaattcattttgaagctggtaattacattttgtttctaatgtagttgtaagaaagacttataaaaactggatttcaaatagcttttgcaaaataacctttgcgtttagttaaataatcagggccaggcatggtggctcaygcctgtaatcccagcactttgggagactgaggcgggtggatcacatgaggtcaggagttcgagactagatggagaaaccccatctctactaaaaatacaaaattagccgggcgtggtggtgcatgcctgtaatcccagctactcagaaggctgaggcaggagaattgcttgaacctgggaggcagaggttgcagtgagcaagatcacgccattgcactccagcctgggcaacaagagcgaaactccgtctcaaaaaaaaaaaaaaaaaaaaaaaatcagaagggaatttcaattttccttgaaatactactagatcttagaaagtaggggcgttatcaccgcaaaaacatgccaaattgtaaggaccatcgatgctaagaagagactgcatcaactaacgagcaaaataaccagctaacatcataatgacaggatcaagttcacacataacaata

SEQ ID NO: 756641 - DNA, 616 bp, Homo sapiens
cggaaataaaaactcaaatgtgaattcattttgaagctggtaattacattttgtttctaatgtagttgtaagaaagacttataaaaactggatttcaaatagcttttgcaaaataacctttgcgtttagttaaataatcagggccaggcatggtggctcatgcctgtaatcccagcactttgggagactgaggcgggtggatcacmtgaggtcaggagttcgagactagatggagaaaccccatctctactaaaaatacaaaattagccgggcgtggtggtgcatgcctgtaatcccagctactcagaaggctgaggcaggagaattgcttgaacctgggaggcagaggttgcagtgagcaagatcacgccattgcactccagcctgggcaacaagagcgaaactccgtctcaaaaaaaaaaaaaaaaaaaaaaaatcagaagggaatttcaattttccttgaaatactactagatcttagaaagtaggggcgttatcaccgcaaaaacatgccaaattgtaaggaccatcgatgctaagaagagactgcatcaactaacgagcaaaataaccagctaacatcataatgacaggatcaagttcacacataacaata

SEQ ID NO: 756642 - DNA, 619 bp, Homo sapiens
atagattcaaaagcaaaagagattactgtgaagagcagataaatgaagtgtaagcacatttagtgttaaagacaatttttttttcactgctacaatatctggtactgcagacacatggaaatttaaaggttttttcccccacagtggaaacgttatgcttagattgcatgttgctcatctaatatccttgatatgagctttaataatattgaaagacttgctattcagctgcctaacagttctaaagtggatatctggcctagccaccagattgaagaatgtgaaagagcttattcagccackttaatgaacaaagtcaatgactactccgttacttcctgtcagttcactcatccctccatccctcctcctgtctacgttttcattaaaatgttgattgaatattccctacgtctctggcactgctcaaagtgctggagctacagcagggaacaaaataaacaaggttctgttcatatggaacttacattttagtggatgttgggttggagaaatatgacaaataaagataaataagaacataatttatcaggtaagagtagatgataattaggaagataaagcctgtgaaagaaataaagcatgatggaggggtgtg

SEQ ID NO: 756643 - DNA, 532 bp, Homo sapiens
tctgatagaggtacttcaattatgaggattttataaacgtgttctaagtattcaatgcttaatagtggggttgctatactattgggtgagatatcaacctggtgtgctggcagacttacttctacacagaaagagactttttgagaatgaagccaatacaagcaaaacagagcctagatgttgatgacacctgatggtcctggatacaaccatgcctgaagctggttttcctgctgcatgagstaatattccagcttttacttaacccatttttagccaaatttctataacttgcccttaaaagtcctaattaatacatttgtccagcatgtcacctgcttttatcatttttaagacaaaagttatctaactcagcctgaaatgtaaaatctcaaagaaaagtgcgttgaatatgtgctgctgaaatgtgtgcttccatcattaaaaaaatccacctgacatttcaatttaaataatggacttacagctttcattaatatttaaaatagcattgtatgttttgcaagattaa

SEQ ID NO: 756644 - DNA, 667 bp, Homo sapiens
aaggatcaggaaaaataaataatgggtagtaggcttaatggtgatgaggccagacacggtggctcacacctgtaatcccagcactttgggaggccgaggcgggcagatcacaaggtcaggagatcgagaccatcctggctaacacggtgaaaccccgtctctactaaaaatacaaaaaaaattagccgggtgtggtggcgggcrcctgtagtcccagctactagggaggctgaggcaggagaatggcgtgaacccgtgaggcggagcttgcggtgagccgagatcgcgccactgcactccagcctgggagacagagccagattccgtctcaaaaaaaaaaaaaaaaaagtgatgattaataggtgattaaataatctgtacaacaaaccctcatgacgtgtttaccgatgtaacaaacctgccatgtacccctgaacttaaaacaaaagttaaaaaaaaaagaaattctgtttctattttttatttttaaggatatagatcggttccctccatctactcacccacacatccatttttaaaggctcctctcaacaaaacatgtttcttttgaagagcatgttgcttttcactgttaaaatatcgcctttaccttgcatggacattctaagcttccccacatgcccccaaatctgaatttcaggccgaa

SEQ ID NO: 756645 - DNA, 667 bp, Homo sapiens
aaggatcaggaaaaataaataatgggtagtaggcttaatggtgatgaggccagacacggtggctcacacctgtaatcccagcactttgggaggccgaggcgggcagatcacaaggtcaggagatcgagaccatcctggctaacacggtgaaaccccgtctctactaaaaatacaaaaaaaattagccgggtgtggtggcgggcacctgtagtcccagctactagggaggctgaggcaggagaatrgcgtgaacccgtgaggcggagcttgcggtgagccgagatcgcgccactgcactccagcctgggagacagagccagattccgtctcaaaaaaaaaaaaaaaaaagtgatgattaataggtgattaaataatctgtacaacaaaccctcatgacgtgtttaccgatgtaacaaacctgccatgtacccctgaacttaaaacaaaagttaaaaaaaaaagaaattctgtttctattttttatttttaaggatatagatcggttccctccatctactcacccacacatccatttttaaaggctcctctcaacaaaacatgtttcttttgaagagcatgttgcttttcactgttaaaatatcgcctttaccttgcatggacattctaagcttccccacatgcccccaaatctgaatttcaggccgaa

SEQ ID NO: 756646 - DNA, 667 bp, Homo sapiens
aaggatcaggaaaaataaataatgggtagtaggcttaatggtgatgaggccagacacggtggctcacacctgtaatcccagcactttgggaggccgaggcgggcagatcacaaggtcaggagatcgagaccatcctggctaacacggtgaaaccccgtctctactaaaaatacaaaaaaaattagccgggtgtggtggcgggcacctgtagtcccagctactagggaggctgaggcaggagaatggcgtgaacccgtgaggcggagcttgcggtgagccgagatcgcgccactgcactccagcctgggagacagagccagattccgtctcaaaaaaaaaaaaaaaaaagtgatgattaataggtgattaaataatstgtacaacaaaccctcatgacgtgtttaccgatgtaacaaacctgccatgtacccctgaacttaaaacaaaagttaaaaaaaaaagaaattctgtttctattttttatttttaaggatatagatcggttccctccatctactcacccacacatccatttttaaaggctcctctcaacaaaacatgtttcttttgaagagcatgttgcttttcactgttaaaatatcgcctttaccttgcatggacattctaagcttccccacatgcccccaaatctgaatttcaggccgaa

SEQ ID NO: 756647 - DNA, 405 bp, Homo sapiens
tttttgtatatggtaaaaggtaggagtccagttttgttcttctgcatatggctagccagctgtgctagcacaatttttgaataggaagtcctttccttgttgcttatttttttcatttgtcaaagatcagatggctgtaggtgtgtggctttatttctgagttctctattctgttccattgatctatgtttttgtaccagtaccataytgttttggttactgtagacttatagtatagtttgatgtcaggtaatccgatgcctctggtgtgttgttgtttttgcttaggattgctttgggtatttgggctcctttctggttctatatgaattttagaataaattctaaataattttctaatgtctgtgaaaaataatattgctagtttgataggaatagcattaa

SEQ ID NO: 756648 - DNA, 521 bp, Homo sapiens
aaaaagtttacagtccttaacactgcaagaactgccattttacaaagcaccatcctgttctttatcactggggtctgacagcagctctgaccttttcagaacatctttactgaaagaagattttttaaatagataataaatgaccagagctttattgatattataatgtgtaatagttaaaacaggttatagttattagaccakgggaaatgatgccttattatacaatcaactgttccctgtgtgccagcttcttttactgacaaaacattttttctaagttttaaaacttgcagagcctataaaactgcacaggaacaagctggattgcattctgctcaacacatcatcactgcaattgtcagctaaattcaaatgctagacctgttagggccattgctgatctcagagaaggaaagaacacagctgggtgtttaactcctggagtacttctggggtggggctcccttttaggggagagaaaaaaatcctaaaatgccaaataaggctcattttctatt

SEQ ID NO: 756649 - DNA, 648 bp, Homo sapiens
aagaaatgctcagggtgataacgagacctaaaatattgccataaaaatcatgcctaccatgtatgcattcattccattcctttgacaacattttttgagcacctattgtgcgtcagccactctacctgaaactccttcctcacctggtgcctttaacttctcaacaagccaattaggtagatcttagtaaaccaatttttcagacaaagagattaaattttgacccaaaccaaaaagctaataaatgacaaaaccaggtttcagacactgatgtgattctaaagtttatgtttttaagaactgttctgtgytttatctccatggtgctgaatgtttttgataggtgaagaggagtgtcttaagagcaggggcttaggacttgtaaggtcagactgttaggccctttccatgggtgccgagttcaccaagaataatgggagagggaaatgtgagcctggcactgaagtcctggaagaaggtgaaggtgtgttgtaaaagtgtaataataagaggaacttcgaaggagacgaggtcacagaggtataaagtaagagcatccctggtttgcaagaagatcaaatgcttgggcccggtgcagtggctcacgcctgtaatcctagcattttgggaggccaagatgggtggatc

SEQ ID NO: 756650 - DNA, 578 bp, Homo sapiens
gtctggtgtcagtgaagaggatgtggttgccatttctgccataaaatccctcttgttgtcattattgtccttacagtgctgaagaaatggctctcacgcccacaaacctaaataacaaaatgtctctgcagatgaagatggactgccaggaacaacagctgactaagaaaaacaatggctttttccaaaagctcaatgtgactgaaggtgcaatgcaggagtaagtcagaactgagcttgcagaagcagyttctagggtcccaactgcagacattcttgggccagcggtatgcaaacgatgagatttccaggttcagagtctaggttgacagtcttccctataatttatctaattttaatctcatgaatatttactgtagtaggccttatgagaagctaaaggggcccaccatcataaactgggcagatacagatacccattaaaaaaagtaatctcaatttgggaaaatatgtggattgttttatggcttcattatcttcacttgctgaagatctaagccatttaaaatactttctggcatagagggagtacaaacagtggtataaacacatatata

SEQ ID NO: 756651 - DNA, 578 bp, Homo sapiens
gtctggtgtcagtgaagaggatgtggttgccatttctgccataaaatccctcttgttgtcattattgtccttacagtgctgaagaaatggctctcacgcccacaaacctaaataacaaaatgtctctgcagatgaagatggactgccaggaacaacagctgactaagaaaaacaatggctttttccaaaagctcaatgtgactgaaggtgcaatgcaggagtaagtcagaactgagcttgcagaagcagcttctagggtcccaactgcagacrttcttgggccagcggtatgcaaacgatgagatttccaggttcagagtctaggttgacagtcttccctataatttatctaattttaatctcatgaatatttactgtagtaggccttatgagaagctaaaggggcccaccatcataaactgggcagatacagatacccattaaaaaaagtaatctcaatttgggaaaatatgtggattgttttatggcttcattatcttcacttgctgaagatctaagccatttaaaatactttctggcatagagggagtacaaacagtggtataaacacatatata

SEQ ID NO: 756652 - DNA, 578 bp, Homo sapiens
gtctggtgtcagtgaagaggatgtggttgccatttctgccataaaatccctcttgttgtcattattgtccttacagtgctgaagaaatggctctcacgcccacaaacctaaataacaaaatgtctctgcagatgaagatggactgccaggaacaacagctgactaagaaaaacaatggctttttccaaaagctcaatgtgactgaaggtgcaatgcaggagtaagtcagaactgagcttgcagaagcagcttctagggtcccaactgcagacattcttgggccagcggtatgcaaacgatgagatttccaggttcagagtctaggttgacagtcttcmctataatttatctaattttaatctcatgaatatttactgtagtaggccttatgagaagctaaaggggcccaccatcataaactgggcagatacagatacccattaaaaaaagtaatctcaatttgggaaaatatgtggattgttttatggcttcattatcttcacttgctgaagatctaagccatttaaaatactttctggcatagagggagtacaaacagtggtataaacacatatata

SEQ ID NO: 756653 - DNA, 572 bp, Homo sapiens
agtaaacattgtgaggaggacagctggcggggtggagatcaagagggcactgtagacctactcctctctgcccatttaaaccacataaggtttttaaactccactttttaaaacaggatattaatttacttatttgttgattgtgcacactyatttatacatacatatgcacagaactgcaattactttggaatttggaatctcactgttaatttatggattcagccaattattatttatccagcccctctatttctacttgtgagatataatatgtgaggtgttattcacccagaaagaactcagtacaaggatagcagatgctccctgggactggggaagatctcagtgttctccctttagaaaggagtagtgcaggcccaagctctggcccaaaggcataataacagcctctgtttggattgtgtggcttgcagtttgctaaaggaaattatcaaagtggaccacatcttagacagatcggatgatgaggatgacatttcctccgaaaaccctcaaactgacttccttcacaaggtagacactgaaaaatgggtaagagagacacttaa

SEQ ID NO: 756654 - DNA, 572 bp, Homo sapiens
agtaaacattgtgaggaggacagctggcggggtggagatcaagagggcactgtagacctactcctctctgcccatttaaaccacataaggtttttaaactccactttttaaaacaggatattaatttacttatttgttgattgtgcacactcrtttatacatacatatgcacagaactgcaattactttggaatttggaatctcactgttaatttatggattcagccaattattatttatccagcccctctatttctacttgtgagatataatatgtgaggtgttattcacccagaaagaactcagtacaaggatagcagatgctccctgggactggggaagatctcagtgttctccctttagaaaggagtagtgcaggcccaagctctggcccaaaggcataataacagcctctgtttggattgtgtggcttgcagtttgctaaaggaaattatcaaagtggaccacatcttagacagatcggatgatgaggatgacatttcctccgaaaaccctcaaactgacttccttcacaaggtagacactgaaaaatgggtaagagagacacttaa

SEQ ID NO: 756655 - DNA, 637 bp, Homo sapiens
aaaaccctcaaactgacttccttcacaaggtagacactgaaaaatgggtaagagagacacttaaatgacacagtaggttgaagagaagaacttcacgccgcatatcttaaagtggtaagaaaatatctgagggttttcttctaattggtgcagaacttcaaagcttgaaatcaggagggaggcagggaatatggcattgttcccactggatgctgctgttaccacatgaaggacttactagccttcccatgcgaacaaaaaagaaaaaaaagtgaattatatgttatttttgtcctcgggaatttatgaaataactgtgacatttctcaccttcgagcaaatcaccatatgaccaaatcaccatatgaccataccccctcctcacagattatcttccartagaattcagctattcacccctaatgcagcctccaggagagaatccttcttcaggcttctgggactccaggccttcagtggcttgtagctacataactcctggtctcttgtcttcatcctcacatggtcttctctttgtctgtcttctcctcctctgtctctcattaggatgtttgtcattggatttaggaacccattcaagtaatctgagatgatcttatatcaagattcttagttt

SEQ ID NO: 756656 - DNA, 423 bp, Homo sapiens
ttcacctggatcagggctcttggctaggaataagaaaggagaaaattagtagaatagtttaaaaagaagaagaagacaaaaacctatgttctataaaatccaattcaaaacaatatgttaaatgaaaaaaaaagcggtgggggatggggcrgagatgggaggaggattatgagaaaataagtattgcctgaatgtgctccagagaaattcacattaactaacaggcactgagtatattcaatccctccctcagcacagagctctgattatttggcctaaccaggactgaatacacaaaaacatttataaacatgaaccattatattttttgagttttcatcataggacttgtttaagtaagtcaaagatgttctttgttctacagttttgatcaaatgaagagactttagtcatttcctcaga

SEQ ID NO: 756657 - DNA, 607 bp, Homo sapiens
atcctcacaaacatcctgtaaggtaagtgttattagcatcattttgacatgaggaatcaaagactctccagggttatacaagtaaattgctccagattcccccagaactgggattgaaaccaaggtctatttgattccaaacctattttgtctttctgtgtctgaagcattgattgtccacaatttacactctcacttctgccctttgcagtaacagaacaagctgactctttwgttacaccatccccaaatctgagcaggcttgaggacacctccctttctttggatgcaggtaccagaagaggctcaccctactcatcaaatccacagcatttgcctgtctggtctttacaggcttccagctgcagctctctaaagcacaaccctgatcactcctgactctaaacacttaaatgagtctccctttaccaaggaacaaaactcatcaaactttcttgactggtgtccaaaagccttcacatccttgcccccaacttacctttctgaacttattttcgactcttcttcatatgcccacactgcatgcactgcatgactttgcacccatatttcctaataatacatcctcactgtgatttttgcctgt

SEQ ID NO: 756658 - DNA, 559 bp, Homo sapiens
aactcatttgataactctgaacttaagttaaagaaaacattattcaatgatacttgttaaagcatggaacaaaggatcattgctacagggctttgcagtgggggagagagattgcgttcgattctgaatattgcatggacaagtgggcatttatagccaaggagcagggtgggagtcagtggatggaaaaatactaagaggaatgttggggtaagggggattctggctaaattaacctaacaggattcttgctgaagataggccagggtgatcggacacctgggggatggtggaggatgaggagactgatcagataccgagagtgggaggttcttgctaaactgacttagcagggttctttgctaaacttggattttacaaggaagtgcacgcagrggcctaggagaagatttatgagcctgactaaagtttggccagaaaaagaatctttgctacataactcatttgataactgaacttaactcattgccagatgaccccatatactgcccaggctggggatagagggtgactgaaaataaagacgaactcaagctta

SEQ ID NO: 756659 - DNA, 624 bp, Homo sapiens
gctaatatttgtatttttttttagtacagatggggtttcaccgtgttggccatggtgacttcagatgacttcacctgacttcaggtgatactcccacctcggcctcccaaagtgctgggaatacaggcatgagccaccgcgcccagctgaagattttcgatatataattttttaagtaggattcttaggaacacttacttagcaygagtatttacagcctttaattttggcatttctcaatgtaatttttaaaatattattatactcagaataaatgaaggtaaataacaaagtttccaagggctcttacctacgtggttggtgaccttttggggctaataattaagaaggatgggtatatatgaaattatttaaatctccatcggctactcgtgtacattttggttcattgattcaactggcctttgttaagtaatagataaaaataaaggtttttctagtgaatgcttgtttgttagtatgataataaattgtgaaatagcttagttctaatacatatctttttaaactactcacaactccagctctaacttgagctttgcattcttttgtgatatgttgtataccttttttcagagagcttatattcttgacctttctatg

SEQ ID NO: 756660 - DNA, 511 bp, Homo sapiens
tcccctgcttcccagctggtctggaattgctaggctcaagcgatgctgccacctcagcctaacaaagtgctgggatttacaggcacaagccaccgcactcagccagaagtatattttaccttattaatgtatactaagcaaaagaatagactgaataaaagaaaatttcaaagagaaggacttttatggaaatgtagttttattatttcaagtraaaaggttactaaaagaagtggccttagagcaactgctaaaaatgaatcctcccctagttcctttagtaacaaggaagaactgatagttaactctaataaagtttttctactatattgtaaaaaataagtaaaaaataaattgtattttgacctattcatgtatacagcaaagtacatataaggattatgggcttgggagtcagagtttaggttctaatataaactatgccaactttctaatgatgtgaacctgagtaaactacttcacctctcttgaatctgtttcctaatctgta

SEQ ID NO: 756661 - DNA, 536 bp, Homo sapiens
tagaggtactcgggagggaggctgaggcaggagaattgcttgaacccaggaggcgaagttgcagtgagccaagaatcacgccattgcactccagcctgggcaacaagagcaaaactccatccctctcccaaagaaacaaaaacaagcgttaaggccrggcgcggtggctcacgcctgtaatcccagcactttgggaggccgaggcgggtggatcacgaggtcaggagattgagaccatcctgggtaacatagtgaaaccctgtctctactaaaaaaaaaaaaaaaaatacaaaagttagctgggcatggtggcacgtgcttgtaatcccagctactcaggaggctgaggcagaagaactgcttgaacctgggaggcagaggttgtagtgagctgagattgtatcactgcactccagcctgaggacaaagctagactccgtctcaaaaaaaaaaaaaaaaaacaggtgttaagaaccatagaatacacaacacgaagagtgagccctaatgtaaactatggcctttgggtgataatg

SEQ ID NO: 756662 - DNA, 495 bp, Homo sapiens
tatataatggtaaaaggccttgtccaacagaaaaatattacaatcctaagtaggatacacattctattcaacagtgcatggaactttctccaagataaaccatacgataagccataaaacgagcctcaataaatttaagaaaattgaaattatatcaagcactctctcagacaacagtggaataaaactggaaagcaactycaaaaaaaaaaaaaaccatgcaaatacatggaaattaaataacgtgctcctgaatgagcattgggtcaaaaatgaaattaagatggaaatttaaaaattattcaaactgaatgacaataatgacacagcttatcaaagcctctaggatacagcaaaggtggtgctaagaggaaagtttttgggcctaaatgcctacatcaaaaagcctgaaagagcacaaacagacaatctagggtcacatgtcaaggaactacagaaacaagagcaaaccaaacccagcagaagaaaggaaat

SEQ ID NO: 756663 - DNA, 627 bp, Homo sapiens
cagaatgacactgcttaaattatttgaggcttaagacatttgctacctggaaaggcaagctacccttgttgttctcttttttcaaaatacctgggctagttcctgtgtttattcttttcccagataaacttcagaaatcgtttgtgaagtttcaccgtatcacactaagatttaggatggagttgtagacacctaatttaaaaagaactaacaatactacaatgttgagtatgcctatttgggaacaattacagttctctatttaaatctgcttcatgcccatcaataaacttttgtcagatgtaaatgcgtggtggggcagtatttttggtgttcattattttgtttgttttcataaaagttgtgttaattcattttaagcttgtcaaatatttcatcctttttgttgctcttaggagagaaaaatgtgttaatgtacttaatagtaaatgttygggcacattagaagtcattaagaaatgcttaactgggtaacttaattaaagctggttctctgagactcttcactccgcatccctttattatctctctttgcatatttgcatgcatttgaaagtagaatatgatatacttaaaagtattttaacacacatcttccactggttt

SEQ ID NO: 756664 - DNA, 703 bp, Homo sapiens
  misc_feature 594: n = A,T,C or G
catgtcatcatttttatatactttatgatgacaaatatgaaagtttgaggaattagtgttgggaaattctaagggtagaacccatagttaggcttaggcctaagagtagtggagtggctgtgcatgaccacagatttgttgtgatgggaatttgcaggagggaggaagctgcttgtgaatggcaaaaaaacacaaagtactataactactgtgtttaacggccctgctgggagaacagaggagctgctcagtaactgtttgctccatgaaataataaattttttccccctcaaactgtttggttgaaaaatgggctatgccaaaggcagtgaagttaattatccccaggagaggcaggctaggtaagaaaagatggccctggggaccatgttggattgccctgagttgctggatgttccaggaggagggaagagatgatttagcttgagcttttcaaacatgttttgtttgtttgttttgcttcaaggatccagaaagtgggatttttttttaaatcccagaagttattttacggggattggtgtgcattggacaaamagcatgaagaaccaggagcagacactggccctgtcnatagcacttaggccttactacttcacagacgccccttcccactcttgactgccagtatctctatcctgtgtgagggttctctctaaattccctgaaggccactctaccc

SEQ ID NO: 756665 - DNA, 582 bp, Homo sapiens
tacccattcatgataaaaactctcaacaaactaggaatagagaggaactttctcaacttgaaaagaacatgtacagaaatcctagaattggcatgatgttaaagagaaagagaacatttcctctagggaacaaggaaaaaaatttagctcttactacttctgttcaacattgtaccaaaagtcctaactactgcagtaaggtaaaaacaagaaataaaatgcatacaaagtggggaaaaagraaaaaaagctttattcatacatatgattatgtgtgcagaatatctcaaagaatcaacaagaaaccctcctggaataaatcagtgattatagcaaggtccccgaacaaaaggttaatatataaaagccaattgctttccttttactagcaataaacaaatggatttgaaatttaaaaaaaatagtatcacataaaattgcaccagtgaaacttaagtataaatctgacaaaatatgtgtgggttctatatgtgaaaaactacaaaactctttgaaaaaatcaaaataaatgtagagatatccccatttattgatttagaagacttaatattaagatgttaa

SEQ ID NO: 756666 - DNA, 570 bp, Homo sapiens
tataacaagcacaaaacagtccctggtgtgcagtaaacattcaataagtgtcattattattatatttcatcttattaaaagttaaatggttatgctagtgtggaaaacagtaagaaaaagtctttagtgagaaaataattggaaatacaaaatcaatataaatatgttgtgttatgtaaggtcagcaaaaaaaaggcatagggaaaaaatagwgaatatgtattattcactccatcaccctgcaatgttctcaatcaaaaatcttagtataattttgaagcctattaattcaagactgaaaatatatttaagtaaaaacaattggattggcacattggccatatagcttaaagataggattaaggcccctgaaattatgtccctcatataatacacaattagatattgatcgtgaggctgaaacaccagcttcaatttaaatacttattaccaattgtatcagctcattgtattaccttatatattataaaatataagacaagtggttaaacggctaaaaatatttaatttcaaaattttgcttacaggcttttaagcaaactttgtcta

SEQ ID NO: 756667 - DNA, 468 bp, Homo sapiens
aatttgcagtctaatgatgtgatagaaaagaaaaacttatattctgggaagaaattcaagccagtagtagaagtttgcatgagtaacaaggagccaaatgctaattgccaaggcaatggggaaaatgtctccagggcatgtcagagaccttcatggcagcccctcccatcacaggcccagaggcctaggagggaaaaatggtttcctggggcaggtacaggtgcccacccaccctgtgaccactgtgtgcagcctcaggccttggtgccccayatcccagcccctccagccttggctacaaggggccaaggtacagtttgggtcatggcttcagagggtgtgagccccaagccttggcaggtgccatgtggtgttcagcctgcaggtgcacagaagtcaagaactgaggtttgggaacttctgcctagatttcagagggtttataggaatgcctgtatgtccagtcag

SEQ ID NO: 756668 - DNA, 638 bp, Homo sapiens
ttcttaaagaaaagaagtttaattgactcacagttccacaggctgtacagaaagcatggctacggaggcctcaggaaacttacaatcatggcagaaggcaaaggggaagcaacacatcttcacatggtggcaggagagagagagcaaagggggaagtgctacacacttttaaacaaccagatcttgtgagaactccaccaccagaacagcaggggggaagtctgcccacatgattcaattacctcccccataggctcctccttcaacacatagggattacaattcgaaatgagacttgggtggggacacagagccaaatcatatcaaggtgccacctcctccagaaggccctccttcatgtccttcatctctgtccccacagcatcctgggcttactgctgtgcaccagctcataaattcatgcactaaccacagacagcgtctgtctcctaaccagcctgggagttgcctgaaggcagggaacaggtttcttayttctgtattgccagcatctggcgaagagtaggtccataatgcagaatgaatgaaggaatgagtgaattaacacattgtcctgtttagtcctcatgactctgggatccctgttctggggctttgggacctcagaagcaaagaga

SEQ ID NO: 756669 - DNA, 634 bp, Homo sapiens
agttcatactaatataaataaataagcaaacaaataaatgaaatgattaaggagtaatggggtcaggcacagtggctcatgcctgtaatcccagcacttgggaggctaaggtgggtggatcacttgagcccaggaattcaagaccagcccgggcaacatggtgaaccccatctccacaaaaattacaaaaattagccgagcatagtggcaagtgcctgtagtcccagatacttaagaggctgaggtgggaggatcatttgagcccaggaggcagaggctgaaatgagccgtgattgtcccactgcactccagcctgagtgacagagctagaccctgtytcaaaaaaaaaaaggaaaagtggaatatttacattgtctcaaagtaactgcccccagattttattaataacttcacagtggaggaggctggccaacattgccttaatccagtaacaaagtgagcatcaccagcaatggggcaatccaaaatggcgccacctgataggatgcaatgaaaagaatacagctgcacttctgtgatgttcatgccaaagatgcctcatctaaatctgatcaaaaggaaacaacagacaaactcaggctgaggttcattctacacagtaactggttggtca

SEQ ID NO: 756670 - DNA, 634 bp, Homo sapiens
agttcatactaatataaataaataagcaaacaaataaatgaaatgattaaggagtaatggggtcaggcacagtggctcatgcctgtaatcccagcacttgggaggctaaggtgggtggatcacttgagcccaggaattcaagaccagcccgggcaacatggtgaaccccatctccacaaaaattacaaaaattagccgagcatagtggcaagtgcctgtagtcccagatacttaagaggctgaggtgggaggatcatttgagcccaggaggcagaggctgaaatgagccgtgattgtcccactgcactccagcctgagtgacagagctagaccctgtttcaaaaaaaaaaaggaaaagtggaatatttacattgtctcaaagtaacwgcccccagattttattaataacttcacagtggaggaggctggccaacattgccttaatccagtaacaaagtgagcatcaccagcaatggggcaatccaaaatggcgccacctgataggatgcaatgaaaagaatacagctgcacttctgtgatgttcatgccaaagatgcctcatctaaatctgatcaaaaggaaacaacagacaaactcaggctgaggttcattctacacagtaactggttggtca

SEQ ID NO: 756671 - DNA, 601 bp, Homo sapiens
gagcccgggaggtccaggttgcagtgagccatgtttgcatcactgcactcaagcctgggcaacagagtaagaccctgtcacaaaagaagaaaaaaaaagaaaaaaaatacatggcttaagatctttgctctaaccactttgcagctgtgtgcccttgggtaagccccttaacctctytgaaactcctcctcataatcacagtatggcccagggatgtatggattaaataagatcaagccccagaagcacttaacatagggcctagtcttggtgagggaggcagttgttattaatatgcccaaaagatcacatctccacaccaccaccagcctggctatttatgaaaaccccatcccctatacaaatttgaaacaaatcagagaattgttttagtgttttgagcagttgtttgtttagcttttttttttttttcctttcctgaaacaatgccaaagtccttaaaaacagccacaccccaccatggacttcctgtgaatggtcagatgatctgggagcgatgggagggaggcagagaagtgggtgaaaatccagcttgacttcctttccccaagatacaagccctggagcccaggggaggagc

SEQ ID NO: 756672 - DNA, 558 bp, Homo sapiens
agaaataaatccaagaaataggtgcaacctcgagataaacaggactcaggatgctgagaatgtttccacagctcaccttcaggattgtccatgttccactttactgttgaacgtgaacttcatgtgtcagttctctgtggctrtgcagcagatagtcccataatttaggggctttaaacagacaatgatttttttttttttttttttggcagtgtctggttgattgggcggtctttgcctaggggtggctcatgtggctgtgttcactggcaacaggctggtgggaatgtccaagaaggcctcttgtatttgcctggggccttggggccaggcacctctgttctcctccaggaatctcctggttcctctcacagggggatggcctggacttcttgagagcatggtggcctgcttacaagagcaggagcccccctgtgcaaatgtctatcaagcccctgcttacatagctcttgctaatatccagttggcaaagcaaatcacccggccaagtccagagtctgcatgagaaggggctacaccagggtgcaagtagtagga

SEQ ID NO: 756673 - DNA, 499 bp, Homo sapiens
caagaaataggtgcaacctcgagataaacaggactcaggatgctgagaatgtttccacagctcaccttcaggattgtccatgttccactttactgttgaacgtgaacttcatgtgtcagttctctgtggctatgcagcagatagtcccataatttaggggctttaaacagacaatgatttttttttttttttttttggcagtgtctggttgattgggcggtctttgcctaggggtggctcatgtggctgkgttcactggcaacaggctggtgggaatgtccaagaaggcctcttgtatttgcctggggccttggggccaggcacctctgttctcctccaggaatctcctggttcctctcacagggggatggcctggacttcttgagagcatggtggcctgcttacaagagcaggagcccccctgtgcaaatgtctatcaagcccctgcttacatagctcttgctaatatccagttggcaaagcaaatcacccggccaag

SEQ ID NO: 756674 - DNA, 631 bp, Homo sapiens
tcgctaatgctgtgttaatcttttagaagaaaaacaatgtccccaagagtccacctccaagagaacaagcaacttcctagcagatgctgaggcttgcaagactaatctgggcttggaagtgttaaaagaaaagattttaatttaaaaagcaaagaaagggccgggctcagtggctcatgcctgtaatcccaccacattggaagccaaggcaggcagactgcttaaagccaggagtttgagaccagcttgaccaacatggygaaaccccgtctctactaaaaattggctgggcatggtggcctgtccatgtggtcccagctacttgggaggctgagatgggagaatcacttgaactggggacccagaggttgcagtgacttgagatcgcaccactgcacttcagcctaggcaacagagcaagactgtctcaaaataaaataaaataaaaagcaaagaaagtccttgaacccattggaaacatctttcaaggagcatgaaaccaacccttttatcacgtaacaagtattaatggaaagacatgagacgttgcaaagtattactagatgctggagtctagagattatctatttgacatttaggcagagagcaaggaaaaaacacaaagtactaa

SEQ ID NO: 756675 - DNA, 604 bp, Homo sapiens
gaggacccacgaggatctcctggatccatggagcccggctgtgctcacagctctgctgcctgctgccccctcaccagcctctcctcaccccagagcggccacccctcatgccttgtctgttcccaagccctttttgggactgtcaccagccctggctcccctgctgacccaggaagggagcatagcccctgtctctgcttctatggggcacccctatgacagcccaccctcctcagtaccctgcccgctgttaggactcagtttacctccttggacagtatcttatccccggttgagttaggtagggctaatgcacaccctgggtgttggggcttcctggaattacaggaactactgagggacagggcaggaactcccctacctgccccaccccacaaggcccctcgtgggagtaggggtggaagtgtgtgcgtgagaggcagtttagaagggtagcyggagcaccagctgggacccagagctgccaggccccagtcctggctctgccatttcctagcaacatgactttgtgcctcaacttccccatctgagaagaatcatcgtgatgattcaaattgaagtgctcagtcacaatgatccattg

SEQ ID NO: 756676 - DNA, 592 bp, Homo sapiens
tgtttattcgtctattgatggacattgggttgcttctacattttcgctagtgtgaataatgctctgaacatgtgtgtgcaaatattcttctgtggttgctatctgttctttggggtatatacctagaaatggaattgctgcacatatggcaatgttgagtaaactttttttttatttattttttttttgagatggagtttcgctcttgttgcccaggctggagtacagtggcggaattttggctcactgcaaactctgcctcccattttctcctgcctcarcctcctgagtagctgggattacaggcgcctggctaatttttgtatttttaggagagacggggtttctccatgttggtcaggctggtctcgaactcccgacctcaggtgatccacccacctcagcctcccaaagtgctgggattacaggcgtgaaccaccgcacccaactgaataaacattttgaagagctccatatgtctttacaagtggtgttcagcttagttcagctgctaggggcagtgttatactgaaataggttagtttggatgaatatccaggtgtctggatgtattaagaacgagagtccaggc

SEQ ID NO: 756677 - DNA, 658 bp, Homo sapiens
cacctaacctacccagcatcacatcttagtccagcctatgtgctcagaacacttatattagcctatagttgggcaaaatcacctagcacaaagcttattttataataaagaggtgaacagctcatgtaattttctgaatactgtactgagggtggaaaacagaatggttgtatgggtacttgaagtacggtttctcctggatttgcattgcttttgcagccttgcaaagacaaaaaatggtttaagttggggactccacaaaaagtggcactctgcacaccctgttctgcaccggctttgttttggtttggttttcacatactgaatcctggaaatgactccatatcagcacataagaagttgcactgctttttttttttttttgagacagagtcttgctgtattgcccaggctgcagtgcagtggtgcgatctcggctcactgcaacctccgcctcccrggttcaagtgattctcctgcctcagcatcccgagtagctgggattacaggcatgtgccaccacacccagttaatttttgtatttttagtagagacggggttttgccatgttggccaggctagtcttgaactcctgacctcaggtgatgcacccgccttggcctcccaaagtgctgggattacaggcgtgagccaccat

SEQ ID NO: 756678 - DNA, 658 bp, Homo sapiens
cacctaacctacccagcatcacatcttagtccagcctatgtgctcagaacacttatattagcctatagttgggcaaaatcacctagcacaaagcttattttataataaagaggtgaacagctcatgtaattttctgaatactgtactgagggtggaaaacagaatggttgtatgggtacttgaagtacggtttctcctggatttgcattgcttttgcagccttgcaaagacaaaaaatggtttaagttggggactccacaaaaagtggcactctgcacaccctgttctgcaccggctttgttttggtttggttttcacatactgaatcctggaaatgactccatatcagcacataagaagttgcactgctttttttttttttttgagacagagtcttgctgtattgcccaggctgcagtgcagtggtgcgatctcggctcactgcaacctccgcctcccaggttcaagtgattctcctgcctcagcatccygagtagctgggattacaggcatgtgccaccacacccagttaatttttgtatttttagtagagacggggttttgccatgttggccaggctagtcttgaactcctgacctcaggtgatgcacccgccttggcctcccaaagtgctgggattacaggcgtgagccaccat

SEQ ID NO: 756679 - DNA, 648 bp, Homo sapiens
gagctcttgtctgctggaaacaagagtcaaccagagctaatgacctgttcttcctgggagaagtctttgctctaggaagcaggaagggaaactgaggactccttagaagatcaggagactgggatttctcctatcatttcagaatctagggatatcagcctggaaggagatgtagggattgtctggtgtggtgagcttccttgacagattaagaaacccaggcccagagatggggagggatctgtcygtgactggtggcagagtggaacttggagccagtgtcccaaccccacactcagggttctctccctcatccccaccttcccttgggtgcactgtctaaattccccccgaggtggctcagccccacgtggctcagggagaaggcagggatcgtttgtgtgtgccgaggaagaaggttgtgttggtcctctctttgctctgtcctcccttctggtctagggaggagtctgaggggcaggagacatttctggggactttggtcagggctttgtggctttccgcatgcagcctgtgttttagggttagggttagggggtgtctcagctggtcaggacactcctctcctactcagggaattccaagtagttcaaaggtgggaggtgggacactcctgaaatattctga

SEQ ID NO: 756680 - DNA, 647 bp, Homo sapiens
ataggctgcgttccatggagggccaggccagcttgggaagagagtcctgtaatacaggctgggacaaccctcccacaccttaaagccctcacttcataacaaatgacagtgcagaactctggggaaatctgtgatatttgggaatgtcgtaagctaaggtcattcaactttgtcaaaaacccataatggaaggaaagctggcctcaaagtaaagctacttccctagcacagaaggcagctcccgacagtttcaggggttgtataagcctctcaggtaaagaataactcagaatcgactcagaggtcatccagcctgttctccccagcaaacaggattatccccaagccccgcaatggggggtggtctgggcatcattaacgcccctcaggaaagagttgccacccaattgtttctagctcacccatctttgtttgtccctgtgcagkttggaaagcaagagagggaagcaaggccaggtgccaggctgctctcaggggaaggatgctgggttaaaacatgccattccaaaccaaagctgacggagggtgcaagctgttagcatgcacactctaggtcatcaggaaagctgcaaggcaacttaataatttagcaaaataattcatgttctaggaatacagcctatttt

SEQ ID NO: 756681 - DNA, 541 bp, Homo sapiens
gccgcaagcagccaactctggcaaaattggtggggtgaaagagagcatttagtcccacctcctcattccacagtcaaatgctagaggaaggggatgcagtaatagctgagttgctcctattggaccacctttctgcaaatagcaactataaaatctagggggaaatatacaaaacaactacctgaaggcacttgagggaggacaaaagcaggctgatactggaggcaagtggacatttaagagaagggaatggtsctgggcaagttagcacaacaatactccgggcaactaaaattcagatagaaaacacacaaccttgctcgtttgaagaaccacaggacaaggccagggtggacccagcaggtagcaggtgaaaggggaaaccttaaaaggtgagagtcacaaaaagggagccccaacatctttgtaaaatccctgcccaagcgtctggccactgatttatccttatggaggacatattccaagcagcctagctaatgctaaaaatattaaactttcagagtttggaatttgtgtttag

SEQ ID NO: 756682 - DNA, 658 bp, Homo sapiens
gcctagcacacggtaagggcttggtgagggttagttgttatttgaggatgataaacacatgtattccgagcttccacaaagcaaattgtatttttctcttacttgctcttccatgacccaagtcgtcactactgagggggagaagggtggagagraagctggaaaaacctatgcttcattagtgattaagcatcactatagctgcccaaagggcctgtgaagctgccagagaagctggtgtgagcacaaaagggtccagggatgaggattagcaagcaagggaggggcgggagtttgaatcagcagctcagttcatgactcaggagacggttggagcatctgtttctgtagagtgctcaggggcagcctgtgtaggaaaaacagctcctctcccttcttcagaatgaaactctgtggagccctgatgtaatttgggagcctggagggcagggcccaggaagggcctcatgtgccttcttggcatctttgacaacttccgttctgaccccgccattatctagaggccgtatcacaccctataaccgtcccctctccctgggcagattatgtgtcctacttctgtcagccctcaggggggttcatctgcagcacactccttcatgcagacttcacttggccagggttccggtttctggaa

SEQ ID NO: 756683 - DNA, 658 bp, Homo sapiens
gcctagcacacggtaagggcttggtgagggttagttgttatttgaggatgataaacacatgtattccgagcttccacaaagcaaattgtatttttctcttacttgctcttccatgacccaagtcgtcactactgagggggagaagggtggagagaaagctggaaaaacctatgcttcattagtgattaagcatcactatwgctgcccaaagggcctgtgaagctgccagagaagctggtgtgagcacaaaagggtccagggatgaggattagcaagcaagggaggggcgggagtttgaatcagcagctcagttcatgactcaggagacggttggagcatctgtttctgtagagtgctcaggggcagcctgtgtaggaaaaacagctcctctcccttcttcagaatgaaactctgtggagccctgatgtaatttgggagcctggagggcagggcccaggaagggcctcatgtgccttcttggcatctttgacaacttccgttctgaccccgccattatctagaggccgtatcacaccctataaccgtcccctctccctgggcagattatgtgtcctacttctgtcagccctcaggggggttcatctgcagcacactccttcatgcagacttcacttggccagggttccggtttctggaa

SEQ ID NO: 756684 - DNA, 594 bp, Homo sapiens
actctcaaaaaataggcatggaaggaatttatcttaacccaataaaagccatgtatgacaagtccatagttaacataatactcaatggcgaaaagttgaaagcttttcctctaagatgaggaaaaaagcaaggaagcccactctttccacttctcttcaacacagtactggaagccctagtgccgggccactcaagtaagaaaaataaataaaagacattcatacaggaaaggaagaagtgaaagtttctgtttgcagatgacataatcttgtgtttagaaaactttaagactccaccaaaaactattagaactgatgaacaaaattcattaaggttgcaggttaaaaaatcaacatacaaaaataagtagcatttttgtacactaacaatgaactatccaaaaatgaacaatctcatttacaatagcatcaaaaaagataaaataggaataaayttaatcaagaggggtgaaaagtctgtacaatgaaaattataaaatgttgatgaacaaaattaaagaagacacaaataaatggaaagctatcccatgtttatgaattggaagaattgacattgttaaaatgttcatacta

SEQ ID NO: 756685 - DNA, 576 bp, Homo sapiens
tgtttttaatttgcatttccataatggctaatgttatttaacagctatttgtatgcttatttgccacaattatatcctctttggtaaaaagtctgttcaagttctttgcccatttttaaaattgggttgtttgtttttatgtggttgaaaattgacagttctttatgtattttggatacaaacctttgttgaatatataatatgtaaacattttctgtgtatgcctcagattttcattyatttccttttttcttctctttttttttctgaggcaggatcttactttgtcacccaggctgaactacagtggcacaatcacagctcactgtaacctctaatttctgggcttaaacaatcctcctgcctctgcctcctaagtagcttggactacaggcaaattctttaaacttttttgtgtagagatggtggtctcactatgttgcctaacctgatctcaaactcctggttttaagtgctctcctggcttggcctcccaaagcactgggattacaggcataagccaccatgcctagccagattttcattattttagcaatgctttacaaagagcagagg

SEQ ID NO: 756686 - DNA, 526 bp, Homo sapiens
ctcgtgtgtgtctgtgtctcttttctgaatgttttccacaatatttgcttaaacatccagtgttgacccatgcatataaaatagtctaagtcaaaccaacattgagtattaccaattaattgattcattcgatgcaaatcattcatttaaatgcctcaaatgtgctagcgtctgtgctgggggacargcaaacaaagacaagtaagggactgtttttgtcttaaagaccacacaatctatctaggagacaggtatgtaaagacatatgcgattccctgtgataatgaaaacaaaaaaagctgagatagtagaaggtacagggatactgcagatgtgcatgttgtcagctctgcgtggaaggcaagagtggtgctggagccgggtcttcaagaatagtgagggttttcaaactggggaggtgaggagaagtcagaaataaaaggatttagctgggcagaaatgtgaggtgtggaacagcacggaacatataggactgccaaaaagagcgtctacgttaaaaattacc

SEQ ID NO: 756687 - DNA, 622 bp, Homo sapiens
aattcaacaaaattcaatacttttttatgaacaaaactagcaaactatgaatagaagggaatttccttaacataatgatgagttttttttaaacttgtaattaatattcttaatggagagaaattaatgcttttagaatttgaaatgtttaaaaacacgtataataacaccaaaaagaaatactggagtataaatttaagaaaatgtttataagatctctatacagaaaacaacaaaaccctagtaaaggcaaacaaagatataaataaatggagagatagtctatrttcaaagacttactatattaaaatgttaatgctcccccaacttaacctactgactcaacccaattccttctaaatcccaggatgttttgggttttgtagacatcacaaaacgtattctaaaattatttagaaacacaaaggactgagaatagccaacacaatactgaaaaaagaacaaagttggaagactaaaactatctgatcaagacttagtataaaactacatcaaccaagacactatggtattgggaaaataattttaaaatacagcagtggaacagagagcttagaagtagacccaagaaaatatagccatttgatttttgacagagata

SEQ ID NO: 756688 - DNA, 622 bp, Homo sapiens
aattcaacaaaattcaatacttttttatgaacaaaactagcaaactatgaatagaagggaatttccttaacataatgatgagttttttttaaacttgtaattaatattcttaatggagagaaattaatgcttttagaatttgaaatgtttaaaaacacgtataataacaccaaaaagaaatactggagtataaatttaagaaaatgtttataagatctctatacagaaaacaacaaaaccctagtaaaggcaaacaaagatataaataaatggagagatagtctatattcaaagacttactatattaaaatgttaatgctcccccaacttaacctactgactcaacccaattccttctaaatcccaggatgttttgggttttgtagacatcamaaaacgtattctaaaattatttagaaacacaaaggactgagaatagccaacacaatactgaaaaaagaacaaagttggaagactaaaactatctgatcaagacttagtataaaactacatcaaccaagacactatggtattgggaaaataattttaaaatacagcagtggaacagagagcttagaagtagacccaagaaaatatagccatttgatttttgacagagata

SEQ ID NO: 756689 - DNA, 602 bp, Homo sapiens
tgatgagcgtatagaatccccaacccttagtgctggaagcaccttcaacaaatacaattccaacgtgctccctttgtgcatgaggctgggagcaggcacaggactctgtcagctgctggaggaccgctctgagcgtgtgctgccagactgcctactcagaaccatgcaggtcttgttctaaaaatgatggtcccagaatgctgaagagtaatgatctcagggacagggctttccctgtgtaagtatgagcagcttttctaagtgtttggagacctgctattgcatccttacagagctctatcatgtatggggagcaggggtatataactgatgaattttacaatttagcaaactcagaggaaaataacaattattgctatttactaagcgagtgctaggtgtccgggacagttgtagcacattgtactttttattyatttatttttatttttagttgagatgtaataattgtacgtgtctctggggtgcatggtgacgtttctatgcgtgtatacaatatgtagtgatcaatgtgtagtaattagcacatccatcccctcgaacattttatcactgctttgtgttgtgaacattcaaaaatc

SEQ ID NO: 756690 - DNA, 612 bp, Homo sapiens
tttcagccagtctggtgaatcaaaattttttatttattaaatatcccatttttcgcctgtggcagggtggtggtccagaggccttgactgaaggggactggaacaacttgtctgtgccatctctgggcttttctcctctactactctactgctcagtgcaaacaatgtatcttctattakatccattacttcagttgtgctttgaagggggcaacaggtttcttagtgggttttgattttagtaccttgatgttaatctgatttatgaaattctccatggagttcatctgagtttaccggattctgctccggaatatgaggcctaagtcccagataataaaaatgtattttggcttgatctcttgggcatttatttctcctcggactttgtggtgaagaggttaaatattccttggttattcctaaattatctggtcaaacatccttatattatcatttttaatgtgtcatacctctttagcacatttccaaccacctgccaattctgttaattaagtagcgtattaacttcctccaaataatatctttaaaatcccaccgttttctccctcagaaacttagtatggtattcaaggatgctagaattctact

SEQ ID NO: 756691 - DNA, 622 bp, Homo sapiens
gatggggacagggtgtcagaacagtcttgatggtcttgccagcaacagctttttcttattttccataatttggtcttagtcgttctccagttgtcttcatgtaaataaagtggcccatggcaatcatgattctgtaattgttatagtgcctttgtaagttgacagtttccaaatccccttactcatacgacccctgtgaaggggggtgtgaaggggttggtgggcttgtgcatatgagggaatgtgaacgatttcattatgaccgaattatgctttactcaataagcactcaaacactaccatctcacttgtagtagaagtgctagggatgcaaccaagagactggttgaataaygggaaggttaaatgcatgagtattttaatagaaaaaaatattaaaaacaaaaccaaaactcgtatggaaagaggcttctgactaggccctcctttctagcagtgtttggcacctgataacaatttgacgctgggggagggagcagcttgacaaggtccacatgaagcagccttgagatttttcgcccacttccatttctcctcagcatcaaaggaaagtgcatggtaagaagtgaatcagacagcgagggatctatgcagttatcct

SEQ ID NO: 756692 - DNA, 588 bp, Homo sapiens
aagctaagatccactggcttgaaattcttgctgtgagcacagcagtctgaagttgacctgggatgctcaggyttggtggggggagcagcatctgccattactgaggcttgagtaggcagttttccccttacagtgtaaacaaagcccccaggaagttgagactgggcagggctcaccaccgtgccgcaaagccaaggtgcccagactgcctgtctagattcctcctctctgggcagggcagctctgaaaaaaaggcagcagccccagtcagggacttatagataaaactcccatctccctgggaaagagcacctgggggaagggatggctgtgggtgcagtttcagtagacttaaacgtccctgcctgccgacatggaagaaagcagtggatctcccagcacagtgctcgagctctgctaagggacagtctgccgccttaagtgggtccttgacacctgtgcctcctgacgggggggacacctcccaacagaggccaacagttacctcatacaggagagctctggctggcatccggtgggtacctgtctgagatgaagattccagaggaagcaacaggcatcaatctt

SEQ ID NO: 756693 - DNA, 588 bp, Homo sapiens
aagctaagatccactggcttgaaattcttgctgtgagcacagcagtctgaagttgacctgggatgctcaggtttggtggggggagcagcatctgccattactgaggcttgagtaggcagttttccccttacagtgtaaacaaagcccccaggaagttgagactgggcagggctcaccaccgygccgcaaagccaaggtgcccagactgcctgtctagattcctcctctctgggcagggcagctctgaaaaaaaggcagcagccccagtcagggacttatagataaaactcccatctccctgggaaagagcacctgggggaagggatggctgtgggtgcagtttcagtagacttaaacgtccctgcctgccgacatggaagaaagcagtggatctcccagcacagtgctcgagctctgctaagggacagtctgccgccttaagtgggtccttgacacctgtgcctcctgacgggggggacacctcccaacagaggccaacagttacctcatacaggagagctctggctggcatccggtgggtacctgtctgagatgaagattccagaggaagcaacaggcatcaatctt

SEQ ID NO: 756694 - DNA, 588 bp, Homo sapiens
aagctaagatccactggcttgaaattcttgctgtgagcacagcagtctgaagttgacctgggatgctcaggtttggtggggggagcagcatctgccattactgaggcttgagtaggcagttttccccttacagtgtaaacaaagcccccaggaagttgagactgggcagggctcaccaccgtgccgcaaagccaaggtgcccagactgcctgtctagattcctcctctctgggcagggcagctctgaaaaaaaggcagcagccccagtcagggacttatagataaaactcccatctccctgggaaagagcacctgggggaagggatggctgtgggtgcagtttcagtagacttaaacgtccctgcctgccgacatggaagaaagcagtggatctcccagcacagtgctcgagctctgctaagggacagtctgcckccttaagtgggtccttgacacctgtgcctcctgacgggggggacacctcccaacagaggccaacagttacctcatacaggagagctctggctggcatccggtgggtacctgtctgagatgaagattccagaggaagcaacaggcatcaatctt

SEQ ID NO: 756695 - DNA, 600 bp, Homo sapiens
taaaagcttgatttgaaacagaatagagacgacaccttacagacatgaaggagtaataagatttatccttttgcctgaaacaaccatttcaagttaacagtcaacaggcaacaaagttctgatccctcagaggcagtagacgaagtgaagcacaaggacagagaaactaaatagagctaggcagtctttgagttatatccaaaattgtactgaaggttctagccagtacaatcaagcaagaaaaagaaataaattccaaatcagaaaggaacaaatgaaatgtctttattcacagaaaacacaattgtctttagagaaaatatgatggaatctacaataaagctactatgamaagggtgtttagtagcagaccttatgcaggacctaagaccaatatatacatatcgattgtatttctatgcattagcagcagaaaattagaaaataaaaaatgtaaaacattgctacgtagaatagcatcaaaagtagaaaataagggctgggtgcagtggctcacatctgtaatttaaacactttgggaggccgaggcaggtaaattgcttgaggtcaggaatttaagaccagcctgggcaatatggc

SEQ ID NO: 756696 - DNA, 636 bp, Homo sapiens
tgttctttttcaaggtgttgcattgtttattgttgtatactagtacagtgccaaaggatttataatttttttcttttaaactggtatagaccctacagttgactgattttgaataacaaaaaggcatatcaagtttataattagtaatactaattagcaggaaataagactatctagattattgacattcttttctgtatttaagaaaataaaattaagaaattatgtttgccgttttcaatgaggaaagattttcaacttcgggattcttaaagtactcagcaattatgttggctattttgaaactgcattgtttatcaagcttgtttttcatgtaaaaggatctgggcattgatatattttcwttatatttatagttaatagtaaaaatgtttaaatatataagtagctggtgaaatttgtatttggcatgccccaaagccccttttccttcaaaagctttaatcctgacagcatctcttgaaatataaaacaaatttgaagttccctaagaaaaatacatgtttttctttgaggatactactgttgctttgctgccctctacagtcatctaaaatagtcactctagatttttctccattcagatacttagaatactttttccctgacctgtgt

SEQ ID NO: 756697 - DNA, 613 bp, Homo sapiens
aattgtttcattaataaaaccagctgctccaggaaaaatctggaggccaaattaaatatattcccaccatcaaactcagcgttcaatctccacataacaatattatctccaaaatatttctcaaatctattaatcrtcttaatttcactaccactaccctagatttcagcactgtatttgttacaggtagttagacaggcataagcagggcaggagagggctctcccccattcactaggaatgttgggtgatggtttgaccattccctcatggtccatacctgttgcactgaagtgttaattgaatgccgataccagagagagggaacttcctgggcatgcacattaagagacaaaatggtagagtatgaccttctgggggcacaccactggaaaagagaagaaagctttcgatgggcatgtatgcactgtcataaacacaccgtacgtgctcacctctcaagggcaaggagggcagtgtatatgtgggcagcccaccccaggggaagcatcatgggaaaggggccagcctataaagccctaggatcaaggttaaacaccgcacttgaccttcacatacatcttctttcaaatgtgctttcctttttttcctg

SEQ ID NO: 756698 - DNA, 613 bp, Homo sapiens
aattgtttcattaataaaaccagctgctccaggaaaaatctggaggccaaattaaatatattcccaccatcaaactcagcgttcaatctccacataacaatattatctccaaaatatttctcaaatctattaatcgtcttaatttcactaccactaccctagatttcagcactgtatttgttacaggtagttagacaggcataagcagggcaggagagggctctcccccattcactaggaatgttgggtgatggtttgaccattccctcatggtccatacctgttgcactgaagtgttaattgaatgccgataccagagagagggaacttcctgggcatgcacattaagagacaaaatggtagagtatgaccttctgggggcacaccactggaaaagagaagaaagctttcgatgggcatgtatgcactgtcataaacacacygtacgtgctcacctctcaagggcaaggagggcagtgtatatgtgggcagcccaccccaggggaagcatcatgggaaaggggccagcctataaagccctaggatcaaggttaaacaccgcacttgaccttcacatacatcttctttcaaatgtgctttcctttttttcctg

SEQ ID NO: 756699 - DNA, 593 bp, Homo sapiens
aaaatgatgagttcatgtcctttgtaggaacatggatgaaactggaaatcatcattctcagtaaactattgcaaggacaaaaaaccaaacaccgcatgttctcactcataggtgggaattgaacaatgagaacacatggacacaggagggggawcatcacactctggggactgtcgtggggtggggggagtggggcgggatagcattaggagataaacctaatgctaaatgtcaagttaattggtgcagcacaccagcatggcacatgtatacatatgtaactaacctgcacattgtgcacatgtaccctaaaacttaaagtataataataataaaataaaataaaataaaataaaataaaataaaataaaataaaataaagaaaaaagaacatttattggttcacataactaaaaattcctgggttaggtttttgtatttggtgggtccaggcactcaacccatgtcattgggaatctgtgttctcttcatcctcctcccggcaggacctcctttgaatggtttccttttcaggtagattatcctcatgcagtagaaaatgcccatgagcagctacagacttagggcttagc

SEQ ID NO: 756700 - DNA, 601 bp, Homo sapiens
aaaatgatgagttcatgtcctttgtaggaacatggatgaaactggaaatcatcattctcagtaaactattgcaaggacaaaaaaccaaacaccgcatgttctcactcataggtgggaattgaacaatgagaacacatggacacaggagggggaacatcacactctggggactgtcgtggggtgsggggagtggggcgggatagcattaggagataaacctaatgctaaatgtcaagttaattggtgcagcacaccagcatggcacatgtatacatatgtaactaacctgcacattgtgcacatgtaccctaaaacttaaagtataataataataaaataaaataaaataaaataaaataaaataaaataaaataaaataaagaaaaaagaacatttattggttcacataactaaaaattcctgggttaggtttttgtatttggtgggtccaggcactcaacccatgtcattgggaatctgtgttctcttcatcctcctcccggcaggacctcctttgaatggtttccttttcaggtagattatcctcatgcagtagaaaatgcccatgagcagctacagacttagggcttagcacagggat

SEQ ID NO: 756701 - DNA, 516 bp, Homo sapiens
ccatggagcctgcatcacagggtggctgtgagtgttcaggagtgaaggtcaggtgcctgccacactccacatgccagggagggggtctgttaaacaaacaggaataaaactagggacatagccagtcactagggggcacgggccctcctgaaagaggacagggacgctgctccagcccctgccsgggcccactctccacggcccaccttatgcaggtcctgggccagcacgtcgcgcagaagctgcttgttttcttgaaggaagtggcccaggccctggagctgcgcagcccggaactcggccggccgcgtgcgccctcagttgaaggcctcacgcagccgccgcagcgtgtcctcgaaggggtccatcctgccggatggggtggcttgaactgggtggccagggctgcccctccttcacgggcaccctccagccaccccagggtctgcacacccttgccccacctgcacccatgggggctcacagacaccccacctcatacacacacagacccac

SEQ ID NO: 756702 - DNA, 649 bp, Homo sapiens
tttttgcccaaagccccatcgtagtggggactacctggaattttaggatccctcctcacactgacaggcctaacaaaagctattcctgaagctaggatatggggagcctcagaaattgtatccttcctattcatataagttaggacaaaagatgtcactcttccaaccctggagaccccttccctccttcagggtatggccctccacttcatttttggggcataacatctttataggacaggggtaaagtcccaatactaacaggagaatgcttagractctaacaggtttttgagaatgcgtcggtaagggccactaaatccgatttttctcggtcggtcctccttgtggtctaggaggacaggcaagggtgcaggttttcgagaatgcgtcggcaaggaccactaaatccgaccttcctcggtcctccatgtggtctgggaggaaaactagtgtttctgctgccgcgtcggtaagcgcaactattccgatcagcagggtccagggaccgttgcgggttcttgggcaggggttgtttctgctgctgcgtcagtgagcgcaactattccgatcaacagggtccagggactgttgcgggttcttgggcagggggagaaacaaaacaaaccaaaaccgtgggtggttttgt

SEQ ID NO: 756703 - DNA, 622 bp, Homo sapiens
ccactaaatccgatttttctcggtcggtcctccttgtggtctaggaggacaggcaagggtgcaggttttcgagaatgcgtcggcaaggaccactaaatccgaccttcctcggtcctccatgtggtctgggaggaaaactagtgtttctgctgccgcgtcggtaagcgcaactattccgatcagcagggtccagggaccgttgcgggttcttgggcaggggttgtttctgctgctgcgtcagygagcgcaactattccgatcaacagggtccagggactgttgcgggttcttgggcagggggagaaacaaaacaaaccaaaaccgtgggtggttttgtctttcagatgggaaacactcaggcatcaacaggctcacccttgaaatgcatcctaagccattgggaccaatttgacccacaaaccctgaaaaagaggcggctcatttttttctgcactgcggcttggccccaatattctctttctgatggggaaaaatggccacctgcgggaagtacaaattacaataccatcctgcagcttgatcttttctgtaagagggaaggcaaatggagtgaaataccttatgcccaagctttcttttcattgagggagaatacacaact

SEQ ID NO: 756704 - DNA, 539 bp, Homo sapiens
gaaagggacaaattccctaccggtcagcaagccatccccagtatggatcccaactgggaccttgactcagatcatggggactggagttgtaaacatctgttgacctgtgttctagaaggactaaggagaattagaaaaaagcccatgaattattcagtgatgtccaccataactcagggaaaggaagaaaatccttctgccttcctcgagcggctatgagaggccttaagaaaatatactcccctgtcacccaaatcayttgagggtcaattgattctaaaagataagtttattacccaatcagctgcagatatcaggagaaagctccaaaagcaagccctgggccctgaacaaaatctagagacattattaaacctggcaacctcggtgttctataatagggaccaagaggaacaggtccaaaaggaaaagcgagatcagagaaaggccgcagccttagtcatggccctcagacaaacaaaccttggtggttcagagaggacagaacatgaagcaggccaatcacctggtaaggcttg

SEQ ID NO: 756705 - DNA, 603 bp, Homo sapiens
gcctttgccccaggccggtccccgcacctgtatctcttgtcgtccagggggatgaagtccatgagcagggcgtagtcggccagggagtccatgcccaggatcttcacctggaagggggggaacatcctcctgcgggagggaggtgctcagcagccggatgcggctccaaccctggcccctgcctcaccccgcccccgctgctcacacctgcctgccttggtgacgatcatctcagtgcccagctggttgaattcctcccacagaggcttcatctccagctgaactgtcactctggacacacgtgggttcttggggccctgcccagtgggctcgkccacagcttgggccccagtagagctggtgcaagggcctgatgggaatggtgaccccagccggggctcccagccagagctggttgtaggtagggggtaggtctctgagggtgcaagtatgccgaggccagcagataggaaggctgtggagagaggacggaagtgtgggccccacgcatcacccagccagctcttatccttcaggctgcacctatatgcctcttcctccaggaagccctccctgactgccagggctgtgttctcacaggat

SEQ ID NO: 756706 - DNA, 505 bp, Homo sapiens
aggagttcaagatcagcctgggcaatagcaagaccccatccgttctaaaaataaaaataaataaaaaataaaaattagctgagcatggtagtggacaccttggggttccagccacgtggccggctgaggtaggaggatggctttgaatcagggaggttgaggctgcagtgagccatgttctgaattagatactggtgatgatcgtgcaaccttcccaatataggaaaaaccactgaacagtacattttcaaagggtaaatttagccggacacggtggctcatgtctgtaatcccagyacttttggagtccgaggcgggcagatcacctgaggctgggagttcaagaccagcctgaccaacatggagaaaccccgtctctactaaaaatacaaaaaattagccaggtatggtggcgcatgcctgtaatcccagctactccagaggttgaggcaggagaattgcttgaacccgggaggcagaggttgtggtgagccgacatcacacc

SEQ ID NO: 756707 - DNA, 525 bp, Homo sapiens
tccttgatgctgccttaagtccggctcagaggggcgcagcgtgacctggggtcgctatcttcccatccggaacatctgccctgctgggggacactacgggccttcccttgcctgagggtagggtctcaaggtcacttgcccccagcttgacctggccggagtggctatagaggactttgtccctgcagactgcagcagcagagatgacactgtctctgagtgcagagatgggggcagggagctgggagagggttcaagctactggaacagcttcagaacaactagggtactaggaactgctgtgtcagggagaaggggctcaaggactcgcaggcctgggaggaggggcctaggccagccatkggagttgggtcacctgtgtctgaggacttggtgctgtctggattttgccaacctagggctggggtcagctgatgcccaccacgactcccgagcctccaggaactgaaaccctgtctgcccccagggtctggggaaggaggctgctgagtagaaccaacccca

SEQ ID NO: 756708 - DNA, 583 bp, Homo sapiens
ttggtgatgtctatgtgatagtgaatgagttctcgagatctggtcatttaaaagtctgtggcatctcatcccctactctccccctttctctctctcctctctacttcctctgtctcatactgtcttgctcctacttttgccatgtgacgtacctgctctcccttttgccttctgccatgattgtaagcttcctgaggcctccccagaagctgatgccacgatgcttcctgtacagcctgcagaamctgagccaattaaacctcttttcttataaattacccagtctcaggtatttccttatagcaatgcaagaacagcctaacagaaggagctgccccaaatttgacaacaatcttaaaatattacagacactaccaataaaacgagttgtcaatctcaaacttttctaaactatcaataataaacacaatttgatcagtcatggtagagaaaaaagtacactgttgacatatgaagaagtggtcaaaaagtatacagtcaaaaaaatctaaataaaaaagtattagaggccgggtgcagcggctcacgcctataaacccagcactttgggaggccaaggcgc

SEQ ID NO: 756709 - DNA, 523 bp, Homo sapiens
cagttaaatcatttgcctgaaaacaaaatgctggctttgggggcttggggggaagtgagggacagagagacagagggagacagagatagacacatataaacatagcactatcatgagtctagagagaaagagacagacacatataaacatagcaccatcaagagtctagagagaaacagagacagacacaaacattgcactatcatgagtctcttttcctaaattgctaatttttttttttttttttgagatggagtctcactctgtcgcccagactagagtgcaatggcacaatctcggctcactgcaacctccrcctcccaggttcaaacaattttcctgcctcagcctcccgagtagctgggattacaggcgcccgccactacgcccagctacttttttctatttttagtagagacggggtttcaccatgttgcccaggctggtcttgaactcctgacctcatgatccacccgcctcagcctcccaaagtgctgctaaattgctaatctttttttttttt

SEQ ID NO: 756710 - DNA, 571 bp, Homo sapiens
atctaaataagtttataaagttggattggaatatattatgtattataatgagagctggagaatggaagaaatgggaatggggatggagaaagaaaaaaaattataaataatttttctctttcccttgcaaagcaaaataaatgacaatgtgctataaaccgagctgtgttattagcctaattgtgagtttaaaataaaagtcttctggcttataagcacagtccataatgttttattttacctttttctgagagagtctcactccatcatccaggatggtgtgcagtggctcaatctcaattcactgcaacttctgcctcccascctcaagtgattctcatgcctcagcctcccaagtaactggaattacaggtgcaggccaccatgcctggctaaattttgtatttttagtaaagacagggtttcgccatgttgactaggctggtctccaactcctgacctcaagtgatcctcccatctcagcttcccaaagtgctgggattacaggcgtgagtcaccgtgcctagtctatttttattttttaaataagaattacaaaactgactttttg

SEQ ID NO: 756711 - DNA, 587 bp, Homo sapiens
taatccagtcagataatatttaaaattcatttagagaatatttaattgaattatgagtcttgagaccaggattcatgacccagatcaaacactaacttgctgaatgttcttagagaggacatatattattgttgtacttccatttctaggaatcactacctaataaaatctgagtcacaagttagattagagtgctcttgaaatggatttgattacctcaaaaaagtagtgagtgtctcatcataaaaagtattytacaaggagccaaatgactttgtagcacataattctatgcttaaaaactggatgcaaagtaggatgtggatttattattatttttaaaaaatcaactattgagaaaaatgtgttaaaatctcaggtatgactgtgtacttctctagttgttcttttagttctattaatttttgcttcatatattttaaagccatattattgatgaacacagatatttgatgccaatatactatggaattgacttctcttccatttggaaatatttttatttctaatagtgattcttacctgtagtttactttaaaatttttatagctatactagctttcttc

SEQ ID NO: 756712 - DNA, 521 bp, Homo sapiens
aaaatgtgttaaaatctcaggtatgactgtgtacttctctagttgttcttttagttctattaatttttgcttcatatattttaaagccatattattgatgaacacagatatttgatgccaatatactatggaattgacttctcttccatttggaaatatttttatttctaatagtgattcttacctgtagtttactttaaaatttttatagctatactagctttcttcagctagtgtttgcatgctccatcttatttttaycattttacttttaatatttctgagtgtatatgaagtatatttttaatattttggataattctctctttctcgctctagctccacctttcttcctagccctaaaaatctgtgtagaagaaataattctgctctttagagctttaacctttctcaccaagcttcctaagggggagaccaattatataatttgtaattggagtaagatccctcctaaatatggcaatattgtaaaaaaaatttattctgcctttacatgattt

SEQ ID NO: 756713 - DNA, 762 bp, Homo sapiens
aaaaggaatctaaggaaaaacaaaaagataaataaagactgcaatatcttaaaaccgctcattttatattgttgcaatgaagaaattaggttaaaagtgctagactagaatgctagagaactgggtttgatcctcagctctaccacaaagtagagcattttgaacaattgtgatccttaaccaactttatgccttgttgcctcctaagtaatctggagctaatagaccttccctgtcataaggttgttgggaagattaagtgagataatgttcattgcagtttctggaaacctgaaaagtgtgatgcaaatataaaggattgttactaccactcaggtcctttgttactggagagtttataaagccttcccatagtgtttcattccacccaaactatgagaatccctattttcatttctgtctgatggctgtcagaaaattcacagaagccattgttgcctgaataagggaatcacagaccaaatatataatagctcactaagatttattttaaatgtctgawcataaaaaggagaagggaaataattcaaagcgttgtgttatatgccaagtggccaaaatggagcagttttttttcagcttagcaacaaactgctattttccttggtttctaggacacaaatacttctgttctaaatgtttagaactccaatttgcacatgtaatttaggggaatgtgaccaactggtttagtaatatttttagttttttccccaaatgaaataatgaaaatgaggatat

SEQ ID NO: 756714 - DNA, 582 bp, Homo sapiens
atagctgagttcaagtcctggatatccttgttaacattctgtctcattgatctgtctaatattgacagtggggtgttaaagactcccattattattgtgtggcagtctaagtctctttgtaggtctctaaggacttgctttatgaatctggctgctcttgtattggaggcatatatatttaggatagttagcgcttcttgttgaattgatcctttaccattatgtaatggccttctttgtttcttttgatctttgttggtttaaagtctgttttatcagaaactaggattgcaacccctgctgttttttttttttttgctttccctttgcttgstaagtattcctccatccctttattttgagcctatgtgtgtctttgcacgtgagatgggtctcctgaatacagcatactgatgggtcttgactgtttatccaatttgccagtctgtgtccttttattgagggcatttggaccatttacatttaaggttaatattgttatgtgtgaatttgatcctgccattatgatgttagctggttattttggccattacttgatgcagtttctttagagcatcaaca

SEQ ID NO: 756715 - DNA, 374 bp, Homo sapiens
taccatcaatagaatacaataactctgcacctatacatctccattatcccctttaagttattgtcattatttgcatctttacatactgtgtgcccaataaaatatatttgtaaatggtccttatgcacttgtcttttaaattatgyaggaaataaaaagtgattttaccaaccccaaatatgataatataggcttttgttatttatttatgtagtatctttattagtgatatttatacctttgaatagctttgagttaatgtctagtgtcctttcagttcaatctgtaaggctctggttaacccaaatctctcaacttttgtttatctgagaaagtcttaatttatcctttattcttgaagaataatttttaca

SEQ ID NO: 756716 - DNA, 544 bp, Homo sapiens
atatatgcacatttgattttcagccatttccaatcctttggaaaagtcaggttaaattgaatagaaaatttgacagcgcatctaacatatataatgaataacaggctatttggggtttttgtacgcttattatcattattttggtatgattaaattctattttcaaatcacaggccaaactgtacactgaggtaaatttctaattgtggaaataccacattccccgggctcctcargatgtggtgctggatgggcaaagggactcaggtatggggagcaagaaagagggggtggattagttttctaggggccggcataatgaatactagggacttggtggctttgatgatagaaattgacttcttcatcatcccgggcagtagaagcccaagatcaaggtgtcagtggggttgtttgtcctgaggccactctccttggcttgtgaatgggctcttccagagttttcacaaggtgtcttctgtgtgtgtctctgtccttacctcttcttataagagcaccagtcacactggattcgggtccatgc

SEQ ID NO: 756717 - DNA, 646 bp, Homo sapiens
tgtcatccaggctttgttgtttcatttctagagcacagggggagtagatttagcataattctaaagggtcctaagatttttgaaatgttcagtgagtgccggctttaacttaaagtcaccagctgtggtagctcctaataaaagggtcagcctctcctttgaaactttgaagccaggcactgatttctcctctccagctatgacagtgctagatggcattttcttccaatattaggctatttcatctacactgaaaatctgttgtttagtgtggccaccttcatcagtgatcttagctggatctggataacttgctgcagcttctacatcagcatttgctgctttaccttgcagttatatattgtggagatgacttcttttcttttttgagatggagttgcactcttgttgcccaggttggaatgcagtggcacaatctcggctcactgcaacctctgcctcccaggttcaagtgattctcctgcctcagcctcccaagtagctrggattacagccacccgccatcacgccccgctaatgtgtttttttttttatttatttatttatttatttttttattttgtatttttagtagagatggggtttcaccaagttggccggctggttttgaactcctgacctcagg

SEQ ID NO: 756718 - DNA, 560 bp, Homo sapiens
ttctggtatgtagcatgacaaccttgctattttttaaaacataagttgtgggcacaagcactctggagaatcttaaaatacagctacatggaaaaaagtatctttaatggcacagctccatctcccttgactgcattgctattgtgaattcaaattttctattgggtagcaggtccttggcagtgttgttaatgtcaacattttatttccatgtgtccaaccagcaggcaccctcaatttttaaagtattatttttgaggttaytcatacctgtttgttcaacatttaaattggaaaatgttttagtcattcctggtcagttgtatgttttcaagactgaggtaatcctgtatctctaaccacgtggaaacactgacttggaataagatataaaacaaactttgtcttccctagaactctccaatgcaaatttgacgacgatcaaatattgaccatgtttcctatttttatttatatttgaacaagaaatgatgacagtgttaatctctagagttaccacaaatgtgactttgatgcctgggttttttctatgggttaca

SEQ ID NO: 756719 - DNA, 613 bp, Homo sapiens
gcatgataagggtagttacagcagagaaattgcaaatgacaaatacatttctgaagacgttcacatcagtgataggggtagttacagcagagaaattgcaaatgacaaatacatttctgaagaccttcacgtcagtgatcagtggtggggtagttacagcagagaaattgcaaatgatgaatacatttctgaagacgttcacgccagtgatgggrtagttacagcagaaaaattgaaaatgacgaatacatttctgaagatgttcatgtcagtagtcagagaaatgcagacacacaaaccaaaacagagaaaaaattaaaaacaaaaacaaaaaacaaaaccccccaaatgccaatttcaccagttggcagagttgaaatatatacataataccctgtggtggcaaacgtgagggggaaatgtcgttcttaaccaccattagtgggattgtaagttaagtttttgagaaataattcgtctgtatttaatgcaattaagcatgcataaacctttgactcaacaatcctacccctggaaattaaactgggatgttttcacagaatgtctaaaaacatacgagaaatgggtgctatggggaatatgttcccaacta

SEQ ID NO: 756720 - DNA, 613 bp, Homo sapiens
gcatgataagggtagttacagcagagaaattgcaaatgacaaatacatttctgaagacgttcacatcagtgataggggtagttacagcagagaaattgcaaatgacaaatacatttctgaagaccttcacgtcagtgatcagtggtggggtagttacagcagagaaattgcaaatgatgaatacatttctgaagacgttcacgccagtgatgggatagttacagcagaaaaattgaaaatgacgaatacatttctgaagatgttcatgtcagtagtcagagaaatgcagacacacaaaccaaaacrgagaaaaaattaaaaacaaaaacaaaaaacaaaaccccccaaatgccaatttcaccagttggcagagttgaaatatatacataataccctgtggtggcaaacgtgagggggaaatgtcgttcttaaccaccattagtgggattgtaagttaagtttttgagaaataattcgtctgtatttaatgcaattaagcatgcataaacctttgactcaacaatcctacccctggaaattaaactgggatgttttcacagaatgtctaaaaacatacgagaaatgggtgctatggggaatatgttcccaacta

SEQ ID NO: 756721 - DNA, 628 bp, Homo sapiens
taattagaaaggaacttggaagtattcttgttcctgataatgtctctaacaaagacaccaacattaagtgacttgctcaaagtaaatggtgaaagttggaaagagaacctacatgtgctgatactaagttacttttccaccctcctatgtaattgtttgtatttatttcctggcatctcagtgccttatttataacacatagaaaataaaatctatcctaatttctcatagggttaatgtgactgtatataagagattattttcctcacttttaaaagcctttatttttagtagaaaaatcaatggacatattgtgacttgaattcatattaattatcctcattggacaactataaagttagtaaaatatgttggctttcagtttaaaaatattgactggatcatgtggaaaacactgtgcatagctcaggggatgtagaggtcaacytgacagacgaagcctgcctgccctcgtgtgtatgacagtccagaggcagacacagatgtgaatcaacacattgagcaaacaattactccattatgattgtgagaaataataaatgacattttataatattgtttccgtaagttactggcatacacagacccatggtctgctgtgggcccc

SEQ ID NO: 756722 - DNA, 590 bp, Homo sapiens
catgagctataaaaagtgtgatttggaagtgcccagcacaatgacgggaggtcatagggtttcatctgtatttattgaataaccaaggaaaacatcattgtaacagaataattgatacatattatttgtcaagctgtgacatagtagaggcatattttaggtaagcaccttctatartgtaaaaggaatgcagttattactttaagatggccagagtaactaaagccagtccctgttcacatcgttgcttgctgctgtgatttaagacattgtgtactgtgtgagatgccttactgcaccccttctctttctaatgtctgtagcagatttgaattatacaataaattttgccaaattgtccttgtctctcccacctatggctgtactttcatgttcgccggctttaaaacatgaatgatgagaggaaaactgtggtgccaagtatctgcctccatttgtcagcgtttacattttccgttaattactgatgttgtgcagtcagtaatatacagcaccggaaagaaacacaagcttcatagaatagagcatcttttttttttcctgtgtgttttcctatagatttgctaaac

SEQ ID NO: 756723 - DNA, 621 bp, Homo sapiens
  misc_feature 441: n = A,T,C or G
tcttgaattaatttttgtataaggtgtaaggaagggatccagtttcagctttctatatatggctagccagttttcccagcaccatttactaaatagggaatcgtttccccatttcttgtttttgtcaggtttgtcaaagatcagatggtggtagatgtgtgctgttatttctgaggtctctgttctgttctgtgggtctatatatytgttttggtacgagtaccatgctgttttgattactgtaaccttgtagtatagtttgaagtcaggtagcatgatgcctccagctttgttttttttgcttaggattgtcttggctatgcaggctattttttggttccatatgaactttaaagtagttttttccaattctgtgaagagtcattggtagcttggtggggatggcattcaatctataaattaccttgggcagtatggcanttttcatcatattgatttgtcgtatccatgagcatggaatgttcttccatttgtttgtctcctcttatttcattgagcagtggtttatagttctccttgaagaggtccttcacatcccttgtaagttggattcctagctattttattctctttgtagcaattgtgaatgggagttcactc

SEQ ID NO: 756724 - DNA, 621 bp, Homo sapiens
  misc_feature 441: n = A,T,C or G
tcttgaattaatttttgtataaggtgtaaggaagggatccagtttcagctttctatatatggctagccagttttcccagcaccatttactaaatagggaatcgtttccccatttcttgtttttgtcaggtttgtcaaagatcagatggtggtagatgtgtgctgttatttctgaggtctctgttctgttctgtgggtctatatatctgttttggtacgagtaccatgctgttttgattactgtaaccttgtagtatagtttgaagtcaggtagcatgatgcctccagctttgttttttttgcttaggattgtcttggctatgcaggctattttttggttccatatgaactttaaagtagttttttccaattctgtgaagagtcattggtagcttggtggggatggcattcaatctrtaaattaccttgggcagtatggcanttttcatcatattgatttgtcgtatccatgagcatggaatgttcttccatttgtttgtctcctcttatttcattgagcagtggtttatagttctccttgaagaggtccttcacatcccttgtaagttggattcctagctattttattctctttgtagcaattgtgaatgggagttcactc

SEQ ID NO: 756725 - DNA, 552 bp, Homo sapiens
atcaaaatgaaggcaggtgtccaagttgccattgcaccatagatttgtacagtttgtgtgaagttcacaggtcagatttattgcatgataaaggaagtggcagtgatgtgcttatttgtacttgtatgtttatctggtgcctgctaatggtggaactcaccttctccaagtcacaccagctaggagcacagccaagcaggagtcttccacttagctccttctggcaaattgtgtgarcgataccccctcaccatcagttaaaatccctttgaaataataaaggaagtcattggtatcctttgacacagtgccacagacggtggcttaacaacagacatttactctccccgagttctggaggcaccagaagtccagaatcaggggttgtgaggacaatgcaggctctgggactctgggcaggaccttcctggcatcttcacacttctggcggccggcaatccttgcaaacctcactgttctctttatctgtctctgctgttggctgaaggatcctaggccactgtttgacgttgcctgtcactgcgtgggctc

SEQ ID NO: 756726 - DNA, 580 bp, Homo sapiens
ttgaaagctgtcaaacagccagattatataaaattatgaagatatttagcaggaatattctaagatactgctacaaacaacactatttattgaccacaaatatgccagttgctttacatatactcaaccttacaataatcctgctaggtaaatcatctgattttacagatgaggaaagaggttcagagaagttaagcagcttgccccaagtcatagaaatagaattccaaatacagaattcaagaattaaaagaactttccagtcagcactggaatactgtagcgcccttccccctcaacccctccacatttaccccaccctccaatcaacatatgaatggaggaaaagggaagggcagaatttatgcttytaatggacagcttcctttcaagaggcagagggtgttgctgagctgatcatggccagtttttgcttcccaatcctgccaatctattaggtcatcccttcttttgtggaaaagagcaaaggagggacagaaagagtcgggagcattatactagcaaagccatctacacggggaaggacatatcaggaataaagaaaagtacttatctcacc

SEQ ID NO: 756727 - DNA, 464 bp, Homo sapiens
attatacaactattattaatccacagcctctcagcttgctgtcctttgagtagacgttcatttccttgcttgaataacctgtaataataattctatctgaagcagttgcctggcaagagatgtccattctcctcaagatctgctcccactacttgttgccacaagacccaccctggcgttagatttcagattgtatcgggaagacaaattgaaagcttgacacaagaagaaacagctcactctccaaagtaattgcaaaattttrctgttttatgttggcagaaacccagtgaatatgtatgtgaatgagttctaagagcatttgacaagaacaaaatgtaacactgggtaaggctaactatattgatattggtgtactgaccattgattctggatttaataaattagctcatactactacaagttgctttaacagttcactggatttgttgactaaaatttca

SEQ ID NO: 756728 - DNA, 574 bp, Homo sapiens
ctccaaagtgctgggattacaggtatgagttgattttttaaaatcaatgttgacatgaagttattcaaggacctgctgattaccatttcattaacttctcttttcatcctgtcttgttccttaattttacacagacttagtttattagggtctgttagactagcgacagcactggggatcatagcttccagaagatgcttaagattcctagaaagggcaacggaggtattgaagtgccacccatatagcctttttcctcttccaaatctctagcctagccctagaaccygtctatttgtaaaagtaaataatactttttaataaccagtcttatttttccagattaaaattagggcatacacatccttagtaaatatgcattgtaaacgtgcctttcttctaccaattcaccaaacatcctgaggccacttctaggttgatttaaacatttctagaaaaatctatcactgatagtcactgttcagaaagaaccaattctgcagtagttgtttaaatggtaggttgtttctctttatgatttcttcctgtgagcctttaaaaaaatctttttttg

SEQ ID NO: 756729 - DNA, 517 bp, Homo sapiens
atgtttctagaacaatacattgaaaagatgttaaagataaaaaagattatggataatgtgcttgccaagcagaaagcagaaagggatgatctggctaaaaaatacaggtgagtagaaaaagaaaaaaaaagagtgcttttgagtttctagaatttatccatttttagctgcaatagttgtctagaatttcttaagaatacaaacactgcttggggccaaataatgactttatgaggttgtctaatccgttactaccatggaaaattatacttcccagaaaggtatttttytacactattacttgggatagtcaaaaaagaacatttcggtatcttaaaaagttgtctacagtggagaattttatgaaagcctttctggttgtgaatcccacaggcaaatttatttctttagcacactcaaattttctacactaaaaaagtttcttttttgctgtcacaaacgtccttctaagcagttgatcaatcagttgattaattttgtgttttattgtatttct

SEQ ID NO: 756730 - DNA, 628 bp, Homo sapiens
tgttctcctgtcataagccaaattggaacaacatagtcctagattgcaagactgggtttacctaacttgtgtggatctcagcccagcaccacatgttgatagccataaacaggtatttgtttcataggtgtgcatgggaatgctaatactattacctaggtttcctggattttcttctatggggaaaacattttcataaatgttaattgatcatggagaactgcccatgaaaattgcaaggaaatgattaatcatatctaatttgtagatagagaaattgaggcacagagagattaaagtgtctatgctaatagggttaaaaagtaatgaggctaaagagcccaggrtgcctgactctcaggccatccccttcttataactggataatgttgagagagtctccacctatgttgtaaaggtcagaatgctaactaattttaggaatgtgttaccagctttctaggaaaagggctgcttttgttaggactcaagttttggtgggaataagagaggttgcagtcatagtttctttatctacttctacagacagaagttaggagcttctttctctcagtcatcagctatcagccatcatctacctaggatcagaacctccagtgaaagtgag

SEQ ID NO: 756731 - DNA, 541 bp, Homo sapiens
ggaatgttaatctctggtcacatgttgcaaatgtttaactgttctatccatcacataatctcttcttgtaaatttatcatgaaatatatttacagctctctatatgacatataaatcatagactaagagctgaatttagccaacattttgaaatcattcccaagagatgttgcggtataaaattttatattcagtttagcacactatgttaacgaacacactaaaaccgcaggacatttcaattactagaattaaacagacctcttaaartattccaaatgtattctgcagaggcttgtcagtggaggtggagtgtatgggattatctttctatctcaactgaaatgatcccacagtaagcgtttggttacttagtaacattaaaattgcagttaagttcccttacaattagtggccttcaaataaatagttttgagaactaattacatactttggcagaatttcattctttctgttttggtagttattctggtaaatttctaaatgtagtgggcatgatcttcctctccaaatgcttttt

SEQ ID NO: 756732 - DNA, 552 bp, Homo sapiens
cataaactaatttcatcttattgagattgcacatttgatttttacaattcaaaataaacctatcttaagatcttaagctagtcctgcttttctaacacttgagttattcattcttaataaaatcatcttatataactcgaagaaatacattgtttagttttatttttttwaatgatgatattcaccacattctcactcctgtctcatgggcttttccttcatttgcccaaagatagctgttactttaacagtgatatgaaatctctcagcttctctggcactttgtggtcagtaaattttgtctaaaaatgtagctttgccaacattcattttgctgaaaaatgaaataaaacgagttttcaggataaacgttttctgtgcccattaccttgttgtttggtttcacactggtaaaactttgtttgtccctgttgctatcatctttgccaactttctctccacatagcaatctgcaataataacttccccaggagtgagcttagtcctcagtctctgagccaaggaaatcctggaagtaggttggggcttcct

SEQ ID NO: 756733 - DNA, 502 bp, Homo sapiens
aaacctgttcaccacttttagtctcagttaaaggtattgaacactatgatttctaatgacaatttcagttttaacatttacaaaatataaggtcagcctcaagtacacagaaatgcaacaaacctaaaaaaaactttcctgaaagtaayggatgcctaatgtttacatgaaattaactttatttttggatacagaaactgacttctgcgggatctttgtgttttaatgtgcaaattgattttatgattatccaacccttactcaggtaaagaagggtaagttctgaaggtcctggaggcttgttttctcccaaatttttgtatctctttgcaagtggctagatgtgtatatcttagtcaactcaaaaacagggcaggttgatgccagcaactgaattttggagcccacctttactaaaaaggctattttctcaaccaacaaatgtctcttattacatagtagagttaatgttccctgatttcctttccaactttgttacaaa

SEQ ID NO: 756734 - DNA, 642 bp, Homo sapiens
ctgctggtggaatgcactccaccccacttcccctaccctactgccattgcagttggagcctttgtgaacacagagcctgccagcctcacccccaccaatgctgtgctcctgcaacaacactgccattagagtgaaactagtatggatgacggtggaaccacccctgcctgctctgagcagccacagagagagcacacagacttgtgcccaccagtgtctcacccccatcaatgtcccacccccctgctaacaccaccaccagtggaaccacaaacacagtcaccaataagggatgtcctcctccagttacgctgtctcccccrctgctacgaatgcaatacagaggcaggaaccttggcacccactagcaccctgctgcagtcaatgagtgtgaaccccaccatgctacctctgccactggcacatgtgaacaagaatggatcctgctgccatagccctacaaaatgctttggcacctcccattgatgtttagggaccagtggtccaagagcaccatggcttccccaaccgcccaccgattgtagttggtttctaaccttgaggagccagagaggaaagtcagactcgcaagtcccctagagtttgagggcacagtccaggagatggaagctgagccttgcc

SEQ ID NO: 756735 - DNA, 667 bp, Homo sapiens
ggctggaggtgtctgcctttttttctgggtggactgtaagggtcagagaagctccaccaaatagtggctttcaatcctacctcctccaccctttgttctgggactaggtataaactaggtgtcctagtttgcagacccaaacacttaggagtgatctccgctcctaagctctggactctggagcattctaatgatgaagagctgagtttctcgtctttacttctctacccaggtctgttccttagttacagcaaatccattttcctcatcacccgctttgtttgctttttcatttctgaaatgtgttctgaagataaaggctccctgcatgtccatatacacattaattatccttcttcagaaagtcaggcgggctcctccccaygcataccacaccttccatagcacctccccggagacttacactgacagtgtctctctgcatgtgacactattggaaccaatcgttcctgtctgaagaaaagttgaggcaacccataaaaatagggaagcacaccgagaataaatcagcttttctcagcactttccacaagctaagcttgttcttatggaagctttactgggcctttcttttcgtaatgaacttgaaaagctattttcccagatgggcttggataaagttttcttagcaatcgctctcatatca

SEQ ID NO: 756736 - DNA, 578 bp, Homo sapiens
gaatgctttttgaggaagtttgattaaaatgtgatccacttcaggagctgcctttgtgggggacggggttcctatttctgctgcctgaatcatctccattcatccacttccatatccactttccatgttctctcaactgtctcactcttacgaaatccctgttctccaggggcatattgcagtcttagttttttcttaactctgtttctttccgttctctttctctttgctcttttttttttctcctcatacctttctcacttctctgttcattagtctgacagtttccttttctccagaccaccccggtcttccattgcttctaactagatttttacatkatcatttaaaaaatgattatacagttcctgttcaaaatgtattctcctccacttttcttaagtctcaaaacaggtacacttggaccataaagacaaagggaacagccacagtgcattgaactccgtcgtcttctctgatgaccttcaaatgtggtcatcagagaagacctacacgtggtctgaaataaatgacttttgactggctcctgttctagagagtgctttggttttgtttgt

SEQ ID NO: 756737 - DNA, 526 bp, Homo sapiens
ctcatggatcctttcagtcaagaagtatttattgagctctactatgtgtcaggcactgttctaggtgctggggattcagcaataaacaaaacacaaattcctgaccttgtggagctgaaaatgagtccttttggatattgtctgttgtagagaagtctagaaataaycctttaccctacactgtggcctctgtgcctggggagaggaggaagccatgggggtaagtgtgtgggagggggattgcaggattggcaggatttcagctgaaatgttttcacacatgctgtacaacaaataaaatgctgggttaacgagccagtgacaggaaagcattctctgctgttggaacataaattgaaggaggtttgcagaattaaatggcttaaaaatggggctacctcccacctcccagaggttgcacagggacatggctctgtactgaggcagctttagttctctcataaagcccagatgtgttcacggccacttccatgtgtcaaacacactgggaaaaagccgcttgact

SEQ ID NO: 756738 - DNA, 526 bp, Homo sapiens
ctcatggatcctttcagtcaagaagtatttattgagctctactatgtgtcaggcactgttctaggtgctggggattcagcaataaacaaaacacaaattcctgaccttgtggagctgaaaatgagtccttttggatattgtctgttgtagagaagtctagaaataatcctttacccyacactgtggcctctgtgcctggggagaggaggaagccatgggggtaagtgtgtgggagggggattgcaggattggcaggatttcagctgaaatgttttcacacatgctgtacaacaaataaaatgctgggttaacgagccagtgacaggaaagcattctctgctgttggaacataaattgaaggaggtttgcagaattaaatggcttaaaaatggggctacctcccacctcccagaggttgcacagggacatggctctgtactgaggcagctttagttctctcataaagcccagatgtgttcacggccacttccatgtgtcaaacacactgggaaaaagccgcttgact

SEQ ID NO: 756739 - DNA, 526 bp, Homo sapiens
ctcatggatcctttcagtcaagaagtatttattgagctctactatgtgtcaggcactgttctaggtgctggggattcagcaataaacaaaacacaaattcctgaccttgtggagctgaaaatgagtccttttggatattgtctgttgtagagaagtctagaaataatcctttaccctacactgtggcctctgtgcctggggagaggaggaagccatgggggtaagtgtgtgggagggggattgcaggattggcaggatttcagytgaaatgttttcacacatgctgtacaacaaataaaatgctgggttaacgagccagtgacaggaaagcattctctgctgttggaacataaattgaaggaggtttgcagaattaaatggcttaaaaatggggctacctcccacctcccagaggttgcacagggacatggctctgtactgaggcagctttagttctctcataaagcccagatgtgttcacggccacttccatgtgtcaaacacactgggaaaaagccgcttgact

SEQ ID NO: 756740 - DNA, 598 bp, Homo sapiens
ttcagtcaagaagtatttattgagctctactatgtgtcaggcactgttctaggtgctggggattcagcaataaacaaaacacaaattcctgaccttgtggagctgaaaatgagtccttttggatattgtctgttgtagagaagtctagaaataatcctttaccctacactgtggcctctgtgcctggggagaggaggaagccatgggggtaagtgtgtgggagggggattgcaggattggcaggatttcagctgaaatgttttcacacatgctgtacaacaaataaaatgctgggttaacgagccagtgacaggaaagcattctctgctgytggaacataaattgaaggaggtttgcagaattaaatggcttaaaaatggggctacctcccacctcccagaggttgcacagggacatggctctgtactgaggcagctttagttctctcataaagcccagatgtgttcacggccacttccatgtgtcaaacacactgggaaaaagccgcttgactttatgtcctggggcttctacttaggtcggtctggaaaaatgcaagcagttcatttaacactctgagctccagtaatatgggtat

SEQ ID NO: 756741 - DNA, 630 bp, Homo sapiens
atcggaactccttcccagctctcccttccaggaatctgtgcttctgcagccaagactccaggtgtcatgcgctccacacccttgggaatgaacccaccatgcagggctttgtgtgcccctgctccctgctctgacttcctcaggtcctgcttggagatcatgctgctgtccctgctaaaactctttagtgtcttcttgttggccctggggtgaaatcccaacgcctcccgatggcctccgaggtgcttgcaacctcatgctgcccaccctgccaccacactgtgctcacttttycctctagctcatgctactctagccaacactggcctctggttggttctagaacattccagatcctctccctctgagggccattgcacctgctgtgcccgtgtctggaacattctttacatggcttttcatgtagccagcaccttttcatccttctgctcttggtttcagtgttgtctctccagagggtcctttcctgatctcttatctaaagcagccccatcaccactattagcccccatcgcagtcctcctttggttttctgcctggtattcctattttgtttatgcgtctccttacttatttatctctaccttcaagaatgtgagccacaggagg

SEQ ID NO: 756742 - DNA, 630 bp, Homo sapiens
atcggaactccttcccagctctcccttccaggaatctgtgcttctgcagccaagactccaggtgtcatgcgctccacacccttgggaatgaacccaccatgcagggctttgtgtgcccctgctccctgctctgacttcctcaggtcctgcttggagatcatgctgctgtccctgctaaaactctttagtgtcttcttgttggccctggggtgaaatcccaacgcctcccgatggcctccgaggtgcttgcaacctcatgctgcccaccctgccaccacactgtgctcacttttccctctagctcatgctactctagccaacactggcctctggttggttctagaacattccagatcctctccctctgagggccattgcacctgctgtgcccrtgtctggaacattctttacatggcttttcatgtagccagcaccttttcatccttctgctcttggtttcagtgttgtctctccagagggtcctttcctgatctcttatctaaagcagccccatcaccactattagcccccatcgcagtcctcctttggttttctgcctggtattcctattttgtttatgcgtctccttacttatttatctctaccttcaagaatgtgagccacaggagg

SEQ ID NO: 756743 - DNA, 630 bp, Homo sapiens
atcggaactccttcccagctctcccttccaggaatctgtgcttctgcagccaagactccaggtgtcatgcgctccacacccttgggaatgaacccaccatgcagggctttgtgtgcccctgctccctgctctgacttcctcaggtcctgcttggagatcatgctgctgtccctgctaaaactctttagtgtcttcttgttggccctggggtgaaatcccaacgcctcccgatggcctccgaggtgcttgcaacctcatgctgcccaccctgccaccacactgtgctcacttttccctctagctcatgctactctagccaacactggcctctggttggttctagaacattccagatcctctccctctgagggccattgcacctgctgtgcccgtgtctggaacattctttacatggcttttcatgtagccagcaccttttcatccttctgctcttggtttcagtgttgtctcyccagagggtcctttcctgatctcttatctaaagcagccccatcaccactattagcccccatcgcagtcctcctttggttttctgcctggtattcctattttgtttatgcgtctccttacttatttatctctaccttcaagaatgtgagccacaggagg

SEQ ID NO: 756744 - DNA, 594 bp, Homo sapiens
cagagggtcctttcctgatctcttatctaaagcagccccatcaccactattagcccccatcgcagtcctcctttggttttctgcctggtattcctattttgtttatgcgtctccttacttatttatctctaccttcaagaatgtgagccacaggagggctcctwggtcatcgctgtattccctcacttccagccctgcagagagcctgcacctcctcctggctgtaagcattaatagctgctaaacacaccctggtccaggtactgtgctgagcccctgatatctcatttaatccatatattatctggcccatggatattatttttttaatccctatttaaaagaggaaaccaagacacagcagggtcaaatgacctgcccaaggtcatgccatccatgacagtgtccgggtggttttgctttagaatttgtgctcttaaccactgtgtggcgctaccagaccttacaggatggtcaagcaatattgacggagtgtttgctgcaggtgctgtgctaagtgctgaatacattacatgttgagcagatgaatacgtgaaagaataagtgaatttgaggagcatgcggcaggcactg

SEQ ID NO: 756745 - DNA, 594 bp, Homo sapiens
cagagggtcctttcctgatctcttatctaaagcagccccatcaccactattagcccccatcgcagtcctcctttggttttctgcctggtattcctattttgtttatgcgtctccttacttatttatctctaccttcaagaatgtgagccacaggagggctccttkgtcatcgctgtattccctcacttccagccctgcagagagcctgcacctcctcctggctgtaagcattaatagctgctaaacacaccctggtccaggtactgtgctgagcccctgatatctcatttaatccatatattatctggcccatggatattatttttttaatccctatttaaaagaggaaaccaagacacagcagggtcaaatgacctgcccaaggtcatgccatccatgacagtgtccgggtggttttgctttagaatttgtgctcttaaccactgtgtggcgctaccagaccttacaggatggtcaagcaatattgacggagtgtttgctgcaggtgctgtgctaagtgctgaatacattacatgttgagcagatgaatacgtgaaagaataagtgaatttgaggagcatgcggcaggcactg

SEQ ID NO: 756746 - DNA, 594 bp, Homo sapiens
cagagggtcctttcctgatctcttatctaaagcagccccatcaccactattagcccccatcgcagtcctcctttggttttctgcctggtattcctattttgtttatgcgtctccttacttatttatctctaccttcaagaatgtgagccacaggagggctccttggtcatcgctgtattccctcacttccagccctgcagagagcctgcacctcctcctggctgtaagcattaatagctgctaaacacaccctggtccaggtactgtgctgagcccctgatatctcatttaatccatatattatctggcccatggatattatttttttaatccctatttaaaagaggaaaccaagacacagcagggtcaaatgacctgcccaaggtcatgccatccatgacagtgtccgggtggttttgctttagaatttgtgctcttaaccactgygtggcgctaccagaccttacaggatggtcaagcaatattgacggagtgtttgctgcaggtgctgtgctaagtgctgaatacattacatgttgagcagatgaatacgtgaaagaataagtgaatttgaggagcatgcggcaggcactg

SEQ ID NO: 756747 - DNA, 594 bp, Homo sapiens
cagagggtcctttcctgatctcttatctaaagcagccccatcaccactattagcccccatcgcagtcctcctttggttttctgcctggtattcctattttgtttatgcgtctccttacttatttatctctaccttcaagaatgtgagccacaggagggctccttggtcatcgctgtattccctcacttccagccctgcagagagcctgcacctcctcctggctgtaagcattaatagctgctaaacacaccctggtccaggtactgtgctgagcccctgatatctcatttaatccatatattatctggcccatggatattatttttttaatccctatttaaaagaggaaaccaagacacagcagggtcaaatgacctgcccaaggtcatgccatccatgacagtgtccgggtggttttgctttagaatttgtgctcttaaccactgtgtggcgctaccagaccttacaggatggtcaagcaatattgacggagtgtytgctgcaggtgctgtgctaagtgctgaatacattacatgttgagcagatgaatacgtgaaagaataagtgaatttgaggagcatgcggcaggcactg

SEQ ID NO: 756748 - DNA, 610 bp, Homo sapiens
gttacaaaatccaaattatttttggatataatttcagtattttgggatcctaactatttaaactgtacatctgtaagaacaatggagcacgtacattccatttttcttttgttattctccatttactaaaagattcaaaatgatcaaaacaacttttgttttcccctggaataaaaaaagcttcctttgcccagctctttctcatttagtttcacaaactatattaaataaaactgctgatacagcattttggaagctgtaggggacaacaaagtttcctgcaaaataacttcttaatatactgcttcactataagtcacaaatacacagaattttgggtccaatcatgtgacacactgagacatgctgttatgattgtcttttgggactgttcagatgagcctatctgttcatgagcgaagagttcacagacagccttttggactgctgcagactcagtggaggtctctataagaacaggagggctgacttgtcmactggctgaaatgtatgagcaggtggaaactgatgggtttccacctttgcagctctccagctggcatgagactcagtcttaaggctttgggctgttttctcccctttcaaatga

SEQ ID NO: 756749 - DNA, 610 bp, Homo sapiens
tttttttatttcatttccttcacagttggggagaacttaaaaaacagaggtaataagaacaataaaaatcatgcagagacgatcagagtggacaagtcctcagaggatgcctgtcctgtattgtatctgtattttaagaagaagtatgaaagttttactgatgtagtaattcccacgatacagagatttttatatataaacagcacctaaacgttggaatgaaagaagaaattagttactctgtcattcatgtaattagcttaaaactggggcagagaggagctgcaagacagtgaaagacacaggggaagaccatgcaatttggaatccaaagttggagattgatctagttagtgactgtgtgtcctcaggaaagcatatttgctsatgatgactcagattccccatctataaaacaaagatggtagtgcctgcttcccagagctgcttgagagatcaaagaaaaataatatggatgaaagtgttgttcgctgtccatcctgcagaaatgtcaatttcacaagaaacttaaaagtcatcttctgtccatccgcgatgcattctgcttcttccagccccggccacctctgtcattggtcttctctgctct

SEQ ID NO: 756750 - DNA, 474 bp, Homo sapiens
ccaggctggtcttgaactcctgacctcaggtgaaccacccacctcggcctcctaaagtgctgggattacaggcgtgagccactgcgcccggcctgcttgagtggattttgacagctgtgtgttatgttttcccattcacatgcaatggagacatttgctcgtttacttttctacaaagtacctccaagagcattttgtgaagagttttggtttcatctttttgtctcctttgattttttttctctctgaagcctgtttctgttgtgttctagtactttcaatctcattaaagaaagagtaagaaataaacaattatttttacaagcatacaaagaaatwtattgctcttttatatgaaagagagtttgacaatttgtgtaatgtttcaattgctacttataaaactatctgaaagatgtttatccaaaaaaaaaaaaaaaaaaaaaaaagatgtcctccaatgaggactaaggt

SEQ ID NO: 756751 - DNA, 610 bp, Homo sapiens
ttaagaaaattaaaaccaaaaccacattgaaataccactttatatccactaggatggctataattgaaaagataaacaataacaagtgttggtgaatatgtggggaaattagagccctcgtgtaatgctcacaggaatgtaaaatggttcagctgcttggcaaaacagtttggcagtactttaaaaagttaaacattgagtttccatataaccagcaaccttacttttagacccacgtgtctactcatagtgcatatccaagagaactggaaacacatccttacaaaaatgtgtacacatgtgttcatagtaacrttactcataatagtcaaaaagtagaaacaactcatgtgctcaacacttggataagcaaaatatgttttcatccacaaggcagaaggtgattcagctgtagaaaaggaatgacattctaatgcatgcctcagtatgaatgaacttgagaacaccatgcttaagtgaaagaagccagtcacaaaaggcacttattgtatgattccatttctataaaataacagaacgggcaaatccatagagatagaaagcaggttaatggttgccagagatggaggagcagggaatggaaagtgac

SEQ ID NO: 756752 - DNA, 604 bp, Homo sapiens
tagcctccagctgcatctacgttgctgcaaaagatatgatttcattcttttttatggctacataatattccatgatgtatatatgaaccatatgttcttcatccaatccattgtttattggcatttaggttaattcaatgtctttgctattgtgaatagtgctgcgatgaacatatgagtgcacatgtctttttggtaggatttattttcctttgggcatgtacccaataataggattgctgggtcaaattatagttctatttttagttctctgaggaatctccwatcgagtttccatattggctgtactaatttacatcctcttcaacagtattcaagtgttcccttttctctacatcctcaccaccatctatcagttttcgactttttaataaagtcatgtgagacacataataaagttatgtgagatggtattttattgtggttttaatttgcatttctctgacgattagtgatgttgagcatttttttcatatgtatgtttttgcttgactatcttcttttgagaagtttctcttcatgtcctttgcccgcattttaatggggttgttctccacttgttcaattgttcaagttccttaga

SEQ ID NO: 756753 - DNA, 604 bp, Homo sapiens
tagcctccagctgcatctacgttgctgcaaaagatatgatttcattcttttttatggctacataatattccatgatgtatatatgaaccatatgttcttcatccaatccattgtttattggcatttaggttaattcaatgtctttgctattgtgaatagtgctgcgatgaacatatgagtgcacatgtctttttggtaggatttattttcctttgggcatgtacccaataataggattgctgggtcaaattatagttctatttttagttctctgaggaatctccaatcgagtttccatattggctgtactaatttacatcctcwtcaacagtattcaagtgttcccttttctctacatcctcaccaccatctatcagttttcgactttttaataaagtcatgtgagacacataataaagttatgtgagatggtattttattgtggttttaatttgcatttctctgacgattagtgatgttgagcatttttttcatatgtatgtttttgcttgactatcttcttttgagaagtttctcttcatgtcctttgcccgcattttaatggggttgttctccacttgttcaattgttcaagttccttaga

SEQ ID NO: 756754 - DNA, 574 bp, Homo sapiens
actgtagaaggcagtttggagatttctcaaagaacttaaaacataactaacatttgactcactcatcccgttactatgtacatattcaaaagaaaataaattgttctacccaaaaagacacttgcattcatatgttcattgcagcactattcacaaagcaaggacacggaatcaacctaggtatccaccaatggtggattgaataaataaaatggggtacatatacaccatggaataacagccataaaaaggaatgaatgaaattatgtctcttgcagcaatgtggatgcagctggaggccattatcccaagtgaattaatgcaggaacaaaaacycaaataccatatgttcttacatacaagtaggaggtaaagaatgggtaatgatggacataaagatggccacaatagaaactgaggattactagacaggggagggaggaagggagtaaaggcttgagaaactaattattgggtactatgctcactacctgggtgattgcatcaattgtacttcaaacctcagtatcatgcaatatacccactgaatctaaataaaagttgaaattatttt

SEQ ID NO: 756755 - DNA, 574 bp, Homo sapiens
actgtagaaggcagtttggagatttctcaaagaacttaaaacataactaacatttgactcactcatcccgttactatgtacatattcaaaagaaaataaattgttctacccaaaaagacacttgcattcatatgttcattgcagcactattcacaaagcaaggacacggaatcaacctaggtatccaccaatggtggattgaataaataaaatggggtacatatacaccatggaataacagccataaaaaggaatgaatgaaattatgtctcttgcagcaatgtggatgcagctggaggccattatcccaagtgaattaatgcaggaacaaaaactcaaataccatatgttcttacatacaagtaggagstaaagaatgggtaatgatggacataaagatggccacaatagaaactgaggattactagacaggggagggaggaagggagtaaaggcttgagaaactaattattgggtactatgctcactacctgggtgattgcatcaattgtacttcaaacctcagtatcatgcaatatacccactgaatctaaataaaagttgaaattatttt

SEQ ID NO: 756756 - DNA, 607 bp, Homo sapiens
tatatattttatccagaaggtgaagatccaagcctttatactctttcctctaaaattatatgtatatataattatatattgaagggttggtaaatttgtttagcaagagtcaatctttaaaagcctggttgatttgwttaggggcatcaacactaaagagtttctattcccaacagtgaggaccaaccccaggacttcagtgacctcatcactgaggagattctacttgagctgttaaccctttttccacttgatatcttacttttgtcttccaacaacaggcaagtacttccttctgaggcactgaattacatttttagacagaggtagttattagaaaatctttatctttcctctctatgtctacatattagcctgaattcagacctctagaacctaaaggagtatatgtaatctattttccacaagatgatcttgcagttatgtgaaaaataatcatcagatgctattaactgtcatcttcccattctctcattcattccttcacctattccttttctgtagaactcttcaattccagacacttcaagaacttgttatccagaagatcagaatcaaggttttcctttggggatatttcagtata

SEQ ID NO: 756757 - DNA, 644 bp, Homo sapiens
tagtttatgcaagccatattaactgggaccaaatcgcaggtcttttggcctcaaacatgttctctttccagtacagcacacttgtaaactggaatagtctcatcatcccttaatattgtcattgatctactattgcaacagccagcattatagagtcaatattataaattgctgtactagaaagatggtttgttaaactgaagaccacaaaccttaaaatyagatgtatttaaaccttgcaaatttctacacgtccccatcctacaatcttctatcaatagcaaaattggcttgttgattaccatttagaaactacctggtaatgcccagaccctgaaagtctctcttggtgggtcacttcaccttgatgaagtggagtattgggcaagtagggtcatatagcaggggatcctgcagggtgaggatccaaagttagttcccaccacggaatccagaagagcaaaggcagttgctccttagtcattgtctcatcacattggcctgtgtgatgtttcaataaaacgagaattctaatttctagaagtttttcctgttttattttctgcaataggggcagcagtcgtagtagagacttaggaaattatttaagttgcagcagggtggcagctgaacgttcctcaaac

SEQ ID NO: 756758 - DNA, 601 bp, Homo sapiens
actttctcttagtattgaatatttttgttgcattagttttaacttgatgttggaatgttattcctgtagcagaaaatactacacagctgtcaactgtgttccttagtgcctagccagaaaaatatttggaggctatttcaaaagtccttcttcatttatgtggctttgctgatcaacttttcaatcaactactgaaattatagtttccagtgaagagagagagagggggtaaagtggtgggaagtaacccatctagatgtgcaataatatcagaaagaattttcsaagaatttatttggattctagaagataaaaggaactatctcattctcattcaaaaagattctcagaacagtgaagacttttaaaatacatgtgtttctctctcccccccacacacaaaaaaacgttaaaaaaaaaaatcataatcagttggtgataaggcaaccggagaaaaataaagcaggcactgagtctccttagcgctaaatttctggctgcctgaaatgctgtcaacaattgctggatggagtttcttctgcctccaccccctgcattttgccaaggtcacctatcacacctttacctaattatctagagc

SEQ ID NO: 756759 - DNA, 596 bp, Homo sapiens
ttaatgcctgttgaggtcaacccacagcagtggaaggtggcccctagaatagagtagtgctcttacattgggcatttgagcaaacaaaccctgggaaattggaactaagagaagggaatcaagctggaagtttgtagcccaaatattcattctcatctacaaaaatccaccagaacaaataaggttaagctgatgcgtatccgcagatttgcaacagtgtggcattccactctctacttttcttgtcagaaactgagaatgtgtaaaatggaagatgtggcgatatcaagcagccaaagctattttccaaatgaggacaaaagaagtgcggccagtttacacaaagcaagcgaacttgctgagcagttataatctgcattccagattytcagcccagagccatcattcctggcttgctcttctaaacagaaatgtcaatgcaaagattaaagtggattgtagtgaggtagaaagttgtcagcagggactaacatcagagtcttacaaaggcattttacctagttaagcatttatggtatgcacgcaattttggccatcacaggctcaaggagagggattctacaaaatacatcaca

SEQ ID NO: 756760 - DNA, 644 bp, Homo sapiens
gattctaagtaggttctagtttcaggagtattccaacacactatgttaccttagacaagtcatgttctctctttgtgattaggtttctcatcaaaaggaaggaaagaaggaagggaggaagaagggactgggagtgttggtaatagataacccttaatatcccattcagatcaaatttctataattataatgtggctctctgcctctggaggtcactcartaacaaagaaatataactttaaaaatagccaaagtaggaaaaataacaatcattctcataaatctgcagtttctttctttctttctctctctctcttttcttctctctctcttctcttccttcctttctttcttctttctttctttcttttcttttctttctttctttcctttctttctttccctgtctctctctctctctttctttctttccttctttctttctctttcttcctttctgatggagtcttgctctgtcaccaggtgggagtgcagtggtgccagatcagctcactgcaacctccacctcctgggttcaagtgattcccctgcctcagcctcccaagtagctaggactacaggtgagagtcaccaggcccagctaatttttgtatttttagtagagatggagtttcaccatgttg

SEQ ID NO: 756761 - DNA, 645 bp, Homo sapiens
gaacggatagagacaaactagaaccagttcctattcttaaaaaattcaaatgcgagtgggaatatagactctctaaaatatattcttaatgttgtgtcgtatatttactatttttttctatttgattgtaaattctgtgtccctgaattgtcattcctaatagtactgaacccaggaaccctgtgctcaataatcgcatgtgtggcctatcctcctgtgaattatgctcttcccagacacatgraagtacacctttcagaggctgatggttatcattctttcctaaagaattgattgtgcaactgacattcactgagggcttgattctcctcgcctcagagctataacccagttacttgttggattcattccaattctcttccctcatccattttccactctagatttttatttaccaatgcagataaaggttatgctttacagagctcttctagctttacagttaacttctcaaatccattttcctgtcactgtttgttaattcaccaacgtattccttttaaaaagtagaataaaaaaatatgtttattttcatcttattttacaagaatctttgtagattgccctttgagacttgattcatggatccaagatcacctgagacgcaaaactttcctggacttt

SEQ ID NO: 756762 - DNA, 459 bp, Homo sapiens
gtgacatattttttctcttatttcttctttgaaagaactccaaagctttgcagatagtttttcctttcactttctctctctgtctctccctcttcctctctctctcccctttccctcccctcttctcctccacgttttaatccttttcttcttctcatgacccacccagaattaccttctgagtaacataagttttatttagaatttgtaaaaataaaattgcttcagggcttagaycctataggccaatctttgcttggagacaatgtttacaacttagcgataaattgggattgttatcaaggggttgacagactgttacctaaagcacggctggaaataatgccataaaaattgctgaacatgggaaagtaaatgctaatggctcctgcagtaaaaacaagttggtaaagagcaatcaacacaataagagttactgtggtcagtttggggatggag

SEQ ID NO: 756763 - DNA, 608 bp, Homo sapiens
atgtaatatatgtgtgtgaataaatatttgtatatattctttttaatgtatattttatatatatatgtctatctatattgtggttttagacaattttatgtctctggggctcaattttctcatttatttaatggggccaaaataataatatctaaaatcttgcctgtgtagatgtaacagaataaaatattaacaattttgacaaaactgatattaaaataataattacatggcaaaaaataactgtatactcaaactcaaagcacagcagaaaaactgtgagataatatttgcaatatatatcacagataaaaattcatgtccytaaatataaaaaactttttgaatgagtgaaatattatcaaaaatataatagcaaatgggcaaaagatataaatggatggttcacaagaagaatgtaaatacaaaaaagacatttaacctccctcataatgagaaaaacgaaaataaaactgtactgacttaccctttctcaagtatcagataggcaaaaatgaaaaaaatcatatgacaacatactcagtgaagatgtagataatagtcactctcatacaattcagtatgaaaaaacattagtaagcacctta

SEQ ID NO: 756764 - DNA, 603 bp, Homo sapiens
tggactctatacaaactattaatagttctaatctacccagccaacctcatttttcaccactgttcctatccttaacctctactctccgtaatataaagtgactcattcttcccagaacacacactgttttctcattcttayatgtaccctcttgaatgcacctcttttcttgttttcctagcaaattaccattaaattcaacatcatttgtctgaaattttattctgtgaaaatttcttgatctttccaaacataattaatgagcattttccctaaattctatagcattgtaatctactctgttaaattgtacttttacatggtgctgtttactacttaataaaatattctaccccactagatcattatctccttgatatcaataactatatatattcatgtttgaatctgtaatacctaacagtggatcttctacctcacagactgtcattaaatgtttttaaaactacctgtacctccagactttcctcccccaatctcatatttgaggtgtcatatctaaaatatgaaatgagatacgtgaactcagcactctacagtgtctctcaaggaagtcttacaagagattcctcattaggttca

SEQ ID NO: 756765 - DNA, 603 bp, Homo sapiens
tggactctatacaaactattaatagttctaatctacccagccaacctcatttttcaccactgttcctatccttaacctctactctccgtaatataaagtgactcattcttcccagaacacacactgttttctcattcttacatgtaccctcttgaatgcacctcttttcttgttttcctagcaaattaccattaaatycaacatcatttgtctgaaattttattctgtgaaaatttcttgatctttccaaacataattaatgagcattttccctaaattctatagcattgtaatctactctgttaaattgtacttttacatggtgctgtttactacttaataaaatattctaccccactagatcattatctccttgatatcaataactatatatattcatgtttgaatctgtaatacctaacagtggatcttctacctcacagactgtcattaaatgtttttaaaactacctgtacctccagactttcctcccccaatctcatatttgaggtgtcatatctaaaatatgaaatgagatacgtgaactcagcactctacagtgtctctcaaggaagtcttacaagagattcctcattaggttca

SEQ ID NO: 756766 - DNA, 647 bp, Homo sapiens
acagtgccacctattggtaaaataaagacgacgtaaccagtttttctgtaacccatatttggtaccagagtcttaagaaatctgccctggattttcgcaggcagatgttagaaagcagattgtctgtgatccaactgaaatgggagatgaatcacgtgttttatgcagagatgctcaagcttgtcatttagaagaactccaaataggatctcaaaagcatgatatccgacttccccagttcgtggttctgccaacaaagagcctgtgaaactgcttagggattctaagaatttagattgttcccacatattgggatgcaaattgttttatatgccatgctactcaggcgtgattgttgctttttagcgacagcaagttgaagtattgagctcatttgatawgtgttctgccagtcttcatgttatcacacaggctattaagtgccaaaaaaggcattagtttcactgaatatatttaatttttaaaagttagttttataaggttagtgaatgtaattttctctttcttcattataagcttttctagagaaggatattatttctacagaactaacataataccaaatacagttgtcttgatattgtggggggaggattggtttcaggatccccttaaatactaaaatc

SEQ ID NO: 756767 - DNA, 646 bp, Homo sapiens
atttgtatgaagtgtttaatgttgttcccgacatgtactatatgctcaataaatggcaaatattataatttattgtttaatatgttggtttttccccccaatgtgatgcttctttccagttttaatatatgtcactttactaggtactacacctggctttaggccatacttgttttcctttttaaaataaaattttctatttctgttaactatgtcactcttctgatctttgatatttyccccaatctacatttaaaaataccaatgcatcttctttttgttgcatggaaattgcattcaactttaaaagtatatccaatttaggccagataatatgacaaaattctgaaatattgtagatttgtgatgaatacatttttaaaaatctatatgcacagaagatatcttcaaaatgaagcactattttgtatttattatatttttaaaggatgtgggcactttcttaatagtcaaatggaaatatatttcaggaaaagctaaatttagtattatattttctattttgtgatggtagtttgtttattattgttattcatttatttgtttttggctggcagcaattgatagtaacttatgctgccatgaacaactaagaaataagtcattcacataatttatgaagaac

SEQ ID NO: 756768 - DNA, 670 bp, Homo sapiens
tagaaatctggagagcagaggcatcatgtaactttatttttaaagcttctgaaaggtaaataaactgtgatggttcctctggtattgtacctgaaagaccgattgatgcttttctagtaatatgctttatcacaccctaaaaaatttaaataagggatttttgggggggggaaatacttcaaagactgaaataggccaatcttaaaatcactttaaatattgtacataccaaaamtatttttgcaatagagtgctttgcatattgagtcttgcactaaaatactgttgttggggaggaagaatggtcattttagagtgtaaatacaagactctattcctaaatatatgaatagtccaaatgaagattcagaaattttttctaaaaccacgtgaaaagcttactggaaaaataacactgtcttataagaattatattattttgatggaggtgccaaacattaaactataaaagggtgactctcattaccttttcctcacaaatttctttgaaaatttattacaaatgattgtgcttactggcagagttcacaatcagtagagtccatgcaaacaatctacttcaatgagaagtacattcttttactctatcaaatccatcggaggtaatcagactggatgttttattcaacagggctgaagaaaattgttc

SEQ ID NO: 756769 - DNA, 516 bp, Homo sapiens
catgagaccaatttgagaaataaaatgaaatggaaataataaaggggtaaaatatttaattcttgaaatgtttttctcacatactggcagaaaagatagcataactttccattatataatcttctcaatgtaagcatttatttgacagttataaagggataggatttggtatacagaggaatcaataacaatgttgtaaagcctagaacagtgcacacaaacatgctgtaggagacattaacattagactgaaagaaataattatattttcaataaacatgttcctcctagtrgggtaatcaattttttacacatcttaccagctatttcacagagctcaggtaatgaaatggcagcagctgttataccaaaaccatatattacatgcatacgagatgcttttttcataggtatctacttatttgtgtaaagccacatttaacacatattaaataaaaacaaggtaatcatggggtgattaattcagaatttttagtaccatcctattttagaaat

SEQ ID NO: 756770 - DNA, 648 bp, Homo sapiens
acaacaactataatccatcatgtaaatatgtactagagatttgaattaggtaagtacttactgctatataacaaactcttgctttttctaccaacatccagtttttctccagatcaagatgtttttcctttttataacaattggcagcagcaagattagctatgagggacytaaaacaaccaaagaataagcaagtaatattatagtcaaacttagcatatgtttcaatagataattaccaatattttttgcaaagtttaaaatttacattttaattaattcttcaaaactaatgttattgatttttaaataaatataaataataattttgttttgagaactttctgaggcatctatgataatttttgttctaaacaacacctggtattttgagaaagaaattggcatttaagttgccttttgatagtaaaataggacctactttttacaccttaatagttcaaaatgcagttaagaaataaggctaactcattatataaaaagaaatctatgcaactaaaaacattttttaagtagaaaaatatctttataaaaataaatatcaacatactataattgtctatttaatcgaagcctttaaaagccaaatatggaattaatttcgtaaaagacacttataaatgtaga

SEQ ID NO: 756771 - DNA, 648 bp, Homo sapiens
acaacaactataatccatcatgtaaatatgtactagagatttgaattaggtaagtacttactgctatataacaaactcttgctttttctaccaacatccagtttttctccagatcaagatgtttttcctttttataacaattggcagcagcaagattagctatgagggacctaaaacaaccaaagaataagcaagtaatattatagtcaaacttagcatatrtttcaatagataattaccaatattttttgcaaagtttaaaatttacattttaattaattcttcaaaactaatgttattgatttttaaataaatataaataataattttgttttgagaactttctgaggcatctatgataatttttgttctaaacaacacctggtattttgagaaagaaattggcatttaagttgccttttgatagtaaaataggacctactttttacaccttaatagttcaaaatgcagttaagaaataaggctaactcattatataaaaagaaatctatgcaactaaaaacattttttaagtagaaaaatatctttataaaaataaatatcaacatactataattgtctatttaatcgaagcctttaaaagccaaatatggaattaatttcgtaaaagacacttataaatgtaga

SEQ ID NO: 756772 - DNA, 613 bp, Homo sapiens
agatttgaattaggtaagtacttactgctatataacaaactcttgctttttctaccaacatccagtttttctccagatcaagatgtttttcctttttataacaattggcagcagcaagattagctatgagggacctaaaacaaccaaagaataagcaagtaatattatagtcaaacttagcatatgtttcaatagataattaccaatattttttgcaaagtttaaaatttacattttaattaattcttcaaaactaatgttattgatttttaaataaatataaataataattttgttttgagaactttctgaggcatctatgataatttttgttctaaacaacacctggtattttgagaaagaaattggcatttaagttgccttttgatagtaaaataggacctactttttacaycttaatagttcaaaatgcagttaagaaataaggctaactcattatataaaaagaaatctatgcaactaaaaacattttttaagtagaaaaatatctttataaaaataaatatcaacatactataattgtctatttaatcgaagcctttaaaagccaaatatggaattaatttcgtaaaagacacttataaatgtagac

SEQ ID NO: 756773 - DNA, 559 bp, Homo sapiens
actctatactggaagatgaagaatgtagtgcacttacactgttttgcctttttattcttccttatatttgctttagtttgattttttattgattgactttatgacttcaacaatatatttaaaacctttttaaaaacttgatttttaacatttgagatatttatggagtcttctccatgaaagggagaattttgcatgcaatagtgtatgatgggcacttttaacttttttatggctttctttttcaaagtcatacaccactttacttttcttttaacctmattccatctttcttctgttttttttgggggggagaggttggaacatctccttagtaattttttccacataggaaaaaggattattaaatattactttgccttattaacctgataatttgagtacatattgaaaatttctagtttcaaaaatttcctcccttctcagcatagaatacattactccattatatttttagcatccggtattctttgagaagttaagtattagtctgatttttattccttttaaggtaattattatttttcacattatatgc

SEQ ID NO: 756774 - DNA, 618 bp, Homo sapiens
aaaaacgtaacttaaaagctatctgtattgaagtgtgatctgttatatgtattcagatctgattatacttggagtcgaaatcactgtatctaaattaatattaagactcagggccaggcacattgtctcacatctgtaatcccagcacttcaggaggctgaggtgggaggtcagttgaggccaggagtttgagaccagcctgggcaacatagcgaaaaactctgtctccacaaaaaattaaaaaaataaaaattagccrgacatggtggcatgtgcctgtagtcctagctacttgggaagctcaggtggaggatcacttgaatctagaggtggaagctgcagtgatctgtgatcgtatctctgcacttcagcctgtgtgacagagtgagactttttctcaaataaaagaatcaatacagcaatacagccccaatttctaaattggagaaagtcattttctatttcgtctctctctgttcctccactagattgtaaactctttgagagtaagaattatgcagttttgtctgctcttcaatgttttattgccttgcattaaaaagataataaatactgcttgatgaattaattaaaaacagcatacagaagagatccaaa

SEQ ID NO: 756775 - DNA, 618 bp, Homo sapiens
aaaaacgtaacttaaaagctatctgtattgaagtgtgatctgttatatgtattcagatctgattatacttggagtcgaaatcactgtatctaaattaatattaagactcagggccaggcacattgtctcacatctgtaatcccagcacttcaggaggctgaggtgggaggtcagttgaggccaggagtttgagaccagcctgggcaacatagcgaaaaactctgtctccacaaaaaattaaaaaaataaaaattagccggacatggtggcatgtgcctgtagtcctagctacttgggaagctcaggtggaggatcacttgaatctagaggtggaagctgcagtgatctgtgatcgtatctctgcacttcagcctgtgtgacagagtgagactttttctcaaataaaagaatcaatacagcaatacagccccaatttctaaattggagaaagtcattttctatttcrtctctctctgttcctccactagattgtaaactctttgagagtaagaattatgcagttttgtctgctcttcaatgttttattgccttgcattaaaaagataataaatactgcttgatgaattaattaaaaacagcatacagaagagatccaaa

SEQ ID NO: 756776 - DNA, 487 bp, Homo sapiens
ttagtggcagtatactcaaaaaaggaaatgtgtaggctttactataataaaaataagaacaacttatataagctccacactttatagatttgtatggatatacaatcaaatgtactaatttttaaattatcctcattttgcagtaattttacattttgctcatttgtgcaaaccrtggtgatagtaaaatatttaacagaaattcaagcacattcttttaactctttctgaaaaatctcacaaatgagatttttttaaaacagttaagaatttactaaatttaaaatgtatatatacctgatgccatccagatgttttattgaatttctaaaataaaagtccacctaatgaatggctaatttactcaacacgtaagacaaagatgtatttctgtgttactaagaacatgcatcctatctccttgacaatggctctaattacctcagcttggactgatcaatatttgatctttttcccaccatgcaaa

SEQ ID NO: 756777 - DNA, 653 bp, Homo sapiens
caccgttaaccaagaattctatatccaacaaaactatcctataataaaggggctatttaagacattcccagataaacacaagctaagacagtttgttaacaatagacctgccctacacaaaatgctaaagagagtccttcaggctgaaatgaaaggacatttgatagtaaccagaagccatatgaagaagtaaagaactctggtaaaagtagctacatagtaaatataaatgccactatcactgaacttttggtttgtaattccttttatttttatatgatttaaaagacaaatgaataaaagaatagttacaaatctatgttaatgggcatgcaatatataaagacgtaatcaatgagcrtaataatatataagaagaggatggagatgtaaaggagcagagtgtttgtatattattgaaactacattggtattattcaaattaggttgttatgagtttagaatgttcattgtaattcaaatggtaaataataaaagtaactaaaacatatacaggaaagaaaaggaagaaggtatcaaaaaagaacactaccaaaaattaacttattcatgttttattacttagacacaaaaatttaaaaacacatagttgttatcggctgaattataaacacccctccacagaccctcct

SEQ ID NO: 756778 - DNA, 529 bp, Homo sapiens
agcaacaacaacaaataccaaatatttaacaattgttagagtcactgcaaaggctgtttcttacccacagccagggcagtgtgactaagacatgccagatgggaatagggcattctcttttgggtccaggcccatcctgggagtggtgggatggatgtgagggaatgaggggcctccgtcaagctggctgggtggcaggcrctgcacggctctgagggattgagcagccgaggcagtgggacatagtaaggggctgaggcccagggcagtgtaagcatcccattggtgtggaagtatttccatattttaccaatgatatgctctttgagaagcaatatcccatggaaatataatgagagcaatatctatgtaatgaaacatacttaggagacaaagaataaaagtaaaaagaaacaagggaaattaaatttggcatttgtcttactcagtaggtccaaaatgttatctcaacatgtaactaatatccaactgattaatgagcgatttcactctttttgttgttgctgaa

SEQ ID NO: 756779 - DNA, 633 bp, Homo sapiens
caaggtggaactcagggcaattctgaggctagtagttgatgccatcagatactcaagttctgtttcaattgatgccagcaagtattcaagttctatctttctgctctgccatcgtcggtatgctggcttttgtcatcaaacatattgtcctatggtaacaagatggctgccatagcaccaagcatcactgtctcacacaatcacaatgaaaagcaaaaggaaaaaaagtgaggagaggtagtttcttatacactcctttttatgaggaagagaagcatatctcagaagccccttgaagatttgttcttgcatactatggcctgaatgagtcacatgcttatgccctagctgtgacgtatttagtctctagagtgagaggtgaactttgccggcaggggaggagtggggtaatgtrgccaatagacaactaaatgtctgaagcatggggcaagaatcttaatatctctgtcctcagttttctttacccataaattggtgtttcagaattatgttcttaacagaatgcctgatacacaagacaaagtcaatcaaagcatgttctttcatttccagcatccatagttcaagaatttcaggaagctgttgctccaatagtcatgtgttctttggtta

SEQ ID NO: 756780 - DNA, 568 bp, Homo sapiens
catgcttatgccctagctgtgacgtatttagtctctagagtgagaggtgaactttgccggcaggggaggagtggggtaatgtagccaatagacaactaaatgtctgaagcatggggcaagaatcttaatatctctgtcctcagttttctttacccataaattggtgtttcagaattatgttcttaacagaatgcctgatacacaagacaaagtcaatcaaagcatgttctttcatttccagcatccatagttcaagaatttcaggaagctgttgctccaatagtcatgtgttctttggttatgaaggccaaacagaacaaatgataggagcaagtgatcttgacttagatagggtcagccccttcctactagatctcatggcaacatgaakgtgaagcagtgatggggaacagagagtggggaacaataaaacatacaaggaaaaaaaagaccagtttttgaatgctttctattaatatgtgcaaaacactacaaaagcatgtgtatttccaaaatccaaatcatgatcccacttaggaagttaatgcccctatctcagttgccctta

SEQ ID NO: 756781 - DNA, 737 bp, Homo sapiens
agcctccataattgtgagcgataaatttctgttatttataagccgtgcaatctaagacatgttgttagcccaaatggactaaaaagcccaaaccatctcaaaataaaaagatttcaatgcacaagacattgaagacatgtgataggaaatgagtgattttcatctatagtggctctcacatagggcttttctcaaaggcctgaagccagcagcataagaagactccagttccctgtgccctcctgctcttgtggccatgtccctagcatgagggggagaattgctagttaaattatctatgattaattttactccagacctcagtaggccaacaattgttaataacgtgattaccatttgccctttctagcaagtagaatatgtgaaaactgacagtaaatggattattatcatttactgtgctaaagccatgtgcttatttcaatattaaaaaaataattactttttcttactsaagactattgtaggaaaaccaaagaaagtgtgttgagattttccaatagggttatgtatatgaaaggagctttaaatagctaagtacacaatgtgtgtgtgtgtgtgtgtgtgtgtgtgtgtgtgtgtgtgtgcgtgtttcattttcttacttttactattgctatggtctggatgctaatgtcctccttcccccaaattcatatgtcaaaatccttatccccaacgtgatagtatgaggaagtgggaagtggggcctttgg

SEQ ID NO: 756782 - DNA, 737 bp, Homo sapiens
agcctccataattgtgagcgataaatttctgttatttataagccgtgcaatctaagacatgttgttagcccaaatggactaaaaagcccaaaccatctcaaaataaaaagatttcaatgcacaagacattgaagacatgtgataggaaatgagtgattttcatctatagtggctctcacatagggcttttctcaaaggcctgaagccagcagcataagaagactccagttccctgtgccctcctgctcttgtggccatgtccctagcatgagggggagaattgctagttaaattatctatgattaattttactccagacctcagtaggccaacaattgttaataacgtgattaccatttgccctttctagcaagtagaatatgtgaaaactgacagtaaatggattattatcatttactgtgctaaagccatgtgcttatttcaatattaaaaaaataattactttttcttactcaagactattgtaggaaaaccaaagaaagtgtgttgagattttccaatagggttatgtatatgaaaggagctttaaatagctaagtacacaatgtgtgtgtstgtgtgtgtgtgtgtgtgtgtgtgtgtgtgtgcgtgtttcattttcttacttttactattgctatggtctggatgctaatgtcctccttcccccaaattcatatgtcaaaatccttatccccaacgtgatagtatgaggaagtgggaagtggggcctttgg

SEQ ID NO: 756783 - DNA, 604 bp, Homo sapiens
gggaaatgaagactaatgtgctactgaaaggttataattttcagctctcagcatgagtcagactccatgtgccaatgctcccttgaaatcaggttggcagttctccagcattaagcagaaacaccatggaattcatctcatacattatcaaagtygtgcacccacccctacaaatgccacatggaactttaagctccttgctggaggagcaaccccaaaagcctggtagcctgacagtaatgttttcctgttaattttatatacatccgatttgttgttactaaatttttcctttaattttacatcaaatgactttgtagcatactttcagttacattctcatatagaatgtcagagatttgcgtactgaaagtgtcgaatctttatcctcaatatccaaagtagttttagcaaaagctttacacacacacacacacacacacacatgcacagcagaaagaaatatttatgtgaaactaagacaggaacagaaaaccaaacactgcatattgtcactcataagtggaagttgaacaatgagaacacatggacacagggaggggaacatcacacactggggtctgttggggggtgtggggcaagg

SEQ ID NO: 756784 - DNA, 657 bp, Homo sapiens
aagttaatatggcaatttcgatttttttaaaaagctatttatatggatccaaaaaataaaaaggtaaacataatgaatggatttgcagtgaaattctttaatacaagtgtgtttttaaagctgagtttcttggatttgactggctgggatgtgttatttgctttatgtcaatgagctattctacaaacaagtgggcctgacttaaagttcagagcagatgttgacaatgagaaggaagcatttgagtacataaaacaagaatgacatgttgagagaaaccacayaccttactgtgactgagctgactacagaggacaaacaagaggctctgaatgacagttttgagccacgatttgcccttgtcctagccccagtaatgagtcagcccccaccctttcacatcagcgagtatgttaaccatcactgaatgtttaacatttaaaaccgaatcggaaagaatcaggtaattatttgatcattacagccatgtcatccgatgttatattggtaaaagatttggattttaatttttttactcatgtatttggctagcttttcagattcaatggtggagacagactctaagctccagagaggaaggggccacatctccttcaccccacaatgccttctaaatgcactcagttcattttgttg

SEQ ID NO: 756785 - DNA, 657 bp, Homo sapiens
aagttaatatggcaatttcgatttttttaaaaagctatttatatggatccaaaaaataaaaaggtaaacataatgaatggatttgcagtgaaattctttaatacaagtgtgtttttaaagctgagtttcttggatttgactggctgggatgtgttatttgctttatgtcaatgagctattctacaaacaagtgggcctgacttaaagttcagagcagatgttgacaatgagaaggaagcatttgagtacataaaacaagaatgacatgttgagagaaaccacataccttactgtgactgagctgactacagaggacaaacaagaggctctgaatgacagttytgagccacgatttgcccttgtcctagccccagtaatgagtcagcccccaccctttcacatcagcgagtatgttaaccatcactgaatgtttaacatttaaaaccgaatcggaaagaatcaggtaattatttgatcattacagccatgtcatccgatgttatattggtaaaagatttggattttaatttttttactcatgtatttggctagcttttcagattcaatggtggagacagactctaagctccagagaggaaggggccacatctccttcaccccacaatgccttctaaatgcactcagttcattttgttg

SEQ ID NO: 756786 - DNA, 615 bp, Homo sapiens
gggttttttgttttgttttgttttttgtttttttttttactgtgtgcccagcagtgagctttgaatttgcaacccactcttatcctattttacaaatgagaaaactgaggctcaaagccaacaaacaattggcttaaaatcccatgctaagtagcacagactggaccagaacttagatacaaacttgatttaagaagcctctgatcttttttttatttttttatttttttaattatttatttatttatttattttttattttattttttttattgatcattcttgggtgtttmtcgcagagggggatttggcagggtcacaggacaatagtggagggaaggtcagcagataaacaagtgaacaaaggtctctggttttcctaggcagaggaccctgcggccttccgcagtgtttgtgtccctgggtacttgagattagggagtggcgatgactcttaacgagcatgctgccttcaagcatctgtttaacaaagcacatcttgcaccacccttaatccattcaaccctgagtagacacagcacatgtttcagagagcacagggttgggggtaaggtcacagatcaacaggatcccaaggcagaagaatttttctta

SEQ ID NO: 756787 - DNA, 661 bp, Homo sapiens
atgaaaagtctcatgcagctgctgttaattttctaagtcaggccatatatttggtcattgtaactgtgtgtttatagcatacatcttttaaaaagtaaatttgttgtgttataacctacatccagtaaaattcaacaattataagcatacagtatgatgagttttgacaaattcacatagggtttacattaatttttttggtaacagatttattaaattataaattacatataattcacttatttaaagtgtataattccttgatggctttagtatattcagagtagtacaaccatcactaccatcaattttagagcattttcatcacccccgaagaaacctcatatgcattagcagtcactccccatttctccctaccccaaaacctcccagccctaggcagccactaatctactttctgtttctacagatgtgcctgttctggacatttcacataagtggaatcatacaatrtgtggtctctttcaattacattttctcacttagcttaaggtttttaaggttattcatgttgttgcatgtataagcattccatccctttttattgctgaataatagtccattgtgtagatatatatcatactttatccattcatcagttgatgggcatttggatccattatctatatatgtttatcag

SEQ ID NO: 756788 - DNA, 606 bp, Homo sapiens
tcttagtctctttagatgtttggctatttctatcatatcctatctagtttgaggagttcagacaatattttctttaaagaggattctggacagaaattgtaaagtactaaattgtcattagaaagatcagaattgcattgtttacttttacaatagagtaggtaccagagagagcaaatttccaatggagggacatatttgattactacaaaagtttctgatttggaagtttggataattctgttaacacaatcatatggtttgagtgtctagattttatacctacagttttgttcactaattgtaacatctctctgtttttgatyattaaatgttgaaagttaatttgtgtaaagacttatgcacgtggtgacatgagttctgcccagtgctctgaaatcaaagtgaagaaataaatccatggaagcccaggcaaatgatgggtgtagctatgactctctgaaggtagccaaatgccttgtcatctaattaggctgtgtgtgaatggataattgatattcctactgtcttcagagattatctgttgaaaccacagccaagtgcatggtttggcagaatccgtgggcaaagactctgttgcacctg

SEQ ID NO: 756789 - DNA, 592 bp, Homo sapiens
tttatttcacttaaccctttacaatgattattttaaaattaggatgctctttttgaagattaaaaattacagttttagctattgcacgcagggcttaattcctaggtaatgggttgataggtgcagcaaaccaccatggctatatttacctatgtaacaaaactgcacgtcctgcacatgtatcctggaacttaaaatttttaacaatcacagttttgcagtttacaaaattccaccaggaaactctaaattacttttcaataccctgggggaaaaaaatcctgtatctttctaaaccacagacatgttcttgtgggatgaaggctgaggaaactagcctccaatgtgtaatttgatwttccccattctctgctatcttatgtgttcaataaatatctgttgaattgattttcatcatgttgacagataaacttggttggcaagaataggaaagttgtttatttatttgttctgtgtgaaaatatagaactttcaaaacaccaagagcatttttaagtatctaatgatgtgacactttgttagaatctgtacaaagaaataggcaaaaatcacaaatttatagttaatgggt

SEQ ID NO: 756790 - DNA, 479 bp, Homo sapiens
  misc_feature 213, 214: n = A,T,C or G
gaaaaatgtatccatgtcctgacctggcagactatgtccaaaagcaaggaaaacaagcaaacttacccagttgcaaagaggctttcttgcagaaggggggatctgaaaaagccaatacatgagaaattgaatgttgagagagtctaagggccgtggcatcatctgcatcagcactgaactatcctgcaactgcggagaggaggctccttactnntgcgtttgtggtagtcctctgcccgccgccrcaactcttgcacacgttgaaacattttcctatggattacaatcactttcatcagataaagcaccactttcaggatgattttaaataatctgccatgtttctgttatcctcacaactgtacccttacacaatctatctatacctagaaaacgtatttcagatggctataagagtacagtctgagccggtcacggtggctgacgcctgtaatcccagcagtctgggagggcgaggc

SEQ ID NO: 756791 - DNA, 479 bp, Homo sapiens
  misc_feature 213, 214: n = A,T,C or G
gaaaaatgtatccatgtcctgacctggcagactatgtccaaaagcaaggaaaacaagcaaacttacccagttgcaaagaggctttcttgcagaaggggggatctgaaaaagccaatacatgagaaattgaatgttgagagagtctaagggccgtggcatcatctgcatcagcactgaactatcctgcaactgcggagaggaggctccttactnntgcgtttgtggtagtcctctgcccgccgccacaactcttgcrcacgttgaaacattttcctatggattacaatcactttcatcagataaagcaccactttcaggatgattttaaataatctgccatgtttctgttatcctcacaactgtacccttacacaatctatctatacctagaaaacgtatttcagatggctataagagtacagtctgagccggtcacggtggctgacgcctgtaatcccagcagtctgggagggcgaggc

SEQ ID NO: 756792 - DNA, 479 bp, Homo sapiens
  misc_feature 213, 214: n = A,T,C or G
gaaaaatgtatccatgtcctgacctggcagactatgtccaaaagcaaggaaaacaagcaaacttacccagttgcaaagaggctttcttgcagaaggggggatctgaaaaagccaatacatgagaaattgaatgttgagagagtctaagggccgtggcatcatctgcatcagcactgaactatcctgcaactgcggagaggaggctccttactnntgcgtttgtggtagtcctctgcccgccgccacaactcttgcacacgttgaaacattttcctatggattacaatcactttcatcagataaagcaccackttcaggatgattttaaataatctgccatgtttctgttatcctcacaactgtacccttacacaatctatctatacctagaaaacgtatttcagatggctataagagtacagtctgagccggtcacggtggctgacgcctgtaatcccagcagtctgggagggcgaggc

SEQ ID NO: 756793 - DNA, 604 bp, Homo sapiens
aaaaaaaaaaaaaaagaatcacttggctaaataggtagttggaaaccaatttgtggattaaaacagcatcgatttatttgtaaaattctagtattttatttagacttttactatcacctgcagaagtagatacattctctgacagataattgtctactttcagctagacaattatcaatgttttaacttctaggacraatttactttcacttttaaaacaaatttagacttgtgtgtgtgtgtgtgtgtgtgtgtgtgtgtgtgtgtgacttgttcaagatctaagtaatcatgatcatctcattatcttctcttcagttaaaaggaccaaacccataaaaagtggcagaaataaaaacagcaacaaacataaatggaaaacttagaccctgaaatctcagaggtttgctttaaaataattgaaaaaagaaaatcaaagagaattttatttactaattttatagctaggttgatttaggacttgctagaaaagtagcaatattatactttattgatttatgactctagtttttcaattgatatctttagttatttaaaatataaatgtattgtgccctgatcttgaggattgtatgtaaaattg

SEQ ID NO: 756794 - DNA, 604 bp, Homo sapiens
aaaaaaaaaaaaaaagaatcacttggctaaataggtagttggaaaccaatttgtggattaaaacagcatcgatttatttgtaaaattctagtattttatttagacttttactatcacctgcagaagtagatacattctctgacagataattgtctactttcagctagacaattatcaatgttttaacttctaggacaaatttactttcacttttaaaacaaatttagacktgtgtgtgtgtgtgtgtgtgtgtgtgtgtgtgtgtgtgacttgttcaagatctaagtaatcatgatcatctcattatcttctcttcagttaaaaggaccaaacccataaaaagtggcagaaataaaaacagcaacaaacataaatggaaaacttagaccctgaaatctcagaggtttgctttaaaataattgaaaaaagaaaatcaaagagaattttatttactaattttatagctaggttgatttaggacttgctagaaaagtagcaatattatactttattgatttatgactctagtttttcaattgatatctttagttatttaaaatataaatgtattgtgccctgatcttgaggattgtatgtaaaattg

SEQ ID NO: 756795 - DNA, 604 bp, Homo sapiens
aaaaaaaaaaaaaaagaatcacttggctaaataggtagttggaaaccaatttgtggattaaaacagcatcgatttatttgtaaaattctagtattttatttagacttttactatcacctgcagaagtagatacattctctgacagataattgtctactttcagctagacaattatcaatgttttaacttctaggacaaatttactttcacttttaaaacaaatttagacttgtgtgtgtgtgtgtgtgtgtgtgtgtgtgtgtgtgtgacttgttcaagatctaagtaatcatgatcatctcattatcttctcttcagttaaaaggaccaaacccataaaaagtggcagaaataaaaacagcaacaaacataaatggaaaacttagaccctgaaatctcagaggtttgctttawaataattgaaaaaagaaaatcaaagagaattttatttactaattttatagctaggttgatttaggacttgctagaaaagtagcaatattatactttattgatttatgactctagtttttcaattgatatctttagttatttaaaatataaatgtattgtgccctgatcttgaggattgtatgtaaaattg

SEQ ID NO: 756796 - DNA, 552 bp, Homo sapiens
caaagtgctgggattacaggcatgagccaccacgcccagccattgttttgttttgtttttagagatagggttttgctctgctgtccaggctggaatgtagtggctcaatcgtagctcactgcagccttgaactcctggcctcaagctatccttccccctcggcctcccaaagcactgggattacaggcataagccatcatgcccagctctccaaaaggaactttaaaacagaacattttgaaaagaaacatattgatgtgtagaaagtcactgaaaaactgcattctaaagtataagcagagttgtgtcttagcagtgggattataggtaattcttgcatacagagatatctcgttcaagccacagacagtstaggcattggcttattccatgtctccatcagtgcagaggaaggcactgaggtgaacccaagacccaggagggatatatttacttcttcccatggttcaggtagctgagggattctgaggcgtgagtaaatactctcagggagtgtgcaccgtggtttcctgagatttcagacaaaaaaac

SEQ ID NO: 756797 - DNA, 566 bp, Homo sapiens
taatgataagggttaacattaattaagctgtcactacgtgttagtcacggtgcagtcattcccacacattattacacttaaacctgctagcaagcttgcaaggtagttagttgtttttcctttaaaaactgagtctcggaatgatgaagcactctgtccaatgtcacacagctagtaagtgtggagaccttgcatccaatcaatgcccgtctcattctaaaggccatgttatgtgttctccagcccatggagaataattttaacacagtcaatgaaatttctacacaacaatgttcttgtctcaagtccaagaatgcctcctacacctcctataatactggctttctggtgagtaaagatgccattctcctgtgtaatcaggtggcaaatggagatatgaccraagtaaccatctgtctacactcataaccctgtacacactcttcctgtgtcgattcaattcaagtaccccttttgatcacttagcaaatgtgacctttaaaagggttgaggtttttatatccatgtaagtttttgtattgctttggaagtctctggttaaatta

SEQ ID NO: 756798 - DNA, 636 bp, Homo sapiens
agtaataggtaattgaacgcttttgctgatttgattataaggaataactctcggtgatcaaaaccaaagctgggttaaaatcctaaagctgggggacagctgaagcacccacttcacgacttaacgtttcaggaatatgaattctatgttcagaaaatttccccacactcttcttcgctggcacattcactgatgtagaaaatgccaggagccccgggggtgtgatgtttccggtggataatgtctcccgttccctgccccggggcccagacagttggtgcttaagcgtctacaatgtagagtttcctgcattttcctcgggccgccatttgtctacytgtcccatccaggacatctccctaaataatctctaagtggaaaaatcacggtcctctaggagatttatccgggaacgaacgtgcgtggggcagttcaaattcctgagctcagatttcgtttcccgcggtcagatggtgcggtcggtggggcccgagggatgcgcacagctgtgcctgagaggtgctgctctcccgccaccgaagtcgctgggaaattctgctgcactgagacattttaatgtcggatgttctaatcctgcgggcaaaaaaaaaaaaaaagtttgaaccaggtactggg

SEQ ID NO: 756799 - DNA, 599 bp, Homo sapiens
aatataaatacaaacttaacactaatatgtgatcctttttctagaaaacacaatattggtatttgggaagtaaatatataattttcaccttcttctctttgaaattgtgcaatacaggcagataaggcacagactgaggtcttgattttagtaggcttcaaagattctcaagtcccttttttggttgtgctgaagattctgcayacgttgggggaacacttcccagtgggatccagagagaaggttttggttttggttttgttttgttttagaggtggaagaaggagggcttgagaaagggcagatatggaagaactagacccattcttagaccaggcagccttaggaaagagtgtgaatgggaacttgaggatctggaaagccttttaacaccctgtgtgcccccattccagtaccccataccccatggggaaacttttgctggcccccaggggatgatctccaagtgtgacaaaattaagtacagcatcacctggaaaaaggaaggaaaggtcactgcttggacaaatcattcagatttacactgttctactttccttagacgtgttttctctttccaagctgctaataccaaacag

SEQ ID NO: 756800 - DNA, 629 bp, Homo sapiens
ccaggggatatttctcagtcttcactttcctttgtgtctctgaagccatggtccctgtggcagccacatggtcactagtaccacgttcaacatttgcttgtcccctaaccaagaagattttgaacagaaaactttgggtggcttggttgtgaaaacagtaggtacttagaaggattttttctttaagtgtttttcgaaactacactctcttcccctagattatgacattctatccgagttggggcagagaggtggagaagttgtgtctcctatctgttgatgatcactggtctacagaaacaaactcctggagcctgaagacctctattctaatcttagctttacaatctgccttttcatgcaaccttggcaaatcactcagcagtttcattttaaagacagaggtgatcacatgtggrcagtggcaagaaaaagaaaaaactgatagatcacaaacaaagctgatactccagtgcgctgcactgatctgggttcggaggaggctacatagtcatttccaggacaaggccactctagccaagaatgaaccatcacagaatgcacctcagggccttaggagatgctgcaacttttctctcagtgcaactcctgcatccaggacaaggact

SEQ ID NO: 756801 - DNA, 632 bp, Homo sapiens
ctgagtgtcacatcactgtatttcgtttctctgcatagcactgatcactcactgttaccttttattgcttgtttattttcctattgtcagtctctgccaaatagaatgtaagctccctgagagcaaggaccttgtctatatcatcaccaccctatcaaaccctggtacctagagggtatgtttcatagcagatgctcaataaatatttgttgaacaaaatgatcaactagtccagcataaccctctttttttttttttttttttgagacggcgtctcgctctgtcgcccagggtggagtgcagtggcgcaatctcggctcactgcaagctccacctcccgggttcacgccattctcctgcctcagcctcctgagtagctgagactaaggcgcccgccaccgcgtctggctaattttttgtatttttagtagagacggggtttcaccgtggtctcaatctcctgacctcgtgatcgccygcctcggcctctcaaagtgctgggattacaggcttgagccaccgcgcccggcccataaccctctttttatagataaggaagaggggttcaaacaggcaaaactctcttaatacatagttactttgtggcaatgtggggggtaaaatagatgact

SEQ ID NO: 756802 - DNA, 645 bp, Homo sapiens
gaattggtgggttcttggtctcacttacttcaagaatgaagccgtggcccctcgcggtgagtgttacagttctcaaaggcggcgtgtccggagttttttccttctgatgttcagacgtgttcggagtttcttccttctggtgggttggtggtctcgctggcttcaggagtgaagctgcagaccctcccggtgagtgttacagctcataaaggcagtgtggccccaaagagcgagcagcagcaagatttattgcaaagagtgaaagaacaaagcttccacagcgtagaaggggaccccagagggttaccactgctggctcgggcagcctgctttttctctcgtatctggccccacctacatcctgctgattggtccattttacagagagccgattggtctgttttacagacaggtgattggtcaggcatggcgggctgcaggtaccgagccctgccccgcggggaggcagctaaggcctggcgagatatsgagcccagcgccggtggatcagcactgctgggggacccggcgcaccctccggagctgctggcccgggtactaagcccctcactgccaggggccggcgggccagccggcggctccgaatgcagggcccgccaagtccacgcccacccggaactctag

SEQ ID NO: 756803 - DNA, 645 bp, Homo sapiens
gaattggtgggttcttggtctcacttacttcaagaatgaagccgtggcccctcgcggtgagtgttacagttctcaaaggcggcgtgtccggagttttttccttctgatgttcagacgtgttcggagtttcttccttctggtgggttggtggtctcgctggcttcaggagtgaagctgcagaccctcccggtgagtgttacagctcataaaggcagtgtggccccaaagagcgagcagcagcaagatttattgcaaagagtgaaagaacaaagcttccacagcgtagaaggggaccccagagggttaccactgctggctcgggcagcctgctttttctctcgtatctggccccacctacatcctgctgattggtccattttacagagagccgattggtctgttttacagacaggtgattggtcaggcatggcgggctgcaggtaccgagccctgccccgcggggaggcagctaaggcctggcgagatatggagcccagcgccggtggrtcagcactgctgggggacccggcgcaccctccggagctgctggcccgggtactaagcccctcactgccaggggccggcgggccagccggcggctccgaatgcagggcccgccaagtccacgcccacccggaactctag

SEQ ID NO: 756804 - DNA, 521 bp, Homo sapiens
agtggtcttatcaccctagcagcccttgaagggtcgagagaggctttaatttctaccctggtatttttcctgatatactttccacttttctaagaggcctggtcttatagcatagtttgattgtctttagaaaacttctagcctcaaatttctatggcwtgtaagttaggagcaagtatgtagccacagctgtgatttagtaagtgtttcctatgtttcagtctcaaattgatctcatttcatcttcacaactaccctgggaaaagatactagtgccattgtatatagttttagagacggggtctcactgtgttgctcaggctagtctcaaactcctagcctcaagtgatcttcctgcctcatccacccatgtaattgggattacagctgggagccaccacacccagcttagtgccatttaataaatgaggaaactgaggctctgaacaaggaaatggttcttccaaagtcacacaacttttaaatgtcagagcatgaatctgaagccaagtctgctatgg

SEQ ID NO: 756805 - DNA, 515 bp, Homo sapiens
ttttgcccactgtacaactatctgagataaagcagatatttaaagaaattaaaactaggaaactttcccttgtcaaccaaatataacacatataaaacatagacttacttgtcaaatataaaaagccatctttgactcaaagtcccttctggaaaaatcttcatcttgtgaatattttacttcttcttcactaaaaacaagtwtaattaaaggatgtgtaaacctttaagatcgaatactaaaatgaaactgaaatcacctgttagtcatatgtggcattttctaatctagtgataagagtctgtgtcattgtgaatacagtacacccttttataactatctcattgagaggaagaaatagcataggtcctttcataggctgactaggctccaagctttcactgtatttgtcaaataagtcaagaaaatacaatttgtctcacaacatatccaaatggataacatgtcatgtttgaaaaggaggttcttaaatttgaagtactctaacaaagtat

SEQ ID NO: 756806 - DNA, 625 bp, Homo sapiens
gcagaatccaaggagtgaatgggaactgctacagatacgagtgaaggagctgcctctgacattggggcagatggggaggggcaagacctgaaagctgcgcttcctttctcagcagggaagtttacagcatgggacaaggtctgacaggggtaatgtgggagcgagactggcctagccaactgcctgggagttaggtggggccttttgctacctgctatcccccactttcctggtgagctatatggtacagcagaggcagccataatcccctctggaacataaccccattggcctgagaaccactacccatccccaacagtggccgtgggaagcccctccyaaggacagtctgagctcagactcacctatccttgcccccatctgatggtatttctctacctgccctggtagccaaacacaaaagatataaactcttgggagctttttatggccctggacatcacctgagaaaccagaatacttacccaagccaacttaaggcaagattatatgtccctactactactgaagctggtgctctctagaaagtgccatgtactggctggaggccaaccaactcaggccattacagcaactcatgacagaataaccctgatcccaggga

SEQ ID NO: 756807 - DNA, 625 bp, Homo sapiens
gcagaatccaaggagtgaatgggaactgctacagatacgagtgaaggagctgcctctgacattggggcagatggggaggggcaagacctgaaagctgcgcttcctttctcagcagggaagtttacagcatgggacaaggtctgacaggggtaatgtgggagcgagactggcctagccaactgcctgggagttaggtggggccttttgctacctgctatcccccactttcctggtgagctatatggtacagcagaggcagccataatcccctctggaacataaccccattggcctgagaaccactacccatccccaacagtggccgtgggaagcccctcctaaggacagtctgagctcagactcacctatycttgcccccatctgatggtatttctctacctgccctggtagccaaacacaaaagatataaactcttgggagctttttatggccctggacatcacctgagaaaccagaatacttacccaagccaacttaaggcaagattatatgtccctactactactgaagctggtgctctctagaaagtgccatgtactggctggaggccaaccaactcaggccattacagcaactcatgacagaataaccctgatcccaggga

SEQ ID NO: 756808 - DNA, 613 bp, Homo sapiens
tagccattgctttgattgtgctttgtcttcaggattgtgctgataaagccatgttccatctcctgttacaattctttgaggaaatgcttcaagatcttgatcccacttgtttaaaatttccattgaaagctctgctcttctctgcagcagctgacctgggtgcaatagttttggcacccactaagtggaaaatttgctcaactttaattttttaatcagaattgtgcaagctgaaccagttgagatgtctatggtgttggctattrtttgggtcattaattatcagtcctcttcaattagggcacaaacaagattttttttttttttttttttttttttgctaattgatgtggatagtctccactgagggctttgttttcaatgctatttcattccttcttaaaatgtattattcatttgtaaactgctggtttctttgggacattgtccccataaacttttcataaagtgtgaacgatttcatcattcctccacccaagattcatcataaatttgatgtttgttcttgctgcaatattagtagaattcctgttgctctgatagggctcaattgaaaatgatgtcttatcctttttagtgactcaaactagat

SEQ ID NO: 756809 - DNA, 592 bp, Homo sapiens
tatagtcctaatgcaagataaagtcatggggtctgaggcacctctagaccctgagcctttaccataaggaagggcatcctcccattcctaatgaggcatagtatacaggtaggtatagccagagtactgctgctgcctggattgctgctacagtccagcctagtactgacacaatatggtttaaaaccaggtgtaaataaagtagctaataagttgaactcaaggcaatatggactgtgatcaccaaggagatgacacctgtggtaatctgtactagtagctaggcaatttatcaaggcttaactttgtggttaattacctagaagttacagaattagctagttagtcatygacccatgtagggccaggccatgtggccagatctatgagaggaagaacaaccttctccaaccaggtacagggttgaacagtaatctgttattgcctgccccagtacccctaaaggcaggggaacagaaaaacctggtgttagccatggaccctccaagcacctcattgcagatggttggctatcatagccccctggggggaggggctgcagtataacttacatgttactccttgggtattt

SEQ ID NO: 756810 - DNA, 548 bp, Homo sapiens
ggcacctctagaccctgagcctttaccataaggaagggcatcctcccattcctaatgaggcatagtatacaggtaggtatagccagagtactgctgctgcctggattgctgctacagtccagcctagtactgacacaatatggtttaaaaccaggtgtaaataaagtagctaataagttgaactcaaggcaatatggactgtgatcaccaaggagatgacacctgtggtaatctgtactagtagctaggcaatttatcaaggcttaactttgtggttaattacctagaagttacagaattagctagttagtcatcgacccatgtagggcmaggccatgtggccagatctatgagaggaagaacaaccttctccaaccaggtacagggttgaacagtaatctgttattgcctgccccagtacccctaaaggcaggggaacagaaaaacctggtgttagccatggaccctccaagcacctcattgcagatggttggctatcatagccccctggggggaggggctgcagtataacttacatgttactcctt

SEQ ID NO: 756811 - DNA, 592 bp, Homo sapiens
tatagtcctaatgcaagataaagtcatggggtctgaggcacctctagaccctgagcctttaccataaggaagggcatcctcccattcctaatgaggcatagtatacaggtaggtatagccagagtactgctgctgcctggattgctgctacagtccagcctagtactgacacaatatggtttaaaaccaggtgtaaataaagtagctaataagttgaactcaaggcaatatggactgtgatcaccaaggagatgacacctgtggtaatctgtactagtagctaggcaatttatcaaggcttaactttgtggttaattacctagaagttacagaattagctagttagtcatcgacccatgtagggccaggccatgtggccagatctatgagaggaagaacaaccttctccaaccaggtacagggttgaacagtaatctgttattgcctgccccagtrcccctaaaggcaggggaacagaaaaacctggtgttagccatggaccctccaagcacctcattgcagatggttggctatcatagccccctggggggaggggctgcagtataacttacatgttactccttgggtattt

SEQ ID NO: 756812 - DNA, 645 bp, Homo sapiens
acttacactaaaagcccagacttcaccactacacaatatacccatgtaacaaaactgcaattgtaccccctaaatctataaaaataaaaatatacaaaaatatttttaaagaactctgtgtgtgtgtgtgtgtgtgtgtgtgtgtgtgtgtgwgagagagagagagagagagaggtgtgtatccataggaaggcctagttgtaattgtgctataaataaaagtaatttgagcaggttacctctggttggtttctgcattctcatatctactccactggagtgaaagtactgaggtgcagtattggactttgtattaattacattttcttattttctgtgttcttgattctttagcatttagggccttgctgaccctggagacactgcccctcccagagtttgctctcctagagaaagcaaatagctcacctaggagcgcgcctttcaaatgcaaagaaaccaatccagggcccactcccaccacctcctctatgtggctcttacgctctgtctcctgtccccctgctctggtcaccccagaccagggacaagatatctaggaacaacccctaagtcccagaggccgctgaaatgattcaagtcagcaagtgctaaacctgctcaccctttccttcccaggacagc

SEQ ID NO: 756813 - DNA, 568 bp, Homo sapiens
cagacagtcttaataaaagtaacatttaactgtctttgactcaaaatttttgggatgaaaaatgcacagttacagctaaaacatcccttttctaccttttcctcttcctctccagaggtaaccactgtcctgaagttgatatgtgttccttatatgtacatttttacttctctacataaatacacacctgccaattttactaacattttctatggtcacytactaatgccaatgaacagtctgtttctttctttctttcctttttctctttctctctttctttccttcttttttgagacagggtcttgctctgtttcccaggctgcagtgcagtggtgtggtcacagctcactgcagcctcagcttcctgggctcaagtgatcctcccacctcagcctcccaagtacctaggacaactggtgcacgcaaccatgcctggctttattttttaataaaactttcattttaggttcaggagtacatatgcaggtttttttatacaggtaaactcatgtcatgggggcttggtgtacagattattttatcattcaggtacaaagcatagcac

SEQ ID NO: 756814 - DNA, 568 bp, Homo sapiens
cagacagtcttaataaaagtaacatttaactgtctttgactcaaaatttttgggatgaaaaatgcacagttacagctaaaacatcccttttctaccttttcctcttcctctccagaggtaaccactgtcctgaagttgatatgtgttccttatatgtacatttttacttctctacataaatacacacctgccaattttactaacattttctatggtcacttactaatgccaatgaacagtctgtttctttctttctttcctttttctctttctctctttctttccttcttttttgagacagggtcttgctctgtttcccaggctgcagtgcagtggtgtggtcacagctcactgcagcctcagcttcctgggytcaagtgatcctcccacctcagcctcccaagtacctaggacaactggtgcacgcaaccatgcctggctttattttttaataaaactttcattttaggttcaggagtacatatgcaggtttttttatacaggtaaactcatgtcatgggggcttggtgtacagattattttatcattcaggtacaaagcatagcac

SEQ ID NO: 756815 - DNA, 568 bp, Homo sapiens
cagacagtcttaataaaagtaacatttaactgtctttgactcaaaatttttgggatgaaaaatgcacagttacagctaaaacatcccttttctaccttttcctcttcctctccagaggtaaccactgtcctgaagttgatatgtgttccttatatgtacatttttacttctctacataaatacacacctgccaattttactaacattttctatggtcacttactaatgccaatgaacagtctgtttctttctttctttcctttttctctttctctctttctttccttcttttttgagacagggtcttgctctgtttcccaggctgcagtgcagtggtgtggtcacagctcactgcagcctcagcttcctgggctcaagtgatcctcccacctcagcctcccaagtacctaggacaactggtgcacgcmaccatgcctggctttattttttaataaaactttcattttaggttcaggagtacatatgcaggtttttttatacaggtaaactcatgtcatgggggcttggtgtacagattattttatcattcaggtacaaagcatagcac

SEQ ID NO: 756816 - DNA, 583 bp, Homo sapiens
ctatgaagagaaacatacagagaataatagacagcatttgaaaaacacttgagaagtaaaagctcaaaatgaaaacacaaaagaaagtttaagaaagttaaagggtaaagttgaagttctctccagaaagtagaacaaagagatggaatattgaagaaaacataaagtgagaaaactaaagaactagatcaggaggtccaatattcaaataggaggtctggaaagagagagcatagatagtgcattagaagaaattatagatgaaataactcaagaaagtttcccacaactgaaaggacccaycaaatgtccaacaaaatgggtaaagcaacacacaacaaaaaacattttctggaaatttcataatattggggccaaggagaaaattctacagtcttccagcaggggtcgggggaacaatttatatagaaagcatgaagagttaaaatagctttgaatgtctcaacagcctgaaggaagaagataaatgagcaacctatcaaaacactgaagggaagtgatttctaacctagaaatccatatccaaactatcagtgaagcatggggggttgcatagaaacat

SEQ ID NO: 756817 - DNA, 624 bp, Homo sapiens
gagaaacatacagagaataatagacagcatttgaaaaacacttgagaagtaaaagctcaaaatgaaaacacaaaagaaagtttaagaaagttaaagggtaaagttgaagttctctccagaaagtagaacaaagagatggaatattgaagaaaacataaagtgagaaaactaaagaactagatcaggaggtccaatattcaaataggaggtctggaaagagagagcatagatagtgcattagaagaaattatagatgaaataactcaagaaagtttcccacaactgaaaggacccaccaaatgtccaacaaaatgkgtaaagcaacacacaacaaaaaacattttctggaaatttcataatattggggccaaggagaaaattctacagtcttccagcaggggtcgggggaacaatttatatagaaagcatgaagagttaaaatagctttgaatgtctcaacagcctgaaggaagaagataaatgagcaacctatcaaaacactgaagggaagtgatttctaacctagaaatccatatccaaactatcagtgaagcatggggggttgcatagaaacattttcaaacctgcaaaacctcaaaaaaaatgtatctcttttggaacttc

SEQ ID NO: 756818 - DNA, 624 bp, Homo sapiens
gagaaacatacagagaataatagacagcatttgaaaaacacttgagaagtaaaagctcaaaatgaaaacacaaaagaaagtttaagaaagttaaagggtaaagttgaagttctctccagaaagtagaacaaagagatggaatattgaagaaaacataaagtgagaaaactaaagaactagatcaggaggtccaatattcaaataggaggtctggaaagagagagcatagatagtgcattagaagaaattatagatgaaataactcaagaaagtttcccacaactgaaaggacccaccaaatgtccaacaaaatgggtaaagcaacacacaacaaaaaacattttctggaaatttcataatattggggccaaggagaaaattctacagtcttmcagcaggggtcgggggaacaatttatatagaaagcatgaagagttaaaatagctttgaatgtctcaacagcctgaaggaagaagataaatgagcaacctatcaaaacactgaagggaagtgatttctaacctagaaatccatatccaaactatcagtgaagcatggggggttgcatagaaacattttcaaacctgcaaaacctcaaaaaaaatgtatctcttttggaacttc

SEQ ID NO: 756819 - DNA, 624 bp, Homo sapiens
gagaaacatacagagaataatagacagcatttgaaaaacacttgagaagtaaaagctcaaaatgaaaacacaaaagaaagtttaagaaagttaaagggtaaagttgaagttctctccagaaagtagaacaaagagatggaatattgaagaaaacataaagtgagaaaactaaagaactagatcaggaggtccaatattcaaataggaggtctggaaagagagagcatagatagtgcattagaagaaattatagatgaaataactcaagaaagtttcccacaactgaaaggacccaccaaatgtccaacaaaatgggtaaagcaacacacaacaaaaaacattttctggaaatttcataatattggggccaaggagaaaattctacagtcttcmagcaggggtcgggggaacaatttatatagaaagcatgaagagttaaaatagctttgaatgtctcaacagcctgaaggaagaagataaatgagcaacctatcaaaacactgaagggaagtgatttctaacctagaaatccatatccaaactatcagtgaagcatggggggttgcatagaaacattttcaaacctgcaaaacctcaaaaaaaatgtatctcttttggaacttc

SEQ ID NO: 756820 - DNA, 591 bp, Homo sapiens
aggaaaaaggctgaagaataatgaacagagactcggagacctatggataacatcaaattcatcaatatatacgtaattggtgtcccgggaggagaggagggacagtaaggagcagaaaagtacttgaagaattaagaattgaaagtacccaaaattaatgagaaacattaacagaaaaatctaagaagctcaacraaccagaagcaagatatacacaaacacaaatagaatcactcctaatcacatccaatgaagctggtgaaagtccaaagaaaattctgacagtaagtaattacatataaggtaaatacaatatgattaacagttgacttcttgtcagaaacagtgggaccaaaaggcagtgaaatgacatattcaaagtgtggaaagaatgtcaataagtaattccagatccagtacaactatttttcaaaataaaggtgaaataaaggaatccgaagataaacaaaaaatgagagaatccattgcaagtagaccttccatacaaaatatattaaagtaagtccttcagacagcaagaaaatgttactagacaggaacttggctgcagtttaccaccagaaatcctaa

SEQ ID NO: 756821 - DNA, 591 bp, Homo sapiens
aggaaaaaggctgaagaataatgaacagagactcggagacctatggataacatcaaattcatcaatatatacgtaattggtgtcccgggaggagaggagggacagtaaggagcagaaaagtacttgaagaattaagaattgaaagtacccaaaattaatgagaaacattaacagaaaaatctaagaagctcaacaaaccagaagcaagatatacacaaacacaaataraatcactcctaatcacatccaatgaagctggtgaaagtccaaagaaaattctgacagtaagtaattacatataaggtaaatacaatatgattaacagttgacttcttgtcagaaacagtgggaccaaaaggcagtgaaatgacatattcaaagtgtggaaagaatgtcaataagtaattccagatccagtacaactatttttcaaaataaaggtgaaataaaggaatccgaagataaacaaaaaatgagagaatccattgcaagtagaccttccatacaaaatatattaaagtaagtccttcagacagcaagaaaatgttactagacaggaacttggctgcagtttaccaccagaaatcctaa

SEQ ID NO: 756822 - DNA, 549 bp, Homo sapiens
ccttggctttaggttccgagtcttgtcacgtttaaggatttttaccaccagtactcaagagagggtggtcgaggacagatcagggtcaggccgccgggattgtgcggtgtgaaaaggacctgagtgtgtgtcagcggttctcagctgcctcccgtcagcatggagtgccctcattctcactggggtccgctcacttaacaaccttttagagcccactctgtgtcaggcactgccgtgtaataagtattagagttgcagctcgactttcttyctacgtatctatttgaggggaaatattttgaatggcatttggagtttttacggaagaggtaattgctactaaagcaaaagaaataaagaagaatgctgtctatttgtattccaaaaagataggatggttaaaaagagacgtaagatgagagtgaaaatatggaggaaaaaggaactgtgtgtattagatttattggcttacctagaacttggccggtcacgatatggttgcatacagactaaatatttattaaatggatgaactacctttgcttttgc

SEQ ID NO: 756823 - DNA, 617 bp, Homo sapiens
agatcccctccattcttccaagtaatatgtaatcttggatgggatagacccgtattccaggtaagagtctgcctttcctgtctgcaatatctcagcaagcactcttatccaaagagacatctttagataagacatcttattcttattctttgctacatatttctgtagcaaagaatgtctactctgctcacataggatcctgcatacgatcaactcattctcagatacccactttatagcaatggaggtgaagcagtggacatacgaccaaggaataccccggtcctacctcctcccacagcatgcaagaaccatgacctgtgataaagtaggctttgtagatayagggagtcatgagcttcaatgtgacaccctgcaaggggatggtgtactatcttttattatgcaatacacacattaaatgagtggtcattatatggtcctcaaaatgtaaaatacatgtgtctaggtagagaaagggggaagtagccattcactgccatccacattcaagggatttgtacttccaatgtgcacaaatatagtctctgtgggtgcagcattcctgattcccagaagaaatcacttccaccaagaggaacaatgtggattgcact

SEQ ID NO: 756824 - DNA, 617 bp, Homo sapiens
agatcccctccattcttccaagtaatatgtaatcttggatgggatagacccgtattccaggtaagagtctgcctttcctgtctgcaatatctcagcaagcactcttatccaaagagacatctttagataagacatcttattcttattctttgctacatatttctgtagcaaagaatgtctactctgctcacataggatcctgcatacgatcaactcattctcagatacccactttatagcaatggaggtgaagcagtggacatacgaccaaggaataccccggtcctacctcctcccacagcatgcaagaaccatgacctgtgataaagtaggctttgtagatacagggagtcaygagcttcaatgtgacaccctgcaaggggatggtgtactatcttttattatgcaatacacacattaaatgagtggtcattatatggtcctcaaaatgtaaaatacatgtgtctaggtagagaaagggggaagtagccattcactgccatccacattcaagggatttgtacttccaatgtgcacaaatatagtctctgtgggtgcagcattcctgattcccagaagaaatcacttccaccaagaggaacaatgtggattgcact

SEQ ID NO: 756825 - DNA, 610 bp, Homo sapiens
agtggaggcttggcccacaaccaatcagaggctgaaatggagcctggtcctgcaaccaatcaaaggctgaaatgaaggcttggccccagaccaatcagaggtacttcccatttgtgctacaggggagtgtgggggcgggaggggtttgtagaggcaggtgactctggtttcttgycacttaggcatagagaggtgaggttttctttttggttcaattccaagaagtcagcctcaggttggccttaggctccagaccctattctcctgcctcacatatatatcatgaaatactacacagccatagaaagaatgaaatattgtcctttgcaacaacatggatggagccggaggccataatcctaagctaatgaatgcaagaacagaaaaccaaataccgcatgttctcactttaaagtgggagctaaacattgagtatgcatggacataaaaatggaaacaatagacattgtggaatactgggaggaggggagttgaaaaactacctattaggtactatactctcctacctgggtgcaacatacccatgtaacaaacctgcacaggtaccttatgtatctaaaaataggcgttgtaaaaaacaaaatataat

SEQ ID NO: 756826 - DNA, 577 bp, Homo sapiens
ttagccaacagcccctccccatcaccatgacaaccaaaaataccctccaaataacccataaaaggacacttccatctttagcaacctctgccacagaagaaccttctgtatctgggagaatgtacctctactctgcctataattggacagaagcaatgtatggaggtccagccctctactccgggtgatggccaackattcttttcagaatcacaagtaaagaaatgaactagtttctcctctaccccctgtccatcatctctttgaaacagaagtgaacaacttacttctactgtgccatccaaaatgttattaataaactggaccatgtcttcaacattcttaatctgtctatctagcaagaaatattgctggtttgaagtattcagtacaactacagttgggactgtcaattcactgaaaatataaaaacaaatcaaaatatacattaaacacagcaatagcaagtattctgatattcatttatatctcagtagccataattatagaagctatttaatacatttgtgcacattttatggtagaaaatgatcaaatagacctagtatttacgtgt

SEQ ID NO: 756827 - DNA, 557 bp, Homo sapiens
caggtggcggggtggggaaggtgaggatgggaaagtatctctctcccagccctgtcctacatagatcttttcatacagttctgtaactaacatctgtggtcttatccagtggactrtaagcatttaaagaaagggactctattcatttttccatcaacggtgtctaatacagtgtacaacatacagtaaatactcactaaatgttcactgaatagagtggcttcttgtttcacatttattaattcagtacagggtttggtaaatgttttctaatatcagtcttgtgaagtggcaaattaaatctctacatcataattttagataaaaattattttaaaactacatattttcctacaaatttagtctactcaaataaattctagaacaattcgtttttgaatgctaaacattttctatgtaatagtctttatataaattttaaacagataaaaattttaaaattgcatattttcttacaaagttagtctatccaattctagaacaattagtttttgaatgctaaacattttctatttaatagttatattgcccattaa

SEQ ID NO: 756828 - DNA, 557 bp, Homo sapiens
caggtggcggggtggggaaggtgaggatgggaaagtatctctctcccagccctgtcctacatagatcttttcatacagttctgtaactaacatctgtggtcttatccagtggactataagcatttaaagaaagggactctattcatttttccatcaacggtgtctaatayagtgtacaacatacagtaaatactcactaaatgttcactgaatagagtggcttcttgtttcacatttattaattcagtacagggtttggtaaatgttttctaatatcagtcttgtgaagtggcaaattaaatctctacatcataattttagataaaaattattttaaaactacatattttcctacaaatttagtctactcaaataaattctagaacaattcgtttttgaatgctaaacattttctatgtaatagtctttatataaattttaaacagataaaaattttaaaattgcatattttcttacaaagttagtctatccaattctagaacaattagtttttgaatgctaaacattttctatttaatagttatattgcccattaa

SEQ ID NO: 756829 - DNA, 597 bp, Homo sapiens
gcagtacccacgtactacatcaagggctttgagtgagtgcctaagacttgctggctttaagtatcaggttgaccacagtggggtacagcactaaacaagctcctgtggtcctccattccaggacttggttcttgttggcacttttggacctgtcctgtgcccgaggggagcccagtgccctgaaggatgagttcaaagccaggaagcactcaccacaagccgatagaagagccctcgagccttaagggaacatcagtaatagtctggcaatgctccccaagggctgtggtggtggtggccatgggtgagactcctttgcctttggaaagcgaagggaagagtgaaaagaactgcrtctagtggactgaaggctacgccagccatagtacagtagaaaaccaagcagacttctaaagtttttgattctactccctggctcctggatagtacctctggacttccaggggcctggggaaactcaccaccctgaagggaggaacataggcttaactggctttgccacctgctgattacagagccccaggaccttggtaaaacacaggcagtagccatggagtggttagagtaggccttggc

SEQ ID NO: 756830 - DNA, 616 bp, Homo sapiens
cgtctaaaatattctttacatatatatgtcttatgttttagccaattatgtgatatatcccatagccatatttatgtaaactatttcaattatttgaaccaatcaactaatgcaagacatacatatatatgtatctacatctatgtataaatatacatgtgaatatgtatatttatatataaaaaccatgttcctaaaacttaatggattcaaagagagatttattgtaggaagcatcagaagttcttacttcaaagcaatgaaaagcataggaatttttcagggaaatttaaatgagaggatttgaatgttatttctggttctttataacccagcaatgtttgtattaatggtattaaaaaagaaaataaaatgtatagataaggctttgtaggagcatttccrtatttatcagtgactgcataaagtttaaaaaaaagtaaaccctaccaccgattgcattactctaatacacacatcatcataattgtagtgaatatctccacttattttattatatatataggcttatgcacccattgaaatctcatctattattttttcagtgctgtctttacactgagttatattaacatgtggtctttatgtttcctaa

SEQ ID NO: 756831 - DNA, 508 bp, Homo sapiens
gcttccccctctctactgactgagtctggggtcgttacaggcacagggtgggggctgctggtggtgcatagatacttttggaaaaggcaacattagatttgtgaaaagacattatttagaaagaaccagttgggagagagccagcaaacagggatagaaattctcactttgggccatgggtttcagtcttttcagcttgaaggtggggttttgctggagacccacccatgtccacctagaatttctctggcttctgcctctatcaatgggattatggaaggcattttaatatttttgaatctgtattacctgtrcttaacacgttacttacttaccaaaagatttacacacttgcaaagatattatgacattgattattataattaatatatcctttactgggtcttttttactctttgtgtttggaaaataagtttctaagcaggtagatcctagtatactgggctagattcactcccaagcagaaaaccaactgtatgatgtggac

SEQ ID NO: 756832 - DNA, 636 bp, Homo sapiens
atctcgtgtcatattttctattcagttttccattgatttaacatcaaaagtcatctggacataggccaatttcaagtaacattcgtataaattaaaatattcttaaatgcagctaaaaggattagaattatccgaagtaaacatgtttacttttaaactgtgtgtacttttactttttttttttttttttgagatggagtctcgctctgtcgcccaggctggagtgcagtggcgcaatctcgcctcactgcaacctctgcctcctggattcttctcctgcctcagcttcccgagtagctgggactacaggtgcatgccgacacgcctggctaatttttttgtattttagtagagatggagyttcaccgtgtttcccaggctggttgcgaactcctgagctcaggcaatccgcctgcctcagcctcccaaagtgctgggattacaagcgtgagccactgcgcccagccagaatttgaatcttaatacaagaactatgcaattttcagtggaaattttaagtcttgtagcagggctatggagtaagcattgtaaatatgatcaaagagatgaacacatcttgcataaagtatcaataatctgggtggtatattactgcttaaatggatggatcccagc

SEQ ID NO: 756833 - DNA, 636 bp, Homo sapiens
atctcgtgtcatattttctattcagttttccattgatttaacatcaaaagtcatctggacataggccaatttcaagtaacattcgtataaattaaaatattcttaaatgcagctaaaaggattagaattatccgaagtaaacatgtttacttttaaactgtgtgtacttttactttttttttttttttttgagatggagtctcgctctgtcgcccaggctggagtgcagtggcgcaatctcgcctcactgcaacctctgcctcctggattcttctcctgcctcagcttcccgagtagctgggactacaggtgcatgccgacacgcctggctaatttttttgtattttagtagagatggagcttcaccgtgtttcccaggctggttgcgaactcctgagctcaggcaatccgcctgcctcrgcctcccaaagtgctgggattacaagcgtgagccactgcgcccagccagaatttgaatcttaatacaagaactatgcaattttcagtggaaattttaagtcttgtagcagggctatggagtaagcattgtaaatatgatcaaagagatgaacacatcttgcataaagtatcaataatctgggtggtatattactgcttaaatggatggatcccagc

SEQ ID NO: 756834 - DNA, 537 bp, Homo sapiens
agcaatacccaggaactatgttgagggcattgggtgagatgttgagacatggtggcttcaggtgagactcagtactttaccagctgtgttggctacatggcaaaactctttctactggagaaaagcagagggaaaagtaaaaggaagaccaagtcttgtatcttaagtatcagcattgccacatgggtgtagagcaccaagcaggctcctggagtccccagctccaggacttgactcttggatggcactatggacctgctgtgggccagaggggagcctattgccctgaagcatgaatcytaggccatccagcattcaccataagctgatataagagtccttgggccttaagggaatatcagtggtagtctgaccgtactccttgtggcctggagtggtggtggctactgggtgaggctcgtttgtctttggaaagggaagggaagagtgggaaggattgcatcttgtggtttgattgccagctcagccacagtaaaatagaacaccaggtagacttctaaggtttttaactctagt

SEQ ID NO: 756835 - DNA, 537 bp, Homo sapiens
agcaatacccaggaactatgttgagggcattgggtgagatgttgagacatggtggcttcaggtgagactcagtactttaccagctgtgttggctacatggcaaaactctttctactggagaaaagcagagggaaaagtaaaaggaagaccaagtcttgtatcttaagtatcagcattgccacatgggtgtagagcaccaagcaggctcctggagtccccagctccaggacttgactcttggatggcactatggacctgctgtgggccagaggggagcctattgccctgaagcatgaatcctaggccatccagcattcaccataagctgatayaagagtccttgggccttaagggaatatcagtggtagtctgaccgtactccttgtggcctggagtggtggtggctactgggtgaggctcgtttgtctttggaaagggaagggaagagtgggaaggattgcatcttgtggtttgattgccagctcagccacagtaaaatagaacaccaggtagacttctaaggtttttaactctagt

SEQ ID NO: 756836 - DNA, 555 bp, Homo sapiens
agtaggccatagcctacacattaaacctaaaccaggtggcgtgactgataaaatagaagatttcaataggatcaagagtctcttaagaaaatatccacaatgtccaagatgcaatttaaaatttgaaaattactcatcatagcaagaagaagggaaatcacaacttggaagagaaaagacaaacaactgaagccaacattgagatgaattagatgtaggaatgaaggacaagaatttttaaaaagcaataatgaaactgtttcaataagcaactacaaatttttctaaaacatattaaaatagaaaatctaggcaaaaaatagagtttatttaaaaataccaaatgaaacttatcaaactaaaaaaatataataatggaaataaaaacaaaatgattctggatgggatyaatagtagaatggaaataacaggagatgtaatcaatgagcatcaagacagatcaataggattactcagtacaacaaaaaagaaaactaaaaaagtaaatggattctcagggactgtgggacaacagcaaaagatataatatttgtg

SEQ ID NO: 756837 - DNA, 629 bp, Homo sapiens
aaaaaataaaaagcgtgtagcaatatgaaaattatgtgttacaaagaagaaaattcaggttagataagaatatttgatggtagttgtccagctgaccactattaacattaaatacagcagtattctttactaccttgggatatatctttatttcaaaygcaaaaatttggtaagcataataattgctaaataaaaagataatacaattacctattttctgtttttactgtaaagcactacccatgtgaaagtttatgaagaaatattttcacttgaccagtatttttttaggaagtaccactttatatatatgtgctttgattttaaatacaattgattaaatgacatttttctacaggtcataagaattttgtattacctcctattaatagtatgtttatacaaagtgtgaccaaagggttattaagaaatatcttctttgagctttcctatactttatttacaggtaaaaggatcagtattttacttttttttagataaaatttcagtattatgactaggttgaggaatcctacaggatatggagtccagtcattactagctaaaagaatcatagaaagaagcacatgaactttgactctgggcttcttcgaagtctgaaatataat

SEQ ID NO: 756838 - DNA, 566 bp, Homo sapiens
ttaatttctctgaaacacagttttcttgtctataaaacttggattagttgaacttaattcaaaaatttttgagattataattttaaaagtaaccaattaattcattgtacaataaacaatatatgcttaattcgtgttagtttatttacttttatctttgaasagcatactaccaagtaaagttgttatccagaactcagataacttccataacccagattattccattgggtactttgaattacataatggaccataatttgtcaaatgcgtgacaacttgccacctcagttgccaccttccttattcctttcatttcagtacatagctccatatgttatacttctatattagaataaaaaatatgatagcacaggattaaatacattaaaactgtaaaggatactaaagtaacattgatgcatctaaaaaatatttggcattcactccccttattttaccatcaggaaacaggcccagtgttgagctgaaaggccttgagatcatctgactgaaaaaatagaacagatgtgcgagtgagtcaatcattccagaactttgacact

SEQ ID NO: 756839 - DNA, 620 bp, Homo sapiens
gaggatcacttgagcccaggaggtaaaggctgcagtgatccatacttgtaccactgcactacagcctgggcaacggagtgatgccatgtcaaaaaaaaataaaatgaagggaacaaaagaaagaaaaataaagaaagaaagaaggaaaggaaggaagraagaaagaaaaagaaaaagaaaaagaaagagggaagaaggaaggaaggaagcaaggaaggaagggagggaggaaaagaaggaaggaagagccaggggtgtgtcatactttcacttttcttctattcctgcaaacaaatgttttatattcaaaattctaaaggagttttatccctagatacatatctgtcaccctacccactcattccaaggagccaagcagaatattccttctaattctgtactcagtctgaaaagcaaaaggttcttaagacagtcatctagaatgtcacagtcatcatttcagtggcataaaatatggatatacttggatgactgcaatatttagctgcttgtcagactttcaagtaaactcattgtaaaaatttctgatttcctagtatatgtatgctactgactatattttctccccgactttttgtaggtaaaactggtactattat

SEQ ID NO: 756840 - DNA, 492 bp, Homo sapiens
ctaccctgtgctactctgcctatgggatagccctgttatcccacagacatacggagcaaccattttgctatacgctattgctttaataaagtttctttctttcactattggctcactctcgagctgtttcctgagcaaagccaagaaccctcttgggctgaaccccagtttggggtttgcctacatcatgtgtttacatatcattcctttctagacgtctcctctttctccctaaggctagattagatatccccacaatatgctccatgatacccaacaggtgttcccaaaatatttattaaatgaatactaagctcaatgttccaatattttytaaagttaatgtctgagaaatactttttaagagaatcattaaatcaaagaaaagctcaaaagcaaaggcaatccttacacaattaccagacattcataatcttttatcctggaatatcatttatagaaaatattcttacagaaataataggaatctag

SEQ ID NO: 756841 - DNA, 516 bp, Homo sapiens
tcccactataccactgttcaagtgttgagagctctgactttgagatccaccattttccaatttaacgattttccaagactttatgcttttcagttaactttgcatcttctatcttttcagaaatttatttttaaaacatgtaaaatgcaacaaaatgaaacagcgatttaaattcayggcaaattgtctcctaaacttcaagctcactggacctagcatccgtagttccccacacattattactatggtgctattacagttccttcttctaaaatattataattgctttctctaaattataaaatatctttcattttgtcttattaaatgtagaataaatctattttactatgttagtagtagtaaatactattgtacgtcattgataaataatgacactaaacattaaaattagaatagtaaacatcattaaaagaattatttttatcagttttattaacaagaagaaaattaaccaattggtaaatattttctccctttcagtactcacttgtt

SEQ ID NO: 756842 - DNA, 521 bp, Homo sapiens
aagcacagagtggtaagctagacaaaaaagcaggaactaatgatatgctgtctacaagagacccacctcacaggtaatggcacctatagactaaaagtaagggataatggaaaatctaccaagcaaatggaaatcaggaaaaaaaagcagaaattacaatcctaatttcagacaaaacagattttaaaccaataaagataaaaaaaggacaaagaagatattacataatggcaattatgtaataattaccataattaacawaattaacacagcaacaaggcttaacttttaaatatgtatgcacccaacacaggagcatctagattcataatgcaagttcttagacacctgcaaaaggtcttagactcccacacaataatagtgggagacttcaatattccactgaaagtattagacagatcatcaaggcaggaaatcaacaaagatattcaggacctgaactcaacattgagccaaatagatctgatagacctctatagaactctccacttgaaaacaaa

SEQ ID NO: 756843 - DNA, 643 bp, Homo sapiens
tccttgagactttcttataatcttttaaaagtttatttttatatatttagagggtacaactgcagatgtcttacaggcataacggtgaagtctgaaattcttgtgtacccatcacacaaataataaacattgtatccaacaggtaatcttttaaccatcaccctactcctaccctctcaccttttgtggtttctagtgtctgtcattccactctgtacgtctatatgtacccatgtttaactcccacttataagtgaaaacatgcaraatttaactttctgcttctgaatcatttcaggataatggcttccagtttcctccatgttgctgcaaaagacatgatttaattctcttttacggctgaatagtattctgttgtatatgtgtaccacattttctttgtccagtcctccactgatagacacttagactgattccatacctttgtttgatattgtgaacagtgttggaataaacatttgagtgcagttatcttttggatataatgatttctttcattttggaaatgtagccagtagtgggtctgctgggttgaatggtacttctatttttagttttttgagaactctccatacagtttcccataaaggtttcacctattcacattcctacacacaatgta

SEQ ID NO: 756844 - DNA, 597 bp, Homo sapiens
ttgagttccttgaagattctgcatattagccctttgcttgatacatagataacaaatattttttccagtctataggttgtctgtttgctctgtggattgttttactatgcagtagcttttaagtttaattaagtgctatttgtatattattgtttttttgttatgtttacttttgaggagttggtcataaattctttgcctaggccaatacccagaagaatttttcctctaaaattttgtagtttgaggtcttatatttatgtcttcaatctatcttggttaatttttgtatgtaataagaattatggttcctgtttcatctttctacatagggatatccaattttcccagcaccatttatttaatatgrtaccctatccccagtgcatatttttgttaactttgttgaatatcagttggtggtagtatgtagcttcatttctgggttctctactctgttccattgatctatttttacattaataacatgacgttttgttactatagccttgtagtataatttgaagtcaggtaatgtgacacctcatgttttattctttttgcttaggtttgctttggctactctggctctttttg

SEQ ID NO: 756845 - DNA, 500 bp, Homo sapiens
aaaggactcaaacagtgaactgatatataggataatgaaaggatattaacctgagagagcatggtcagaagatcctcactgagatggtaatatcaaagcccaggcctgaggttgagaatgagatagccacagggaggatggaagagagtgagttttgttacaggatgcagaaatgacatggtccaagaacccagtaagtctttggattccaggaaccaaaagaagctgacaagtatggccagaactgcagtgtaatatcctgagaracaattgttggtcctagtcagtttattggctcaagctcatcacgttcttatttcaagctcatctccctgttccaggaattaccatcccaatttttccagatgctgcccttcattcttccatttgagggtctcttctttcaaatattttgggaaacggggtatagaatttggactttggtcatgctttccattttcagatgtgtcaatcaggatcccaggagaaaatagaattcc

SEQ ID NO: 756846 - DNA, 609 bp, Homo sapiens
aatataaatatctcttaattacaacccctgaggctcattcctctccccacttcccagaaactattaccaaaattagttttgagtgtgcacttccaaatatgtttttatacttttatatacatgtagtagtatccattactgtcaaacttttgtgcttttaaatttacataaataaatatataattttttagtcaacattatttttagatacatttatgaatgattttaactggtatagacagccataaaagtatgctatgatttgtttatctatttcttatctacaaatggacattaagtcagtcatcaagttttttgctaataaaaaatatgttgtaatgaacatatctctgtatagcctatagatcaagaatgttttcatttttgtttttaagacatgtacccaagtggaactgctgggtcatagcatggacacatttttaattytactgtatatttattaaattgcttttcagtgtggctttagcaatttaaatctgtgccagcaatgtgtgagagtagcatttgcccaatatctgtaccagcatctgctatctcatattctttattccaactaataggtgaaaatggtatctcattgtggtttta

SEQ ID NO: 756847 - DNA, 552 bp, Homo sapiens
tttttttttttttgagacgatgtctcgctcttgtcccccaggctggagtgcaaatagcgcgaactcggctcactgcaacctccgcctcccgggttcaagtgattctcctgcctcagcctcccgagtagctgggattacaggcgcctgctaccatgcccgrctaatttttgtatttttagtagagacggggtgtcaccatgttggccaggctggtctcgaactcctgatctcagatgatccacccgccttggcctcccaaagtgctgggattacaggcacgagccaccgcacccggcccgttcatgagattctttgtgcaagtgtttactttggcttttacttgtaaaacaacaatgatccagcaataaaataccttacgttgcctatgctcagaagaagccaggacaagatttctgtcactctctaggtttcgtttttaaacttcctacaaccctgtcttgagagaaaattaatttactggggcagtgataggggacattccaaaagattcagaaaatatacaaatatacacattgattaaaagacatctat

SEQ ID NO: 756848 - DNA, 552 bp, Homo sapiens
tttttttttttttgagacgatgtctcgctcttgtcccccaggctggagtgcaaatagcgcgaactcggctcactgcaacctccgcctcccgggttcaagtgattctcctgcctcagcctcccgagtagctgggattacaggcgcctgctaccatgcccgactaatttttgtatttttagtagagacggggtgtcaccatgttggccaggctggtctcgaactcctgatctcagatgatccacccgccttggcctcccaaagtgctgggattacaggcaygagccaccgcacccggcccgttcatgagattctttgtgcaagtgtttactttggcttttacttgtaaaacaacaatgatccagcaataaaataccttacgttgcctatgctcagaagaagccaggacaagatttctgtcactctctaggtttcgtttttaaacttcctacaaccctgtcttgagagaaaattaatttactggggcagtgataggggacattccaaaagattcagaaaatatacaaatatacacattgattaaaagacatctat

SEQ ID NO: 756849 - DNA, 590 bp, Homo sapiens
cagttactcctgataatgtattaatttgtaggtatctaagaagttcaaggtggcaacgatttttctctctctctccttctgtctctggacttgataaaaatccttctaaattctctattctattcaatagccaattttaccaatctcctataaaaatgatcaaatccaatatgtgtgtattagaatgaatacataaaaaacttttataattttttcaaaatctcgcactcataagttggtaagtcaaccacggaaaaaaacctcaaatataaaattaatgcatttaatggtgtttacgtttttattaccctgtaattatatctttcctgtgattgttttccttttcatgctggcctataaaatgtggctgcctcaacctgttttaaacatctacatttgtargattaggactagtgatgttttgccagtttccatgaaagaagccagatgcactgaagcaacctcctttgatagttaaagtccttcattaatttgacacctggcactcccagctatggtcttattcatttttggtagaatcgttctggtccacagataagagcatattctctgtcatgataaatgaatta

SEQ ID NO: 756850 - DNA, 578 bp, Homo sapiens
aaagaatcctctgacctacttcttctgaaagtagaacagaaggttcttactccaggggggtcctgccctataccaggagagaaggaatggcacagacctaggccaagaggaatctcaacaatcagggcttgctcccgggtgtggtggctcacacctgtaatcccagcactttgggaggctgaggcaggtggatcacaaggtcaggagttcgagacaagtctggccaacatgaggaaaccccgtctctacaaaaaatacaaaaattagtctggcgtggtggtgtgcgccgtarttcagctacttgggaggctgaggcaggagaataacttgaacccgggaggcggaggttgcagtgagccaagatcacacaactgcactgcagcctggcaacagaacgagactccatctcaacaacaagaacaaaaaaaattcacggcttgctaagttccctgagtttattaccattagattccacccactttgatccaaacacacttctccaaaacttccactctcttcctcaaaatagtttcctttgtttctttggatcttcatttctgaaggctctcatatcatgt

SEQ ID NO: 756851 - DNA, 543 bp, Homo sapiens
atccagtgatatttccttttgttcactcgtaatggcttagaaatgcaactgttttgcatacttccagcaggaacctaaacatgttggacaaatagcagctgccttaaggaatgaatagaaaatcaggaaaagtcatcatccatatgaactacatatcatctgctttcttgcaagtggaacaaattattcatgtgggcaggagtaattcatacagcccttgacccccctgatgatgtccagtgtgagagccaaagccaaacactgacccaaaagcacccgtgctctcccggtcttgatttgtgacrcctaacacttgtgctttatcctaatcatatataatgactgctcatttttatttctgtctgggaaactttactttctcctggtgatttttaattttttaattattttaagtattacaagtgtactaaagtgagaaaaaaatggttagagaaatccttataggatgatagaaatgttcttaaattggattgtggtgatggctatgcaactctgtaaatttactaaaaatccactgacttg

SEQ ID NO: 756852 - DNA, 384 bp, Homo sapiens
gtcatcgcccctgcaaggaaaccaatttaacaactgtctacagaaaaaaagcactttcgtaagaaccaaaaatcaggtgagcactcatagtacctggctttaacttcatgtcaaagacgctactcactaagaaaatggaaagcaggctggrtacagtgcctcacacctgtaatcccagtgttttgggaggctgaggcaggaggatcacttgagcccagaacttctagactagcctgggcaacatagcaatagcccatctctacaaaaaaataaaaaattggacgtatgtagtggcatacacctgcagtcttagctactcaggaggctgagaggacagcctaagcccaggagttcaaagctgcagtgggcagcactgtgaagtgc

SEQ ID NO: 756853 - DNA, 630 bp, Homo sapiens
ttccacatcagcaatggtcttgctaatatctaaaatatagaaaacgcctactcatgggcaaaatagaagataaaattagaactggagggctgggtgcagtggctcatgcctgtaatcccagcatttttggaggccaaggcgggcagatcacaaggtcaggagatagagaccatcctggttaacacagtgaaaccctgtctctactaaaaacacaaaaaaattagctggggtggtggcgggtgcctgtagtcccagctactcgggaggctgaggcaggagaatggcatgaacccgggagtcagagcttgcagtgagcccagatcatgccactgcactctggcctgggtgacacagcragactccatctcaaaaaaaaaataaaataaaaaaagaactggaccaagcagaaaaagatatatggcattataaacactcactgaagtgttaatgtagccactaaatgtaaatatgcggtgaattataaatgacattataaatagcacaaaaatatgcaggaatattttaaaaaatcatttgcataataaccttccagacataaaggtattacctttaggagtggagtgctgagggatttcagtgaaacaagagctgtgtgaagcccagggtctc

SEQ ID NO: 756854 - DNA, 630 bp, Homo sapiens
ttccacatcagcaatggtcttgctaatatctaaaatatagaaaacgcctactcatgggcaaaatagaagataaaattagaactggagggctgggtgcagtggctcatgcctgtaatcccagcatttttggaggccaaggcgggcagatcacaaggtcaggagatagagaccatcctggttaacacagtgaaaccctgtctctactaaaaacacaaaaaaattagctggggtggtggcgggtgcctgtagtcccagctactcgggaggctgaggcaggagaatggcatgaacccgggagtcagagcttgcagtgagcccagatcatgccactgcactctggcctgggtgacacagcaagactccatctcaaaaaaaaaataaaataaaaaaagaactggaccaagyagaaaaagatatatggcattataaacactcactgaagtgttaatgtagccactaaatgtaaatatgcggtgaattataaatgacattataaatagcacaaaaatatgcaggaatattttaaaaaatcatttgcataataaccttccagacataaaggtattacctttaggagtggagtgctgagggatttcagtgaaacaagagctgtgtgaagcccagggtctc

SEQ ID NO: 756855 - DNA, 686 bp, Homo sapiens
aaaggtcacttacttgttccctatcttgccctgctcttttcctccatttagaatggttctcagtattttggcatttccactaaagaaagaaggaccagggaaaaggtcagactctaaggtcttctttctatataacttttgacagtgctagtgaaatactttttggctaggagagcttgggactttctaatgcaagtaaatgyctgctttatctacctgcgtcatcgtactgtcacttccccaccaattcagacatttgactggggctctcagtctggctttctggctactaagacaacatatatacttacctgatctttcaaaactcatgatgtgatgtgaagtttcagaaaagcagtaaaagcccttaccttccaccaactgtcttttttttttaagctgaagctctattccattgtaagacaaaacccatacatttcaaattgttccactctaaagtttttcttaatcctaaaacatgaatgacccttgttccaattccatattttataaagagtcattcattcaagatattttttataaaagcaataattaaagtatataatcccttcactcacataacttcagattaggaaaaatatattaaaagtgagaaaatcaattcaaatatgagaacatgacaaaatttaccattgcagggctatgaggatgacagaaaacttatg

SEQ ID NO: 756856 - DNA, 635 bp, Homo sapiens
ttttgccagaaaacctgctgctcttccctttttcagtatattggatcatcatccatgtcacagcccaaattagaaacttcagtaacatctttggaacattctcactcatctctttcattcaataattaccaagtgctatctcctaaataccttcagaatctccatgttcttctycactgctattgccagtgtccttgtacagacacttgtcatctgtagtctaaattataacaaaatcttcctacaactgcctcattgccttcagtcttgacccagttactccaaagcattcactaacctgcaaccagagaatctgtcaaacacacaaatctgatcatgtcactccccagttttaaatatcctagggtaaattcatacttagagttgtatcagaagtaattcctgcctgcctctctaacctacagtttagctcacactccatagtgcaactgtacacaatttttagttcttcaaaagcatcgtgctctcaaagacttcagggtctttatacacacagtttgctctttctggcaaacttttccatagcctcttcctctggctaacttctgattatttttcagttcccccacttgaacaccaattcttcaggaatgcatcactttattgtcttacct

SEQ ID NO: 756857 - DNA, 570 bp, Homo sapiens
ctcccataattcccaagtgtcatgggagggacccagtgggagataattgaatcatgggggattgaggggagtctttaccatgctattctcatgatcatgaataagtctcacggaatctgatggttttataaaggggagttcctctgcacatgctctctcttgcctgccaccacagtaagaagtgactttgctcctcatttgccttccaccatgattgtgaggcctccctarccatgtggaactgtgagtccattaaacctcttttttttttttttttttttttttttgcaaattacccagttttgggtatgtctttattagcaatgtgaaaacagactaatacaggttgcaaaagttcacaggacgtttaagccatgaccaagggcatggagtttatactaaatgaaatggaaagccgttggagggtttgtagcagggaagtaacatgacttgatttatggttttaaatgatcctcctggcagccatctggaggactaatagcaagggaataagaatggaagcatcagcccaaagcttctgcagaaatgagaaaagattttggtttaaac

SEQ ID NO: 756858 - DNA, 560 bp, Homo sapiens
ttgtttgtttgttttttgttttgttttgtttttgtttttgctttttgacagtcttgctctgtttttcaggctggggtgcagtggcacaatctcagctcactgcaacctccgcttcctgggttcaagtgattcttgtgcctcagcctcctgagkagttgggattacaggcacatgccaccatgcctggctaatttttgtatttttaatagagatggggtttcaccgtgttggccaggctggtctcaaactcctgacctcaggtgatctgtctgccttggcctcccaaaatgctgggattacacgtgtgagccactgcgcccggccgagagccacactcttatatccaatgacctagtctatgtctctgctagggttcctagcaggcacctcaaacttaacatgcctttcccagccagagtgttccctgagaacttaagcagaggctctattcttacagctgttgaagccaaaaaaacaccgagtgtgcctcaacgcctctccttcctctcccaggccacgtccaacccatcagccaattctagtggctttactttcaaact

SEQ ID NO: 756859 - DNA, 621 bp, Homo sapiens
tactagtatgtcatttataaaagcgtgtttaggctgggcatggtggctcacacctgtaatcccagcactttgggaggctgaggcgggcggatcatgaggtcaagagatcgagaccatcctggctaacacggtgaaaccccgtctctactaaaaatacaaaaaattagctgggcgtggtggygggcacctgtagtgccagctactcgggaggctgaggcaggagaatggtgtgaacccgggaggtgcagcttgcagtgagctgagattgcgccactgcactccagcctgtgcgacagagcgagactccgtctcaaaaaaaaaaaaaagcgtgtttagtattttcatctttataatatttattgagagctacgcatttatagcactgtgctgaaactctttatataactgacgcctctggctaatatctttcattggccacgtgagcttcaatttgtatactgtgtgaaagcagtgaaatttttgactttcaaataccgttcttcagttgtcagcaggataataaagtattcagaattagtttggtaggcaatgcttactgggcatattattgccttttgcttctctattgctacttataacacattaaagaaaattatattt

SEQ ID NO: 756860 - DNA, 611 bp, Homo sapiens
catgacaggatcaggttttggacgtccgggctagttacagaagtgcttttcaactttcacgtatctgcacagaatgaaaggattataatgatcatctatctatccaggggacaacaaagaaagaaacataaaatgtctaaacctctacttcctacaaaaaacatcagctaatttcactatgtcagttacttcaaaatgctgttgtctagctggctaactcaaagacaaaaatctgtcaatgtcaagaagcctactgtggtcctggagacacatattagaaatcctagaaagactacagtcacttttttttcagagacagggtattgctatgctgcccaggccttgatctcctgggctcaagcaatcctcccacctcacccttccaagtagctgggactacaggtatgtaccaccaggtgtagctgactatggcaattcctactttctattaaacattacagaaatgtaacgcygtgaacattacatcctcaatcctatttcttctctcttaatttatatgtggaatctggtatgttgtatatatcattgttacccttatagcaaattacagggggaatgacttccattacgttttgatacaatagctaagc

SEQ ID NO: 756861 - DNA, 530 bp, Homo sapiens
actacatgttagcatcatacatttgttctgtttttttttttttttttttgcaattctagacccttgtgtcagaaagagcaaatcctctagccctttgatcttcacaatccttcaattatctttctggtttccttctgttgtcatttagggtaaatacatatatttggtctttgtgtccatccatgaaaggtaatctcactcttcttttaattatttttagatccgttggctgaatgccttttagtctgcatacatgcatctcataccgcacagcccaaatttctacaacttgtccaggtgcagtctcctcagaactacaaagcaagaaaagatcacctttgggctcargaactcacagtcgttctccctctcccggaaggcacaatgaccaggacagtaccgagctttacagccatattgaactcaccatcaactcagcacattcaactcaatcagtcaaaatcgtcttttcctgctggtaaataacactgaaatgtaagtgccaactgttagtctttcttatctggagt

SEQ ID NO: 756862 - DNA, 530 bp, Homo sapiens
actacatgttagcatcatacatttgttctgtttttttttttttttttttgcaattctagacccttgtgtcagaaagagcaaatcctctagccctttgatcttcacaatccttcaattatctttctggtttccttctgttgtcatttagggtaaatacatatatttggtctttgtgtccatccatgaaaggtaatctcactcttcttttaattatttttagatccgttggctgaatgccttttagtctgcatacatgcatctcataccgcacagcccaaatttctacaacttgtccaggtgcagtctcctcagaactacaaagcaagaaaagatcacctttgggctcaggaactcacagtcgttctccctctcccggaaggcacaatgaccaggacagtaccgagctttrcagccatattgaactcaccatcaactcagcacattcaactcaatcagtcaaaatcgtcttttcctgctggtaaataacactgaaatgtaagtgccaactgttagtctttcttatctggagt

SEQ ID NO: 756863 - DNA, 622 bp, Homo sapiens
aagagaagactacaggcactgatacttcagggtcttccatttaagcaaccatgaggctcagcagtagataagccccacccgtgaacaaaattctatttagatatttacttcctcactccctaataagaattgacaccaagtatcttcagacatttaataaagctccgagcataaaatagtcgctaaaacaaacaaacaaacaaaattaagggagatagagactgtactggccagaagaaaactgcaaataattataattatttccctatccttagggaaataagaaagaatattacattcaagaaatgttagagtgcaataaaagaatattcagagttcaataaataactcttggtttstaacaagtaaaacagaaaaaaaaattataataggagaattaagagatgaagttaggaaaatctccttggaaaatgaacaaaaaagtcaagaatatagaaaatggggtaataaaaatcaatggataaatctaacaaaccaaatgtttgacccatatcagttccaggaaaagagaacagagggggaaaaaaaaagagaaaaaatttcaagacataatgcaagaaaatttcttagaaatgaaacacacaggttttcatttgaaaca

SEQ ID NO: 756864 - DNA, 593 bp, Homo sapiens
atatgactccagtggaaacgacaaaaatgacttggggagagagagagagagattagtaccactttcactcatccccccatccctctaccccttgctcatatgcacacacacacacacagaaagagagaaaatggaggtatagctttcaagttgtcttgtttgtgtggctatgaactccaaagttttggcaaatacatctaaattacatatataatagctttttttttttttcaccagagagatccttcctgaagaaggctaaagtgttccttgtagcccaggattgatcactccttgtaattgaaacctctcaaaatagtgtaacgtggctctccacttgcatgattcctttaaggagatgttgaaagccatgtaggaaatggaccgtgcttagtcagttccagtactgtgtttggatgtaaccaatggttggtaatttaataaatgaaacrgatggatggatggatggattaattagtggatgaataaaagaagggatgagtgagtggatggtgggtgggtggatggatgaattagtggatggatagatgaatacatagatggatgcgtggatgagtggatggtaggtggat

SEQ ID NO: 756865 - DNA, 629 bp, Homo sapiens; identical to SEQ ID NO: 753938

SEQ ID NO: 756866 - DNA, 607 bp, Homo sapiens
cattggaaagaacccaaccccaggtttagggttaggacaatgacacaatcctgcacatttgtatttaaggctggccatgtgatctaagccacactgatgagaattggccctgggagttttagaagttttgctggaaagaggttgcctttatctgccactatctttgccatgatgatgtaaagcctaagacagaaaccagcacgctgcaaattggagccaagcagggagaattagatagattcttataagttttatttgtttgactagcctgaagctagcatagctctggacttcttagtcacctgagacaatcattaaacttctgccacttgcaaccaaaagattccaggttaatgtatgcctgtaagagagaaggaaatttagtagtcaatgatatagatgaggagaaagtcaagagtgttagcggaagtgacsaacggcaggagtggctgagaggcttggcttttcaacagttgtttgggaagtcattctgagtttaaaaggtgtcttcctaaaagccagacattaaatatttctaagaaagccagagatcggcatcagaatcatattaaaacctcaatatattgaatggattttcaatctagca

SEQ ID NO: 756867 - DNA, 550 bp, Homo sapiens
aaaccaatagttaattaaatgctcttttttctttttataaccagcattaacgagttgtgacattttccagcccaggcttaacaagattattggtcttaatagaacttaaactgggaaaaggaacctgtaaaacatgcttaccagtgctcacatacatcagggaactactgasttttatcagatatccatcagaccccacccagtatttctcccagggacaagaataagtttggttctttgttgttcaagatcctataaatgcctatagtggagtcttttcacctttattcagttctttacttcaacctccaggcgagccctattcacatataggtcttcactctggcacacctgggagacagaaacatatataactgccattctcattatatatactattatatcccattatatatgtatgttttatatcccattatatacaacatatgctttatatatgtagtatatgtactatatatgtaatatgtatatgtaatatataattatatatgtttatgtaatatatatgtatgtaatatatacatagata

SEQ ID NO: 756868 - DNA, 536 bp, Homo sapiens
gcactttgatgcttcatttagacaaagattagctaaaatgaaatcttacagacttcattgtttccatatgctcatgaactctctcttctttactttggctgagtactctgtttctccaggattagagcataatagtaagtagatgtatttgttagtttcatgtaactctggctgctgtatacatcaatcaaaagatgcatagtggctctaacaaattagatacttaagttttgctcatgtaatatccaaaataagagtttttgatccattgaatcaaatgttatgatccatttgatccaccacacctctttcatgtggcaattcaggaatccagtaccttccatcrtattgttttcatatatttaatgggtagcttccaagattgctgcatttgtctgcatcaagcaggcagaaaggaaagagccaggaaaactacacttaggaatttttagtgcatcagggctggacatgttgcagatcctgttcactggcacttatttctatcactcagtcaagcagccagtgaactctgagag

SEQ ID NO: 756869 - DNA, 536 bp, Homo sapiens
gcactttgatgcttcatttagacaaagattagctaaaatgaaatcttacagacttcattgtttccatatgctcatgaactctctcttctttactttggctgagtactctgtttctccaggattagagcataatagtaagtagatgtatttgttagtttcatgtaactctggctgctgtatacatcaatcaaaagatgcatagtggctctaacaaattagatacttaagttttgctcatgtaatatccaaaataagagtttttgatccattgaatcaaatgttatgatccatttgatccaccacacctctttcatgtggcaattcaggaatccagtaccttccatcgtattgttttmatatatttaatgggtagcttccaagattgctgcatttgtctgcatcaagcaggcagaaaggaaagagccaggaaaactacacttaggaatttttagtgcatcagggctggacatgttgcagatcctgttcactggcacttatttctatcactcagtcaagcagccagtgaactctgagag

SEQ ID NO: 756870 - DNA, 553 bp, Homo sapiens
taacattactgttaattttaccttgttttccctctttattttttacttttttctttatttattttgattttatttatgtatttatttttaattttgtgggtacatagtaggtgtatataacaatgggatacatgaaatgttacaagatagtatttgtattttcccttttaaactttgtgtctgttacttgttaaatttttacaaaagtaaaactaacagaataatgctggcccaacactttgagatgataacaagtccatataagacagacaaaattgaacttaataagagactgcaggtaactttagcctgagagccaccacttcctttaaacckcccttgttgctcaaatgtggctataaggattttgatgctgactcctagccaccatttactctctccaacatgggagcagaccagtaacctgggccatgtctatccttggcaccgaataacaacaaaacctaactacaagatgattgattagtcatgcctttggaaaaagatctttatcaggtatcaaagaaaaaatgtgatacctgttaaaatggag

SEQ ID NO: 756871 - DNA, 652 bp, Homo sapiens
aataaataatctttgctccagggctatgctgaacctccttaggcactctctaattagatgtcctaggtcctcccaattcttagacctttaatacctgtttttctccttcgcttattccgtttagtttttcaattcatacaaaaccgtatccaggccgtcaccaataattctaaatgacaaatatttcttctaacartcccacaatatcaccccttaccacaaaatcttccttcagcttaatctctcccactctaggttcccacgccgctcctaatcccgctcaaagcagccctgagaaacatcgcccattatcttttcataccatcccccaaaatttttacggtcccaacactttaccactatttcattttatttttcttattaatataagaagacaggaatgtcaggcctctgagcccaagctaagccatcacatcccctgtgaccttcacgtacacatccagatggctggttcctgccttaactgatgacattccaccacaaaagaagtgaaaatggcctgttcctgccttaactgatagcattatcttgtgaaattccttctcctggctcatcctggctcaaaagctcccctactgagcaccttgtgacccccactcctgcctgccagagaacaatccccctttttccc

SEQ ID NO: 756872 - DNA, 652 bp, Homo sapiens
aataaataatctttgctccagggctatgctgaacctccttaggcactctctaattagatgtcctaggtcctcccaattcttagacctttaatacctgtttttctccttcgcttattccgtttagtttttcaattcatacaaaaccgtatccaggccgtcaccaataattctaaatgacaaatatttcttctaacagycccacaatatcaccccttaccacaaaatcttccttcagcttaatctctcccactctaggttcccacgccgctcctaatcccgctcaaagcagccctgagaaacatcgcccattatcttttcataccatcccccaaaatttttacggtcccaacactttaccactatttcattttatttttcttattaatataagaagacaggaatgtcaggcctctgagcccaagctaagccatcacatcccctgtgaccttcacgtacacatccagatggctggttcctgccttaactgatgacattccaccacaaaagaagtgaaaatggcctgttcctgccttaactgatagcattatcttgtgaaattccttctcctggctcatcctggctcaaaagctcccctactgagcaccttgtgacccccactcctgcctgccagagaacaatccccctttttccc

SEQ ID NO: 756873 - DNA, 631 bp, Homo sapiens
ctctcaaagctctggaggccggaagtctaaaagccccatgtctgcagggctgcactctccaaaggctctgggggaggaagcgtctttgcctcttccagctccccttggctgctgtgctcctgggctcgtggccatatcgctccaggctctgcctctggggccacgtcgtctcctcctcttctgtctgggtgaaatctcctccacttttctcctataaaatatttgttcttgaatttagggcccacttggataatccagggtgatccccccacctcaagatttttaacttaatcatggagatagcttttttctaaataaggtcacatttacagggattcagagggggacatrtctctttggggccaccatcaacccacatactcagtgcaggacacacaactgcaacaatatgactgtgtctactgccccgtcacattctttggtcatgaaagccaagccgtctgcactcctctctgacacgcttggcttggccaattggcttcttcctgcagactacagagcggctgttctgggaagctcctttctgctgcagagacacacagcccttcccgcaccaggccgagggtcagctcagcaggggccttttctggggaaggtgcagtactccaac

SEQ ID NO: 756874 - DNA, 568 bp, Homo sapiens
atttctgggtgatggaaatgctccttttcttgactgaggtgtgagtcacatgaactaagccatgcctgtgtagaaattctggaatctgctcttactgaaacccctactctctccacatatagcattcatttgatcgccatgctaatgtaatgaatactcattaagttcctatcatatgcctgacatgacacaagaatggataaagcaaaaacgaaaagtccttccgtcttttggaagccyctggtggctttctctgtgacctcaccgagggactgcagggttgtaagtgtgagtggaacagcaccttgaaggagaattacatgacaactatatgaggggacttcagaagtgccaggcacagcagtctcacattgccatcgttattgttattacccagcaaaaccaagatcgcagccaattctgccaaggtcggggctggagggagcagacagaggtctcatcaacaaggtggcatctggccatgaggaacccagaggctacggtgaagatggcagggcaggatgctgcaccctggctgtgcccgctctgggccagcgcctctgtcatg

SEQ ID NO: 756875 - DNA, 633 bp, Homo sapiens
tgaaaattaaagacaaacaaaatttaaagcagtgatcagaaatgacactttacctacagaagaaaaacttgaatgatagagaatttctcagatgaaactacagaggccagaaaaaaaggagtgtatttttcaagtgctgaaaagaaaagaactatcatatccagttaagacgtattttgtgaatgaaggaaggaaatcaaagctttctcagttgaataaaattaagaaagttttttaccagcatctacacttcaaaagaatagctaaagaaagtttactaccagaaaataataaaagtaagaatsttggaacctcaagaagaaagaaagaacaatggagaaaagtaaatatatgaataatgcaacatatcctccttcacctctagaattttctaaatcatgtttgaggacttaagcaaaataatataacactgaatatggttttaaatgtatatagcagaaatgcaaaataattgtattataaatgggaaaaggtatcagaacagatggaaggttaaatttctacaactcatttgaactggtaaaatgataacaccattaggcttataagttatgcatatttaataaaatacctagagcaacctgtaagcaagctatataaagaaatagactc

SEQ ID NO: 756876 - DNA, 612 bp, Homo sapiens
aaaagggatcccagagacagctcttgctttttttccggcatgtgaagatacaataagccagcaatatgaaagccagtcagcaatctgaaagccagaacctaaccatactgttaggaaatttacttatttcctaactataaacaataaatttctgtttataagccaaccagtctacagtactgtgttatagctgcccagaatgagacttcatcttaaaccatttttaagtgtgtagttcagtagtgttaagaacattcatattgttatacaaccaatttccagaactccttcagcaaaattgaaactctgtacccagtaaaccagaactcccyattccacaccctcttcccctagcccctaccactattctactttctgtctctgtgaatttgactattctaggtacctcacatatgtggaataatacagtatttatctttttgtggttagcttatttcacttagcataaggtccttcagaaccttacatttccactaacagtgcccaaggcttccaatttccctatgtccttgccaacaattattattgttatcacagctaatgggcatgaggtggcatcctatctattgtggttttcattgcgtttcccta

SEQ ID NO: 756877 - DNA, 586 bp, Homo sapiens
gatttatgtaatgatcatataaattctgttaaggctcagggagcttttcagagtagctcctctctctgtgtgatgacctctttctctgtgatgagaggtgaggtcacttgcttcttgtggtatttccatttcaacacatggtttctacagttgcctgttatagagaagataggytcttgaatgtctcagcctggagctgacctgaatttcttctacttagttttcactgcctagaaccaggtttctcaactatggctggggtgaataatttgttttgggggactctccttgcactgcaggatgcatgccagcatccctggtgtctatacaccagataccagaggtgtcccctctggctgtgataaccaaagatatctctagaggttggggtgagggcagcagtgaatggaaaaattgcttttggttgaaaaccgctgaaccagaggtagtcatttagttctaactgcaaggttgttgggaagagtggtcttcttgtgtttacaggaaggtgaggaaaatcagacatggatatgcactagtagactgcaacatattagctaacggaaatacagacttttcatcattt

SEQ ID NO: 756878 - DNA, 585 bp, Homo sapiens
agacacacgcatatgcataggattaaacgcaagtggggaagtgcaaactaggttctatgagatcagagaggacggcatctatcacatatgttagcatgtgtgagagtgtgtgtgagtagagattggttgtgtgagagagaggttgtgtgtatatgtgtgtgtgtgaaagggtaacttagggagttaaccctttctgaatcctaaagggttgacgggattagagcagaagcacatttcagatcaaaagaacacagaaatgccataggaatgyaatatatcatgatgtgcttcagggaccatgaaaagttgacagttgctggaataaaaaacagagaggtaaggctggagaataagcagaggtttgggtggggtcttctggataaggaacgtctttaataatactgtaaagaacttgaactttttattggagttcatgggaaacaaatgaaatggtctaaacatggatacgtttaagggtaacatggagaatggatttgatgggtaccagactgtgtccaggcattctaattaaaagactgttgtaaatatctggacaaaagatggtaaaagacttaacttggcaat

SEQ ID NO: 756879 - DNA, 576 bp, Homo sapiens
tcatgaatctctactctgtacccatggcatttctatttacaaataggtacatatttggatttatattccagatcttcagcttctgaatcctataacctgggaaactattgaacttacctgttttttttctcacctgcccagtgatggcacagagaggattaagtgacactgtccatataaagtacctggaacacacactagtgcaatattatttgccttccttttttcttcttttgagattttaaaaacaacaacataacaacatttaccaytataaccatttccaaatgtgtagttcagtagtattagagcattttcactttttcatctagtaaaacggaaactgtaaacccactcaacatgaatgccttgttccctcctccctgcagttcctggtaaccaccgttctctttgcttccataaatctgactactcttgatacctcactgaatggtatcttatagtgtttattcttttgtgactggcctatttcatttagcataatattctcaaggttcatccacgtcataatatgtgactggatttccttccctcttaagactgaataatatgcca

SEQ ID NO: 756880 - DNA, 576 bp, Homo sapiens
tcatgaatctctactctgtacccatggcatttctatttacaaataggtacatatttggatttatattccagatcttcagcttctgaatcctataacctgggaaactattgaacttacctgttttttttctcacctgcccagtgatggcacagagaggattaagtgacactgtccatataaagtacctggaacacacactagtgcaatattatttgccttccttttttcttcttttgagattttaaaaacaacaacataacaacatttaccattataaccatttccaaatgtgtagttcagtagtattagagcattttcactttttcatctagtaaaacggaaactgtaaacccactcaacatgaatgccttgttccctcctccctgcagttcctsgtaaccaccgttctctttgcttccataaatctgactactcttgatacctcactgaatggtatcttatagtgtttattcttttgtgactggcctatttcatttagcataatattctcaaggttcatccacgtcataatatgtgactggatttccttccctcttaagactgaataatatgcca

SEQ ID NO: 756881 - DNA, 662 bp, Homo sapiens
gtggtgccacttccacttcaaccccttgattcctggatccgtgaattctggctatgggagaaacggtaccatatattggacgctgattcagagcatacatggtcttgtggagaactttaccccagccctgcagagtattgtcacctagttggagttgtaattgtgacttcaattacagtgaaggccattccaccattctatcaatccagctgcttcaggatgatgggcaacatggttaagaccagtgaattccatgaacatgagcccactgttacacttcttctttctttctttctttyttttttttttttttgagatggagtctcgctctgtcacctaggctggagtgcagtggcacgatcttggctcactgcaagctctgcctcccgggttcacgccattctgcctcagcctcccgagtagctaggactacaggcgcccgccaccacgcccggctaattttttgtatttttagtagagacggggtttcaccctgttggctaggatggtctggatctcctgacctcgtaatccacccacctcggcctcccaaagtgctgggattacaggcatgagccaccgcgcccggccgcccactgttacacttctttagccctaaagtgagtgccttggtcagaggcaatgctgtgtggaataccatg

SEQ ID NO: 756882 - DNA, 642 bp, Homo sapiens
tggcctataatacatatattatctttttttttttttgagatggagttgctctgtcacccaggctggagtgcagtggcacgatctcagctcattgcagcctccacctcccgggttcaagtgattctcctccctcaacctcccgagtagctgggactacgccctcctcagcctcccaaagtgctggagttatagctgtgagctaccatgcccagccaagaatatgtttctaagaaaagaacatatgcaactttggggtgtcagttgctgataggaaatccatgtcactggcttatgctggtctcaggctctgcaggatgtgctcatccctggcaggttggttagcagaagactggaggaggygaggaggatagagagactcgtatagcagggagcaatggtctctgtaaggccacaaatagtcacttcatcaagcggtagagagctgatctggcaacattacctgctttagcatttctttccttggagcaatgtgtcatagctatttccctcctccaggagagtaagaaacagaacaatctaggcaggggtgaggccacaatgccgcagcttcctgagcacagcaggaagatacaatggagattcctttttttaatttttaatttttgtgggtacatactgtat

SEQ ID NO: 756883 - DNA, 523 bp, Homo sapiens
cccctggccatgtctttaacccctgagtaatcactattctcttctccacttctaaaattttgtcagcagctcatgcctgtaatactagcactttgggaggttgaggcaggaggattccctagagttttacccaagttgytgcctgtatgaacagtttgttctttttattgtggagttgtgttccacggtatctctgtaccaaaatttctttaaccacttaccttttatgggttatctgggctgattccagtttggggctattataaataataataatatattctataaatatgtacaaatttttgtgcaaacacaagttttcatttcttggggttaataaattccaagggatgtaattattgagtcatatggtagttacatgtttagtttcataagaaactgccaaactgatatccacaatggcagtaccattttgcattcccactggcagtgtatgagtgatcccattttttcacatccttgccagaagtcggtattgttggttttgtttttctttctagcc

SEQ ID NO: 756884 - DNA, 668 bp, Homo sapiens
tttactggtggagggtcttgccttgatgttgatggttgctgacttatcagagttgtggttgctgaaggatggggtggccatgacaacttcttaaagacaatcatgaagtttccacattgattgactcttccttttataaactatttctctgtagcatatgattctgtttgatgacattttacccacagtagaactgcttttgaaattgaagtcaatcctctaaaattgtgcttctggtttatcaactgagtttatgtaatattctaagtcatttgttttaatttcaacaatgtttaaaatatcttcactagaaatagattcaatctcactttctttgctcgtccataagaagcagctcctcatccgctcaagttttatcaagaaatcatagcaattcagtctaatcttcagattccacttctaattctagttctcttgctatctgcaccacatctgcagttacgtcccacaggcaagattgaacccctcaaaatcttccaygagatttagaatcaactgcttctaaatttctgttaatgttgatatttttctaccctcccacaaattatgagcttaataaaatctaaaattacagattatttccagaagtttttcaatttactttacccagatccatcaaataaattactacctatggaagctaaaga

SEQ ID NO: 756885 - DNA, 631 bp, Homo sapiens
ttttatggcaataaattaacttagaccaggtgcagtggctaacacctgtaatcccagcactttgggaattcaaggtgggcaggtcatttgaggccaggagttcaagaccaggctgggcaacatggtgaaaccctgtctccactaaaaatacaaaaattagctgggtgtggtggtgcatgcctgtaatcccagctactcgggaggctgaggcatgagaattgcttgagcctgggaggtggaggttgcagtgagctgagattscaccactgtactccagactaggagacagagtaacacgctgtctcaaaataaaaataagaaaaagaaaaagaaaaaggaaagaaaagaaaagaaatagaggaaaaaaaatttttgaaaaaagaaaaatatcactaaaattgactcaatagaaaatatgaatatacccacagtaaaaaagaaattgaatttgtagtttaaaaccttcccacaaaaataaagctcaagcatagataacctcaccggtgaattctaccagacatttaaagaagaaagcatatcaatccctcataaactctctcaagatagaggagaagctttccaacatattgtatgaagtcaataatactctgatagcaaagccagacaaaaa

SEQ ID NO: 756886 - DNA, 540 bp, Homo sapiens
gaaaatatgaatatacccacagtaaaaaagaaattgaatttgtagtttaaaaccttcccacaaaaataaagctcaagcatagataacctcaccggtgaattctaccagacatttaaagaagaaagcatatcaatccctcataaactctctcaagatagaggagaagctttccaacatattgtatgaagtcaatawtactctgatagcaaagccagacaaaaatatcacaagaacactacagaccaatattcttcatgactatacatacaaaatcttcaacaaaatattagtaaatcaaatccaagaacatataaaaaaagagaatgtaccatgaccaattggtatttaaacccaaatgcaagattggtttaacatccaaatattaattcgtatgacaccttactaattagaattaaaaatgcactcacacaatcctcttaataaatgcatgaacatcacttggcaaaatccaagatccatccgtgattttagaagaaaactatcaacaaataagaaataaaaagaaacttccttgctcga

SEQ ID NO: 756887 - DNA, 617 bp, Homo sapiens
taatgctctcccttcccttgcccccgacccccggacaggtcccattgtgtgttgttctcctccctgtgtccatgtgttctcattgttcaactcccacttatgagtgagaacatatggtgtttggttttctgttccygtgttactttgctgagaatgatggtttccagcttcatgcatgtccctgtaaaggacatgaactcatccttttttatggctgcaaagtattccatggtgtgtatgtgccacattttctttatccagtctaacattgatgtgcatttgggttggttccaagtctttgctattatgaacagtgctgcaataagcatacatgcgcatgtgtctttatagtagaatgatttataatcctttgggtaaatacccagtaatgggatcattgggtcaaatggtatttctgattctacttccttgaggaatcaccacactgtcttccacaatggttgaactaatttacactcccaccaacagtgtaaaagcattcctatttctccacagcctcgtgagaaatgagagaatcacttgagctcaggaattcgagaccagcctggtcaacatagtgagaccccatctctatttttaaaaaaaaaaaaacgggc

SEQ ID NO: 756888 - DNA, 568 bp, Homo sapiens
caatttacaaaagaaagaggattactagactcacagtttcacttggctggggaggtctcacaatcatggcagaaggtgaaaggcccatctcacatggcagcagacaagagaagagagcttgtgcaggaaaacacccccttataataaccatcagatctcatgagacttaccatcaygagaaaagcacaggaaagacctgcccccatgattcaattacctctcaccaggtgcctcccacaacacatgggaattcaagatgagatttgggtgggtcatagccaaaccatatcagcatccatattggaaaaaaggaagtcaaactatctctgtctgttgatgatatgaccttatgcctagaaaaccctaaggactcctagatttggtgaatgaattcagtacagtctcaggttacaaaatcaatgtacacaaataagtagcactgctatacaacaatgactgatctgtgaatcaaatcaataactcaatcccttttacaatagcgccaaaaaaaataaaatacttacaaatacacttaaccaaggaggtaaaatatctctacaaggagaac

SEQ ID NO: 756889 - DNA, 568 bp, Homo sapiens
caatttacaaaagaaagaggattactagactcacagtttcacttggctggggaggtctcacaatcatggcagaaggtgaaaggcccatctcacatggcagcagacaagagaagagagcttgtgcaggaaaacacccccttataataaccatcagatctcatgagacttaccatcacgagaaaagcacaggaaagrcctgcccccatgattcaattacctctcaccaggtgcctcccacaacacatgggaattcaagatgagatttgggtgggtcatagccaaaccatatcagcatccatattggaaaaaaggaagtcaaactatctctgtctgttgatgatatgaccttatgcctagaaaaccctaaggactcctagatttggtgaatgaattcagtacagtctcaggttacaaaatcaatgtacacaaataagtagcactgctatacaacaatgactgatctgtgaatcaaatcaataactcaatcccttttacaatagcgccaaaaaaaataaaatacttacaaatacacttaaccaaggaggtaaaatatctctacaaggagaac

SEQ ID NO: 756890 - DNA, 603 bp, Homo sapiens
gggaaatgacctttgaaaaagctatttgaagagcttggtttctaatgccattctctaatgaaataaactttgagaaatgactacttctaggcattaaggcagggaatagacacgatgattctggagcatctttagtgccagagagtaagtgctcataaaacaaaatatgtgtatttggcaaagagacatggaagcaaactaaaagagctgcccatggccaactttaacaatttgactaataaatctaatttgctattaggttataaacccaakaatgaaagaaatatccatgaatcaaaattaatataaatatatgataaaaaataaataaatggaagataatagaaacattttccctatgaaagaatctcaaatatttgcatagatagggatgcctcagtgaggtgaagcataacttccttccaaagagtataaaaagaagggggaagtttagttagttttcactggagaaacataataaaagtacatatgccatgcaaacaagggcaccattatcaattaaataatattgttgataataggcaccatccatagaaataatgatgagaatggcactttacctctgtggtcttcctctcaaaa

SEQ ID NO: 756891 - DNA, 634 bp, Homo sapiens
tagattaaccataataaacatttccctatttcagtggaggaaggaagcacaaattaaaaaattgagaaaatggagactgatcattaagaggaaacaaaaagtaaggttattctgccaaaaatgcagaatgattctgttatctacaaatccctgtaggtgagagtgaacagcaactctgctatgctaaatgtttaggtcaactcagaacttttcctggagagttttggaactctggactgaatatgagaggtgtataatgagtgacagaacagtgagggaaagtgtttcatgctgtaggcatatatagctctcaaagccccacagagatttttaaagcattcacaaatgatacaaatagtaatcaggaagtcctgccaaatacatggttaataakaaatacaaatttctttgggccaaacaaggatatcctatgtcaagaccaagttcttctaagttacttgtgaaggcaaattttttttattttactttaagttctagggtacatgtgcacaaagtgcaggtttgttacatatgtatgcatgtgacatgttggtgtgctgcacccattaactcgtcatttacattaggtatatctcctaatgctttctattccccctacccccaccccacaaca

SEQ ID NO: 756892 - DNA, 698 bp, Homo sapiens
ttactaaagtaggaagagcttaaatcacaacactcaagtccttttaagtatctagaaagctttctcaagaaagacagctatgaatatgcctaggcagtgaagactacaataaatatataacctttcaatgtccacacgctgaggaacatcyactagcatcaacaccatccaaaaaaatgatcttaccaaatgaactaaataaagcaccagggaccaatccaggagaaaaagaaatatgtcctctttcagataattcaaaatagctgcgttgagaaaactcaaagaaattcaagataacacaggaaagaaatttagaattctatcagataaatttaataaagagactgaaataatgaaaaagaattggccaggcacagtggctcatgcttttgtaatcccagcactttgggagattgaggcgggtggactactgtgcccaggggtttgagaccagccaggacaacatggcaaaaccctgtctctacaaaaatacacacacaaaaaaaattagctgagtgcagttgtgtgcacttgtactcccagctactgggaagctgaggcaggaggattgcttgagctggagagttagaggttgcagtgagttgagatcacaccactgcactccagttcaggtgacagagtgaaactgtctaaaaaaaaaagaaaaaagtaaaacaagcggaaattctggagctgaa

SEQ ID NO: 756893 - DNA, 597 bp, Homo sapiens
gtgaagactacaataaatatataacctttcaatgtccacacgctgaggaacatctactagcatcaacaccatccaaaaaaatgatcttaccaaatgaactaaataaagcaccagggaccaatccaggagaaaaagaaatatgtcctctttcagataattcaaaatagctgcgttgagaaaactcaaagaaattcaagataacacaggaaagaaatttagaattctatcagataaatttaataaagagactgaaataatgaaaaagaattggccaggcacagtggctcatgcttttgtaatcccagcactttgggagattgaggcgggtggactactgtgcccaggggtttgagaccagccaggacaacatggcaaaaccctgtctctacaaaaatacacacacamaaaaaattagctgagtgcagttgtgtgcacttgtactcccagctactgggaagctgaggcaggaggattgcttgagctggagagttagaggttgcagtgagttgagatcacaccactgcactccagttcaggtgacagagtgaaactgtctaaaaaaaaaagaaaaaagtaaaacaagcggaaattctggag

SEQ ID NO: 756894 - DNA, 611 bp, Homo sapiens
tatttcaataacattcgcatttaaaaatatatgtaactatatttttccaggttaataaagttataacagaaaaataaatattgtatatatttaaagtgtacaacatgatgatttgttatatatacacacacacacacacataatgtattatggaatgattaccaaaaccaggctaattaatacatccatcacctcacatagataccctttttatagtagtgagatctcttaagatctactcttagtaaatttcaaataaacactatcgtgttattaactatagtcatcatgctgtatattaaatgcccagaatttaattatgttatagtttaaatgtattctttgaatcaacatccctcgaccccacctggaaatcaatatttaactctctagctatatgagttcaacttttttggatttcacataaaaatgwaatcatatagtatttctttttctttctttctgtgtcttgaatttagcataatgttctccagcttcatccattttttcacaaatgttaggttttccttgctttttatgtttgaataacattctggtgtgtgtgtgtgtgtgtatcaaattttccaaaatcatatcaaataattaccaaa

SEQ ID NO: 756895 - DNA, 628 bp, Homo sapiens
ctattcataaaataatatatagcttaattttgagaatatgaaatgtacacacttctatgtataaataagcattacaaagtaaagattacttttttatactaaaattaaaatatgtcattaaacttgacttcatttcctttttgataatcattgaaatagagaattaaatgatgtttattaagactccctctggcactcaatacttcaaaatgtgtttagcctgatcggatatcaaagaagaaaaagaaaacaaatagttgaaagaacattcatattaatttatcttaataaaatgtgtattcatrgatatcaatttttattatattctgcatcctacagaattacaacaaggatattatagaaatagctcacatagttcaaagtgaatgggagtggatactcaggatattcatgaagagccattgcagaaaaaagaatgcattgcaatgatatttcatttttaaacaatgtaacacctaaaaagtaaaataatatatcaagactaaaccattattatgatttcttcctaggactataatactggtgcattaaatgtcattataaaaaatgtttagaatattttattaattagtggtattataaagtagcatacatttgtatattgttt

SEQ ID NO: 756896 - DNA, 628 bp, Homo sapiens
ctattcataaaataatatatagcttaattttgagaatatgaaatgtacacacttctatgtataaataagcattacaaagtaaagattacttttttatactaaaattaaaatatgtcattaaacttgacttcatttcctttttgataatcattgaaatagagaattaaatgatgtttattaagactccctctggcactcaatacttcaaaatgtgtttagcctgatcggatatcaaagaagaaaaagaaaacaaatagttgaaagaacattcatattaatttatcttaataaaatgtgtattcatggatatcaatttttattatattctgcatcctacagaattacaacaaggatattatagaaatagctcacatagttcaaartgaatgggagtggatactcaggatattcatgaagagccattgcagaaaaaagaatgcattgcaatgatatttcatttttaaacaatgtaacacctaaaaagtaaaataatatatcaagactaaaccattattatgatttcttcctaggactataatactggtgcattaaatgtcattataaaaaatgtttagaatattttattaattagtggtattataaagtagcatacatttgtatattgttt

SEQ ID NO: 756897 - DNA, 601 bp, Homo sapiens
tcctgactaacacagtgaaaccccgtctctactaaaaatacaaaaaattaggcgggcctggtggcgggcgcctgtagtcccagctacttgggaggctgaggcaggagaatggcgtgaacccgggaggcggagcttgyagctagccgagattgtgccactgcactccagcctgggtgacagagcaagaatctgtctcaaaaaaaaaaaaaaaaaaaaagtactaagaaagatctgctctagttgagtaaaagacccttggttctgtaacccaatagactattacaaaggtatgtaatcttacctctttaaaatgattttggctcctctccccccaccctctgcctctgaaaaactaaatcctatgactttttttttttttccatgccccttacatcttttgccttaaagagccaggctctgttttccttatggtacatttgaaaatattcattttaatttttttccagaaatgatgacatcagaaaaatacaattgctgtaaagaaagcaaaaaaattctaatgataggatttattctgggaaatgtatattttgtagctgagattacatgatgctgtactgaacttgaccaaaaacttacc

SEQ ID NO: 756898 - DNA, 579 bp, Homo sapiens
tatagttatcttgaaatatacatgcaataaattattactaaatgtagtcactctattttgctactgaacactggctctaatttctagtaactgtatttttgtgcctattaaccagctcctcttgacccacccttcccaatacctttytcagctcttgataaccatcaatctactctttactttcattagatcacattttttttttttttttttgagacagagtctcgctctgttgcccaggctggagtgcagtggcttgatcttggctcactgaaagttccgcctcccaggttcacgccattctcctgcctcagcctcccaagtagctgggactacaggcgcccgccaccacactgggcaaattttttttttttttttttttgtatttttagtggagatggggtttcatcatgttagctaggatggtctcgatctccagacctcatgatccgcccgcctcggcctccctagatcactttttaaaactcccatatatggtaagaacatgtgatatttgtccttctgtgtctggcttattttatttaacatactgacctctaattccatcaatgttgctac

SEQ ID NO: 756899 - DNA, 585 bp, Homo sapiens
gttctccttgtagagacctttaacttccttgtttaaatgcctttccaagtttttttttttttttttttgctattgtaaatgggaataaattcctgatttggttgtcagtttgattagtattgatatatagaaatattcttgatttttgtacattgatttaatatcctgatattttactgatgtcacttatctattctaggagtctcttggcagaatgtttagggttttctaggtataagataatatctttagaaaacagataattcgactctgtcctttccaatttgcacgccttttatctctttgtatttcctsgttgctatggttggaaatcccagtactgcattaaataggagaggtgaaagtcgtcatccttgcttgttctggttctcaacaggaattttttgaacttttccccgttcaggatgatgtttgctgtcacatattacttttgttattttgaggtatttcttctatgccttgtgtgttgaggttcttttttttctatcatgaagagatgctgaagtttatcaaatctttttctgcactgattgagataataatatggtttgtgtttttaactat

SEQ ID NO: 756900 - DNA, 637 bp, Homo sapiens
ggtcagtccaatctactaaaaaaacggtggtggtccatttgaaaatttacatggagataatgtcaaagagcatatgataacagtaaagagtaatcacatggttaggcttggtagtagtaacttggaatttaaatttctgggagagtacagtactttatctggaagataaagtaataatttaagctactgtaatttatgaaaataaaaagtaaaagatacatttttagttttcgtctacatggttttacacatgtgatttcccttgtactaatttctacttcatgaagtccctttgagttaaatagagcaagtattatttccataatataaatttatttttaatgtggtttagtgagacttaataactttccaatattacatactcctgcaagatccattaggatgaaaacactttctctttgactcatttmtatattctcagcaccaaataacgtgataatatggcttgacatattgtaagtatttgtcatatcactcaatacagttgtgtcagtttcagaactcaaaacaaaatacactatttccaaactcagtgttattactttaagcaatagagaacagcattaaaaaaataaataaaatctaagaaatactttatttctttaggtataggatg

SEQ ID NO: 756901 - DNA, 608 bp, Homo sapiens
ataattgacttaataccagaattatataacaatattaaaacaataaaataaattcatggaccaatattcctcataatcatagacacaaaattcttaacaaaacagaggtgaaaccagaaacttataaaagagataatgcattataactattttggtgtatacaagaagaaatatgaagttaatttaacaatcaaaaataaaattttgcattttgccatagtaagaggataaaagagaaaaatttatttctatagacacatgaaaaacatttgagaaaagtgagcaacaaaggtttatttcacaatagtgagaatacccatgtaagtagctttaggaacctaggaatagacaggacttcttgaacttgacaatagatttctactaaaatcttacaactaaygtcatacttaatggtcaaatattcattactttcccctaatattaaaaagtcaagaatatgaaccctgagcatttgattcacaatgtactaaaagtcctagatgttgcaataaggttaagggaacaaaggcataaagaatagattttaaaaattgaatttttttttgcatatcatacgattgcttacatagaaaatctttggagatctt

SEQ ID NO: 756902 - DNA, 608 bp, Homo sapiens
ataattgacttaataccagaattatataacaatattaaaacaataaaataaattcatggaccaatattcctcataatcatagacacaaaattcttaacaaaacagaggtgaaaccagaaacttataaaagagataatgcattataactattttggtgtatacaagaagaaatatgaagttaatttaacaatcaaaaataaaattttgcattttgccatagtaagaggataaaagagaaaaatttatttctatagacacatgaaaaacatttgagaaaagtgagcaacaaaggtttatttcacaatagtgagaatacccatgtaagtagctttaggaacctaggaatagacaggacttcttgaacttgacaatagatttctactaaaatcttacaactaatgtcatacttaatggtcaaatattcattactttcccctaatattaaaaagtyaagaatatgaaccctgagcatttgattcacaatgtactaaaagtcctagatgttgcaataaggttaagggaacaaaggcataaagaatagattttaaaaattgaatttttttttgcatatcatacgattgcttacatagaaaatctttggagatctt

SEQ ID NO: 756903 - DNA, 608 bp, Homo sapiens
gaatgtcattaatggttacttctttcaatatgaagtaacaagagcaatttacaactaatttgtatatttaaatctcaaatattagaaaatattactttaactaaaataatagtttagattcttgtaatattgctatatgtatatggtctcaataaagtggttatttttgctgcctgagtatacaaaggaactagaaactgcttaacaataaaacatcaatgtaatttgcatagagatagttcagacatcatttctatgtaagtacagtataattttctttgtattattttgttaaaaataatcaccctgacattttttcactttctacttttcccaagtttttcttagggtgttatctcagaaacaagttgtattattttcctcttataagaatttcartttggagggatattgattttgagactgataaatattagaaaattatttcaaaaaaactgtgcaaagatatttctaataatttctctgtttgctgaatgattatattctataaagtagcatccctggagatgctggtggatttttaatggctttcccaacctaagaagtttgaaaatggcttctactgacacaatagaaatttagctgat

SEQ ID NO: 756904 - DNA, 608 bp, Homo sapiens
aaaatctggtacatatacacaatggagtattatttagccatacagaagaatgagatcctgtaatttgttactacatgaatggaactggggatcattatgtagagtgaaataagccaggcacagaaagacaaaaattgcatgttctaatttatttgtgtgatctggaaattaaaacaattaaactcatggacataragagtagcagtatggttaccagaggctgagaaaggtagtggaggacttgagtggaagtggggatggttaatgagtacaaaaataaaaaagaggaataaatagaatctactattggatcgcacaatagggtgactatagtcaataataacctaattgtactttttacaataacttaaagagtgtaactggatttttgtaactcaaaaaataaatacttgaggggattattaccccactccccatggtgtgcttatttcccattgcatgtctgtatcaaaacatctaatataccctataaatatacacacctactatgtacccataaatattttaaaaaatcttagaaaaccctagcaaccttattaaatattctttgagctctggactagtgaatagtaaattctcaaatatat

SEQ ID NO: 756905 - DNA, 608 bp, Homo sapiens
aaaatctggtacatatacacaatggagtattatttagccatacagaagaatgagatcctgtaatttgttactacatgaatggaactggggatcattatgtagagtgaaataagccaggcacagaaagacaaaaattgcatgttctaatttatttgtgtgatctggaaattaaaacaattaaactcatggacatagagagtagcagtatggttaccaraggctgagaaaggtagtggaggacttgagtggaagtggggatggttaatgagtacaaaaataaaaaagaggaataaatagaatctactattggatcgcacaatagggtgactatagtcaataataacctaattgtactttttacaataacttaaagagtgtaactggatttttgtaactcaaaaaataaatacttgaggggattattaccccactccccatggtgtgcttatttcccattgcatgtctgtatcaaaacatctaatataccctataaatatacacacctactatgtacccataaatattttaaaaaatcttagaaaaccctagcaaccttattaaatattctttgagctctggactagtgaatagtaaattctcaaatatat

SEQ ID NO: 756906 - DNA, 559 bp, Homo sapiens
ttttctttttcaccacatggttgagctgcaaattttccaaacttttatgccctgcttcctttttaaatacaagttctctttgtttatgcaaacgagcataggcttttataagcagccatgccacatcttgaatgctttgctgcttaggaatttcttctgccaaataccttaaataatctctctgaagtttaaagttccacaaatctctagagcagggacacattgtcaccagtctctttgctaaagcatagcaagagtgatcattactccagttcccaatargttcctaatcttcatctgacacctcctcatcccggactttattgtccatatcactatcagcattttgttcaaaaccattcaacaattgtctaggaagttccaaagtttccctcatcttcttgtattcttctgagtcttccaaattcttccaacctctgtccattacctagttctaaagttgcttccacattttcaggtgtctttataacaatgccctactttctcagttccaattttctgtattagtccattttcacactgctataaaaacatatct

SEQ ID NO: 756907 - DNA, 634 bp, Homo sapiens
ccatcccctcagttacgtaagccaatttcttgaaagaaatctctgtcagccgggcacggtggctcacgcctgtaatcccagcactttgggaggctgaggcgggtggatcacgaggtcaggagattgagaccatcctggccaacatggtgaaaccacgtctctattaaaaatacaaaaattagccatacgtaagccaatttcttgaaaaaaatctctatcagccgggcatggtggctcacgcctgtaatcccagcactttgggaggctgaggcgggtggatcatgaggtcaggagattgagaccatcctggcccacatggtgaaaccgcgtctctattaaaaatacaaaaattagccaggtgtggtagcrtgcgcctgtggtccccagctactgggaaggctgaggcaagagaatcgcttgaacccgggaggtggagtttgcagtgagcggagattatgccacggcactccagcctggcgacagagcaagactccgtcaaaaaaaaagaaagaaagaaagagaagaagaaaggatgaaagagagagagagaaagaaagaaaagaaatctctatcatctacctatttgtctaatccatctaccagctatcaattaatcaatatatgtctatctatc

SEQ ID NO: 756908 - DNA, 691 bp, Homo sapiens
tagaattttctaagacagtcctctggatcctctaaatgtgaattttgatgtaataactgctaataaaattatattgaaactgttttatagaaagttttttccaaagttttctatgtttggctcaattagggcagtatcatcagttctataatgtaaaagaaattttctttcttttgaggtattccataaaagtagttgggaaaattattatgtaaaataataagactcttccaaagccttaataaaaacatcaacattgaaaacagttttttttaggttgcccaaaattatttcttcaaagagtcattcattccttcatttagcaagtatttattgagcaactgctatgtggcagatatgtttctagatgctgtagagacaacagtgaacaataaagataaaagtccttgtcctcacagcagtacattctattgttcatcatatttgatcartgtactcatttttctttatgcaaggagtggatgtcttattgtaaatgaatagaatatttcttccctaagcgtgtgaaaataggggatggatgagtgggaagggcatgggatattcctggcaagatctctgatttcataatacttttttgggctcatgtagtggaattaaatatacctcttacttcaggaacaaagttaacaaatatgtttgatgatccagccgactttgacactgttat

SEQ ID NO: 756909 - DNA, 616 bp, Homo sapiens
ataattgttactgaagcatgttggctacaaggattggagaaaatgttattaagtgtaaaggacttgagttggcagtaaggtgggctggggtgttgggactttgaaaggatatgataaacttgtatttttagaaatgycagtgacattttggggtcagcaagcagatcagtcttgctgaaaggatgtattacagtcagggtttatttattacaaatcatccaccctagcttaagctaaaagggggaaattacgggataagtgcaaggctatttcctgccaaacagtcagatagtacagtgggatctcaggtaggactggaaccaagactttgaaacatgccagcaacaaaggaaaccactctctgttttcctggagttgctgagtctagcaactcactttccctctctgatttattgttctctttctatgttggccagcttattttgcttctctaagcacatgatgaaaattggccccacagtacaaactaggctaactataattgctaggtccccattcaaaattctctggaggcagaacctgattggtggattttggtcaaatattctttcttggtccaattaatgagtcagagtatgcaaattaaataatatga

SEQ ID NO: 756910 - DNA, 631 bp, Homo sapiens
aattacccgtttctctaaataaaagcctttggacaataatctactcccctaattaaaatattctaatcctttctctccaattcctatttcaactggaagagccacagttattaatttctaatggtttcttttgtattttgtatttttttaaaatgtcagcaatactactttacatataaaatacaaagcagtattaaaagtatagagctagtactgccattcagattttaaacatatacctttatgacgaaatagtcatgaagcaaagtgttcagatctgtcaragcaaccaaccatttaaaaatcagatctacgatcctttttgtctttttaaagctattctggtttacatcaaagtgctcctagtgaggaggaatgatgtactgtactgaaaactgagacttcatgaggggtcttcttaaattggctgtgaacaattttaaaagcccacagatcttcactatgtgttattctcagagtcaataccacaggaagccttgtaaaaagatcctttggtactactgatagctaaagcaccttggattgaatccaagatggatatgcattacaaatgaattgtgctttgtagtaaaatgcatttaaagtaaaattcaatgtacttaccataaag

SEQ ID NO: 756911 - DNA, 504 bp, Homo sapiens
aaggtaaaaaataaaaacacatcagtgtatgcagttcaatgtaaataagtctgaaagaggaaaagaagctttgtatagaacctcaagaggtagccaatcaaaaacataatatagctatccttgtctaagccctttatataagtagttaatcttgacaaattgcccatgaaacatagaaaggttaaatatagcmcaaggtcacacagcaagtaaatggcagaaccaagatacaaaccccagaaatctgtctctagagcctgtatctttaaccactctgctctactgcctaataaatagctatgactactaatgggaaaaaaacttccttaagtatatcaagaactactatcaggtattattgccattacctaaaattggctgtcaggaaaatttcttgccccgcgtaaagcagagaaaaagtaatccaagtctcccatccacaattaagccattctgaagtttaagattactttcccttctaaatttagaaacaaatttgttctt

SEQ ID NO: 756912 - DNA, 567 bp, Homo sapiens
ctgtgtcttgaagttgcttagggatactgtcagtgtttgcggagtttggaggataggactgagagttctgctagagtccagggcatgtgcaagggagaggctggaggagaggttggaaaggctgcttatctgagaacaaaaaggrctgggaacactatctagagcccttgcccataattattaagacaaggagaggcctggcatggtggctcatgcctataatcccagcactttgtgaggccaaggtgggtggatcacttgaggtcaggagtttgagaccagcctggccaacatggtgaaaccctgtctctactaaaaatacaaaaattagccaggtgtggtggtgcacgcctgtaatcccaattacttgggaggctgaggcaggagaatcacttgaacttgggaggcagaggttgcagtgagccgagattgcaccactacacttcagcctgggagacggagtgagactttgtctcaaaaaaaaaaaaaaaaaaaaaaaaaaaagacaaggaggagccaccgaaagttgttgagttgagcaggagagtgtttggagtagttctttgg

SEQ ID NO: 756913 - DNA, 597 bp, Homo sapiens
cattcccatgtttattgcagcactatttacaatagccaaaatatggaatcaacctaagtgcccatcaaaggatgaacagataaaaacaatgtgatatatacacagtaaattattcagccataaaaaagaatgaaatcctgtcatttacagcaacgtggatggaactggaggtgattatgttagtggcacaagtgagacacagaaagacaaatatttcacattctcgcctatawgtgggagctaaaaatgttgctctcatggaggtagaaggaagaatggtggttaccaaaggctgtgagggcaagcagggtggaagtaggaagagaggttgcttaatggatacataaatgcagttacgtggaaggaataagttctagtattcgacagtacagtaattatagttaataataatcgattgtatatttgaaaagagctacaagaactgtaatgctcccaacacaaagaaaagataaatgtttgagataatggatatcccaattaccctgattagagcattatacatagcataagggtatcaaactatcatgtggatccccaaaatacgtacgactactatataccaatataaaatacttt

SEQ ID NO: 756914 - DNA, 413 bp, Homo sapiens
catttgcttatctgaaaggaacattgttctccgtcacttatgaagctaactttggccagatataaaattctgggttagaaattctcttccctaagaatgttgaatattggccccmactctcttctggcttgtagggtttccactgggaggtccactgttagtctgatggatttccctttgtaggtgacctggcctttctctctggctgcctttaacattttttctttcatttcaaccttggagaacctgatgattatgtgtcttggggttgatcttctcatggagtatcttactggggttctctgcatttcctgaatttgaatgctggcctgtcttgctaggttgggaagttctactgtatgaaatcctaaagtatgatttgtaacttggttctgtcctctccatctctttca

SEQ ID NO: 756915 - DNA, 593 bp, Homo sapiens
cagtctctgacaaccaccattctactccctgattttatgagttatatttttttagattctacatatgaatgagaccatgcagtatttgtctttctttgcctggcttatctcatttggcgtaatgtcttccaggttcattcatgttcaggattttctttatttttagaccaaacaatattccaytgtgtgtgtgtgtgtgtgtgtgtgtgtgtgtgtataaagtaatataatataaatgtaatatatatgatgtaatatatatataaagatgaaatcttatacattcatctgccaaaggacacttaagacacttagattgtttctatatcttggctattgtgaataacactgcaatgaacatgagagtagagatagctctgtgagatactgttttcatttcctttgactatacctgtagtgggattgctggatcatatggtagttctgcttttaatttttttaggaaccttcatactgttttccgtgatagttacactacatgccttctatattttaaaacctaaacttaagcagagtttcgtgtgttatgcattcattgtcccacaaatataagtcatatctgcttgtgattt

SEQ ID NO: 756916 - DNA, 656 bp, Homo sapiens
tttttaaaatctttaaaaatagtttaaaaatcaagcgacaagctgctaaataaaatatattctatactcctaccttgaaaaataggcctcttaactacctggaattccagtaagggaggagaccacccctcatagtgtcttatgaccaatttctgcctcaaagaaaaagtaggagttaaagaaaagacagaagtgaaatcagtagtcagacagcccggcgctgcattcccaggctggtagttaaagattgactcctgacttaactggttatgttatctatagattccagacattgtatggaaaagcactgtgaaaattcctrtcctgttctgtcccgttctgattactggtgcatgcagctcccccgtcacgtagccactgcttgctcaatcgatcacgaccctgtcacgcggacccccttagagttataagcccttaaaggggacaggcattgctcactcagggagctcggtttttggagacgtgagtccaccgatgctcccagctgaataaagccctttccttccacgactcggtgtctgagggattcttgtctgcggctcgtcctgctacaccaggttcaaatttcagataccctgacttggaattttccatgggaacacagctgcctaggaaagctgccccatctcagaagc

SEQ ID NO: 756917 - DNA, 557 bp, Homo sapiens
cttttgggttggatccaagtctttactattgtgaatagtgccacaataaatatatgtgtgcatgtgtcttgatagcagtatgatttataatcctttggttatatactcagtaatgggatggctgggtcaaatggtatttctagtcctagatccttgaggaatcrccacattctcttccacaatggttggactagtttacagtcccactagcaatgtaaaagtgttcctatttctccacatcctctccagcacctgtttcctgactttttaatgatcaccattctaactggtgtgagatggtatatcattgtggttttgatttgcatttctctgatggccagtgatgatgagcatttttgcatgtgtctgttggctgcataaatgtcttcttttgagaagtgtctgttcataaccttcacccactttttgatgggttgtttgatttttttcttgtaaatttgtttaagttcttcgtagattctggatattagccctttgtcagatgggtagattgtgaaaattttctcgcattctgtaggttgcctgttcactctgat

SEQ ID NO: 756918 - DNA, 676 bp, Homo sapiens
aggtatatttctatagaagaaggtgaacgctaagagcaaagtctctggagacatgtgcatacggatttgatcttcatcttcctacactaggtatgctacatatgcttctttcagatttgggatttaggtgaaattaggacagtcttatttatctacaagattacaataagaattaaatgagacaatgcaaacgccctgcaatttgtaaatcttcaaaaatcaatttattgttatcataattatgattaatactaaaatttgtgatgtgacacattccatatgactgttagcatatatatatacacacacatatatatacacacatatatgtgtatatacacatgtgtgtgtgtgtgtgtgtgtrtatatatatatatatatacttcctatgctgtagatgataatgcagaaaatagtctgatatgtactttgttgaagtttctcttaacagtgaaatcattcattgctggggaggaggaattagcttaactgtatcacattaaaagggagaacaaaaaaataagagagaggaagaaaaagagaaaaatgaagacatataagcaggagactgactgtgggaaagtttaagtaaaatcaaatatgtaagatggaatgggaagtaaaagtagtatataaaaatagtaaaatgataatgacattaacatttgtaaatttt

SEQ ID NO: 756919 - DNA, 649 bp, Homo sapiens
taccaagtgcaaaaaaacaactaataccaattcacctcaaactatttcagtaaattaaagaggagcaattcaccatactcattctatgaggccagcattaccatgatgccaagaccagacaaggtgtaacaacaaagaaaactacaggtcactatccctgatgaacatagacacaaaaattctcaacaaaatagtagcaaacaaaatccaacatcagaccaaaaacagccatcatcatacttgatatttataccaggtatgcaaggctgattcaacatatgtaaattaataaatgtggtatatcacataaacagaatgaaggacaaaacccacatggtcatcttagtagacacagaaaaagcatttgatgaaattcagcatcctttcataataaaaactctcaacaaactagrcataaaaggaaactaataaaggccatatatgacaacccacagctaaccttatacagagtgaggaaaagttgaaagcctttcctttaagaattggagtacaacaagggtgcacacatctactgctcctagtcaacaaagtactggaaattctagccagagcaatcaggcaagaaaaagaaataaaaggaatccaaactggaaaagaggaagtcaaattaccccctctctagagacaa

SEQ ID NO: 756920 - DNA, 541 bp, Homo sapiens
tctctcatgagtcaacgtttaccccattggatattaactatccccactcttccaggttttattccctggcctctgaaggcagctcctggaaaggctggatcagtgcaagagtagcagcagcattcaccacacatgccataaactgcacagtgagtcagcgaggaaaaattggccagtggcagtatttatttgctggctggaagctgaaaatgtcattaatctgataaggtgggctatatcatgggttctgagaaggtcctgcggtgtattgaaccttagtagtgagtaagcatggaatggatggcataaatgaggtgtgcacagtgagaggcatgagactatstgactggactctgagcaatatgggggcaggttgctgcatcagactgagttgaagaaaatataagagtgctaaaatgatataatgtatgccatgatggtgctgacagagcactatgagcttctctgcagtaaacagaaaagtcatcgttctatggcctataagattgtgatcagttcagaccttcctggaatgccaatc

SEQ ID NO: 756921 - DNA, 494 bp, Homo sapiens
agttgatcctaccaggactaagcctgcctatcaatatagcagatttccttccggagcaaggtgaatctaggaatgccatccaagtgcaaaggcctaaaactgggactttcaggaatctgttggtgctttacaactgagctcatacccaagttgcaagacaaagccctctgttttcttctcttgccttttcccaagtggaaggagtctctccctgtactggactttctggacccrggggaagggtgatgcaggcaatcctttggccaccacagctagcatctcactgagttgcatccctagcccactgcctctgagatcagcacagcaccaggactcgcccaaggactgccgtctctatggcctgactgccactcaaatttatttgagggggtcccaggccatttgtgtcagctgatagtgaagctggcctggactcagatttcttcttctgggatggaggatgttcctctggcccaagactggtctaaatactc

SEQ ID NO: 756922 - DNA, 494 bp, Homo sapiens
agttgatcctaccaggactaagcctgcctatcaatatagcagatttccttccggagcaaggtgaatctaggaatgccatccaagtgcaaaggcctaaaactgggactttcaggaatctgttggtgctttacaactgagctcatacccaagttgcaagacaaagccctctgttttcttctcttgccttttcccaagtggaaggagtctctccctgtactggactttctggacccgggggaagggtgatgcaggcaatcctttggccaccacmgctagcatctcactgagttgcatccctagcccactgcctctgagatcagcacagcaccaggactcgcccaaggactgccgtctctatggcctgactgccactcaaatttatttgagggggtcccaggccatttgtgtcagctgatagtgaagctggcctggactcagatttcttcttctgggatggaggatgttcctctggcccaagactggtctaaatactc

SEQ ID NO: 756923 - DNA, 594 bp, Homo sapiens
gtcattcttaattccattttttttttttttttttttcgagacagagtctctgtcacccaggctggagtgcagcggcgccatctgagctcactgcaacttccacctcccgtgttcaagtgattctcctgcctcagcctcccaagtagctgagattacaggcatgttacaggcaccacacctggctaatttttgtatttttaatagagacaagttttcgccatattggccagcctgctctcaaagtcctgaccccaagtggtccacccaccttggccccccaaagtgctgggattacaggcctgagccactgtgcccagcccattcttgattcttcttgttcccttacatccacatttagttaggaagttctgctgttcaactctaacatattgcacacatcctgccagtccctactatctccrttgctataactctaacccaaatgaccattatctctcgtaaactactatgatgacctcccactagtaggcccaactccactgttgtccctctatgtgccgttacccacacagtagtcagaaccatctttctaaagtgaaaatcagggcatttgctctctgggtgaaagttctt

SEQ ID NO: 756924 - DNA, 587 bp, Homo sapiens
catctcaaaatatttagctcaatcacatctgcaaaaggcattcccccccaccccccacactctgttagttaagaggttccagagataaggaggtggatctccttgggaagccatttttcaacctaccatagtgtgacagttaatttaatgctgacacacttccctgggccacagggggcttagagatttggtcaaacgtgattctgggtatttctgtgagggaggttttggatgagattaacatttaagtcggtggactgggtaaagcagattgccctayataatgtgggtggggtttatgcaatcagttgaaggtctgagtagaacaactgaccctcttcctaagagcattttcctgcctgatggccttcaaactggaacatcttcctgccacctaccagccttcagactccaactgggacatcagctccgaagattttgaagttgccagcctccataatcatattagccaattctttaaaataaatctctttctctgtatgtacacatcctattggttcttttctctggagaaccctgactagtataacagtctcaggagaagaccagccttatgaggaatcagt

SEQ ID NO: 756925 - DNA, 635 bp, Homo sapiens
taggagacaattctggcatttatgcatgtcttctgagtgaggggcattgacagctttgttcagcaaggtttgcaaagctgctccatggcagggatcagatttgtttacattctagcataataaagttagtcttctcttctctttccagagatattccagggttgtaaagataacactcaatctgaatcaaaggacaaatttgtttcctgaccaagatgatcaagataatatctgtctccacaggggaggatggacaggtttgccagcagcccctgtataatattagggatcctagcctcagtgttcctatgtgtcatagatccacaatgtgtgcagtattaacctgggcccacctccacatcaccccatatgtcttgaggatcaaagagaatcagtaagaacacaaagctcaagttgcctactgtgttgtaataaactgtctaaatctgtttgggatcatgtctcctcactggccaagactatggcagaagagcragctggactagtaccagaagtagtcactgttgcctaggagctgcttgactgcttgatatatgaaactctagagaaaaccaatctaatctatagtgattcatagtagattgatggttgcttgggactaggtgtggggagga

SEQ ID NO: 756926 - DNA, 610 bp, Homo sapiens
gggacttatgggataccattaagtggaccagtatatgcactggtccattaagtggaccagtatatgcactggttcattaagtggaccagtatatgcactgggttaggaaagtcatagaaggagaatagaaaaagaaagagctatacagctaattcaaataaatgatggtcaaaaaattctcaactcctctgaagaaaatggacattcagatgcaggaagcccaacagatcccaaatagaatgaamccaaagaaatacacaatgagatacattctaatcaaattgtcaaaaattcttgcaaaagaattttgcaagcagcaggggaaaactgacttatcatatacaagggaattcataaaatatacaggaatttccatgggctgtcagcagatttctcagtagaaatcttgcaggacagaaaggagtcggatgatattttcaaagtgctgaaagaaaagcactggcaataagaatgttctatccagccatgctgtctttttaaaacactcacatgatatacaaaaaatcaactcaaaacggattaaagaaacataatatctgaaactatataactagtaaaagtaaacagggggagaactacacaacattgg

SEQ ID NO: 756927 - DNA, 598 bp, Homo sapiens
  misc_feature 528, 588, 589, 590, 591, 592, 593, 594, 595, 596, 597, 598: n = A,T,C or G
tatctgattaaaaaattaatatgcaaattataaaaggaactcaaacaactcaatagtgaaaaaaaaaaactcaatttaaaaatggcaaaggatctgaatagacatccctccaaagaagatacaaattgccaaaaggtatgygaaaaaacgcttgtcactaagcatcagggaaatgcaagtcaaaaccacaaagagatcttctcaccccacctaaaacagctgtgattaaaatgacaagagataacaagtgttagcaagagcagagaaaatgcaatcctaggacactgttggtagaaatgtaaattagtaaagccataatggaaaatagtatgaagtttcctcaaaaaattaaaaatagaacttccatatgatccagcaattctactatcggtaggcatacaaataaaatgaaatcaatatgttgaagagatatcttcactcccatgtttattgcagcattattcacaatagctaagatatggagtcaacctaagtacctatcaatggatgaataaaggaaatgtggtnatatatgcacaatagaatactgtttagcctaaaataaaaaactctgtcatttgtgacacnnnnnnnnnnn

SEQ ID NO: 756928 - DNA, 647 bp, Homo sapiens
aaggcttctggtcaatagtaggctatgagtgttggaagtcaaaagttatacgtgggtttttgactgcctaggggctggcagcattgacttttgagttcaggagtcaactgtatttccctctaatatgtttaagaaagtggagttacctttagactcaaacagttcatacttctgtaaacgctgttttatgagctttttcttgtgttctttaaagtacgatttttttttttttttttttttttttttgagacggagtctcgcccaggctggagtgcagtggcgccatctcggctcactgcaacctccacttctgaggttcaagcgattctcctgcctcagccttctgagtagctgggactacaggcgcgtgccaccacrcccggctaattttttgtacttttagtagagacaaggcttcactgtgttagccaggataggggtctcgatctcctgacctcgtgatctgccctcctcggcctcccaaagtgctgggattacaggcatgagccaccctgcccagcctaaagtatgattttttaagtgggttgataatacataataatgcaccggaaatatctaatcatgtccttgtcagacttcaggtgtttctgattttatactattgtataggatgatttaaagagtat

SEQ ID NO: 756929 - DNA, 532 bp, Homo sapiens
taagggaaatagattgtaacagtaacgtttaactttcattttagatgctgcaactacaaagaaaaacggactttcactggctgactgattgtctggaaaccgttttgggatttctttcctaagcttcttaattagaatctttacattatagagaaaatgattttgagagttgagtgtggtctgtggagtgtcctawtagtaacgacttctgagtaggtttaagtcacctcttttattgaaatgtgaaaaggtgtgacatttataatagaaaactctttgaaagtcgcaccgttcattttagaggaattttaaatgtcaccccaaattttacgattttaattaattttaattaatttccaaattttaaccaataggcataatattcaagatcttatctaaaaattattacatggcaatattttgtccttgttaattaaaaaataacactgaaaacacagtcgtcttcctttaaggtaaaaacctgtccaatagtaacaatctcaatgatggcagaatgaaatcagaatctgat

SEQ ID NO: 756930 - DNA, 568 bp, Homo sapiens
gtcatgttgttttctttggggcttatgtttatatttctgttcaataaatattttgaaaattcagattcatttgccaatcttttctattttctgcaagattagtttactatgtgttatggaagttatgaacgaaataataatttgaatgtkacccaacacagtaactgaatttcaaatgataaggacctatgaatacggcaaaattatatatgttcatgtattcagtttaacccaataactgaacactgacattcatttcaagtgcacactgagtgtttgccacgaatatgtgtggtcttagagagaactcgttagctttaaaattgaaatacaatacaccctctcctatgacggcaacagagtcaaattggaaatcaataacaggaagaaatccataaattctccacatatatgcaaattaaataaccacttctaaataaaatgatcaaatatgaaattacaatggaaattacagctatcctgagttgaatgaaaagcacacatttacaaaatttctagatgcggttgaagctcagtgagaaactcataataggaagaaaatatcgta

SEQ ID NO: 756931 - DNA, 643 bp, Homo sapiens
acagacaaaatgaagtgcaaaactattaaaaacttggaggcgctgggcacagtgactcatgcctgtaatcccagcactttgggagactcagatgggcagatcacaaggtcaggagttcaagaccagcctggccaacatagtgaaaccctgcctctactaaaaacacaaaaattagctgggcgtggtggcgggtgcctgtagtctcaactacttgggaggctgaggcaggagaagcacttgaacctgggaggcggaggttgcagtgagccgagatcatgccactgtactggggaacagagcaagattccgttataaaaacaaaaacaaacaaaacaaaacaaaaactaggcaataccattctggacataggaatgggcaaagatttcatcatgaagataccaagaacaattgcaacaaaagcaaaaaatgacaaatgggaagtaattaaacagaagtgcttctgtacagcaaaagaaactatcagagcaaacagtcaacctgcagaaygggagaaaacctttgcaaacaatgcatctgacaaacgtctaatacccgcatctataaggaacttaaatttacaagaaaaagataacctcattaaaaagtgggcaaagggtataacagacagttttcagaaggtgac

SEQ ID NO: 756932 - DNA, 607 bp, Homo sapiens
actgagactgtgcatctcaggttggctgtctctgtaccccagagactgggttgacagggatcaagaacagggttgggaggcagtgagcctctcaaggacagcaaatgtgggcttcccgactctgacaggattggcaagaggaatgagtccaggaactagaaaccaacagaatgtgacattttccctttcctgcaggctggtaaattgtcacctctcacccattgattgtgaagtccttgctggccttctaaccaacaacaagaagctgacgtatctgaatgtatcctgcaaccagttagacacaggcgtgccccttttgtgtgaagccctgtgcagcccagacacggtcctggtatacctgatgtgagtggatgttgggggtgcctactgtggagggccatggcggcagttcaaacctgggcctattgatgacagtctgctcattgatggaggccacatagcggaggtttaaaagctcacgcttaagaatcagaaaagacttgagttctagttcaggatttaycacgtatatactgtcttcttaagcaaaatatttaacttagaagcagaggaaaatcctgtcttagaggtcttatggctatcaagt

SEQ ID NO: 756933 - DNA, 600 bp, Homo sapiens
gggtgcctactgtggagggccatggcggcagttcaaacctgggcctattgatgacagtctgctcattgatggaggccacatagcggaggtttaaaagctcacgcttaagaatcagaaaagacttgagttctagttcaggatttaccacgtatatactgtcttcttaagcaaaatatttaacttagaagcagaggaaaatcctgtcttagaggtcttatggctatcaagtgagactgtctatacagaacacgtactgygtttcaaagctgttaggttgggttaatgcacctgcaacacacatggtacttcccgtgttgataacggttatttcgagcatgtagaatagacttggtgggtactcaggacagtagcggggaaaaatgtctatgggcctcttgaccccagttaatactataatacatgtgatgttcttgcagtaataggatgagaagaggctattcaagccagttttagggtacgtaaaacacagaaggaagacagatgagtaagtgttaaaggccaattgatttacctattaatggaattctaatacctttaggtgatacttatacaaaaggggagaggacaggagaatatata

SEQ ID NO: 756934 - DNA, 631 bp, Homo sapiens
acataattaaagaaaaaattagtaaaatggaagataggttacaattacctagaaagcagcatgaaaacagaaaaataggtaaatcatagaagagggtataagacttagatgattaagatgttctaacacacttactgggaatcgcggaaagagaaaatattttaagaagactgaaatttttctgtaaccaatgaaagattccaattcagattcaagcatccaaataagcgcttaacaggataaatagtggagaaactgcagaacaccagatataaagatgttggtctgtaaagatttaacaaggggctgggagcttggggcggggggaagtgatatctacaagaaaggagacagacttgggtgaagagtaatagtggaaaccagagggctgtacagtgagatattcagtatggcggggaracaggagggtggattgtcaacctagaattctatagccaccaaaaactatcaagaatgaggataaaaacacattttcaaataaataccaagtttcttaccaccagatccttcctaaaagtaattctaaagactgttccttagacagaagtaaatcattccagatggaagagagatagagcaaagagaggggtagatctttggataaatctaa

SEQ ID NO: 756935 - DNA, 631 bp, Homo sapiens
acataattaaagaaaaaattagtaaaatggaagataggttacaattacctagaaagcagcatgaaaacagaaaaataggtaaatcatagaagagggtataagacttagatgattaagatgttctaacacacttactgggaatcgcggaaagagaaaatattttaagaagactgaaatttttctgtaaccaatgaaagattccaattcagattcaagcatccaaataagcgcttaacaggataaatagtggagaaactgcagaacaccagatataaagatgttggtctgtaaagatttaacaaggggctgggagcttggggcggggggaagtgatatctacaagaaaggagacagacttgggtgaagagtaatagtggaaaccagagggctgtacagtgagatattcagtatggcggggagacrggagggtggattgtcaacctagaattctatagccaccaaaaactatcaagaatgaggataaaaacacattttcaaataaataccaagtttcttaccaccagatccttcctaaaagtaattctaaagactgttccttagacagaagtaaatcattccagatggaagagagatagagcaaagagaggggtagatctttggataaatctaa

SEQ ID NO: 756936 - DNA, 513 bp, Homo sapiens; identical to SEQ ID NO: 737156

SEQ ID NO: 756937 - DNA, 513 bp, Homo sapiens; identical to SEQ ID NO: 737157

SEQ ID NO: 756938 - DNA, 513 bp, Homo sapiens; identical to SEQ ID NO: 737158

SEQ ID NO: 756939 - DNA, 513 bp, Homo sapiens; identical to SEQ ID NO: 737159

SEQ ID NO: 756940 - DNA, 599 bp, Homo sapiens
caggtaggcggagagaggaagggaggaaactactgactgagtaaccatgtatgattgggaataaaatgggatctcaaaatcagattccattttgcacccaaccacaactgagaaaactgaggctcaaaaaagtgaagtcattgacacaaggtgtygactattaattgctgagtcaggatatgaagcccagttagtctgattccaaaacttatattcttcctggtggatcagacagaaggaatgggaaaatgcaatgcactcagggtgctcagtggaagcgttggagtgtggagttcaagtcctgagcgaatgtattcctggataaagaattagtcatcaggggaaggtcatgctggagctacgctgaagggtaaagtttgtttttggactctacctgtttcctctccttggctctaagatgacatgcaccagggatctcacctctaatcccgccattgcatgaagagaatgccttgcacatgactagatgctcaacaagtatttgtaaatgtgcatcttaaaaattggtcatgtcagttacgatgtgaaattcaccagtgaaaatgctagctggggctttgaacctggagctactaatt

SEQ ID NO: 756941 - DNA, 575 bp, Homo sapiens
tactgagttgaaaactggtggcatcaactggcaccctgtagataaactgacacacgactgtaaacccagaaattggaagtgaacacttctctcactgttatacttgaatgggcatgttagaaggcatactgcaaattgttggamggagagtcaacaatgagggacaaactagaaagtggaagaaataggtcagatgaaagttcaataacaaagcattaagttgagatggtatttggggtagtacctagtaagacgacttaagaaacatggatgaagctggaaaccatcattctcagtaaactatcacaaggacagaaaaccaaacaccgcatgttctcactcataggtgggagttgaacaatgagaacacatggacacagggaggggaacatcatacaccggggcctgtcagcgggtgtggggctgggggagggatggcattaggagaaacacctaatgtaaatgactagttgacgggtgcagaaaaccaacatggcatatgtatacctatgtaacaaacctgcacgttgtgcacatgtaccctacaacttaaagtataattaaaaaaaagaaaa

SEQ ID NO: 756942 - DNA, 386 bp, Homo sapiens
ttatgagtttttatattttatataaaaatgatattttgaaaatttttatgaggctaaatagggttaatttttaaatatttattttttactgccctttactattcttttttagttttggtgataaaatgtcctttcatttaatatgttatggtgatatcagtttacagttatctttttatgtctttacttggcaaagttaggttaacaactytatgacggtttcctaatatattgtttaaatttatttgttcacaatatccaaacctttgggaatccttaatctagagcacattttaccaaagtgccacctaaattgcagttggaattgcttgcaagaaagaagggtgggagaagtttactgtcgaatatactcaggatgctgagat

SEQ ID NO: 756943 - DNA, 582 bp, Homo sapiens
aaaacataggaggaatctgtctgaacttgtagcccacgatgggttgtcaggtatagcactaaaatcactagtgcaacatgaccttacataccaggatgagtttgtagagacagcactaaaatttagaattaccagtattacaaaatgaacctttawacatatgtatttcattcttaccagaacagtggaaacacttgcacaaagctaacgcaattgtcttcatttcacttgatgcacacgctctctacctttggctccctgatgagtaagcaagggctgggaacaaaagcaacaatgggttgccctatctgcctttcctgtggaagagaagcaggagccaactccaagagttcccaatggccaaagataaaaccatttcagaaaaaaaaaaattgaattaagtaattttatattttgagattatatcccaaagtaccaaaaacaaaaaacaaaaaaacaaaaaaaaaaacccactatgggttcatgctgatgtaaataaataattgaataaataaatagaaacatcttccctgccaagaattccaaataatttacgtagatactttagcctgaatgaggtgg

SEQ ID NO: 756944 - DNA, 618 bp, Homo sapiens
taaaacaattcccaagaagaataaataaaattaatttgcacagttaccaatgtataatagtaaacatggccagttctcaaaaaatcataaaacattaacaaaaagaaaatatgacccactcacaaaagaaatgaaaaaaaaaaaaactctccctgaaaaagcacggacatttgaattagtagaaaaagacttaaacctactgtttaaaatacacccaaatagctaaaggaaaccatagacaaaaaggtctaggaaaccaggagaatggcatctgaacaagcagaaaatgtcactacagatatagawgttataaaaaaatacaaatactgaagataaaaagtacaataactgatgctataaactcatgagaaggtttcaaaagttggttaaagcaggtagaagaaagaatcaacaaacctaaaattaagaaagttgaaaatatccagtatgaagaaaaatattcagtatgaagggaaaaagaagggaaaaaaataaacagagcttaagaaacacatggggcaccatgaaacataacaatatatgcataataaaaaatccaaaagggaaggagaaagagaaagcagcagaaataatgtttgaataaatgactgcaaattt

SEQ ID NO: 756945 - DNA, 618 bp, Homo sapiens
taaaacaattcccaagaagaataaataaaattaatttgcacagttaccaatgtataatagtaaacatggccagttctcaaaaaatcataaaacattaacaaaaagaaaatatgacccactcacaaaagaaatgaaaaaaaaaaaaactctccctgaaaaagcacggacatttgaattagtagaaaaagacttaaacctactgtttaaaatacacccaaatagctaaaggaaaccatagacaaaaaggtctaggaaaccaggagaatggcatctgaacaagcagaaaatgtcactacagatatagaagttataaaaaaatacaaatactgaagataaaaagtacaataactgatgctataaactcatgagaaggtttcaaaagttggttaaagcaggtagaagaaagaatcaacaaacytaaaattaagaaagttgaaaatatccagtatgaagaaaaatattcagtatgaagggaaaaagaagggaaaaaaataaacagagcttaagaaacacatggggcaccatgaaacataacaatatatgcataataaaaaatccaaaagggaaggagaaagagaaagcagcagaaataatgtttgaataaatgactgcaaattt

SEQ ID NO: 756946 - DNA, 640 bp, Homo sapiens
agaaataatgtttgaataaatgactgcaaatttccaaaatttactaatcaaaataaatcaacacattcgagaaactcagatacgtgtaggaaggataaactcaaagagatccatactgggacatattttaataaaattttgaaagacaaaaacaaagattgaattttaaagatggcaagacagaagtaacttattatacacaacagatccttagaaagagcacctgcaaatttctcattaaaaattcctggaggccagaagcaagtggcagtatatttttaaagcagtgacgcaaaaaagcaaaaacaaaaacaaaaactctatcaaactcactattctacattcagcaaactatgcttcagaaatcagacattgataaactagaaataaatatattcacaaatttttaaaagcaaaatgctacaatgaatgccartgcggagtatccacaatgaaataaaaagacttcggaaagtaaagcaatgccgttagaaaaattaaaaactacaatcaaagtcattatactggtaaatataaaagtcactattcttatactttcggtttctaactcatttttcttctatatgatttaaaagacaaatacataaaacaatcaccacacatctgggttaatggtaac

SEQ ID NO: 756947 - DNA, 640 bp, Homo sapiens
gcgcaataatataaacaaagtagattatttatggttgttgttctccatttctattattttcttaatttgatagctcagaaaatacatagttacgtgagctccacaagggcatatcgcacagagatttccattttgcgaactccattccaggatatttctagttttgagacctacgtgtatttcagaagcaacatggggcgcgtctcaaatgtccactttttaaagaagcctcttgaaaccacagctcatcctttcagaatctgcattctcagacaaattccagccttgcttttggcatcttgaagaaaatccccatttatctcagataacagagaaacaatttgctgtgcttatttagtagctggtaccttgagttacacaggatttgcgctgcgtttgagcctagctgctcggttggaactgagtgtaatgttcacgacgtggctaaaggagttttgagacctaccctccgacatcttgtagaccctggytgtgggactgggttcacattccagggggggttactttgacactctccagtagatacacggcattcgtcaagaagttattaggatttacagtggaattttggtatcacgaactagttgtaagaattttctcataatggatttttctggtc

SEQ ID NO: 756948 - DNA, 541 bp, Homo sapiens
gagggacaggaccacttccctgtctgacaggtgagacgtctagggcctcccatcagcttctgcaaaagatagaaaccctgaatcattatttcaaggtacttcatcatcctccctcctctgttgctctgctgctgtcctatttcatcagttctaattttattcattctccttctggaactttcacttcagcatgggctgggttatgactgcatgtcctttcctatgttctggcttgtattaaaaattgcaataacacaacaattgacttgaagatataattgacctgaagatgcaaatgacctgaaaagctgaaatagtattgagtttcaaaaacattattagaaatatgaagagctgaaaaaatagctttttatgaatttcttctggggaytgtacatatgtacttaaaaaaaatacatggatgagatgattaggatggaaaatgagacccctatatgtcatactggaataccagcagaaaggtcatccaactgttttctaaatggagaaactgagattgatgtcagggctttctaccggc

SEQ ID NO: 756949 - DNA, 625 bp, Homo sapiens
catatatatatataccaaatacatctaatatatatatatacaaaatatatatatgtatatatatacaaaatatatatgtatatatatacaaaatatatatttatatacaaaatatatatatattttttctatttttttggtttattgttatatatagagagatgtagaatgtatatgtttgtaggtaaatatgtacatttggtatatttggtgtatatatttagacataagatcatacctatatatcaaatatatatattttatatatatatttatttggcatttatatattcrtatatttatatatatatttggtatatataagtgtgatcctacacctaatgatatgaagtaaaatgcatgtatatgatttgggttgaaataaaattttaatattaggtgtttatatattttagtggttctctttttaaaaatgctcatttgcttaagtaatttggtcctcattacatgatataagggacgtatttaggggagtttagtttggagactataaattcctgagggtaagaagcatttcagtcttgttaccaattgaacgtatattgcacagcagagtgctgccatgtagcaggttctcagcgactatttactaggtgaaataaat

SEQ ID NO: 756950 - DNA, 592 bp, Homo sapiens
ctgccagacgtccatgtggagatagagatggacagctgcattttagaggagggagactgtggtgatataaatctagaaggcgttagtatacagacggaaagagataaattcactgatgacctgaatatagacaggaaacacttggatrttcagccctaaattatttccatatctgaaaccaggacaaggaggaagactaaacaaagaacacaaggacaggctaatgagacgggagaaaaatcagaggtctcaggaaacaaataaaaatgctgtttaaataaagagggcattatcacagaaaattatgctgacgaggaaagaaaataagaataaaaacccgatcattatattcggaaatgcagtcatcgatgatccacacaaaggtgttttgttggtgtggaaattctgaagacagtaactgattgcagtaggttcaagagagaattggaagaaatgaaaaaaggggaaaaataaagtatccacaacttcttcaaagagatttgcggcagaggggagcagagaaatgatcaatagctgaaaggaaaagtgagtcacacaaaagttttctttaaggtgaatgaaatacacataa

SEQ ID NO: 756951 - DNA, 406 bp, Homo sapiens
atcatacatacattgctggttggaatgcaaaatggcacagccaccccgggaaacagttggcagtttctttataaaacacaacctgcaactatcatacaacctaccaattgtactactaggcatttatcctagaaatgtgacaacattcacacaaaaacctgcacatgaaattttatagcagcgttatytggaataagcaaaaactgaaacagcccagatgtcctttaatgagtgaatggctaaataaattgtgttacatccataacatctaataccactcagcaataaaacaacgacaataacaacaaataaaaacagactgctgactgatacatgccatatactggatacatctttagagaactaggctgagtatacaaagccaatcctcaaacgttgtatgcta

SEQ ID NO: 756952 - DNA, 552 bp, Homo sapiens
catacaatggtaaacaatcattgtaagctttcatagacgattaagaagaagtgggaaatacatggaagcaggggtaaacaaataaatgaacaaaataattttagataagtacctcaagacagcagatatcactgtggaagctactttatgttggttggccaagcaaaatttacctctctaaggaggtagatttgatatatgaaagaccatgtcatatgaagactgagggacagctttcactgcataccacatcaaaaactatacagtgggttttatcaaaatctcacataacccataaatatacrcctatgtaccccccaaaattaaacattaaaaacattaaagaaaataataaataaataaaattgtacatcaggaccatgactagtgtgtccgaagaacagaaaggaggcaaacatggagcacggatccctaacaccacagaccgtgatccttgcaattcagtttttctgaatatgagagataatttgcttatgcaatggcttttcagtttttctgttccctacaaccttaccaaattctaacaaatat

SEQ ID NO: 756953 - DNA, 601 bp, Homo sapiens
acagaacttaactctgatgctgtgaacttgatctcccaagcaacacaggaacgactacgaggccttctagaaaaactgactgcaattgctcagcatcgaatgactacttacaaggtaaaggaaatcattaaagaagtataaactctcgagtgttataggtagtcttttgggcgtggattgatattctaaacacgtttttaaaggaatggttgaggcttatatttcatattagtggaaaatcaaagtctcattcttatttagataagcttacatgacaaataaaattaaaatggagtttaaaatkatattaaaagcttctgtgtcactgtagattgaaatatgtatctgttctgcatgaggcttctcttaagcttttgatggggaaggaaagatatgttagaatggaatattggctacttgtgttctcttcagtgttctgcactctcctcgcattcctgttcctttttttttttttgcctttcagttttccagagattgatttattttaaaataaattttattgtatatattaatatttaaggtatacaacgtgttaaagatacacatgtatagtaaaattattactatttagttgaataag

SEQ ID NO: 756954 - DNA, 578 bp, Homo sapiens
agtgcaatttgtgtcatcagttgattcttcccttcacaaaagacttctctgtagcatgcagtgctgtctgatagcatttcacacacagcagaacttctttcaaaattggagtcaattctctcataccctgccattgktttgttaactagttgttgtcatattctaaattctttgttaccatcctaacaacatttatagcatttgaccaggggtagactccatctcaagaaaccagtttctttgctcatctgtaagaagcaactcctcatctctttcagttttgtcctgagattgcagcaattcggtcacatcttcaggctccactttcaactgtggttctcttgctatttctagcatatctgcagtgacttcttccactgaagttctgaacccctcatagtcatccatgaggatggggatccacttcttatgaactcctgttagtgttgatattttgatctcctgcctgactcataaatatacttaatggcatctagaatggtgaatcttttccagaaggttttcagttgactttgcccccggattcatcagaggaatcactgtctatggcagccgta

SEQ ID NO: 756955 - DNA, 576 bp, Homo sapiens
tgtcctgctgctggtgatgccaaccttgatcactgggtcaaggtgttggcctccagatctctacattataaaggtattttccccctactttgtaataagtatgatctgtgaaatgatactcgaagtgtcaagatgatactctgagacgaccgtgtgcatgtagtgcccaacatgtttcacccaatggttttagcatccagtgatgatttttgcccaaattaattgttccactggggttgcaaaackgtgactttctaattatgtcatttcttctctgtgtatcagcaggcattcttttgtaaagaagagctgtcttcctgtcccccactctcaccctttattaacatttatacgaacttgtttttgtaatttttaactgaattgtgattacccattaccatcactattttttagaatacttaaattgtcccaaatttggccagggagcatactttcttgtgtccttttaatgtgacctccattgagcacttccttgttttctggaccaaaaaaaatccccaattactttttactttccttgatccagatcttgaatcaaacatttctccagcgggc

SEQ ID NO: 756956 - DNA, 619 bp, Homo sapiens
aattcttttttttaattagcaaaatatccactgctacaactagacactaaaccaaactctgaagttaaatgggcagggaaacaaaataaggatgcttcatttggtttttattctttcaactgtcagcagtataaatgactgatacaaataaaaatcaaataataaaatatagggggataatagaaatcgcttacaacactgaaccccacaaggaaaaatgaagtgaaagacaaggaacatccccaaaatgaaaatttcctctaccacttaagcttcaatttgattacaagcgtccttgataacagaatctgaggggttgagtatgaagctggtgacaagactggcatgtcttcagcacagcaaggccaaatctatgtaatatactcattaaccccaccctgagaacrcccagttggaccagataaataaataccacatagtatgatgctactaaaggaatttggtcttgactggtagtcccttctaagtttgaatcttttcctgatttctatggtatcagttaccagaatcaaatgggtgtctctcttgactaagtttcagcgtcattaaataacactggcaataagcaatgattctgataggtaggcattttaaatca

SEQ ID NO: 756957 - DNA, 623 bp, Homo sapiens
ttaaggggcctcagaatctgaggcagttctgacatggttttatatagaagggttaagggctgccactcacattcagcagatggcctgtcagaatattgtggaggagacaggaaaactcacagggccttttctctatgacctgactcygtggccaagatacaactaaagaagaacatggcccagtgttgtcttcagaatctccacaaacaccagttttgtaagatggaagtgatgagaacagaaaggcttggcggtcaaataaatttaggattactaaattaaacaaaacctaacagtaacccttaatgtaggacttctcaaagcctttaacacactaagagggggatccaggaggtagtgcttataagttcactacagagcactggcaggactatagtgttctttgaagcaggaatttaaaccactattagaacttaattacacatggacgagtatgtctttaaacaaactgacagcatcagaaatgatgtatcagaaatgtattcgaactgatggatggatctagaaaaaggggagtccatgcaagataatcagtgcagattccttactcttccaaaagaatatactcagcttctatattcccaactcatgcatttctaaag

SEQ ID NO: 756958 - DNA, 623 bp, Homo sapiens
ttaaggggcctcagaatctgaggcagttctgacatggttttatatagaagggttaagggctgccactcacattcagcagatggcctgtcagaatattgtggaggagacaggaaaactcacagggccttttctctatgacctgactctgtggccaagatacaactaaagaagaacatggcccagtgttgtcttcagaatctccacaaacaccagttttgtaagatggaagtgatgagaacagaaaggcttggcggtcaaataaatttaggattactaaattaaacaaaacctaacagtaacccttaatgtaggacttctcaaagcctttaacacactaagagggggatccaggaggtagtgcttataagttcactacagagcactggcaggactatagtgttctttgaagcaggaatttaaaccactattagaacttaattacacatggacgagtatgtcttyaaacaaactgacagcatcagaaatgatgtatcagaaatgtattcgaactgatggatggatctagaaaaaggggagtccatgcaagataatcagtgcagattccttactcttccaaaagaatatactcagcttctatattcccaactcatgcatttctaaag

SEQ ID NO: 756959 - DNA, 628 bp, Homo sapiens
acaaacgattttatggaaagacactttaaagttttattttccctgataataaattagatcctgagtggctggtcataaaatccccagctgagaaacactgtcttagatacaatcctttcatataaaagcaaaggcaaagaattagagcattyggggggctggaatggactttaaataaaagcaaggccaactcccttattttccaaataaagaaaatgtttactcagagaagctaaatggacttgtctgatggatagtaaaagagttagaacaagatcagaatgagtgcgggtaaagttgaaggaaatctgtaaagtatcaaagaacaacaaaaaaaaaaaaaggtgcttatggaggtgtcaccattaattttgaaactcaacacaaataaacccaaagtgtgtatgctggagagggggacaaactaggagcacagaatcccacactgatttccaaggttatcatctttcagaaggcattgttgccagagtttctttattgagggcaacagatatttagaatgaggggatttacatatatcttcatctctttgagtgtgccagttgtaactctaatagctcatgtctcaggaagaaaagtattttatattattaactggtatacccat

SEQ ID NO: 756960 - DNA, 628 bp, Homo sapiens
acaaacgattttatggaaagacactttaaagttttattttccctgataataaattagatcctgagtggctggtcataaaatccccagctgagaaacactgtcttagatacaatcctttcatataaaagcaaaggcaaagaattagagcattcggggggctggaatggactttaaataaaagcaaggccaactcccttattttccaaataaagaaaatgtttactcagagaagctaaatggacttgtctgatggatagtaaaagagttagaacaagatcagaatgagtgcgggtaaagttgaaggaaatctgtaaagtatcaaagaacaamaaaaaaaaaaaaaggtgcttatggaggtgtcaccattaattttgaaactcaacacaaataaacccaaagtgtgtatgctggagagggggacaaactaggagcacagaatcccacactgatttccaaggttatcatctttcagaaggcattgttgccagagtttctttattgagggcaacagatatttagaatgaggggatttacatatatcttcatctctttgagtgtgccagttgtaactctaatagctcatgtctcaggaagaaaagtattttatattattaactggtatacccat

SEQ ID NO: 756961 - DNA, 635 bp, Homo sapiens
tggcagcttggcctataccctaacaatgacagcacatgttctattttaaataaaatttatatttttaaaattcaagatcaagaaaacacatatatttaaagtaagataatcaatgtataaatcccattacttattcattcactgctgatatttcaatagcatttaaaactttcattttagaaaggtgcagtaatttaccagttgatatttctaacttttaatctataaatcccaaatatttcttaacattcttgtgtaaaataaaatgacccattgttatgtccaaaggaaaaagccagttcttttcatcttgtttcagagatttyttttatattcacttttcttcattttcctagacaaccctctcacaagactatatttcattttgacagctatgatactgtcacttgtttacttctcatcagataatggactttggtatctgattagctttactttattcttgaaagaaaaatgtcatcctgaggctaacatatcttactgatagctgtcagtacagtaacctttaacaccttccccaaaatactctaacaactttcacaaagcatactgcaaacaaaactagctgtattcaaaaactgacatttataatttgaaaaaggtttctaataatt

SEQ ID NO: 756962 - DNA, 667 bp, Homo sapiens
  misc_feature 637, 661, 662, 663, 664, 665, 666, 667: n = A,T,C or G
gttataaaaaagatgaaagataacaagtgctgtcaaggattggagtaaaggtgacccttgtacactgttggtgggaatgtacatttgtacggtcattatggaaaacagtaaggaagtccctcaagaaattaaaaatagagctatagtatgatccagcaaatccactactgggtatatatcaaaagaaatgaaatcagcatgttgaagagatacctgcatttctaggtttattgcaacattrtttataatcacaaagataaggaatctacctaagtgtccatcaatggatgaatgaataaagaaaatgtgatatataaatataatggaatactcttcaatcttaaaaagaaggaaatcttgtcatttttggcaacatggatgatcctggggattaagtgaaataaaccaggcacagaaaaacaattactgaatttcttcacttacgtgtgaaatttcaaaacgttaaactcatagaatggtggttaccaggggctggtgtggaggtgtaggggcttggaagattttgatctgaggacaattttggttagataggaagaaaaagttcaagagatccactgtaaaacatggtgactatagttaataacaacatattgcatttcgaaaattgaaatttttnctatttggtgaactacaagcagcnnnnnnn

SEQ ID NO: 756963 - DNA, 667 bp, Homo sapiens
  misc_feature 637, 661, 662, 663, 664, 665, 666, 667: n = A,T,C or G
gttataaaaaagatgaaagataacaagtgctgtcaaggattggagtaaaggtgacccttgtacactgttggtgggaatgtacatttgtacggtcattatggaaaacagtaaggaagtccctcaagaaattaaaaatagagctatagtatgatccagcaaatccactactgggtatatatcaaaagaaatgaaatcagcatgttgaagagatacctgcatttctaggtttattgcaacattatttataatcacaaagataaggaatctacctaagtgtccatcaatggatgaatgaataaagaaaatgtgatatataaatataatggaatactcttcaatcttaaaaagaaggaaatcttgtcatttttggcaacatggatgatcctggggattaagtgaaataaaccaggcacagaaaaacaattactgaatttcttcacttaygtgtgaaatttcaaaacgttaaactcatagaatggtggttaccaggggctggtgtggaggtgtaggggcttggaagattttgatctgaggacaattttggttagataggaagaaaaagttcaagagatccactgtaaaacatggtgactatagttaataacaacatattgcatttcgaaaattgaaatttttnctatttggtgaactacaagcagcnnnnnnn

SEQ ID NO: 756964 - DNA, 579 bp, Homo sapiens
gatggtgtactttgcccccagaagttaaataaaagcatagcattggagaggttgaggagggacatgcattagccagattcgcgaagcccactaaggcccctttgtacagtgtcccaccatatgaagacttgattatttttggcttctacttttgcccactctctgcagcccattgcttatataataaccatagagagcttttgtaaaactagtggctccgctacttaaaactctccagtcattttacagtgcrcatatgctacacacatacataaaatcccatgaggcctcacaaatcctccctgcctgtttctcagagcagagcaatggagcacacaactgcaggggcaccatacacaccaaggcagcagacctgccagtgcaacatgatggtaccatctctgacttcatctcttctatttgctttctgcctcccaaatgccaatctcatttttgcttaaactcttttgctcgcatttcccttcacctggaatgttcttctctaggccacagggttgaccccttcttatcattcagatcttactgcaaatgcatgcctttgcaggcaggccttccctg

SEQ ID NO: 756965 - DNA, 556 bp, Homo sapiens
caactatcaaagattttaaaaagtatgatagatggaacttaaacattgaaaagtagagtttaaaatatcagtagataaaaggtatagttatttatgtttcacagagagattatattcaccttcctgagactttttcagaaattttaattaaaatcaaaataaattttaaattttcagtctgtacttgccaatraacaaattgactttcaatcagtatttgtcagttaacaatttgaaaattcaaacaaaatattttcgtgcctttgaccatctagaatagataacaattgctattgatgacactgtgcttttctgtggttaaaaaaatagcatgaatgagagctaatattacaagaccaaaattagttctttaaaatttcagattggaagtttaatgaagatttaagctttggtaaaagctaaaataatatttcaatttttttgcttattcatgttgattgatgacagatagattatttttacttttccgctaaatgtcttgattctcatgatgttgtattttggtttttagccctaaagcaaagaaacaagcaca

SEQ ID NO: 756966 - DNA, 578 bp, Homo sapiens
ttttagaacagttttaggttcacagcaaaattgaacagaaagtacagaatatcgatgctcttgtttctgcgtttccagtgtgggcccagaactggctcatacaagtgcacaagagccagtagttaaatgttcagaagctttgtgaaccagttttaaatacagctattgctaaaattaaattatataaattttaaaataagtcaactatattaaatgaaaggtarttctcaaaattcatcacatcctaattatttacttcatattactatgacctatgcagttgagactctatgtctgtcagatcttcgtggtgcaaatgctttataatgatgtgctactgctttccctgtctctgaattcggcaacatcatattggtagcttaaaaatggccttggtggtagtgggagtatttatagaatgaaaataggcaaacactacgaatcatggcttcatttactgcgtattgatttctggatctgtaacctgtacattgtgagtggcaaaaaaaaaattttctccatgttcaaaaactaatatctgacccagcaaagaagtcacttgcattactgatgaactc

SEQ ID NO: 756967 - DNA, 578 bp, Homo sapiens
ttttagaacagttttaggttcacagcaaaattgaacagaaagtacagaatatcgatgctcttgtttctgcgtttccagtgtgggcccagaactggctcatacaagtgcacaagagccagtagttaaatgttcagaagctttgtgaaccagttttaaatacagctattgctaaaattaaattatataaattttaaaataagtcaactatattaaatgaaaggtagttctcaaaattcatcacatcctaattatttacttcatattactatgacctatgcagttgagactctatgtctgtcagatcttcgtggtgcaaatgctttataatgatgtgctactgctttccctgtctctgaattcrgcaacatcatattggtagcttaaaaatggccttggtggtagtgggagtatttatagaatgaaaataggcaaacactacgaatcatggcttcatttactgcgtattgatttctggatctgtaacctgtacattgtgagtggcaaaaaaaaaattttctccatgttcaaaaactaatatctgacccagcaaagaagtcacttgcattactgatgaactc

SEQ ID NO: 756968 - DNA, 646 bp, Homo sapiens
ctcaggtggaacagtgtgaacctgtaaatgatgctgtcagaagagcagtggacgcaatgaataagcatggctgccaggtaaaggaactgacacttcacttggcaattctcagtaaacttatgggaaaaaagactgtaactaacatgaactcacaagagaagaccattcacttacttaaggaaaactttcaggtttgtgagaaagatgatgaacttgcttttaaatggattgmatttgagacaccttgtgaaaaccgaggaggaaggataattggtttggagttcagcagaagatacagagtaaacatgtttttgaggaagtcatttgtacataaactgaagtcatgagtgttgttaaaaattattcagtggaaatgtttagacttggagtaaaggttttcaaccaaaccttgtggaatgtcagcatgttagggcatctacattaaaagaagctagagattgcaaatgtagaagcaaagctaatgatgtacaaccaaggatgttcaagtcttaatcctcagaagctgtgaatatgctaccttttatagcaaatggaatatggcagatgtgattaagttaaagattttgagaaggggagataatcctgagttatctaggtgggtcctcctaagagggaggccatagaa

SEQ ID NO: 756969 - DNA, 631 bp, Homo sapiens
ggacaactagatgataggaactgtgctttatactttattgaactttgtttattcatggccaaacaatatgcttgctccataatagataaaagctcaataaataaatatagaatgatattatgaaaatatcagtaatttcctatttacttatttttgttaagctttggtactattacttctatgtcaaattatgaagacaacattattacagtgcagaaaaacgccaggacctcttggctaagacctcaagaggaacattgtaagattttagtagtgatttttatattcgccaaaatataatgcaagcgttgtagacttttaaccacttgcattttttattcctttgcacacaaatgaagctactggggataaaggaaggagaaataagtcaactaaaatttgagcacctgctaataggtacgtaagagggaaaaaaaygtgacttgagacaccttgcttcactcatttctacaattaatgagccattttccttaggaagaaaaatgctgtcttatccctatatctgtgtctttaggcacttgtggtaagtaatgtcacaaatttaagtcatcttcaaaattctagacttctttgatatttgaagcactgaagtaaacacaaaatccatttg

SEQ ID NO: 756970 - DNA, 633 bp, Homo sapiens
attaaccaacctctcccaatcttctcctcccccctattctttctagccttaaataaccacaattctactctctacttctgtgagctaaaagtttgtatctcctacatatgagtgagaacatgtggtatttatctttccatgcctgatttactctacgtaacattatgtacttctgactcatccatgttggtgcaaataataggatttcattcttttcattcttttttttatgactgaatggtattcctctgtgtgtgtgtgtgtgtgtgtgtgtgtgtctgtgtgtgcttagctatttatctgttaatggacacaggttaattccatatcttggctattgtgaataatgctgcaataaacatgggkgtgcagacgttacttcaatatactgatttcctttccattggagaaagacccagattgctgagtcatatggtagttatatttttagttttttaagggacctccatactgtttccataatggctatactaatttacattcccaccaaaattgtataaacattagcctttccctgcatcctcactgtcatttgttattttttgtctttttaaataatagctattctaactagggtgagatgatattcattgtggttttgattttcatctt

SEQ ID NO: 756971 - DNA, 594 bp, Homo sapiens
tgcaggcatcctggcctctgccatggggccataccaccttcctctctaggtggttgagacctcttggcctcctccctttttctgcccacagagagaggacagaggtgctgtcatggcctgtcactccagcttttgaagagcacagagaatcaaagggtttaggcagggccagcgttgtgggtgtgtgacccatgagtcacacagggactcatattcagaagggcctcatgcttggtttaatgctctgctgttgctgtcttaaaattaatcatttttcaacaaggggccctatattttaacttcgcactagaccccacaaattccaccaccggtcctcggtctgggtcaggatggggtagtcctgacaggggctggcttgggggacttgcttcagctggtagcagacctcaggcccattgccacrtttgaaatcaagtctagaaatgaatttaacctcagaccagactgaatatttgtgttacaaagtcccctggcagaagtggcagagaaggcatttgcctcccagggtgatttggggcttggggggtggttgggagcctgcccttcctgtcttcctggatgctgagatgttcc

SEQ ID NO: 756972 - DNA, 594 bp, Homo sapiens
aaaagaggaacctatcaaaaataattattacaacaattttttaagacatagacaatataataagatataaatagaaacagaaaaagttaaaaagcaggaggatgaagttaatgcatggagtccttattaattagtttttcctgcttgtttgtttgtttttgcaaagttttcatcagtttaaaataatgggttataagatatttgtgcaagcctcatggaaacctcaaatttaaaaacctacaacagatatacacacamaaaaaaatacaaaattaaaacataccaccagagaaaatcactttcacaaaaaggaagacagaaaggaaagaaaaaagagaagaccacaaaacaaccaaaaaacacataacaaaatggcagtaataggcccttacttatcaacaataatattgaatgtaaatggactaaactctccaatcaaaagacatagagtggctgaatggatttttaaaaaataatgatctactgcctacaagaagctacacttcacctataaagacacaaataaactgataatatggaaatggaaaagatattccatgcaaatggaaactgcaaaatagcaagagtagctat

SEQ ID NO: 756973 - DNA, 623 bp, Homo sapiens
gaaggtgaaacaattggggaaatcgtgaattttttaaatggaggctaaaggagtacagagatcactggagatgtttaaggtgggacagaagctaggctgccatgtgactatgaacttggttagggcaggttcatgccagggtgtctcatagatgtgttgccagctcctgtcacagtgtctggccgataacagctgcttaaatatttgtgacatggatcagttgatgagtggatgataagaaagtgttggaaattaagcatagatkgaacattttcaataaatttgccaatgaagaaatggggaaaaggttgttagtgggaggaatgttcatttttcttttcagacgtgtgtgtgtgtgtgtatccttagataacctgtagagaggagagatgaatgatgctggagcagaaagggtaggaagaaatatgaattcctctggtatgctgctaattgtttaataactggctctccaaagaacgggactcctgatttgtagtgtttgctaatgtaaatactcccactgtggctgattgcaagctacgagtgtgacttcactgaccatggagttgtgagagctgtcatagtccgccatgatgccatgtttctaccagacggatgcaata

SEQ ID NO: 756974 - DNA, 646 bp, Homo sapiens
ccaattttcctctttttacatgaccatactccattggcctgtgtagttagaaactgtgtgagagttagaggttgatcctaaaatgagataccataatgagagactcttgtgactacacagactttggaggaaattttgctagtgttcattgtcatttttctcttttccttttccattgttaatttttgsctacttaagtctttggaacttagctcaaatgcaatgatggaaaatgtcaatatttaaaaaagattaagttttgtgttttatgtattttgtcttcaataatcataatgtagtaaagttgcacattggcaaactgatttttaaaaggtatttaataaacatttattaaaaacttactctatatacaaatgtcttagggatcatttgcttgcgagagcaaaacttttaaaagtttgtttaaacaatttgcagtatttcttagaaaaatacactagactctaacaacacttgaggacatgtgttgaacacggtttctggacacaggaactggcaaggtcaaaacatttatatttttgcctctctggggcttcatagtatctctgtcgcttttaaaaaaattaatattgttttcctttttccttctttgtaaagactgacttgggccgggcatagtggctca

SEQ ID NO: 756975 - DNA, 549 bp, Homo sapiens
gtcatacagttgatttccccagagagaatggactggacgatctatgtggccaggaagaaaatgtacccacaggaatcctcaggtgtcatcttgtcttaatctcctcaacctacagtctgtaatagacccgaggagactctacaaatccgaagtaacccagagagaactacttttcccaagccccaaattatgcaaggctgactcagagatttgtcttttttgttcgtacattgttttcacctacggcaacacctgctacacggttgatgcttagctggaggtaggtggatgtggccctcccaacctcctacttggtcckgaagctgcatctgcaccaacagtgactcttagcaatacccaatgtacattgtgaggctttgaactcaagttaaaaatgcagtcttccttccgtgcctgtcaacattgatgctagagtattttatgaaatggccctgcttcagtgagtatactttcacaagaatttattaaacacctattacataatgaggtaatagttttactgtatataatcctggattccaataaata

SEQ ID NO: 756976 - DNA, 626 bp, Homo sapiens
gtatgcaaaatctttgactctatttcagaaaatcagtctgggaccacaatactgagcctttctttgtctttttctttttgctttgatcatacagtgctatagtacagactcaataaatcacacattgaatcttaccaaatacagagaagctgagacattgtgtgttatggtttttatgctgcattttgacattttgggctatttatttaataattgcatttgaagttgctctcagcctcatcaggacagagcagcagagttatacccctgctgtgctcagcagtgcatcctggaagattgtggagaaggttgttagctgtcctgttttcctgtgtacataattcattatctcttaactacatctagtgctacttaaaagtcgtgtagatatttggaagggataatcttttatgtttacatttaatttctyaatctaagtaagtcttcggaactttaggataatctctagattgatggtattgccttggccttctgatttttttctggtctgttttcagtggctggagagcaccatgttggtatggccagcatttaaccagggatggaatttttggattgttaaagggtaagggatgcaatagtgtcaggtgttattataaaggtat

SEQ ID NO: 756977 - DNA, 523 bp, Homo sapiens
ttttaaatatgtcaaatggaatataaatactaaaagtgatttatctaccattatattttaaaaatatatcaataagctcgtcttttatctcttggaatttttgtttgtttgtttgtttgttttttgagacggagtcttgctctgttgcccaggctggagtctggagtgcagtggctcgatctcggctcactgcaagctccacctcccaggttcacgccattctcctgcctcagcctcccaagtagctgrgactacaggtgcccgccaccacacccggctaagtttttgtatttttagtagagacggggtttcactgtgttagccaggatggtctcgatctcctgacctcgtgatctgcctgcctcggcttcccaaagtgctgggattacaggcgtgagcccctgtgcccggccagctcttggaattttatattattctttttccattttgaactaacgtttttattccatttggcttgtagaattttattttaattttatacaattttatgttttcattagtc

SEQ ID NO: 756978 - DNA, 584 bp, Homo sapiens
tgaccatgtggtgaggaattcaatcaggctgcagaaatttgcataagtaaagaagaaccgatagccaagacaatgggaaaaaggccttgaaggcacttcagagacctacacagcagcccctcccatcacaggcctggagggctaagagggaagaatgatttcatgggccacgcccaaggccctgccaccctgcacagcctcaggacattgctytcagcatccctgtcacttcagctccagccttggctcaaagaggcccaggtacagcttgggccactgcttcagagggtgcaagccataagccttggcagcttccacgtggtgttaagcctgtaggtgcacagagtgcattagctgaggctcggtagcctcctcctagactttagagaatgtatggaaaagcctggatgttcaggcagaggcctactgcaggggtggaaccatcatggagaacttctactagggcagtgcagagggtaaatgtgggtttggaggccccacacagagtccccactgggacagtgcttagtggagctatgagaaggccaccatcctctggaaccaggaatgctaccaacagcttg

SEQ ID NO: 756979 - DNA, 591 bp, Homo sapiens
acttatgtttgacacattttgcatgcatgtactatggatgctatatgcatgcagcattcatatagttgcatgcatgatgtatgctggtaacacacatgtatcgtgtgtagtatacatgtagcctgcatgcaatattcatgcatacaagttgtgcgcatgttgtgtgcatgttgaatatgttgtgcgcatgtagcatgaatgttgcacatatgttgtacacgtgtagcatgcatgttgtgcrcatgtggcatgcatgcattaggcatgttgtgcgcatgttttgcatgttgtgttcatgtagtatgcatgctctctgtacgcatgttgtgtgcatgcattatttatgttatgcacatgtagttgcatgttgtatgcatgcagcaatcatgctttacgcatatagcatgtatgttgtgtgcatgctgcacacttgtacggatgtagtgtgaatgtggtgctcatgtagcatgtatgttgaaagcatgtgcacatgtagcatgcatgtagcatgaatgcatgatgtatacacgtagtgtgcatgtttcatgtagtatgcatgcagcatgcatatattttgggcgcatgttgtgt

SEQ ID NO: 756980 - DNA, 594 bp, Homo sapiens
gaaggaggcagagaaatttagcctacaaaacaatttacatgacaaagtaaaattgggggacttattatttagtcatggatttcaattcaagtttctaagtaggaggaggacagagaaatagaaaaagagatgtactttccagaagatatagagataaattattaatattactatttgagacagggtctgaccctgtagcccagactgggatgcaatggcatgatcatagcttactgcaacccccatctcctgggctcaagcaatcctcccacctcagtctccccagtagctatgacattaatggaactcattcttgcagataaaataaatatcaatagccttatacatatwgtatactttatacaaatattattggtggtattccaaagacaggtttctatagcaaattaactcctaatttgaaatttctgcctgtgatattgttaaccttgctagaagatctgaggatctgctgttacattatttgaattctatccaattatgttcactgatgtttctccttccagtgtttgaatatttgttagaggctgcagttcccaggttatagccaccatgttggtaatggaaacctgt

SEQ ID NO: 756981 - DNA, 594 bp, Homo sapiens
gaaggaggcagagaaatttagcctacaaaacaatttacatgacaaagtaaaattgggggacttattatttagtcatggatttcaattcaagtttctaagtaggaggaggacagagaaatagaaaaagagatgtactttccagaagatatagagataaattattaatattactatttgagacagggtctgaccctgtagcccagactgggatgcaatggcatgatcatagcttactgcaacccccatctcctgggctcaagcaatcctcccacctcagtctccccagtagctatgacattaatggaactcattcttgcagataaaataaatatcaatagccttatacatataktatactttatacaaatattattggtggtattccaaagacaggtttctatagcaaattaactcctaatttgaaatttctgcctgtgatattgttaaccttgctagaagatctgaggatctgctgttacattatttgaattctatccaattatgttcactgatgtttctccttccagtgtttgaatatttgttagaggctgcagttcccaggttatagccaccatgttggtaatggaaacctgt

SEQ ID NO: 756982 - DNA, 536 bp, Homo sapiens
aaaaaggtctctctaactccatctcatctccctccaactcatccatatcaactgcaagaaatatctttccaaaatgcaagtatgtttagtgttactcaactgctaaaaacattttgacagtttctaacaaaattttcagattcagctacaaaaatgcctycccctcacatcctatgctgacataccaatatccctcactactgaaactctagtactagcagtttttcacacaggtcatgttatttcacaactgcagggctttgcatatgccactccgtctataagaagctaccttccccacctgactatttggcaaagacctatttatattctgagtctaaactctaatgacttccccctaaaaatagagaataatgtcaattttgcatctatacatctaagaatttaacaaaatttctatcaaaatcgcaacagggtttaaaaccttgattaaatgattattaaattcaactgttaagagtaacaggcaagaatagttaagaaaagaaagcatagccctatcaaatctctaaatg

SEQ ID NO: 756983 - DNA, 536 bp, Homo sapiens
aaaaaggtctctctaactccatctcatctccctccaactcatccatatcaactgcaagaaatatctttccaaaatgcaagtatgtttagtgttactcaactgctaaaaacattttgacagtttctaacaaaattttcagattcagctacaaaaatgccttcccctcacatcctatgctgacataccaatatccctcactactgaaactctagtactagcagtttttcacacaggtcatgttatttcacaactgcasggctttgcatatgccactccgtctataagaagctaccttccccacctgactatttggcaaagacctatttatattctgagtctaaactctaatgacttccccctaaaaatagagaataatgtcaattttgcatctatacatctaagaatttaacaaaatttctatcaaaatcgcaacagggtttaaaaccttgattaaatgattattaaattcaactgttaagagtaacaggcaagaatagttaagaaaagaaagcatagccctatcaaatctctaaatg

SEQ ID NO: 756984 - DNA, 628 bp, Homo sapiens
tccccccacactgttttcattttatcttatctccttctagtactcaaataaatacatatatattttaattctacatgcaattataagttctttttcatttattatatagtctatagttctaagtaacagcctttatcattgtacccttcataattgtattatttacctgtgtgtwacatcccatcaatatgacaacaatttttctggatgtaaagtccaaaaagaggaagtttcagcatgagtttatgttggatacactttattatatttcctagcatataatattccatattacatagttaatagcacaatgatgacttcacacattaacatttttcttcttttaatttaataccttaatatgaactcccagatatagaatgattagctcaaagagtatgaacactgcttgacagggtttactgcatcactttccacaggagctatactaattaatgccatcacatgcaatttttaaaaaatctttatacataaacacataaatgttaattttaactttaaagcataaattagtagtcatgtttccctacctcaaataccctctccaacttccctcccacaacatgacagctccatccatttgcccattaaaatggtccaagttaac

SEQ ID NO: 756985 - DNA, 503 bp, Homo sapiens
agttttattctattgtggtcagagaagatgctttatattatttcagtttttttaaatgttttaagacttgttttgtgacataacatatggtccatccttgagaatgatccatgtgctgaggaaaaagaatgtgtactctgcagctttgggatgaaatgttatgtatgtatctattaggtccatttggtctgattagktccatttggtacagattaagtctgatgttcattgattttctctctggaagatctgtccaacgctgaaaatgggatgttgaagttaccagctattattatattggggtctgtctctctttttagctgtaacaatatttgctttatgtatctgggtgctccaacactggtatatggatccagtgttgggtccatatacaattacaattgttacatcttcttgctgaattgccccctttatcattatatagtgaccttctttgtctcttcttatagtttttgtcttgaaatctatttcgtctgatatac

SEQ ID NO: 756986 - DNA, 656 bp, Homo sapiens; identical to SEQ ID NO: 742500

SEQ ID NO: 756987 - DNA, 656 bp, Homo sapiens; identical to SEQ ID NO: 742501

SEQ ID NO: 756988 - DNA, 635 bp, Homo sapiens
actatagatactctctagagctcagaagagagatttcttccaaaaatgtattattgagaattgccagcgtggtattattttatgtcatggcagtagattacatagaattggaatagaagacattctagcaagagtcctgcacaccaccactatttaagaggaagagraagggaagccatcaaaagacttgaaaagaaatgaacagaaatagaagaaccaggcagaaagtatctcattagtcattagtggaaaactattcaaaatcatgaattactaaaatcatgaatgaaagagggaacatgactactgagcttgaagaaatatggaatgcaatgaaaaagtgtatgtcaaaaaatcagatgtctatataaaatgaatgaagttgtagaaaaataaagctataagaaatgactaaagaagaaattaaaaaaactgaatatgcttattacaagtaagcagattgagttagtgatcaaaagaactacccacaaagaaaagcctaggatcagatcatttctctggtgaattctaccaaatgctttaaaaagaattaactcttccaaaaagagaatagggaaaaacactttttaatttattctatgttgtcagcattaccctgaataataaaaagggca

SEQ ID NO: 756989 - DNA, 644 bp, Homo sapiens
ttaaagaagccctaaataaatgaaaagatatctatgttcatggattagaagacttgatattgttaagatggcaatacttctcaaattaatctggagattcaacaaaatcttatcaaaattataactgaattttttatagaaatggggaaattartcctaagatttatatggaattgtaagggacccagaatagccaggcaatcctgaaaaagaaaacgaacttggaatactcacacttctgaatttcaaatgctgctcaaaagctacaataatcaagtgtgttttgctagcataaggatagataaataataaaatgtaattgaaagttcaaaaataaattatatatcaataagtgtgccaagagcattcaacaggaaaagaaaagtctttcaaacaaatattgttgggagaactgattatccacatgaaagaaataaaattggactcctcttttgcataatattaaaaaactgactcaaagtgcatcaaagacctaaatataaaagctaaacctatacaatctttataataaaacagaagtataaatcttcatgattttggcttaggcaatggtttcttatgtatgacactaaacgcaataggtgtaaacagagaaaaaaatatgtgaatttgacttcatcaga

SEQ ID NO: 756990 - DNA, 644 bp, Homo sapiens
ttaaagaagccctaaataaatgaaaagatatctatgttcatggattagaagacttgatattgttaagatggcaatacttctcaaattaatctggagattcaacaaaatcttatcaaaattataactgaattttttatagaaatggggaaattagtcctaagatttatatggaattgtaagggacccagaatagccaggcaatcctgaaaaagaaaacgaacttggaatactcacacttctgaatttcaaatgctgctcaaaagctacaataatcaagtgtgttttgctagcataaggatagataaataataaaatgtaattgaaagttcaaaaataaattatatatcaataagtgtgccaagagcattcaacaggaaaagaaaagtctttcaaacaaatattgttgggagaactgattatccacatgaaagaaataaaattggactcctcttttgcataatattaaaaaaytgactcaaagtgcatcaaagacctaaatataaaagctaaacctatacaatctttataataaaacagaagtataaatcttcatgattttggcttaggcaatggtttcttatgtatgacactaaacgcaataggtgtaaacagagaaaaaaatatgtgaatttgacttcatcaga

SEQ ID NO: 756991 - DNA, 632 bp, Homo sapiens
aagcatctgaagcaggtgatagggatagggtttggacgttttgtcccctctgaatctcatcttgaaatgtgacctccaatgttggaggtgaggcctggtggaaggtgtttgggtcatgggggtggatccctcatgaatggcttcatgcccttttagcagtaatgagtgagttatcactgctttgagttcttgaraaatctggttgtttaaaagagtcgggagcacctctctccatcagctcttgctttggctcttgccatgtgatgaacctgctccactttcaccttttgccatgagtggaagcttcctgaggccctcaccaggagcagatgctggcaccatgcttcctgtacagcctgcagaactgtgagccaaaataatccccttttctttatatattacccagtctcaggtattcctttatagcaatacaaacagactagtatagcagggatcagcaaactgtagttcatgggacaaatttggcccattgcctgactttggaaatatagtgttattctacacaggcacactcattcatttacatgttgtttatgctgcttttgtgacatcacagcaaagatgagtagttgtgaccaagactgttgggtctgcaaagcttgaaataatta

SEQ ID NO: 756992 - DNA, 631 bp, Homo sapiens
ctgtatcattttattgttttccttagattgggtttcaactttctcctgaatctcaatgatcttcattcctatctatattccgaattctgtgcctgtcatttcagtcacttcagcaacttcagcctgattaagaaccactgctggtgaactagtgtggccatttggaggtaggaagacaatccagctttttaagttgccacaattcttgtgctggctctttctcatttgtgtgagctgatgtttgttcaatcttagyagttgctgtcctttgggtggggttttttgcttttatcttctttgatgcccttgggtatttgattgtggtataaggtgggttcagtcagctggctttgcttctagaagattttaggggaccatggctcagcttggcagtcctggaatgtgtgctttggctctgaaggtctgggaccaagccccttgctttgttctctggccccttgaggttaggaatctgtagtgttggaggggccgaggtgttctcagtctgtaggtcacaacactctgatgggggggtgtcaggcaaagtacttcatcagggcagtggcagtgggatacatgcttgcttgcacatgccagcagccacagcagtgtgatgaagtgcatgcacatt

SEQ ID NO: 756993 - DNA, 630 bp, Homo sapiens
acatcttcacattattcataatatctgaaagtggaacaatctaaatgtccatcaacatgaatgaataaattaaatgtcatttctctgtatataaaatgtgatgttattaggcaattaaaaagaaatgaaatactgatatatgttgcaatgaatgattctgcaaaacagtgtaaatgaaagaagccagtcacagctgaccatataataatatccagaatagacaaatccacagagacagaaagtagattagtggwtgcctatagttaccctaaaaattaggctcacgctttccctaacttcccccaccctttcacaagtctcacttcccctaaaataaccacttaatttttagtattagttttaagttctttgaatggttacccctatatgcctaaataatacatgtactgctttttagaatttaccaattagagaaattttgcaaagattagaaaaaatataattctgagaaaaaggaatttttttttttttttttttttttttttttttttttacccattttgggtttactgactaggccctgcacaaaagacagattaacaagagaaaaaagtgcaaatctacctaatatgagttttaaatgacacaggtgattaactactaagagct

SEQ ID NO: 756994 - DNA, 630 bp, Homo sapiens
acatcttcacattattcataatatctgaaagtggaacaatctaaatgtccatcaacatgaatgaataaattaaatgtcatttctctgtatataaaatgtgatgttattaggcaattaaaaagaaatgaaatactgatatatgttgcaatgaatgattctgcaaaacagtgtaaatgaaagaagccagtcacagctgaccatataataatatccagaatagacaaatccacagagacagaaagtagattagtggatgcctatagttaccctaaaaattaggctcacgctttccctaacttcccccaccctttcacaagtytcacttcccctaaaataaccacttaatttttagtattagttttaagttctttgaatggttacccctatatgcctaaataatacatgtactgctttttagaatttaccaattagagaaattttgcaaagattagaaaaaatataattctgagaaaaaggaatttttttttttttttttttttttttttttttttttacccattttgggtttactgactaggccctgcacaaaagacagattaacaagagaaaaaagtgcaaatctacctaatatgagttttaaatgacacaggtgattaactactaagagct

SEQ ID NO: 756995 - DNA, 630 bp, Homo sapiens
acatcttcacattattcataatatctgaaagtggaacaatctaaatgtccatcaacatgaatgaataaattaaatgtcatttctctgtatataaaatgtgatgttattaggcaattaaaaagaaatgaaatactgatatatgttgcaatgaatgattctgcaaaacagtgtaaatgaaagaagccagtcacagctgaccatataataatatccagaatagacaaatccacagagacagaaagtagattagtggatgcctatagttaccctaaaaattaggctcacgctttccctaacttcccccaccctttcacaagtctcacttcccctaaaataaccacttaatttttagtattagttttaagttctttgaatggttacccctatatgcctaaataatacatgtactgctttttagaatttaccaattagagaaattttgcaaarattagaaaaaatataattctgagaaaaaggaatttttttttttttttttttttttttttttttttttacccattttgggtttactgactaggccctgcacaaaagacagattaacaagagaaaaaagtgcaaatctacctaatatgagttttaaatgacacaggtgattaactactaagagct

SEQ ID NO: 756996 - DNA, 630 bp, Homo sapiens
acatcttcacattattcataatatctgaaagtggaacaatctaaatgtccatcaacatgaatgaataaattaaatgtcatttctctgtatataaaatgtgatgttattaggcaattaaaaagaaatgaaatactgatatatgttgcaatgaatgattctgcaaaacagtgtaaatgaaagaagccagtcacagctgaccatataataatatccagaatagacaaatccacagagacagaaagtagattagtggatgcctatagttaccctaaaaattaggctcacgctttccctaacttcccccaccctttcacaagtctcacttcccctaaaataaccacttaatttttagtattagttttaagttctttgaatggttacccctatatgcctaaataatacatgtactgctttttagaatttaccaattagagaaattttgcaaagattagaaaaaatataattytgagaaaaaggaatttttttttttttttttttttttttttttttttttacccattttgggtttactgactaggccctgcacaaaagacagattaacaagagaaaaaagtgcaaatctacctaatatgagttttaaatgacacaggtgattaactactaagagct

SEQ ID NO: 756997 - DNA, 605 bp, Homo sapiens
tgggtatattgtagaaaataaaaagttcctcttcaaagcttcccttcttgttaaagaataaatcataagtgttagaattaacagtttcttttaaagactaactttatgctagacatgctcacagacacgtagtacattctatgtcctcgtactttaaccaagatatctgtgctagacgtgcacacaggcatgtctcagctcrcagcctatgccctttccttatttgggaatgtttattccttatttggaaatgttattacttttctaagtcctttcgtaagcaacttcattttttttcctttgtttttctattgcctttacctgtttaaaaaagttttaaactgttagccaatcgggttttagtttagattgtgaggtctggctccagccaatggagacaggacacagtagcagggacaaactgggtaagggataaaaattgcttcgctccattgttccggggtgctctcgccattgttccaactgccataaacaccctttctgcagaaagcaaaaatggccttgctgagagaattaaatttatgttcgagtgctatttctttgtggcactggggaacaagcattctatttctaaataaacattt

SEQ ID NO: 756998 - DNA, 640 bp, Homo sapiens
tgctctgccagagtggttgagagcatagtttgggaatgagacagatctgggtttgagtcctcactgctgtgcaccacctctactaccttgagcaaattagttacttgctctccctgtatctgagccttctgatctacaaaaagtgtctaaaatcttccagagttgttgtaagaattctgctggctttattattttttaatacattatcatactattgctcaattagccatcagtacctttcactaaataacacagcagttatatacacacctcccccagcagaattctctaaggggtaagagcctgtttactggctttactcatgagattcttcactctctggtcaaataggtgtgtcagcaaaggaatctacacataattatcattaaggaattcattaattcaagacttactgagaattgtataaagacttgttgagaaaaactgaacccacactcaaaygaaatctctattcaatgaactatacgtacgtgtttggaatgagttttcttcatgcttcctattctgcagtgctaagaagcaggcaacaagcctttgcagtgaggctaggggagtgatttccatgctgactggttagagtttctcccttgtgggttccatgatgctcttgctctgtatt

SEQ ID NO: 756999 - DNA, 506 bp, Homo sapiens
caacatgttaattactctgaaggactaaagccaaaacatgtttattttttgaggtctttttttaatcttctagtgtccataccaatactcatacctgtatatattttgctctaaaatatttgaagacttcttccaagaagaacaaaacttttcatttctcctaaggagacctctttctttattctttggtattttgactttgagcaagtacagattttcttccttctggtgttcaagtgttttttcttcagagcaggcaaatacatgtaaataatctgatttgytccagggaagagaactttgaaagtaaacttcctacagtatattcaggaagtgacttgaggaagataatttgctttcaataggtgagatcttttttctctctccagatgggaatattgcttagtttttggaggaatgggccaaatatatttttatctgaagggaagaaaagaatgtgcctttcttaaaacttggttttaggtttttctcaacctcccagcatt

SEQ ID NO: 757000 - DNA, 666 bp, Homo sapiens
gtttttgttggttactcttactttttttttttttttttttttttttttttgagacagggtctgctctgtttcccaggctggagtgcagtggtgcgatcacagctcactgcagccttgacctcccggactcaagtgatcctcccatctcagcctcccaaggcaagtcggctcccagttcctgcttgatatggctagccacctggagcactgccctgctcccagattctttgttcctgttgttgttgcccagctcaatattgaggttggggaaaggaggggagaagaagaaataaagagaggattaaccccacctggttgctgttggtttagaacaccaactaattaccccattcatatcccctaggccctctatttctcctggaacatatcaccctcatatgtggaacagttttgatattgctcctaattgcaatwgtcatctcccggtggttttgaactgaggtttccatcttccatcctatactgtcttctttctctcagggatttcttgtagcttctggtctatccactgcaaactttttttttttttttttttttttttttgagacagggcctcactctgtcacccaggctggagtacagtggcacaatcatagcttactgcaacctcaaattcctgggatcaagggatcctcccacctcagc

SEQ ID NO: 757001 - DNA, 601 bp, Homo sapiens
tgggaacctccacctagatttaagaggatgtgtggaaacacctggatgtccaggcagaggtttgctgcaggggcagagccctcatggagaatctctgccagggcggtgtggaagggaaatgtgtggtgggaacccctacacagagtgccactggggtactgcctagtgcagctgtgagaagagggctaccatcctccagcacccagattggtagatcaaccaacagcttacactgtgtgcctagaaaagctgcagacactcaacaccagcccatgaaagcagctgggggggaggctgtcccctgcaaagccacacgggtggagctgcccaagaccatgggaacccasctcttgcatcagcgtgacctggatgtgagtcttggagtcaaaggagaacattttggagctttaagatttgactgccccactaaattttgggtttgcataggtccttgtccccctcattttggccaatttctcccatttggaacacgtgtatttacctaatgcctgtacccccattatatctaagaactaactaacttgctttttattttacaggctcttagacagaagggacttgccttgtatcagatgaaact

SEQ ID NO: 757002 - DNA, 549 bp, Homo sapiens
ctctcatatcaataaaattaaaattctaactttcaatgtctattataatctgtttatagactactcagtctctaaatgacataggcactgattctcattttttattactgaaagatattgtgaatgaaaagcctttaataaaggtattttataatcccccatttattatttattatgatggtgattatcaattagtttttttatatatatttgatgtttgaaaactgtcattgtttccacattcaagcactgaatgcatttaaagtgtgcatttctttatgtattattaaatgttagcaccattttctatgttcattgtaatktataaagttgtattattgggtatttttaaatatttttatttttatttttttaaagcagctgcactgagaatgttcctcgtgtggctggtgcacacggagacactctcactgccagcaaagcagggagagctgacaaacaaccacatagatattttttaaatggttcatgagaacttttatctattaaggttagtacctgctatagtttggatatttgaccctccaa

SEQ ID NO: 757003 - DNA, 636 bp, Homo sapiens
tagtcgacatcttagtaaaagctgtgcatgtagtaagaggacaagccaaagaaaccctctagtcaaagatactgatatagttaactgaggagcaagaccaccccttcctccaacccatcccacaatcacttgcaatttttgctttaagcagatcttgtttaatttttaaaaaccaaatagaaagccttaaaaagtataaagtttaatcctttaaggcaataattattaagggccacaacatgacaggttgtaagcagccagtacaaagggcttaaagtctgcctgtgcctggcacttttaaggaacaggaagatggtccatgttcttggatctaacagaatgatagtgaatttgtaagaagtgaggataggaagtcaaaggggtgactcaatgttgtactgtgtctagtggctggctatccctttggaaagaaataggagcaaattttwaaaaaatagaaaaaaatatggagggttttttgaggacagagtagtaataagcatatatcttcgaagcattgaaggctgctgaactgaaatcaggcttttattggaagcacttgttttaagcacatgcttgcagattattctgcatcagggaacctctgtagacctttttaacaattgatgcattatt

SEQ ID NO: 757004 - DNA, 647 bp, Homo sapiens
atttcccataaactttctggaaaataagcatgccttcaaaggcattgtaagttaaagaaagtcatgataatgtgctatacactaaatttgttggggaaatagttcaaataaattatgatcttggaattcttttccataccatcagttaaaggaggtgtgtatggtgtcaaagcacctggtaaattcggtcaattcaattaccagttagtaaaaaagtttataaacctaattattgaccacgtctttaacaaaatgactggtacaccttgtcaatagtttattatttttgtgaacctaatctttgattttattccaagacttaatctttcatagcctagaacacttttggtgaaatttttatatgagaaaaaaaaactaagtaaaccacgagatcatcctaactagagccatagagkatatatgagaccaataagaatcatgagattattccagcttgaactccagtttaaaatgggtttttacacattagcagaaccagcaggaattgagctaatctatacaacagcatgattgaaaagacataaatttctgcagtcttttatgctatgctgttttgaagctatactgtaataattttgcccagttttagtcttcatatgatattaatattgctgttatgaatatgt

SEQ ID NO: 757005 - DNA, 602 bp, Homo sapiens
aaaagctcttctttgtgtttgttaacacaaaacagaattttcagactattgcttatacttgttttatttaatgtgaattcagggtttagatacatatactcacagagtgcaattgtgatactcaaagagcttcattgaatttatttcccttagaaaaggttaaatagggttgaaatatttgagcactttattttcattttttcaaatatctagatcaggggtcagacaactacacgcataggccagatctggcttgctgcttgcttttttttttttttttaataaagtgtcatgagattgcagctacacctacttgattcagtattatctagggcagcttttgcactataatggcagagttgagtagttgtgccggaaaccrtatggcctgcaaatactaaaatcttaactcactagccctatgcagaaaaagggtgccagccactcatctaggtgaataaataaacttcatgtaaagctctagaatttttaagtagtatgaatagaacattgatgtgttaactgagtatgcactgaagatatagttttatgtcttccaggaacaaaatatataaatggaaaaatctgtcagtgagtcatga

SEQ ID NO: 757006 - DNA, 525 bp, Homo sapiens
attgatggcaaattgggatttcaaaaaaacatcgaaggagcattcattttacgaaataaaactgattcattttttatgaaataaaagcagtttaaaaagggatcacattagccttaataatatcaaagttggtggctattcataccagtttgttcattttatctcactatgttctattctctcaggtcattttcaattcattttgttagaaatgagatttgtgatgctttctaggtctcttctagttgttcatgattggaatatgcatttataggtaaatctttccagtgcaacaaattttatgatatcctgaggctccgaatccctcttccacataatacyctaaaagaactctagttttttcactaaccagatttttattcaagaaaataaataaaaataaatagcaaaatccccaaatagttagcgagtaaatttatttacaaatcatgcaggttaaatacaaaaaagacaactagtacatttctgtaagtggaaaacaggatcaccgtaagtttgaataag

SEQ ID NO: 757007 - DNA, 681 bp, Homo sapiens
actcccatatgaagaagctaaaaagtcattactctcatccttataagaaaaagatggaaaaaatgaaaatcaatgtattttcttggagctatagaaagctgtgcatgcagagcaaactgtcaccctgaaatcaagcaaaacaggcaaatccagagtcacagctgaaatctgcttatttgtaccagttgcaaccagagccatgaactggtaagaacacataaatagtaattttgatgaataactggaggcttgagtgtagaccagcttgagaattggatactcttgtgggcccactatttcatatgttttacatccaggaaacctgttaggttctcaaggtggagatccaaaaaattatttctgtgatctggcagagatgggaaagataattcttctgaaatacactcaaagayttctccacagcaaatccttctctactggagggaaggctttactagagcctgtctcagagccatcagggagatacatttctcccatttccaatgccatctagacttcctatttcacccaagatggggagattctctacaagaaaaaatactggtgaagggcacaggccagataggcagacccactaaaacactgagatttaattcaaatattataaaatgcacactctccctcatatcttatggacaacaaacagggatccagtttaat

SEQ ID NO: 757008 - DNA, 623 bp, Homo sapiens
tgacatggataaatattgatggatataaaacctaggggttaaagttggttggcaaataagagatttacataagttcaaattattttcccatagattactcactaattatgaaatgattaaaaggtacttttatagcaataaaatttagaagaaacagccttaactaagtgatcaagattaatataacyatgcatggaacaaacgccgttaagtgcctcctgatatcatactctgggaaagatactatatcacatacgtaatatttctgccaaaaactcaaaagcataattataaagaaacaacaggaaaaacccaaatgagagaaatactacaaaacatgtgtctgtactcttttaatacaccaaggtcataaaacacaaagaaaagggaggaaatgctacatatcaaaggagagaaaacatacaatatgactaaatgtaaacttctgcatggatcctggttcagagggcaacatgctataaaggacactcggaagataattagtgaaataggaatataaactatattacatgacagtgatatagctatgttacattttaaaaatttgaggtgtggttatgagagaaggttttagggatggagggtcatgatttctacaattt

SEQ ID NO: 757009 - DNA, 588 bp, Homo sapiens
ggtgggtgcagagagttttgttatttcttggctcccaaggtccctacctggtctgccttttctctccacctttcaacgtcttctgttcattttatatataatgtccagggatcttagctatacttagaggaaaaagataagtatgtttactgcattaattatgttgaatcatttcattgcttttttggctggtttaraagtttttatttagttacatggttaaactatagatattaagtttatcatacttttatcctctttctgggaaatacatgacctttgaatagtttgatcccacttatgtatctactcccacttgtcctcatatattttaattttatactcgaaaaccccacagttgttatttttaatgtttcatataatgatatttagttttttccacctttttatcacttcattttattcattcctcttgtatatcatattctccatctgggtttatattttcttttgcttcaagtacgtcgtaaataatttccgtatgggtttatgagtagcaaccttttagtttctgtttgtctgaaaaaatacttttactggcatccttaaaagatgatgttactgagt

SEQ ID NO: 757010 - DNA, 590 bp, Homo sapiens
cagagagttttgttatttcttggctcccaaggtccctacctggtctgccttttctctccacctttcaacgtcttctgttcattttatatataatgtccagggatcttagctatacttagaggaaaaagataagtatgtttactgcattaattatgttgaatcatttcattgcttttttggctggtttaraagtttttatttagttacatggttaaactatagatattaagtttatcaatacttttatcctctttctgggaaatacaatgacctttgaatagtttgatcccacttatgtatctactcccaacttgtcctcatatattttaattttatactcgaaaaccccacaagttgttatttttaatgtttcatataatgatatttagttttttccacctttttatcacttcattttattcattcctcttgtatatcatattctccatctgggtttatattttcttttgcttcaagtacgtcgtaaataatttccagtatgggtttatgagtagcaaacacttttagtttctgtttgtctgaaaaaatacattttactggcatccttaaaagatgatgttactgagtag

SEQ ID NO: 757011 - DNA, 596 bp, Homo sapiens
tgggcggccgggcagagacgctcctcatttcctagacgggatggcggctgggaagagacgctcctcacttcccagactgggcggccgggctgaggggctcctcacatcccagacgatgggcggccaggcagagacgctcctcacttcccagacggggtggcrgccaggcagaggctgcaatctcagcactttgggaggccaaggcaggcggctgggaggtggaggttgtagcgagccgagatcacgccactgcactccagcctgggcaagattgagcactgagtgagcaaaactccgtctgtaatcccggcacctcgggaggccgaggcaggcagatcactcggggtcaggagctggagaccagcccggccaacatggcgaaaccccgtctccaccaaaaaatgcaagaaccagtcaggcgtggcggcgcgtgcctgcaatcccaggcactctgcaggctgaggcaggagaatcaggcagggaggttgcagtgagccgagatggcggcagtacagtccagcctcggctttcacaactttggtggcatgagagggagaccggggagagggagagggacccctcttctgatttctaga

SEQ ID NO: 757012 - DNA, 596 bp, Homo sapiens
tgggcggccgggcagagacgctcctcatttcctagacgggatggcggctgggaagagacgctcctcacttcccagactgggcggccgggctgaggggctcctcacatcccagacgatgggcggccaggcagagacgctcctcacttcccagacggggtggcggccaggcagaggctgcaatctcagcactttgggaggccaaggcaggcggctgggaggtggaggttgtagcgagccgagatcacgccactgcactccagcctgggcaagattgagcactgagtgagcaaaactccgtctgtaatcccggcacctcgggaggccgaggcaggcagatcactcgkggtcaggagctggagaccagcccggccaacatggcgaaaccccgtctccaccaaaaaatgcaagaaccagtcaggcgtggcggcgcgtgcctgcaatcccaggcactctgcaggctgaggcaggagaatcaggcagggaggttgcagtgagccgagatggcggcagtacagtccagcctcggctttcacaactttggtggcatgagagggagaccggggagagggagagggacccctcttctgatttctaga

SEQ ID NO: 757013 - DNA, 508 bp, Homo sapiens
cagacttcctcccacactggagtttggtccagtatcagcaaactctctctctccttccttcaaatcactctcaggtcctgcctcccacaggctacaaataacctgacagtctctccattaatattggatggccaaattctgcatgccttaggccactggggctgcrgtaacaaaataccatagactgggtggcttataaatgtttatttcttgcagttctggaggctgggaagtccaagatcaaggtgccacaggctcagaggccagtgagggtctgagtcctcatagacaaccatcttattgtaccttcacacggtggaaggaaaaacaggcctttctggggttcatttcctaagggcaataatgccactcatgagagctccaccgtcatgacttaaccaccttccaaaggccccgcctcccaacacccccgccttcacggtgaggattttgctgtacgaattcgcagggacataaaactctgtccatcacatgttgtaagggaggg

SEQ ID NO: 757014 - DNA, 687 bp, Homo sapiens
acctcaagaaaatgagcagcagcagcaagctggaaataatctacttagctgcactttacaaatgcctcctaaaaaaatcaagcttgacttcaatggaatttctagaaacaattcaatggaatttctagaaatagtaattctatgaggtatcaaattattaagaaaaatacctaaattacaaaggattcatgtgcattggccattctaaatctttttcccttttagtgttgaagctcaaggcactgtcaaaaaaaaaaaaaaaamaaaaaaccttggaacttgacaaaatgagttcagaaatacaaggaaaaaaggcaattaagagtaggaacttgaaagctcaaagaagaggggaaggaaggttgacaaaagacactcaatgatcccagaggtactgccctaacctctaagcattgcatctatcctaattttttaaagtttcgttttaattcccgaaattccatgaattaggcctagaaattagcaaataccctttgtgaagaacgtaaattttcagaagagacagggggttagcaatcaataacttcttagtaagaaataatgtgaatatttttctttcctcctatatcctgagatcagctactctgagtttttcatagaaagtaaacactaatttgggaacttgaagcacttattgggggaaaggacaggaggcttgggtagtac

SEQ ID NO: 757015 - DNA, 604 bp, Homo sapiens
aactatttagtttagaagccatttcaatttatacatttcccatacttctgttcttccaaaagataaacacatacaaacacctcgtggtttcttttgaaattccttccatgagaaaggtgagcaggaagaaacggacaacagctacaagcctgtcatactcttgttggattaaraatctgggaaccgttggtcgggtgcagtggctcacacctgtaatcccagcactttgggaggccaaggtgggtggatcatctgaggtcaggagctcaacaccagcctggccaacagggtgaaaccctatctctactaaaaatacaaaaattagctgagtatggtggtacacacctgcagtctcagctacttggtaggctgaggcaggagaattgcttgaactctggaggcggaggttgcaatgagctaagatagcgcccctgcactccagcctgagcaacagagtgagactttgtctcaaaaaaaaaaaaaaaaaagaatctgggaactgtaaaccatgcccttccaataaaggcaatttttgttggctattttggtgcctaatcgcttgtgtgtctgccgggaaaatccgacaagagcagcatgtgtgcgt

SEQ ID NO: 757016 - DNA, 601 bp, Homo sapiens
gctggtcactttatagtaagccttcactgcaacactgaggcattatttttatggatgagcaaactgaggctcagagaagttaacaattagcagtaggtcacttcattataaatggcagaaccaagctttaagtataagtgtgttgacaccaaggcaatgtgtctttgctactttgtggtaggacactgttttccttccatatctctttctgtcatcaggttctagcccagaatactggccattttttagctattcagtgcragcattgagtgaaattgtgaatttgcctgtcactgactccagggaagagacgagtcaatcaactctgacgaatcaagatttccagaagatctaaagcccccttgcctctctttttctcagctacccatcaaataagagaacccattgcagaaccagaagggacatcatccaagctgtctgaaatcccggttggtactccaggcttcaacaactgcagcacaatgagagacagcaaagaacatcctggcctttgacaaccccctgtcttctaacatactgaggttaatcagaccgaggacaatttggaaggggctctctgccacaacttggggagtggagg

SEQ ID NO: 757017 - DNA, 601 bp, Homo sapiens
gctggtcactttatagtaagccttcactgcaacactgaggcattatttttatggatgagcaaactgaggctcagagaagttaacaattagcagtaggtcacttcattataaatggcagaaccaagctttaagtataagtgtgttgacaccaaggcaatgtgtctttgctactttgtggtaggacactgttttccttccatatctctttctgtcatcaggttctagcccagaatactggccattttttagctattcagtgcgagcattgagtgaaattgtgaatttgcctgtcactgactccagggaagagacragtcaatcaactctgacgaatcaagatttccagaagatctaaagcccccttgcctctctttttctcagctacccatcaaataagagaacccattgcagaaccagaagggacatcatccaagctgtctgaaatcccggttggtactccaggcttcaacaactgcagcacaatgagagacagcaaagaacatcctggcctttgacaaccccctgtcttctaacatactgaggttaatcagaccgaggacaatttggaaggggctctctgccacaacttggggagtggagg

SEQ ID NO: 757018 - DNA, 644 bp, Homo sapiens
caggaatgttcaaagcagcattattcatatcatcccaacatggcaaaccaaccaaaatatccatcaacaataaaatggactttataaatagtggtatgttcccataatggaatattacacagcaggggtccccaaaccccaggccacacagaccagtaccagtttgtagcctattaggaaccaggctgcacagcaggaggtgagcagtgggtgagcaaacattaccacctgaacttcgcctcctgtcagatcagtgatggcattagattctcgtaggagcacaaaccctattgtgaactgcacatgcaatggatctaggttgcatgctccttatgagaatctaatgcctgatgatctsaggtggaataattttgttcctaaaccagcacctcccccaacccactgtccatggaaaaattgtcttccacgaaagtggcccctggtgtcaaaaaggttggggactgctgttatacagtgaacaaactacctctacatgcaaaaacatggaacattacaaacataatgttgaatgaaaaaagatagtcaccaaagagcacaaaagttcaactacatttatataaagttcaaatacaggaaaaactaattcataatgttaaaaattatgatagtgcttactattgggg

SEQ ID NO: 757019 - DNA, 644 bp, Homo sapiens
caggaatgttcaaagcagcattattcatatcatcccaacatggcaaaccaaccaaaatatccatcaacaataaaatggactttataaatagtggtatgttcccataatggaatattacacagcaggggtccccaaaccccaggccacacagaccagtaccagtttgtagcctattaggaaccaggctgcacagcaggaggtgagcagtgggtgagcaaacattaccacctgaacttcgcctcctgtcagatcagtgatggcattagattctcgtaggagcacaaaccctattgtgaactgcacatgcaatggatctaggttgcatgctccttatgagaatctaatgcctgatgatctcaggtggaataatttygttcctaaaccagcacctcccccaacccactgtccatggaaaaattgtcttccacgaaagtggcccctggtgtcaaaaaggttggggactgctgttatacagtgaacaaactacctctacatgcaaaaacatggaacattacaaacataatgttgaatgaaaaaagatagtcaccaaagagcacaaaagttcaactacatttatataaagttcaaatacaggaaaaactaattcataatgttaaaaattatgatagtgcttactattgggg

SEQ ID NO: 757020 - DNA, 644 bp, Homo sapiens
caggaatgttcaaagcagcattattcatatcatcccaacatggcaaaccaaccaaaatatccatcaacaataaaatggactttataaatagtggtatgttcccataatggaatattacacagcaggggtccccaaaccccaggccacacagaccagtaccagtttgtagcctattaggaaccaggctgcacagcaggaggtgagcagtgggtgagcaaacattaccacctgaacttcgcctcctgtcagatcagtgatggcattagattctcgtaggagcacaaaccctattgtgaactgcacatgcaatggatctaggttgcatgctccttatgagaatctaatgcctgatgatctcaggtggaataattttgttcctaaaccakcacctcccccaacccactgtccatggaaaaattgtcttccacgaaagtggcccctggtgtcaaaaaggttggggactgctgttatacagtgaacaaactacctctacatgcaaaaacatggaacattacaaacataatgttgaatgaaaaaagatagtcaccaaagagcacaaaagttcaactacatttatataaagttcaaatacaggaaaaactaattcataatgttaaaaattatgatagtgcttactattgggg

SEQ ID NO: 757021 - DNA, 596 bp, Homo sapiens
ctcagcctccctagtggctggaattacaggcatgcgccaccactcccggctagttttgtacttttagtagagacagggtttctccatgttggtcaggctggtctcgaactcccgacctcaggtgatccgcctgtctcggcctcccaaagtactggaattacaggcgtgagccactgcgcccggccctttcctctctctctttttttttttttttttttttagagacacgacctcactctgtaactggagcagtgcgatcatagatcactgcaacgcttgaactcctaggctcaagcaatcctcctgcctcagcctccagagtagctgggataacaggtgtgcatcacaatgttcagctaatttttaaattttttgtaraaatggggtcttgctatgttgcccaggctggtctcctctaactcttggcctcaagcagtcacatactgagacccccatgtctacaaaaaatgttttaaaaattagccaggggtagtggcgcgcacttgtggttccaactacttgagaggctggggtgggaggatcgattgagcccaggaggttgagttgcagtcatgccactgcactccagcctgggt

SEQ ID NO: 757022 - DNA, 618 bp, Homo sapiens
agtagtggggttataggcaatggaatactgcccctcataagagtgggaatgttcccattgtggaaatctgtggggagagtctaggacctcggacttttcaggggcttgataatctgggagaacaagacatacatggtctgtgtgagccaaaagttacctgggcccctgagggggcctccaagtcaggttcaacctatattgttacaataacttgcctttccttcttaggaaggcatggataactyttcttccttacaatgaaagattctaaccaattcaatatgcaagatttacataaagaaagaaccattatttgactgttcagaacaaggttttgcctagcacctcaaatccagtcttgggttttatgttggacaatttaagaataagcataagaatttaaaataagaagtgcgattggcctgtccactgagatatgacatgtaaaccaaaatcttccattatacaatgcagagaagtactccccaaaatgacggattgactatataccttgtcttttaacaacagacatttagggtttttgagggggacatggagatggctagagtctctggttttggtaaaagcatatttaatatctgcttacagacaaatcct

SEQ ID NO: 757023 - DNA, 618 bp, Homo sapiens
agtagtggggttataggcaatggaatactgcccctcataagagtgggaatgttcccattgtggaaatctgtggggagagtctaggacctcggacttttcaggggcttgataatctgggagaacaagacatacatggtctgtgtgagccaaaagttacctgggcccctgagggggcctccaagtcaggttcaacctatattgttacaataacttgcctttccttcttaggaaggcatggataactcttcttccttacaatgaaagattctaaccaattcaatatgcaagatttacataaagaaagaaccattatttgactgttcagaacaaggttttgcctagcacctcaaatccagtcttgggttttatgttggacaatttaagaataagcataagaatttaaaataagaagtgcgattggcctgtccactgagatatgacatgtaaaccaaaatyttccattatacaatgcagagaagtactccccaaaatgacggattgactatataccttgtcttttaacaacagacatttagggtttttgagggggacatggagatggctagagtctctggttttggtaaaagcatatttaatatctgcttacagacaaatcct

SEQ ID NO: 757024 - DNA, 681 bp, Homo sapiens
tctttacaaccaaaaagtagagaatctaacaggaacggattagatcacagatttgtgcagattaggttagaaaattgactgaaaagagactacaacagtgctcgcacagagtgagtggtcaacacattttaggagaaagaaaagaggaagcagaagagaggaaggaaggaaggagggagggaggaaggaagagattaaggaaagagagaggaaggaagcaagsaaggaagaaagaagttagaaccttataggatggtatatgtcaaacggaaaatgagtggaccaggcaattctttagtgaattcagagaaggttccagggcatgggttagtcagagaaaacttcttgaggtaaacagggagagatgtatgaaatgtcaaatagttgagtagaaacagaggcctcactttagccaatgacttaaatatttctaagagattctattaaacacaaactttttcaaatggctagaattctcttctgagttcctcaaaatatctagatgacggaggaaaataaaaaccattgtctcttagatacgtcttaaaccacgtatttttagaacacgtgaacatgagatttgcctatgtagtagacatcccgtgaatttgagggagaccaaggcacatctaggaaagcgcacagctgtcttccctagaggtaaccagaaaaagccagaga

SEQ ID NO: 757025 - DNA, 457 bp, Homo sapiens
gttctgttctaagatggccgattaggaacagctccagtctgcaactcccagcatgactgacgcagaagacgggtgatttctgcgtttccarctgaggtacctggttcatctcactgggactggttggacagtggttgaagcccatggagggtgagccgaagcagggcagggtgttgcctcacctgggaagcacaaggggtcaggggatttccctttcctagccaagggaagccgtgacagacagtacctggaaaaatgggacactgccactcaaatattgcacttttcccatggtcttagcaaccggcagaccaggagattctctcctgtgcctggcttggcacatcccacacccacagaaccttgctcactgctagtgcagcagcctagatccatctgcgaggctgcagcctggcttggggaggggtgtccaccattgctgaggcttagctaggta

SEQ ID NO: 757026 - DNA, 590 bp, Homo sapiens
agggattgaaatgggtatatttggtaaatattttgatacagttctccatatctagaagggataccagattgcatagcaatatactcattttatagatgatgcttgaaataagacccactcaatgtcacatgtatagttagtggcctaacagggattaaatcccaagtctcttctctgaattcacttatctactcaccacaagaaatgcaatgaaagtttctcagtgagtagagactctacatatttcaggtgataataactaggtctgtaactgccaaattttttaaaatactttggtctataacttctaattttttaaaaattccattaaaatatatattttatatactataattggcaaaaactacarttacttttgcacaaagctaaacacacacacacagaaagagagagaaatagaaaaatatccaaggtaacaatatcttctataaaatgatatcaaagctcatagacaatgatttttaaaattattcttcaaataaaatattttggttagcaattgatcttttgactgagtggaagaaagtacaacagtaagtgacatagtgttattatataccatttagaat

SEQ ID NO: 757027 - DNA, 579 bp, Homo sapiens
gaccaggctgtcaaagatcctgccgggcaagaggctgtggagatgcaacaggaccagactaggggacaaatttatttctatttctggagccatttattcaataaataataactgagcccctactatgtgtcaggtatctttccaggtgatgaggattcagtagtgaacagtgaacaaacagacaaaatctctgcctgcatggagtttatagtaggagatcagggatgccatgaaaatgagttagctaaattctagagagacatactgtaatgtcaggtatttcaaacagaaatagcttttactttttatgtggcttcacttgcttggtcttccctgtctgtatagyaggttggtgactcaaaataataattggctctatctgagtccggtacattaccctaataatacaggaaaggggtcattgaacttggaattatgtaatgacaagcaagtgatcacttaggaataacttgcaccacaatgtgaaatgcactatgtaaaattaatacagatatagaaattaaaaattaaaagtgggcatgactgcaggatagttttcgttttaattatcctataggg

SEQ ID NO: 757028 - DNA, 579 bp, Homo sapiens
gaccaggctgtcaaagatcctgccgggcaagaggctgtggagatgcaacaggaccagactaggggacaaatttatttctatttctggagccatttattcaataaataataactgagcccctactatgtgtcaggtatctttccaggtgatgaggattcagtagtgaacagtgaacaaacagacaaaatctctgcctgcatggagtttatagtaggagatcagggatgccatgaaaatgagttagctaaattctagagagacatactgtaatgtcaggtatttcaaacagaaatagcttttactttttatgtggcttcacttgcttggtcttccctgtctgtatagtaggttggtgactcwaaataataattggctctatctgagtccggtacattaccctaataatacaggaaaggggtcattgaacttggaattatgtaatgacaagcaagtgatcacttaggaataacttgcaccacaatgtgaaatgcactatgtaaaattaatacagatatagaaattaaaaattaaaagtgggcatgactgcaggatagttttcgttttaattatcctataggg

SEQ ID NO: 757029 - DNA, 579 bp, Homo sapiens
gaccaggctgtcaaagatcctgccgggcaagaggctgtggagatgcaacaggaccagactaggggacaaatttatttctatttctggagccatttattcaataaataataactgagcccctactatgtgtcaggtatctttccaggtgatgaggattcagtagtgaacagtgaacaaacagacaaaatctctgcctgcatggagtttatagtaggagatcagggatgccatgaaaatgagttagctaaattctagagagacatactgtaatgtcaggtatttcaaacagaaatagcttttactttttatgtggcttcacttgcttggtcttccctgtctgtatagtaggttggtgactcaaaataataattggctctatctgagtccggtacattaccctaataatacakgaaaggggtcattgaacttggaattatgtaatgacaagcaagtgatcacttaggaataacttgcaccacaatgtgaaatgcactatgtaaaattaatacagatatagaaattaaaaattaaaagtgggcatgactgcaggatagttttcgttttaattatcctataggg

SEQ ID NO: 757030 - DNA, 620 bp, Homo sapiens
catctgcttattttctcaatattcatctcctgttttgactttggatctattccaccttacattatgcatgtctttctctagtaatgcacacttttatttttctcttcaagtaatatgctacttcacaaacagtgtaaagactttacaatggtgtatttcttctttttatataaatgacataaattctacaatacatagttatacattatttgtaatagtttatagttaaagaaatttaaatatctgtctctatataaatgttatacatatgtacatatatactattttcctctacatatgctstgtctactgatctttattcctaagataccccgattccttctagtgttgttttgcttcaggctgaaaaacctctagtagtgcaggtctcctgggaacagatacttttttcattttgtcagttcagaaacatctttacttcaccttatttggggtggatatttttactaggtatagaatcttaggttcatactatattttctttcagctttgtaaagatgttagaaggacccctaccctagtatttaatatgtctttttacccctctgtctgcttttaaaacttgctttttatctttagttttctgcagactgactact

SEQ ID NO: 757031 - DNA, 545 bp, Homo sapiens
tttctactgggctattctctatgctaaaatgttagttctaggactctccttcaatatctaggtgagcatccacttctatcctagttaaaaaaaaagtgtggaagtttctgtgaaaacgcaatctagagacaagtaggcacatactgartacatagattctaaaacccttgaagacaatgacctggtttgcctgtcttggcctggcacttagtagatattttataatcactattattacatgtttgcatgcatgtagacataaatgtatagatgtaaatattgacatataattttaatcaaccagtcaattcagtaatctcaaatagtaaagctttgcatgtcataattaaatgacaatgtcctgcctgtagtatccataaagtaacacaaattaagtatgaactaaagtaaccaaaataattcttttgattaaacaaagaagattgagtgaagtattacttactctaaaattcattctgttctaaagtcaaggtggtttacataactacccaccattgctgaaaagaaaggaatgatattcattt

SEQ ID NO: 757032 - DNA, 545 bp, Homo sapiens
tttctactgggctattctctatgctaaaatgttagttctaggactctccttcaatatctaggtgagcatccacttctatcctagttaaaaaaaaagtgtggaagtttctgtgaaaacgcaatctagagacaagtaggcacatactgaatacatagattctaaaacccttgaagacaatgacctggtttgcctgtcttggcctggcacttagtagatattttataatcactattattacatgtttgcatgcatgtagacataaatgtatagatgtaaatattgacatataattttaatcaaccagtcaattcagtaatctcaaatagtaaagctttgcatgtcataattaaatgacaatgycctgcctgtagtatccataaagtaacacaaattaagtatgaactaaagtaaccaaaataattcttttgattaaacaaagaagattgagtgaagtattacttactctaaaattcattctgttctaaagtcaaggtggtttacataactacccaccattgctgaaaagaaaggaatgatattcattt

SEQ ID NO: 757033 - DNA, 558 bp, Homo sapiens
aaaaaatgacttttgcagctgcctggaaatgaatatcattcctttcttttcagcaatggtgggtagttatgtaaaccaccttgactttagaacagaatgaattttagagtaagtaatacttcactcaatcttcttgtttaatcaaaagaattatttggttactttagttcatacttaattgtgttactttatggatactacaggcaggacatgtcatttaattatgacatgcaaagctttactattgagattactgaatgacggtgattaaaattatatgtcaatatttacatctatacatttatgtctacatgcatgcaaacatgtaataatagtgattataaaatatctactaagtgccaggcaagacaggcaaaccaggtcatgtcttcaagggttttagaatctatgtaytcagtatgtgcctactgtctctagatgcgttttcacagaaacttccacactttttttttaactaggatagaagtggatgctcacctagatatgaaggagagtcctagaactaacattttagcatagagaatagcccagtagaaa

SEQ ID NO: 757034 - DNA, 585 bp, Homo sapiens
atacatgccattgatcactcaaggacccaataaagcatctaggcagcttcatggtcaaggactttcaaagccagaagcagggggaggtggggggaattaaaggaagatgctgcttctggctttttatgttgtttgrtagatttctcaaaaggcacttttctgtaacccagcaacaactctgcaggatcaccatctattttattctttcaatttcctgtagtctctctagattttacgtcatctgcagaacgagggaaaagcaaaattgattttaggaagggaaactgtaaaaacagttctgggctagctagtctcatctcctgctgagttcattttattaaaggaagcagtgaaaacgctagaacgtggaaagctgaaataatcttttgttcttatattgactctgggcagagaaaagcaatattgattgaagcgccattgcatatatggacctctttaataccccgaaacaaccctttccactaaggggtattattagcttgattttgtaaatggtaggctgaaactcaagccacttgatcgaggtgaaattagtgactatttggtaaagctgggatcaaattc

SEQ ID NO: 757035 - DNA, 687 bp, Homo sapiens
ttttggagacagacatacccaatccctgaaactcgacctgagttctgtttatagcagagatgtcaattctatttcgtgacatttctaattgcttttctaccatcagagaccaaactcctgaaggacacagtctacagtttgtgttatckttgtgcttttcatggaacttagaacagtgcttcagagagggattcctgtgtgtttgctgcaatgaatatctgccgtttcctagtgtcatacctgctatctagacaggttattctacatagacatttgagcaaaatataaaaagataagcagccagcattatctggtctaagtagacaacaaaatggggaataggattggatgatttggatgtacctttattgaatgtgtacattaagtcatggcctttggtagtttatatatatgtatatgtgtgtgtgtatatatatatgtgtgtgtgtatgcatatgtaagtatgtgtgtgtatacttggagagagagaaactcatttatgtcacaaaatgaccatgtggcagaaaattgtacagatgatcaaacctgaacttaggaaggttgtcatctgacaaagtgtacaatgtgtaccagctacaagcctaagtttatcagattatttttttttttagtgattagagaaaaagtataatggttttagagtcaagagacaataaatcgaaaact

SEQ ID NO: 757036 - DNA, 560 bp, Homo sapiens
ttattttgttatttttatcacctatagaatgtcaaagaaagaatgaggttctctaaagaatctatgctggaatcgtcttttgtcattgctttttaaatttactcctacagggagcctccttatactacactgcgctttgctcttttttttttttttttcctaagtcagacacatcttcaragcaacccctgtcattctcccactttgttgttggcaaagagtgccctctgattagtagcgattgcactcatggtaatattagtcattttcacagcaacagccatgccagttgggagttctaatagacattgttttgacttctaaaaaaatcatctttgtgtattacttcggtgatcaaagtttattattcatccaccagcacttgaaggatttagataagagatattgttgagttaatttgtcccttggcctaatggagcctctgaaatataagctagattctcagagtcaccatgaaagcctcacttcattaattgaagaccaatctagagagacgataagaggggagaaaaagaaatctaagctcatcttcccagtta

SEQ ID NO: 757037 - DNA, 640 bp, Homo sapiens
tttaagttggtaagccacagtcaccaccaattaaatgcttcataaaccaagtgttgctatacttttacacatactaggccaattttaatttcagagaataaattacaagtatttcaaaattattagtctctcaaatattttttcaaactttacagtgcatctttgataatacatttcctaatactgttctctgcaagcaattctgctgccttcattctgatgtcttccaaaatgttagacaaaaagagcgcaggtactttacatatctgtagmctttggccagtcatttaatcattcagagattcagtttccttccatataaattaaggacaattatttctgccctgctgtcttgtataagtacttgttagaggtactatagaggcattcaataattattgtcattattatcatcctgatttcttttatgtgctgtatcagtaggtgtgtcttcatttttatggtttaaagattttaggaccatctttttttatatccccacccagaagaaataaaatggcagaaaacaaaaatagcaaaaacaaggcacaatttttttccccctgagaatttggcaaagggcattttgcatgcacgtgtgtgtgtgtgtgtgtgtgtgtgtgtgtgtgtgtgtatttgt

SEQ ID NO: 757038 - DNA, 657 bp, Homo sapiens
tttttgtgtattgattttatatactgaaattttactgaatttgtttatcagttctaacagctttttggaggcatcttttgcatattctgtatataagattatgtcaatacacagggatagtttaacttctttcttttccatttgaatgccttttatttatttctcttgcctaactgctgtggctaggacttgcagtaatatgttcaatagtggtaaaggtaggtatccttgtcttgtctctggtctcagaggaaaagctttcaactcttcaccattgaatataatgctagctatgggtttctgtatattgccttttttgttttgaagtatattgcctctatacctaatctgttgggagttttttaaatcattaaacrgtgttgaacttgtcaaatgtgttctctgcctctatggaggtgatcctagggtttttttatctttcactttgctgatacagtatatcacctttatagataggtgtatattgaatcatacttgacattccaaagataaattttacttcatcatggtgaataacttttttggtgtgttgttgaatttgatttactagtattttattgaggatttttgcatctatattcatttggggatattgccctgtagttttcttatactgttcttatctggctttggtat

SEQ ID NO: 757039 - DNA, 627 bp, Homo sapiens
gccacttggctcgtgccacctcgggatccaattattcccattgcatttaaattttgtagttgagtgactgcggttcccactgttagatctggcatacagagaagagcaatcacagagctcttcaaggatgcagatgctgccctcacgaatctgttttgcaaagtattagtgaagggtatgtcttctggaccctcccagcttggatgagtaggtctaaagtgactaatccactccagcatcccaatcttcctaagccttttgatccytccctgtacattacaccaagggagattaggcatttccagctcacccacagtgggcgatcttttaacccatatttcagctaaccaagcaaaccaacaattagaacctttttaacttcctgagctgcaacattaaatgcataatccctgtgtagtgggccctaatcaataaattcagcctgatcaacctctatgtttcttccaacattatcccacacctttaatagccattcccctgcctgttctccagatttctgcttatataaattagaaaactcaagtagttcttttggaatgtagcacacctccttgtgggtcacactatgaacctcacctctaggggcctgcttctagttataggttg

SEQ ID NO: 757040 - DNA, 657 bp, Homo sapiens
gcgtgggtcagggagggatgttgcccccactggggatggggaagttgtttcttctggcaaaaaaaggctcatcggaatttacaaattcagtgtccccagcttcatcaggaatgctgatagaaataactatattatagattcacaaaaacctttttattcctgtcagactttcaaattcttgataagctgtttcacaaccctaggtagttgtaagctaaatagcattaaatatgcatattaaaggaaataactcaggtgaaaatcaaatagcaaattttacatcataaggtacagagaaaagtctggtgtgctagagggagattaaaaatgaatgtcaaatcaaacataaaattacaaaaatctatcatgggattgtatragaaaaccaatcgtatttaggtagggactacctatcttttaactggatcaatgagctccgggcagagcccacacttaatcctgggtttccaaaccgggagaattattatgaggttagacaatgtgatgtttttacagtacactttaaacaatttgtttgaaacagacatttctaagtgtctacactacactcttctttaaaaacccaagagtaacctgtttcaataactattttagtcagtaaatcaggtaacataatacaaaagcaagcagtttaaa

SEQ ID NO: 757041 - DNA, 566 bp, Homo sapiens
aaaagttgcttttgagataaaaaagcttgcattagacaggtaattattacattttaaatataagcattgtgaactgactgcaaaatgggtatgaggggaaagtggagggaatcttttaactgggctgagtgaattagtcaagcacagtgatgattagataatggtcacacaaaatttttattttattattgttataattttttaatttgacaaggtctcactcttgcccacgctggagtacagcgacatgatcactgctcactgtagcctcaacctcccaagctcaagcaatcctcctgcctcagcctctggagcagctgggacyacaggcatgcaaaaccacgcttggctaattttttttattttttatggagatggggtctcactgtgcccaggctggtcttgaactcctaggctcaggcgatcttctcacctcagcctccccaaaatgctgggattacacaagcccagcctggtcacacagattttgagccctgagagaaaatttgcattacagatgctcctcaatttgcagtgggtttaggtcctgattaaaccattgtaag

SEQ ID NO: 757042 - DNA, 634 bp, Homo sapiens
tatatcaaaacatctcgtataccccataaatacatatacctactatgtacccacaaaaattaaaatcaaaaattaaaaaaaaaaacaggaaattgacattggtgcaatccatagaccttactcagattttaccaattttacatacgatcgtgtgtgtgtgtatgtatgtatgtatgcatgtaggtctatgaaattttgtcatgtgtagatttgtgtaaccatcattacaagcaagatatagaactgatgcatcaccacaatgatctctttcatgttgtactcatgcacctttcccccaaaccccctactcattcttaaccctgtaaatcatttttgaaaaataactaaaaacttgttaaatttaaattatgatgaacatttatccaacattttgccacctaagcactcctattcatcstaagtgattcaagtattatccttttgttaaatgagttaccaatctacaattccaaactgttagaactatatagtgtttctgttttaccaaattaaacacttccttgctgggtcctacttgcagaccctggctgaacaacaaatgcactcagacacaggtatttagtgaaggagtgggctagggaaccaggccgcttacagaccctaaggagggtgc

SEQ ID NO: 757043 - DNA, 599 bp, Homo sapiens
tattaaagataaatcctcattgttaaatatcctcagtagaataaataatcatcttctaatttcttgagcaaagagattttgactattacattagctgctaattcttggtttatgtgaaataaaagcactgtgtgaccactattttcttggagtggccaaggaccaattagtaacctccaaatactatttattgttacatctgctttagagaagtaggtgtttattagtttttatgtatgtttatgattctctctccctcctaaggtatatcttcccagaacatagtttactgctgagcagataatagttccttttcttctctcctttttttggtttcccctcagagaattgaagctcagtctcctgcaaagacagtagtttaaaaaaaaatttwaaaaaaaaggctcagagaattgaatgaaagttatatgcactatgacttgcacaatctattgtctgttgggattacagctagagacatatagatgatgtatgaacaagtatgtttatagtaaaattctagaattatcaatactatgttgacttagttgaaaacagataaacacggaacctaaaatggaacatttgaatatcatcat

SEQ ID NO: 757044 - DNA, 575 bp, Homo sapiens
ttttttcagagatgccctgcccagagaggaggaatctagagaggcagtctggctacagtggctttgttgaacttcagagggctctgcccagttggaacttcccagcagctttgtttacactgtgagggtaaaaccgcctactcaagccttagtaatggtggacgcccctccccacaacaagctccagtggcccaggtcaacttcagacttctgtgttggcagcaagaatttcaatccagtggatcttagcttgctgggctccatggyggtgggatctgctgagctagaccacttgggtccctggcttcagactcctttccaggggagtgaacggttctgtcttgctggcattccaggcaccactggggtatgaaaaaacaaacaaacaaacaaacaaacaaactcctgcagctagcttggtttctgcccaaacggccacccagttttgtgcttgaaatccaggccctagtgacgtaggcaccagagggaatctcctggtctgcagttgtgaagactgtgggaaaagcgtagtatctgggccggagttcaccgttcctcatagcacagcccctcat

SEQ ID NO: 757045 - DNA, 623 bp, Homo sapiens
tgctcctggcaatgaagctcatctagtctacttatcttagttgcaaaaataaaacaggtctgcacagtcacaaaggagaaaaagatgtggtagacaatttaaaaataatgaataaagtttcaaaatttagcaaggatggttggtgagagaagagtattttgcagcagtaaattaactcctggcttttacgggcagtacagaatatccaactggctcatgcttaagatgtggcaatattaagaacaaagatctagtgcttggaatggtgccgggtctgtattatcactcaacmgatattttgaaggatgactattttcttttatcaaagaagagatctataaatattaatgtcctctgtcttaatggcatctgttcatccttcttgttaacagatctgtggtacatggcctggccttttccaacattagaaaccagtgactatgagtcacgaagacctggaagactggtagtttgggacctagtgcacaacccaccccaccccagccccatcaacttattttatttcctccagttcaggttgccagacccatctgtaagcacttatcataatgtgaacaaatgcacatagatgaacaatgagcactgtttgtttagagtgatga

SEQ ID NO: 757046 - DNA, 612 bp, Homo sapiens
gcaatatttaaaaatccatctgaataaaatttgaatgaaggagtcattctccccatccaaaaaggttggtggaacagtagttttatatactattaaaagtaagacatcaggttttaaaatttaagtaggaaaggaacattggccatagttgattgtgtgtgagggtttcatatcttactgcccacattgtaccaagtgtctaaatatcagataattcatcacawatcatcagtccctgttggaaattccacgatcatgtcaaacagtaagtcaaagagggatctgatcactcttccacttactttgttctccttttctttgttatctcactgaatggtaacctatttacccagatgccccaagtgaaattctaccatctctaatcagttatcaagtcttctttctatttctatttcaaacccatcttttcttctcaactgctaatgtcttcattttgttcctcaaaatttcatatctgagtaagcaaaacattcctctaattagtctccctgactccatactgtttatctttcaattaactcttcatgtgtaggtcaaattggttttttgaaaatcaaatatgatccttggtttaaacatctcccagtagct

SEQ ID NO: 757047 - DNA, 622 bp, Homo sapiens
  misc_feature 311: n = A,T,C or G
accaataaagagcccgaaaagccaaagcaatctctaagcaaaaagaacaaagctgggagcataacattacctgacttccaactaaaaggctacaacaaccaaaacagcttggtactggtacaaaagcagacacgtagaccaatggaacagaagaaagaacccagaaataaagacacatatctacacaattagatcttgacaaagttgacaaaataaggaatgggaaaggactccaaatttattaaatagtgtggtataactggctagctatatgcaaaatgaaactggacccytacctttcaccatatacnaaaatgaactcaagatggattaaagacttaaatgcacacctcaaacataaatcctggaagaaaactctggaaataaaaaccattctggacatcagccttggcaaagaatttatggctaattcctcaaagcattgcatcaaaaccaacaattgacaagtgggatctaattaaattaaagagcttctgcacagcaaaccaagtgacaacaaacagacaacctgtagaatgagagataatattcacaaactctgcatccaacaatggtctaatatccacaatctataaggaacttgaacaattcagcaagtaaa

SEQ ID NO: 757048 - DNA, 622 bp, Homo sapiens
  misc_feature 311: n = A,T,C or G
accaataaagagcccgaaaagccaaagcaatctctaagcaaaaagaacaaagctgggagcataacattacctgacttccaactaaaaggctacaacaaccaaaacagcttggtactggtacaaaagcagacacgtagaccaatggaacagaagaaagaacccagaaataaagacacatatctacacaattagatcttgacaaagttgacaaaataaggaatgggaaaggactccaaatttattaaatagtgtggtataactggctagctatatgcaaaatgaaactggacccctacctttcaccatatacnaaaatgaactcaagatggattaaagacttaaatgcacacctcaaacataaatcctggaagaaaactctggaaataaaaaccattytggacatcagccttggcaaagaatttatggctaattcctcaaagcattgcatcaaaaccaacaattgacaagtgggatctaattaaattaaagagcttctgcacagcaaaccaagtgacaacaaacagacaacctgtagaatgagagataatattcacaaactctgcatccaacaatggtctaatatccacaatctataaggaacttgaacaattcagcaagtaaa

SEQ ID NO: 757049 - DNA, 660 bp, Homo sapiens
tcatttaatttcaaagcaccttgcctcaccatcttatattatttttttatatgctatgtgttaagaaagtttgatttctgtttgctacagattcagataatctgttagtccccattaatctctaccttttgggtccaaggatgatactcctggttttcataaactccagccaagacaccacatgcttcttcaacatcacaacactttctttcagccaacaattatatattattatgcttggtattgtctatttgtgatcaggtccatttctacccctggatttgcccagaccctgatatactactttcctataacctttactctttctgccttatgaatcatcaagtcagataagatccaactaaaaagtattcatacattcaatatatattcatcttgggtttcagaaggttttggtatccstctattaattgttctgtttcaaatgaatgtccaataaacagccagtaattgacatccaaaggaaatgtaccagcagcctcaggacatcctgaggccagaaacaggctggtcttgttgaccctttctgggacctatcaaggggttcatgccaccccacagttgaagacagataccaagaaagatagccatgatgggaaccatgagaacattcagaaccagaaatgctccatatgggta

SEQ ID NO: 757050 - DNA, 496 bp, Homo sapiens
cagggaccttctacctcagtaaaatttctaggggtccagtggtttggggcctgtcaagatattccttctaaggtgaaggataagttgctgcatttggccccttctacaatcaagaaagaggcacaatgcctagtgggcctgtttggattttggaggcaacatatttgtcatttgggtgtgttattctggcccatttatcaagtgactcaaaggctgccagttttgagtggggtccagaacaggagaaggctctgcaacaggtccaggctgctgtgcaagctgctctgccacttgggccatttsacccggcagatccaatgatgcctgaggtgtcagtggcagataaagatgctgtttggagcctctggcaggcccccataggtgaatcacagcagaggcctctaggattttggagcaaggccctgccatcttctgcaaataactactctccttttgagacaaagctcttggcctgttactgggctttgatggaaac

SEQ ID NO: 757051 - DNA, 602 bp, Homo sapiens
gaggtagggtgtaagatgtgtagaatatactctgtgtgttgttttgtaacttgcatgtttttttgagtcagtttgtatgtgtttttttttactgttttaacctgaccttattagttctgctcattttttggtttttaaaattcattaatttctggttttacacttattattttattgctttttcttatgggattgttttgtttgcctgttctaatctattgaatgtaatgcttagattttctttttttwaaattaacaatgtaagtatttgaggccatatattttcttcacaggctatgtagcatattggagttttcttggtaataattttcaacctttatttcattattgtccttttaaaaagaaaaaatttaaatttatcattaataaaaaatggtatagtgaaggataaaattttgttgaatagagttgagctttggtcaaccacaaatgattttaatgtctaatatttttcacttcccaagaaccaattttcacctcttgggaggtaatatactctctgttgagaatgcatcatttaataaatacttcctaagcactttcaaatttcatttaagtctcagattagccctatgaaatag

SEQ ID NO: 757052 - DNA, 602 bp, Homo sapiens
gaggtagggtgtaagatgtgtagaatatactctgtgtgttgttttgtaacttgcatgtttttttgagtcagtttgtatgtgtttttttttactgttttaacctgaccttattagttctgctcattttttggtttttaaaattcattaatttctggttttacacttattattttattgctttttcttatgggattgttttgtttgcctgttctaatctattgaatgtaatgcttagattttctttttttaaaattaacaatgtaagtatttgaggccatatattttcttcacaggctatgtagcatattggagttttcttggtaataattttcaacctttatttcattattgtccttttaaaaagaaaaaatttaaatttatcattaataaaaaatggtatagtgaagrataaaattttgttgaatagagttgagctttggtcaaccacaaatgattttaatgtctaatatttttcacttcccaagaaccaattttcacctcttgggaggtaatatactctctgttgagaatgcatcatttaataaatacttcctaagcactttcaaatttcatttaagtctcagattagccctatgaaatag

SEQ ID NO: 757053 - DNA, 492 bp, Homo sapiens
gcatggagttaggaaggtttcttagctttccttccaggaacactttctggttactcattggcctaattcataattgtgtgttccaattttaagctataggtcgtgcttggtatcaagtcacaggacatgccctgtggtgttgaaatttgttaggaagttagatacgtggttctgtggaagtaagaaatggcatatatgagtgatacaattaatcacagacrcataggcttcctttttgagagaatttaaaagatttttaaatccacaggtactcctctttcaataaagaatcagttcaggataaagttgtagaagaatttcttcactccctgtggagcagatttagacagcctaccaggggcaaagttggcttcctgtataaaagggaaaacatttttcaaagtcttgtatttagatcttaaggattacccagttgacctaatgctaaatgacaagttaatgggtgcagcacaccagcatggcacatgtata

SEQ ID NO: 757054 - DNA, 524 bp, Homo sapiens
gaaatgcttgatttatttcaatttttttgaaagttttgagacttgttttgtgacctaacccttgatctatccttgagaataacccatgtgctgaggaaaggaatgtgtattctgcagattattgaatgaattattctatacatatctattaggtccatttctatagtgcagatgaagttcaatgtttctttgttgtttttctgtctggaaaatctgtttattgatgaaagtgagattattgaaatctccagctattattgtattggtatctctctccttagctctrataatatttgccttatatatctgggtgttccagtgttgggtgcatatatatttaaaattgtcatatcctcttgctgaaataacccctttttcattatacaatggccgttttttggtctcttcttatagtcttaaaatctattttagctgataaaagtatagctactcctgctctcttttggtttccattggcatggaatatctttttccattcctttattttcagtttatgtgtgtct

SEQ ID NO: 757055 - DNA, 612 bp, Homo sapiens
taactaatttttgtattttttgtagagaataggttttgttatgttgtccaggctggtttcaaacttctggactcaaacgacctgcctgcttcagcctcccaaagtacttggattacagacatgagccacagtgcctggcctgatttttggttcttatgaaggtgatttgtttggcgtagacagttgttggcatccttgcaggagagtgggggacactcagtggaagccttttattccaccgtcttgctctgcccccaaaagatactttgagaagtagaggtcttgcatttttatgttttattccttttcatttttattccactgtgaatgagaagtgattggctgtatgtaactcagagcaattcattatacttcattctgtttattgtatacacaaagaatatttcttctgtgggcactgccgcaaatgtctgatggttctatagatgacatttctttacattgaaaatattgkttagtggttttctgaaagagttctgtctggtcatctaaactttggctgaaaaggtaaagcatatgtacggagaattttactactaaatattgttattgtaaagatttattattctatataagaaagtaagaaactgt

SEQ ID NO: 757056 - DNA, 605 bp, Homo sapiens
acagacaacctacagagagggagaaaatattcacaatctatacatccaacaaaggactaatatccagaatctacaaggaactcaaacaaatcagcacaaataaagcaaataatcccatcaaaaagcgggctaaggacatgaatagacaattcacaaaaataagatatacaaatggccaacaaacatatgaaaaaattatcaacatcactaataatcagggaaatgcaaatcaaaaccacaatgtgataccatcttactcccgcaagaatggcccttatcaaaaaataaaagaaaaaataaatgttggcatagatgtggtgaaaagggaacacttctgcactgctggtagaaatataaagtagtacaaccactatggaaaacagtgtggagattccttaaagaactraaaggactactatttgatccagcaatcccactactggatatctgctcggaggaaaagccattatacaaaaaacatacttgcacatgcatgtttatagcagcacaattcacaattgcaacattgtggaaccagcccaaatgcccttcaatcaacaagtaaagaaactgtggtgtatatatatgtatatatatatatacat

SEQ ID NO: 757057 - DNA, 622 bp, Homo sapiens
gacatgttttggctgtgtcctcacccaaatctcattttgaattgtagttcccatactccccaggtgttgtgggagggagctggtgggaggtaattgaatcatagggttggttaccttcatgctattttcgtgatggtgagtgagttctcaggagatctcaccagatctttgcttggcacttcaccttcctgctgccatgtgcaaaaggatgtgtttgcttccccttccgctatgattgtaagtttcctgaggcctccccagccatgctaaactgtaagttaattaaacctttttattttataaattatccagtctcgggtatgtcttgattggcagcagcatgagaatggactaatgcagtgagagagaggaaattttcttggactggggcagccagcatatataggtttagtttatatctacctctgatatttgttcccttaggtatgtgaccaccattgtgagcctgagtttcctcatktaaaggtaataactacacacatgtactatatgggttagtttaaagaattatgaaaggtttgtggaatcacgtagcattgtgtgtggtacataatgacatctaataaatgactcaaatgagctagacatttcctctctttta

SEQ ID NO: 757058 - DNA, 459 bp, Homo sapiens
ttgagaatatgtaaatatcctattatgcctcacacacattattttgcttaccagttttagtatcttgcttcttgcttcaattagttataattaggatggctaccaaatgctgattttctaattccttcatttcctctatatttatgagttgcctttctactgwaaggaagaactttcccttctcatttatttatttcactatgaattcatgaattcttgttttaatcaatatgctataatcctttgctatagttatttcaatgctcaaattttctctgttttggccagtgggagcccctacaatctggctcatatccttttggcatgtcctcttgaatctttgagcatgtccacacattttgatacaatgagattttctagcctcaacttgcacttttcctctcccaatcctggaatcagacatttctccaagcaacactgattcttttttttttagac

SEQ ID NO: 757059 - DNA, 530 bp, Homo sapiens
ctcactcatacttacaaatctttgtcttagagctttagttagcaggaatcactcctcagagcctacacatttctgtaggaacaaagtaaatgtctttaatttattttatgttattttttaagacaaggtctcgctctgttgcccaggctggagtgcagtggcgtgatctccgctcactgcaacctctgcctcctgggttcaagagattctcccacctcagcctcccaagtagctcaatttacatgcatgcgccaccatgcccagctaatttttgtatttttttgtagagttagggtctccctaccattgcccaggctggtctcaaactcctgggctcaagcaatctgcccaccttggcctcccaaatttctgggattacaaaygtaagccaccgtgcctggcctgtaaatgtctttaacaaacatggagctggcaaacaaaaatgagagccatgctcaccctatcccagttcctatcctttatcatattattaattcctaaattaaccaattaatttaggaagatttggt

SEQ ID NO: 757060 - DNA, 545 bp, Homo sapiens
aggccaagctcacaaagtccaaggcaggcaaggcttaggtgttgtcacagaaatgtgcagagaacaaggagaggcacagggagagggaggatggattcgctccaaagcagggaatggttttttttttttaattggttttttgggtttgtttgttttttgtttttktttttttttttttgagatggagtttcactcttgccacccaggctggagtgcagtggcacgatcttggctcactgcaaccttctcctctcaggttcaagcaattctcctgcctcagccgcccaagtagctggaaatataggtgtctgccaccacgcccagctaatttatttgtatttttagtacagacagggtttcaccgtgttggccaggctggtctcaaactcctgacttcaggtgatccgccggccttggcctcccaaagtgctgggattacaggcacaagccacaacgcccggctgggaagtttttatagaagcggcacttaactgggtctggggaggtggatgcaactcagatgaaaatagaggctcctccaatta

SEQ ID NO: 757061 - DNA, 529 bp, Homo sapiens
ttaaggaaccacaaattttaacattattaagatccaattcatatttgcttgatattttatgattgcccttctagatccactcttcattcctttccatccttatgtgtgtcctgagagggtatcctgttgggtatattctacctcaacagactctcttgttgtataaatttcctttgcatttggatttgggtttgaagattcctggtagaaaatctgagggagggcaaaaagtaaggtagaggtatttgttcccttagctacctccatccagggttgcctaggcctgggrgcagaacctcttgcccaaatatcttatctcctatcatgtgacttcctaaactaggttcccataattgctccttctctttgccttttggaaattctactatttacagtcccagagtattgcactatttctcatggtttgtcctactctgattgcacttttataaatagtcccttcaaattacccaatttgactgcaccatctttttcccactgggaacttaattggcacagtaattgatac

SEQ ID NO: 757062 - DNA, 529 bp, Homo sapiens
ttaaggaaccacaaattttaacattattaagatccaattcatatttgcttgatattttatgattgcccttctagatccactcttcattcctttccatccttatgtgtgtcctgagagggtatcctgttgggtatattctacctcaacagactctcttgttgtataaatttcctttgcatttggatttgggtttgaagattcctggtagaaaatctgagggagggcaaaaagtaaggtagaggtatttgttcccttagctacctccatccagggttgcctaggcctgggarcagaacctcttgcccaaatatcttatctcctatcatgtgacttcctaaactaggttcccataattgctccttctctttgccttttggaaattctactatttacagtcccagagtattgcactatttctcatggtttgtcctactctgattgcacttttataaatagtcccttcaaattacccaatttgactgcaccatctttttcccactgggaacttaattggcacagtaattgatac

SEQ ID NO: 757063 - DNA, 529 bp, Homo sapiens
ttaaggaaccacaaattttaacattattaagatccaattcatatttgcttgatattttatgattgcccttctagatccactcttcattcctttccatccttatgtgtgtcctgagagggtatcctgttgggtatattctacctcaacagactctcttgttgtataaatttcctttgcatttggatttgggtttgaagattcctggtagaaaatctgagggagggcaaaaagtaaggtagaggtatttgttcccttagctacctccatccagggttgcctaggcctgggagcagaacctcttgcccaaatatcttatctcctatcatgtgacttcctaaactaggttcccataattgctccttctctttgccttttggaaattctactmtttacagtcccagagtattgcactatttctcatggtttgtcctactctgattgcacttttataaatagtcccttcaaattacccaatttgactgcaccatctttttcccactgggaacttaattggcacagtaattgatac

SEQ ID NO: 757064 - DNA, 622 bp, Homo sapiens
aaaatgaaggcataacatatcaaaacatatgggatgccacgaaactaatgcataaaggcaaatttataaatgcctatattaaaaaagaaataagagctcatatcaacagccttaccattagaagcaccttaaaacactcaagagcagctaaatctaaaacaagcaggagaaaggtaataataaaaccaaaagttgtgtatttgaaaagattaacaraaataggcaaatctttagctggtcaagaaaaagaatacagaagactaaacttactaaaatcaggcataaaagaggagacattactactgaacctagagaaacaaatgaaaggctgcatcagactgtggttaccaacttttccaaagtgaaactgaacacaactttcctattctccagcatcagtctatttgaagcacagaatgaaaaactgcttacaaagctgttactgaaagctactcagtttggtagcttttaaattgcttgaacttctgccaatgtaggacaaaaggtgccacagtctacttactcaagctgttcccatctcccactggaaagaagaacttgatgataacaaagacttggagagggccaaaattaaaatcaaaatggtaacgttgcagcaatt

SEQ ID NO: 757065 - DNA, 622 bp, Homo sapiens
aaaatgaaggcataacatatcaaaacatatgggatgccacgaaactaatgcataaaggcaaatttataaatgcctatattaaaaaagaaataagagctcatatcaacagccttaccattagaagcaccttaaaacactcaagagcagctaaatctaaaacaagcaggagaaaggtaataataaaaccaaaagttgtgtatttgaaaagattaacaaaaataggcaaatctttagctggtcaagaaaaagaatacagaagactaaacttactaaaatcaggmataaaagaggagacattactactgaacctagagaaacaaatgaaaggctgcatcagactgtggttaccaacttttccaaagtgaaactgaacacaactttcctattctccagcatcagtctatttgaagcacagaatgaaaaactgcttacaaagctgttactgaaagctactcagtttggtagcttttaaattgcttgaacttctgccaatgtaggacaaaaggtgccacagtctacttactcaagctgttcccatctcccactggaaagaagaacttgatgataacaaagacttggagagggccaaaattaaaatcaaaatggtaacgttgcagcaatt

SEQ ID NO: 757066 - DNA, 555 bp, Homo sapiens
actcatcaccccttctgagatggactatgttaattcacaggggagaataaccttctcggaaacacacatttacatttacataaagcagagtagaaaataatcatgcttctccatgagcaaatgacagttacataaggatattcttccacctttttgcgtgtcactcataaaactgctttcaaaatwaaatctgtggagaggacgcttggaaagcagtgccgtttgctacaagcactgttcaaaaccactcacaaatccgtcacctttttccttctttcaagtacactttgcttaattttagtatgtgtaatcctctcaaaaaaaaaaaatcacataaaaaactttcaccctagaaaggtttctcggaacatttcccctctgagagctttaagcgaaggttgtacattaaatggtttcataaaagatcctgaataaaggctattatctacatgtaacattcactcgcactatatctcatgatctattgacataaagcagtttattggtcaatatcactggccaaaggcagagacagaggtatgattccagccatct

SEQ ID NO: 757067 - DNA, 555 bp, Homo sapiens
actcatcaccccttctgagatggactatgttaattcacaggggagaataaccttctcggaaacacacatttacatttacataaagcagagtagaaaataatcatgcttctccatgagcaaatgacagttacataaggatattcttccacctttttgcgtgtcactcataaaactgctttcaaaataamatctgtggagaggacgcttggaaagcagtgccgtttgctacaagcactgttcaaaaccactcacaaatccgtcacctttttccttctttcaagtacactttgcttaattttagtatgtgtaatcctctcaaaaaaaaaaaatcacataaaaaactttcaccctagaaaggtttctcggaacatttcccctctgagagctttaagcgaaggttgtacattaaatggtttcataaaagatcctgaataaaggctattatctacatgtaacattcactcgcactatatctcatgatctattgacataaagcagtttattggtcaatatcactggccaaaggcagagacagaggtatgattccagccatct

SEQ ID NO: 757068 - DNA, 592 bp, Homo sapiens
tacaatattttaactctgtttacgctagatataggaatctgggttgacagttcttgtctttcagcacttgcaaaatattgtgacacttctttcttgtcttcgtggtttctgatttttaaaaaaaatcagtcatattgtttttcccctatatttaaggtgttattttaaaaaggctgttttcaatattttattcttgtctttwgttttcagaagtttaattttgatgtgtcttggtgtgtatttaagtttttccccttttgaattatcctggtttcttgaatctgtagattaatgtctcttatctgattcaaaagttttagccattatttcactgagtacactttcagctccttcttctttctcctcttattccaggcctctgataacaggaatactaaattttttattatagacccacagggacctgagaccttattcatttttctcagcctatttttttttttctccatggtcagggtgggtaaattctattgttctatctcccagtttcctgattctttccttgattccttgcattccactgttgaacccttaacttaaggtttttgtatcagttattatattttttagt

SEQ ID NO: 757069 - DNA, 670 bp, Homo sapiens
taaattgttaagaatatatagtgtttaaacatcagagtagaggaattaggtatacttctaagattatgattttaaagtaatagctggaaatagagagttctattgtttgagttcttatgatgataggaatatcacaaggaaattacttcccacartcaccataaaatttagcctgtttcataatggagaactttggggaaaattttagtctcagccaaatattttgtaagatatttgtaatagtctttgatgtgaaatgatatacaaacattgataagaatttggtggaatgtttcaattttttttcatattgaagatatcctggtaagacttttcatacttattttcttttctcctatataacaaatagcattactcattttccccatgtattatttaatctttaacaatgcactttggtatacatttgaaaaactaggacaaaatatgttcattgaataacacgaattatatctaatgtttagagaagtgtttacaagtgtgataaatttagtagaccagggtaaagaataacaagattaggttttgaactgttttgtaatagttatctggaaaagtaaagagtatttgattaataagtaactcttgtcactttatagcatacagaaaatctgaaaacatgctaaaacaaaagccgtcttctcagggg

SEQ ID NO: 757070 - DNA, 615 bp, Homo sapiens
aggtattcttggaagacatggtcttccaagtcgtattccttccaagtccctgaccatccattcagaccattggccacagcccctgaattgttgtgtaatcacatgtctggccatttctccttccaaggaaagtttacaatcaaatgtactgcttgaagttctgtccacagggaggatttctcttcaccactttgcttcaaagatatcccagagagggacagtgtactgcagctgtgcacttccagttaatacctgtatatcatgtagaaccatcgtaaacctctgtcagaatgatcatagggaactctccatggggccataggtgcagactgggagagagaaggcagtgtagctggattagggactatggcatgtgggctacctcttcctgtaacttacttgtgcctttagggcctgcttgggttcatctcatatatactatttccatttgatgayggagtgctgctgatcatgcccaactttatagcttgatgggtcagataacacactgttcatgatggccagcttaggtcacatggtaacttggtggcccatggttaagcattcagtctctactaagacccagtagcagggtaagcgctgtttctcaaaagt

SEQ ID NO: 757071 - DNA, 553 bp, Homo sapiens
cattcacaatacatgttcattaaataagcaaaaaccaacaaaaataacagcaaaacctgccctaaatcaccttccttctcatcacctctcaatgagaatcaaagtcaaggacagtttactgagtaatgctggcaataatggacattgtagtaaatcatgcatatgatgaagccaaaatccacagtttaaagtagagtggaacggatgagaaaacaacccaaaaccctgattatgttatttctgatcgctagttggtggaccttgctttaaaacacctccatcccattcactttttgtcagagaaccctatttgcttccttcatagtaatggwcacagactatcttatctttgttctttggctttgtcctctaaatccccagcatctagcatatgttcagctcttggtggacatacatacagagcctcagcacttgctgttccctctgccaggaatgcccttctcccggacaccctcccagcgggctgctttgttccttcctgcaagtcatcacccaaatggcaccatcactcaaattcttccctcacttccct

SEQ ID NO: 757072 - DNA, 601 bp, Homo sapiens
acaaactcttcccatactgtggaggcacagggttataacaactttagaaaaatgcctttaaaagggcccaatttatttgtcacattatcatggatagctgaattgttctaatagtggcctgttgagcaacttcatcctttcctgagaatgagggcaggtgtttgtttacaacgtttagaggtgggatagtttatgtgtctctccaaggcaagaggaaacatctagaaagtagaaaattcargtagattgtcatgtacaggcttgattgccttctttttcaggtcaagggagagagaggtgtgaaaagtttggaaaagccagttggatgagaaggcatgtgaaatgagcagagggcatgtggtgaagcctttttgagaactgttgtctggccagattaacttggaatttaaatttgttagagctctctgatttcaccatcagaaattacacaaaggatagagaagtaagatagcataagtaaggtagaggatagggttttcctgccttgagaagtgaatttgctgtttggtaagagagatacagactaagacaactaactgaacagaatctgttcctgaaaataattattttgaatggtaca

SEQ ID NO: 757073 - DNA, 612 bp, Homo sapiens
aaataatcttggcacagagtttgaactcaaatctgactgcagagcttaagctcttaattgcaacatcatcaacctggtaactctcaacttggtaactctgtctggtctgctatataataattctggaaaggcagggagttcaaatttagactctgctgataacttctactaaaagtacatgtgaaataaatacctgaggatctttctataggtcaaaaatggcaagaggtttcatcttayatgtcaactctaaacagcctggaatgattttcagtgcttcactgacagcaatgatcagttccaaggaaaagactgcaatgatagtgaggagtgaaagccatagtcttaccgaggctcattttaagtaacttgattctgtttctggatatcctaaacctgcgtcacatttcaataccagacagtgacttattaattagggaaatgtctctcctaaaaaaactatttgatgacatactcttagtatgtttattaagaataattttttaattgccatataaagtctttgcatctcctgtaaagccaatgcttgaaagtttgttcaacaggtgatttaatgaccattgcacaaataagcccaaggcaaattcttct

SEQ ID NO: 757074 - DNA, 628 bp, Homo sapiens
ctaaaagtctaaaacattagatttataatttaattcaacaatagaggaatttcacttattataatacctaacagctcaagtggagaatttcaaagaataccgtattaatcttcttccaagtacattcaaggaattaactctggtttataaaacacaaactaagtctcaacttctgagccatttctttctttatacagaatcttttcacagcactccagctatcaactaaytttaatttatatatgaagtaatttatgtatgagatgctttatagtaccaatttttctaagtcaaaaatttaatattaatcttttaaaactggccatgctatatatatatatatagcataatattgttaaacactccctaaaatgtagcattttattttgctatgatttttaacaagtggtgttctttcttttgattgtcatcctgttttaatctttaatcttcacttaaactttgatgggataaacaatataaaagtcaaaaaggacggcatactatccttctccaaaatggattgtaagagaaaatttctagacactccttaactcagtgtgatagtgaaatttttaagtcaaagatgtcttcgataaaacttttttaccaaaaaaaagagaaagag

SEQ ID NO: 757075 - DNA, 635 bp, Homo sapiens
gctcatcagcaactggatcctgggtctttgaatctcaaacagttaacataagaaggaaagaaatagttgaagttctagttatctgttttttaattttatcccacaaatatttattaaggctcagctttgcgacagacactgttctggatgcttatatgacagtgataagcaggacaaagttgctgctctcatgaatttcgtactttagttggtagagggcaatcaaacaaatacagaagataattacagacagacacaagtgttatcgagaaaataaaacgatgtcataagactaggaccaggaggtgacatagagcagagatgtgaaagatgagaaggaaccagctttggggcgcttgcagggaaatgtgttgcatccagtggttcagtcctgtcatcacagaaacatgctcaactagcaccatttaaagacaaacaaacctcccttgacctcwtctttttctatgctcccttttgtgaaaacttcttcagaagagtggcttgtttttccattctctcttcaatcttctccaatcgagtattcatagactcttccaaaacagctttcatttggtcaccaccaacctctatcttgtccttaaacagcagcattctgacctaactattcctgttat

SEQ ID NO: 757076 - DNA, 659 bp, Homo sapiens
actgtaagtcagtcctgacctaaaactccattaattacctgacctctataagctcctactttaactggaggaccacagtgacattttgggtcccctggaatcaacgtcagctcagagccagtgtccagtagtccccaaagtgtctgatcatttcccttttcccaatgcacagttaccctggtaaaaggccagaggtctccctggggaagaatgggagaaagattcaccacataaattgttggtaatgcagtggggtccttcctcaaggggtcctggtctccccttcattcaagggrttctgggtcagtaaactggctcaagtcggaaattaattgaggggccatgattctctatttttgtaattcaaattagtcttttgtccattcaacctagaaattttctgtttgtataatttaagtaggaatgcagtagtcttcctatcaatttcacttctagaaacactacgattagttatccagtgccagagctctacatgagtcagactattctgattgccactttgcctctgctgtccattatggtagctactcccaccttgcctttgattgttgagtgctgccacttggctcctgccacctcacgatccaactgttaccattgtatttaaattttgtagttgagtggctgtggatcctact

SEQ ID NO: 757077 - DNA, 659 bp, Homo sapiens
actgtaagtcagtcctgacctaaaactccattaattacctgacctctataagctcctactttaactggaggaccacagtgacattttgggtcccctggaatcaacgtcagctcagagccagtgtccagtagtccccaaagtgtctgatcatttcccttttcccaatgcacagttaccctggtaaaaggccagaggtctccctggggaagaatgggagaaagattcaccacataaattgttggtaatgcagtggggtccttcctcaaggggtcctggtctccccttcattcaagggattctgggtcagtaaactggctcaagtcggaaattaattgaggggccatgattctctatttttgtaattcaaattagtcttttgtccattcaacctagaaattttctgtttgtataatttaagtaggaatgcagtagtcttcctatcaatttcacttctagaaacactacgattagttatccagtgccagagctctacatgagtcagaytattctgattgccactttgcctctgctgtccattatggtagctactcccaccttgcctttgattgttgagtgctgccacttggctcctgccacctcacgatccaactgttaccattgtatttaaattttgtagttgagtggctgtggatcctact

SEQ ID NO: 757078 - DNA, 632 bp, Homo sapiens
cagcccaggtagaggttggcatgcttcgatatggatccaaaagaatccggaagcaccggacaatgagaatgcccaagaaaataaacaacagaatcacaaaaacaaatgtcattttctgctccagggacatgctagaatctgctgatwcgttcccaaggggcactagggatgaggggatgggctgtcctccatccatggtccagggaagccagagcacaggatatcctggttttcttttcttccatcatcaatctgcggaggtcatggtggctgcactctggagaggctgagttatctgcagggaaaaaggaagggaaaggaatacctataaaatagcagccttatttttttaggttcacagtcatatttttcagagagaaaaagaaatctgtaaaccagctttctttttcaccagagatgctcaattctgtataattatcgggaaagatattttactcttgcatgaaattaccagattgttctcagaagagccacctggggccaggagggatgggcagggaatacgactataatatagaagatgagaaatgtgcacagtaatattgacctcagggtgtactgtcaacttgacatctgaacccagcctcccctgccaagtctcctcctgctct

SEQ ID NO: 757079 - DNA, 625 bp, Homo sapiens
catgaaacttttgtagcttaaatacacaagaattttttgaaaaggaaataagataatgatgcaaaatagttaattttttaaaaaaatgttagacactgcagtggatgcaacaaaatactttatatgaaagatttatccagttaacttttgtggagtattaggtattagactaataattagcacacttacttaagttagaaagtataataatgcgccggacgcggtagctcacgcctgtaatcccagcactttgggaggccaaggtgggcggatcacaaggtcaggagatcgagaccatcctggctaacacggtgaaaccccatctctactgaaaatacaaaaaatttgccgggcgtgatggygggcacctgtagtcccagctactcgggaggctgaggcaggaggatggtgtgaaccccggaggcagagcttgcagtgagtcaagatcgtgccactgcactccaacctgggcgacagaatgagactccatctcaaacaaaaaaacaaaacaaaacaaaaaaaagtgtaataataatttatcattagctggatgatatgctgttgtttcccatgtcacctgtataagatatgtaaaataagaacacattatttacatctaatatag

SEQ ID NO: 757080 - DNA, 598 bp, Homo sapiens
tttattttgtttttggttaggctggtcttacattgcaacttacagatctggcagctcagcaggaaggaaatctgctaatccgtagtcattggaagtatttccctgtttctcaccagcctatcctaatagttcatggaaaatggtgcagccatctttcttaaatacatcatttagctaaatgacttaggcaccatcattccttaacttagtaaacactgaacactaaagattgaagaaatatacaactctatggaattgacataaagacttgcatgcaaaagcttcattgttggccaggcacagtgactcacacctgtaatcttagcactttgggtggccgaggcgggaggatcgcctgagagcaggagttcagcaccaggctgggcaatatagcaagacatcgtctctactaaaaaaataaaaaattagccaagtatgatggtgtgcacctatagtcccyagctactcaggaggctggtaggatcacttgagtccagaagttcaagcttgcaataagctatgatcatgccactgcactccagcctaggtgatagagcaagaccctgtctcaaaaaaaaaaaaaaatatatatatatat

SEQ ID NO: 757081 - DNA, 568 bp, Homo sapiens
tgcagtctcggctcactgcaacctttgcctcccagagtcaagaaattctcttgcctcagcctcccaagtagttgggattacaggcgcccaccaccacgcttggctaattttttgtatttttagtagagacggggtttcaccatgttggccaggctggtcttgaactcctgacctcaggtgatctgcccacctcagcctcagcctcccaaagtgctggattayaggcatgagccaccatgcccggccttgttttttatttatttatttctttgagatgaagtcttgctctgtcacccagactggagtgcagtggtgcaatctcggctcactgaaatctccacctcccgggttcaagcgattctcctgcctcagcctcccaagtagctggtattacaggcacacaccaccatacctggctaatttttgtatttttagtagagacgggtttcaccatattggccaggctggtcttgaactcccgacctcgtgatccgcccgccttggcctcccaaagtgctaggattacaggcacctttttaaaattattatattgagacagggtgtcact

SEQ ID NO: 757082 - DNA, 577 bp, Homo sapiens
tttagtaaaatgaggccctttaaataatattttgcaattatcttttcaggaacagagtcctttgcatgaaaaaaaaaatctaagaagtaaaatttaaccagaatcttcacttgttaaaactgataagtttatagctgctctgatcctcasgttgcaggtgggatagggcagcaggtgcaaagaaaggaggatgacttcagtcccaaaccattctactcacccacagtctcccacttcaaactgagccaaggttaaggcactcttttcacttccggcacacataggaactgataatgtttgtgtagctcacctaggcagatggatgggctgatggcaggactgggtgaaagtgaatgacttgggggtttagcttagacttggcggggggtctaaggtcacttcaaagctgagggaatgatgaattgggtacacctaggtcaatctgtagcatgctagttggaaatcagctcttccttaagacacaaacatagaacaaaagactcctaagagcagttcaaaaaccactagttggtccctgagccctctttgggctcagagaatggccaggtaaacaaca

SEQ ID NO: 757083 - DNA, 577 bp, Homo sapiens
tttagtaaaatgaggccctttaaataatattttgcaattatcttttcaggaacagagtcctttgcatgaaaaaaaaaatctaagaagtaaaatttaaccagaatcttcacttgttaaaactgataagtttatagctgctctgatcctcaggttgcaggtgggatagggcagcaggtgcaaagaaaggaggatgacttcagtcccaaaccattctactcacccacagtctcccacttcaaactgagccaaggttaaggcactcttttcacttccggcacacatagraactgataatgtttgtgtagctcacctaggcagatggatgggctgatggcaggactgggtgaaagtgaatgacttgggggtttagcttagacttggcggggggtctaaggtcacttcaaagctgagggaatgatgaattgggtacacctaggtcaatctgtagcatgctagttggaaatcagctcttccttaagacacaaacatagaacaaaagactcctaagagcagttcaaaaaccactagttggtccctgagccctctttgggctcagagaatggccaggtaaacaaca

SEQ ID NO: 757084 - DNA, 575 bp, Homo sapiens
tcttctgaagaattttctgtccattattataaaatgttcttctttatctctgataatgctttttgtctttaagccatttttttctgatgttagtatagccttgcagctttttatgcctactgtttgcatgacatttatcctcttagttttaacttatatatgttgttatacttaaagtagatttctttttttttttgagatggagtcttgctcttgtcacccaggctggagtgcagtggtgccatctcggctcatggcaacctccatctctggggttcaagcrattctcctgcctcagcctcctgagtagctgggattacagatgcccgccaccaggcctggctaatttttgtatttttagtagagatggggtttcaccatgttggccaggctggtctcgaactcctggcctcaggtgattcacccgcctcggcatccaaagtgctgggattacaggcatgagccaccatgcccggccagatttcttgtacacagcttatcttataactgggtcttctattaaatccaatctaaccatcactatcttttaattgaaatgtttagttaattgaaat

SEQ ID NO: 757085 - DNA, 629 bp, Homo sapiens
tactgggcactcattctattccttatcatgttgtgtttgaattcagttattctttcttgtgctctttgacattgtgctgggattttggccttccccatatatcactttgaattttagcaaatacaatgccttatattttaaaaattgctttwaagaaccatatttagacctaagtagatagagttctctttaaaaaaaaagaaaaaaaatacccttgggtcattcagcctagcagaaagagaaaaacagttatacctgttaacttgttttcattcttgtactagcaagaaagaatgagagtaagattggtgtcccttccaactttcttccctagagatgattttctggggggccctattgaagaactgaaaaagtctgaaagctgaaccagaagtgatgcaaaattagccttgaataagtcttatacttaagcccacctattattgaaaatatgaaacttaaagcaaaatattaaaatacaaattaatttcaaaatttcaaattaattgtattcagttccttagtctaaaaccaacataaaaccataattacatattaatgaggtgaatggattttaaactacaacaaagaatattatatttacaagcagataaacctatttgagatga

SEQ ID NO: 757086 - DNA, 616 bp, Homo sapiens
aaatacgctcagcgaatcgatgagatgcactgaaaactgcaatgcctgcagctggcattggtcaacagaaagggcccaattcttctccacgacaatgctcgtggagcacacattccacattccacgacacattccacaaccaacacctcaaaaattgaacaaattgggctaccaagttttgccttatccaccatattcaccggacctctygccaaccagctaccacttcttcaagcatctcgacaactttttgcagggaaaacacttccataaccagcaggatgcagaaaatgcttttcaagagttcatcaaattccgaagccgggatttttacaccacagggataaacaaacttatttatcattggcaaaaatgtgttgattctaatggttcctgttttgattaataaagatgtgtttgagcctagttacaatgatttaacattcatggtctgaaagtgcaatcacttttgcacggacctaatataaaattagaggaaggaaatcaagtctctaaaatattaagtaattgcccattgtcccacagctggtagtgggatgaaagcaatgggtgagatgggatggggtgcatgatccatatccagtactgcaatcca

SEQ ID NO: 757087 - DNA, 616 bp, Homo sapiens
aaatacgctcagcgaatcgatgagatgcactgaaaactgcaatgcctgcagctggcattggtcaacagaaagggcccaattcttctccacgacaatgctcgtggagcacacattccacattccacgacacattccacaaccaacacctcaaaaattgaacaaattgggctaccaagttttgccttatccaccatattcaccggacctctcgccaaccagctaccacttcttcaagcatctcgacaactttttgcagggaaaacacttccataaccagcaggatgcagaaaatgcttttcaagagttcatcaaatyccgaagccgggatttttacaccacagggataaacaaacttatttatcattggcaaaaatgtgttgattctaatggttcctgttttgattaataaagatgtgtttgagcctagttacaatgatttaacattcatggtctgaaagtgcaatcacttttgcacggacctaatataaaattagaggaaggaaatcaagtctctaaaatattaagtaattgcccattgtcccacagctggtagtgggatgaaagcaatgggtgagatgggatggggtgcatgatccatatccagtactgcaatcca

SEQ ID NO: 757088 - DNA, 581 bp, Homo sapiens
tctagaaggccctagtgtgtgttgttcccctcaatgtgaccatgtgttctcattatttagctaccacttataaatgagaacatgtagcatttgattttctgttcttgcattagtttgctaaggataatggcctccagctccatccatgtccctgcaaaggatgtaacgtttttcttttttatagctgcatagtattccagagtatatatgtaccacttttttaaaaaatttagggccaggcgcggtggctcaagcctgtaatcccagcactttgggaggccgagatgggcagatcacgaggtcaggagatsgagaccatcctggctaacacggtgaaaccccgtctctactaaaaatacaaaaaaattagttgggcatagtggcgggcgcctgtagtcctagctactcaggaggctgaggcaggagaatggcatgaacctgggaggcggagcttgcagtgagccgagatcacgccactgcactccagcctgagcaacagagcgagactccatctcaaaaaaaaaaaaaaaatttagtctatcactgatgggcatttaggttgatttcatgtctttgctatt

SEQ ID NO: 757089 - DNA, 613 bp, Homo sapiens
cctctttagtttcctgtaaattcctttacactgactattttgtaaatataggaattaagcttttagtatactttccaaaaactgtgaaagtttcttcagaaacttttccattcaaagtccagagtaatactttttatgtgtttgtttattttcctttaattgacaaataaaaattatatatatttgtrgtggatcacatgatgtttcgatataggtatacattgtagaatgactaaatcaagctaacatatcaattacctcaatacttattttttgtgtctgatgaaaacatttaaaatatactttcttagaaattgtcacacatatagtatgtttttatttcactgtaatcaccatgttgcataatagatctcctgaacttatttcttttgtaattggaattttacttttcatttacaaataataattgtatgtatttgggggtgtatagtgatgttgtgaaacatataacatatagtgatcagaccagggtaattagcatatctatcatctgaaacatatatcattttttttgtgtgttgaggacattcaatatccttcttctagctatttgaaactatatattaattattgttaactatagtcatccttt

SEQ ID NO: 757090 - DNA, 629 bp, Homo sapiens
ttatagcctcaggaaattctgactaaaatggcagatttggagacagtggtagaggggacaatagcagacaaggaatttatttatttgtttgtttattttttagagacagggtcgtgctctgtcacccaggctaaagtgcagtggtgccatcctagctcactgcagccttgaattcctgggttcatgtgrtcctctcacctcaccctcctgagtaggctgggactgcaggtgtgtgccaccatgcccagcttcaggcaaagaatttaaacaaatatttggaagatgatggaacacagaggagcaataattaaattagtagagcaaagtaagctgcaacctaaatgcctgcagaagggaataccaagagaagcaaatagaattgtttcaggactctggtaaacagttaaagtaaggagcaagacaagactgctggaaacagagggaaactctgaaaaatctatactcagagtaggtagactctcctacaaatgccttcttatctcccaccacaaactagatgtttagtctctggatatactgaattagagaagctctgggataggagacaccagctcagcagatggtgatgggggagggttaacttcagatactgaaggtgacaccctgag

SEQ ID NO: 757091 - DNA, 629 bp, Homo sapiens
ttatagcctcaggaaattctgactaaaatggcagatttggagacagtggtagaggggacaatagcagacaaggaatttatttatttgtttgtttattttttagagacagggtcgtgctctgtcacccaggctaaagtgcagtggtgccatcctagctcactgcagccttgaattcctgggttcatgtggtcctctcacctcaccctcctgagtaggctgggactgcaggtgtgtgccaccatgcccagcttcaggcaaagaatttaaacaaatatttggaagatgatggaacacagaggagcaataattaaattagtagagcaaagtaagctgcaacctaaatgcctgcagaagggaataccaagagaagcaaatagaattgtttcaggactctggtaaacagttaaartaaggagcaagacaagactgctggaaacagagggaaactctgaaaaatctatactcagagtaggtagactctcctacaaatgccttcttatctcccaccacaaactagatgtttagtctctggatatactgaattagagaagctctgggataggagacaccagctcagcagatggtgatgggggagggttaacttcagatactgaaggtgacaccctgag

SEQ ID NO: 757092 - DNA, 498 bp, Homo sapiens
gtattccaaaaggtaaagggaatccgccctaaatcatcctatacagctgggattaccaaaataccaaaaccaggaaaggacataacaagaacaaacagacaaaaacaaaactactgaacaatatccttgatgaatatacaggcaaaaatcctcaacaaaattctagctaaccgaatccaacagcatatcaaaaagataatccaccatgatcaagtaggtttcatacgagggacacagggatggcttaacatccgcaagtcaataaatgtgatacaccacataaatagaattaaaaacaaaaatcacacgatcatctcaatagatgcagaaaaagcatttgacaaaatccagcatcgctttaygattaaaaccctcagcaaaatcagcatagaagggacataccttaagataataaaatccatctatgacaaacccacagccaacattatactgaaccaggaaaagttaaaagcattccccctgagaactggaacaaga

SEQ ID NO: 757093 - DNA, 619 bp, Homo sapiens
ttaaataattatttatgcataattttaaaaggaaataatctaaaattaaaatacaaaagcattctaggatagtaacagggaggaagagagtaagtgtgctacagatcttatctaggggaggaatagatatactacaaaattctaagacattgttagaaaagagtattgaaattcggtaagagaaaaggttttggatgtattcaaactgtaatttttattctttatacaagtagatgtccatgaatggaaaagaaatccaatttatatgcctttaaattcaatatgaatttgcttttcttcaaatatactcatatttgtagatctgtattgatatggaaacatcattcaccattataccattcctggagctgctgaaccctctttaaaacaaattggacaaaaatgattatagttagccttgaacattctatatcgcacagaaccaaataatgaaatkgggtatacaaaactgtgattcaaaaagcttaagtattaattcttggaaaattacttctcccaaaattcagatgaccacaaaatctttactgtaggcacattatacaaagtggtccacatataagaatcttaaaattttctgttgcttatgtttcaattaaaa

SEQ ID NO: 757094 - DNA, 644 bp, Homo sapiens
attttaatgcctgacacacaaaaagtcttgaataagttctgattaattgagcacaatttaagttaattttaacacccctatttgttgagatgtaataacagcctactgagaggtccagcatgctgagaggaaagagtcaaaaatttgttcatgtatgtgatcacttatttgttcagtaatgttgatcaataatgttgactgggataagcagcactggctccaactgcaggtcaaacagcagaattggccccaactgggaggcggagtgaatsattgctgttagaggacaagcaaagggaacattcagaaggaaagaatgaaaacaacacagaaagacccagaaagaaccagggaaatacagagtactctaatcacttctgaggctcagaggggacaaatgacctgtcccatgtcatgtagccctcttcttggcagagccaagagtagagagcagattctataatcctcagtctaaactcttgacattacatattgcattgcttctccaagtggggcaggaaggggtggtaatgcaaactgcgatttcgggaagtggttaaaaaaaataccttaaaatgtggttatcctttacctagtagttctaaaggagtccatgtttgggatccaagaaattcccctgccaa

SEQ ID NO: 757095 - DNA, 592 bp, Homo sapiens
aattaatcatatcaattctaaattacagtttagttaacattttttaacctgttcttcagttattacactgtatttttagtccaaaaaaagatgaaaggatttatcaggatgttttgaggggatagatttttaaataggtcattttgaagatacttttgagtagacatagtcattacatagtcattaaaaaaccagagctttacatatttttataaaataatttttaaattctaaaagtaataaatgaccttagggaagatttggaaaatacaaacaagtatgaagaagaaaaaaaaaagtccccscaatcccactgtgcaaatcaaccactcttttttttttttccaagccaaactgtatccagctttattaaagatactttccataaacagtcgtggtatttcaggcagaacatgggcagacagtcattaacagtacacaacaactttcaaacttaactaccttcttcaatggactaccgaaaatcagaaagccactataaaacccaatgaagtcttcatctgatgctctgaacaggcaaagtttagagtgagggttgacatgtcacatttagcatgttgtttaacaactt

SEQ ID NO: 757096 - DNA, 616 bp, Homo sapiens
aaatctgatgtattgaggtggtatgtcacttcctgaaaattttctaaaggttattctatgtttagcccattattagagttagacatattttatggctttatcagatcttctgttaaattcccaggacacagaatattagttgaaagtcttaacactatactggtcttcattaattggtgctcaatgtacccgacatakcatcatcagtgatatatttttaatgaaatgacaaatggttatattttcataagaaacaatcaagaagaaaaaatattttattaaaatagtttaatttaagtacataattcatcattcgcttaaggacggttaagagtatagactgagatcagtcaaacctgaactttagtacaacctttgctacttcacgatttggtgttgaacaagatatcctacttctcttttctaagttttctcatattgtaaattggaataatagtactacttacatcaaatgattttaataaagactaagtgagatatttcaacgggtgctatgcacagttcctaatacaaaattaatgaacaataaatacaagtagtttcatgaaagttaatattataagtaccgttacgcatcatttaatgatggaaatat

SEQ ID NO: 757097 - DNA, 616 bp, Homo sapiens
aaatctgatgtattgaggtggtatgtcacttcctgaaaattttctaaaggttattctatgtttagcccattattagagttagacatattttatggctttatcagatcttctgttaaattcccaggacacagaatattagttgaaagtcttaacactatactggtcttcattaattggtgctcaatgtacccgacatatcatcatcagtgatatatttttaatgaaatgacaaatggttatattttcataagaaacaatcaagaagaaaaaatattttattaaaatagtttaatttaagtacataattcatcattcgcttaaggacggttaagagtatagactgagatcagtcaaacctgaactttagtacaacctttgctacttcacgatttggtgttgaacaagatatcctacttctcttttctaagttttctcatrttgtaaattggaataatagtactacttacatcaaatgattttaataaagactaagtgagatatttcaacgggtgctatgcacagttcctaatacaaaattaatgaacaataaatacaagtagtttcatgaaagttaatattataagtaccgttacgcatcatttaatgatggaaatat

SEQ ID NO: 757098 - DNA, 618 bp, Homo sapiens
ttaagtcgactcatttctggctacgataacattttaacattggtcccagttcctgagcctaggaaagaatagcaggtctttgtgccttaatgaatatcatgcctagagctgactactaatgcaaatctattattagaggttgaagtgagccaattgatatgatcttagtgatcagaaaataattgtggaattagtgtcaaaaaatgtgtgtgtgtgactttaatatttatgtctgaacttgtatccaaggcattgatagaaacccgtgaaaggtaactgatacagtcaacgtctttccctttcaagcccccatcgttttccttaccagatactctcctttctcctgagcttctatcctgtgaaaartcctatttaagggtacctattataattctgcccaaagtatctgcagataagactttatgcccctaatattagagacactggactctaggaagccttttcctagaaggcaaagtggtgagtttggtgttgtgaaccagcaaatgaagagtcaggaggtcggcctggacccctataaatcagatggcagaggccatctcatgagatgggccttgccccttggaactctttttaagtcaaatatctaaatatttg

SEQ ID NO: 757099 - DNA, 587 bp, Homo sapiens
agatgggccttgccccttggaactctttttaagtcaaatatctaaatatttgcatgccttcccaagttacttctgttaatttttacatttttacaaaaagaaaattagccaaaacaatactaaaaatagccactggcctattggcctacataagtgataattggtggtatttatgtgggaaaaagagaccctttctaccctttattcctaacagaaagaaattaatttgcaagctctatacaaaagcaaatacctattaaggagagaaaagcaagaaggtaatatatcacttggcacatattttgcttaattatkatatgcttttttctttctgtatctgtctcattttagtgaagaaaacaatttggtggtagcttgctttgaaataggtcccacagctttttgttgttttcttccaactcccctttgcttcagttagtttcactcagcagcttattatcacttaaactatcttctggtcaactatttatcgttattaaccttgcttttccagagttatattgtccagtatgatggagcaggtacatctgtgaatgtgttgaaccacagtttccaaagcctttcta

SEQ ID NO: 757100 - DNA, 625 bp, Homo sapiens
aagtgtttttcatagcaatgcaagaacagcctgatacgtgtgtgttctgcttttatttcccacacccagtgacttaattactcaaagctcaactcaaacagcacatatccctaggtgccttcattgatccactctaagcaaaagtcatccctcctgtacgggtacattccatgacagtttaagatctggatctatagcactgaatgtcttataatattttggtagagtttagtgtgagtcttttaatctcctgacctcttccactccattygaactccaggagtgaaatggactgattgatcaagtcttgtagatctttcttatttgccatactggcacctaatccactgcttgataggtgacacacagatgatgctgaaggcttgtttgttgtattataatggattgaaataaatgtttcagttaccatatgccttttcaaaagggcttagatcttattaaaaataaggcagtaaattttctacataatctaacttaaacatgtttccaataaaaatccactgcattgagagggctatatttatttgacagatatattctaatgaactagatgcacagttaacaacaataaaaacaaatattctctaagcttcttggtgtactg

SEQ ID NO: 757101 - DNA, 646 bp, Homo sapiens
gttctctttgaattctcacattaagttacattaattaggtaaatatgacataacttacaaatgtgttctctggacctaaattgaaaagcttctttaattggcatttcctataggaattgccatttttctataggaaagcagctaaattgcagcactccactccccatcattcaagtttaatgatgaattaaagtcatgaatataaaatattcttttttttaaaaaatgaggattgcatgcttttgtttctacatatttatttcctttctagatgactcttatatttaatattatactcttgtaaccaattctaccaacaatacattagaaaatctagaaacagaaacaaattattctagggagtattatcaggcccatgttttacactaactttaaagtgcaatcatataattcctttagcatgatgatcacaatcctagtgacagaggctatggtttggggggtctccaacactgctcakatggggagaggacatttccagtttcatgtacatggagaagtccaccagttaaaatacttgaagccaaacacaccattctcatttaatgatctgaattttgccacgaatttactatactaaaacaaagaggaaaaatgtttttaaggataactcattttttacaga

SEQ ID NO: 757102 - DNA, 542 bp, Homo sapiens
gtccctggagatttcacagagcttccttcacatctctccctaagaagagaagcctgagaaaacagatgggtcttcctctgtgactctgagatcagcagcccagcctctggcaactaatcaaggggaagaattccagggccaatggcccttctgaaaaaaatattctgcttcctttttcccagaactcaaagtgaaactcgaatttatcgagttggttatcttgtatctcaacaaatcastaaatgtttccccagatttagtacaaaagaagaaaagaaaaagatagacaaagatgggagagtgcacatacacttaggtaatacggtcactctcaggagaagccaaatagctcataagattatgttgcaattatgaactgaagtaaaataagaataaaatgaagcaaattagccttgattgatatcaacaaaagtgaaggtactaaactttataagaatgaatagtcagtaccacagttgggggcttaagtatatgaagtatacaatatgatggaatattatgcaaaatattttctcagctta

SEQ ID NO: 757103 - DNA, 518 bp, Homo sapiens; identical to SEQ ID NO: 740912

SEQ ID NO: 757104 - DNA, 594 bp, Homo sapiens
ttttccattggttagtctccaatggcctaccccacttccattttctgtccttctccatgatgatgggccccaaaagaggaactcccatggactgcatctgcaggctcccttgttagattggatttatccattggaaagcaaaggagattgaagaaaggcagaagagaaagtatgatgtgctaggcagaaaatgccttcccaaagatgtccatgttctaatccccagaacctgtaatatattaccttatatgacaaaagagattgcacagatgtgattaaagaacttcaaatggggagattgtctgggattatctgagtgggcccaatgtcatcagaagggttctcataagaggaaggcaaaagggtcatggttagacaaagggatcagaagatgctacactgctggatttgaaggtggaaaaagggaccatgggtcaaggaatgcaggyggctcctagaaagtggaaaagtgaaggaaatagattctctccccagaacttccagaaggaatgcagccttgccaacaccttgattttagcctagtgaaatctattttgcatttatgatctccagaactacaatataataaatttt

SEQ ID NO: 757105 - DNA, 599 bp, Homo sapiens
cggcgcgggttccgggtgggtgcaggcttggctggcccgccgacgcctgctgggcttgatctggggatgagctccctctgggctgccggagtgcccagggtagatgctgcaaagttctaaagggagtgctactgagaggtgaggccggctgggcttctggctccggtggtgacttggagaacttttctgtctacctaaaggattgtaaacacaccaatcagcactctgtagccagctaaaggtttgtaaatgcaccaatgagcaccctgtccaaatggaccaatcagctctctgtaaaatggaccaatcagctctctgtaaaatggaccaatcagttctccgtaaaatggaccagtcagcaggatgtgggtggggtcagataagggaataaaagcaggctgcgggagccagcggtggcaaccygttagggtctgcttttgtcctgtgggagctttccttgtttggttttcgtagtaaatcttactgctgctcagtgtttgtgtctgtgctgcgtttgtgagctgcaacgctcacggtaaaggtctacagcttcactcccgaagccagcgagactgtaaatccactgggaggggcaaaga

SEQ ID NO: 757106 - DNA, 605 bp, Homo sapiens
cagggtaacaggagtcagcagagggctttccaaggacaggtttgccaagaagcgagaacagactgaggggggaacgatagaggcactgggtgtagtcagacaccactgcaatggtaggcgaaaaccgcgccgtgagaagactctgtggggagggtaactaggtgcatgagagtgagaggagcgaaaaaagcctcggatggctccgaagctcctggcccagcttccaggggttggtggcccaggaccgcccctgcacgcggcctcgggtgcctgctccaggcagacctgcttctctggcccattctcggcaccaatcactgtcccatccgcccgtcagccragtcctctgagttcttcccggagcccagcaccctgatgcaattgtccctgctctgaaaaccctcagcaatctattgggtcttcagtagcatctactctttctagaaatgtcgaacaaggtttttcgattgtgctgcacgtgtggcagacacagaaacggaaacgaccttccagagaactggccaaaggacgggagctgctccagtaactgaagggcacagactgagcgcttctgatggagtcggggaggtcgccggcccatccac

SEQ ID NO: 757107 - DNA, 579 bp, Homo sapiens
gctgctggccctgagccaagagggatcccggagcctccagcctctgctgcccaggtggggtgctggccctgagctgaggggttcctggagtgcccggcctctgctgcccgggcagggtgctggccctgagctgagaggggtcctggagcccctggcctctgctgcccaggtggggtgctggccctgagctgaggggttcctggagtgcccggcctctgctgcccggcacaggggtgctcagcgctrtctccagcttgagaaccaggctcagcactgctgctcttggctgccgagctgccgtgagagcatctgggtattttcagaggatttttaatgaaagaattatttttcatcaatttaatacagatattaagctatgcgagaaataggacttctccttttttttccgtttcagctggtactcctggttaatcaacagcttcgtcaacggtgagtccatgtgcttccctgcttcagtactagtgtttccagcaggcagcgatttaattgttcttgcattgaaacccagtgtggcaagcccccctgtgatttgaggctaatccctccccaccctgttct

SEQ ID NO: 757108 - DNA, 580 bp, Homo sapiens
gacttacattacctgatttaaaaatgtattacaaaaggaccataatgaagatagtgccattttaatctcctcaggctgccacaacaaaatacaccagatttgggggcttaacagcagacatttgtttctcacagttctggagactggaaatccaacatcaaggcagctgattcagttcctggtgaggcctctcttcctggcttgcagatggccgccttcttaytctatcttcacatggcagaaagtaaaatggagagagcttcctcttcttataaggccacagtcctcctgggttatgaccccacccttacaatttaatttaacctaatcacctcctaaagtccctatctccagataaagtcaccttgcgggggttatggctttaacctatgaatttgggggtaaacaattcagtccacagcaagtgtggtattagcatcaaaatggattaacagatcataaaacagggagcccagaaataaacccacacacatacatacaactgacttttcaacaaaggtgcaaaagcaactcagcagaacactgaacaactggctcttcggaggtaaagtggtgaact

SEQ ID NO: 757109 - DNA, 524 bp, Homo sapiens
tccaaaacctctcacaacggaaccattgttcctcctccatctaccgacaaggccaagatagcgatggtagaagttaaagacttaaaacaaactttggcaactgagacaggataccaagatataaatgcctgggtggaatgtatcaaatattccatccacacattaaacaaaagcaattgttatgcttgtgcacatagcaggccagaggcccagattgtcccctttccactaaggtggtcctccagtcgactsggcatgggctgcatggtagctgttttccaggattctacagcctggggtaacaagtcgtgccaagctctctctctactatatcccgaagtctgacaccctgtgggtcgcccccaagggccattcagcttccatctcccaacaccaagttcacttcgtgtgtctcacaacaggaaggaaacttagcattccttggagacctggagggatgaagtaagcttaagaatttttaagagcttaccagtcagcccttgttcatccctgagtggatgtgt

SEQ ID NO: 757110 - DNA, 584 bp, Homo sapiens
agtccagttggctatccctttcaccttggcattttatcaaccagaggaaggaaaaataagacatcataaagcgagagaagccccttatgggtctttcgactctcacgtctatttagatgcagttggagtcccacagggaataygagatcaatttaaagcccgaaatcaaatagctgcaggatttgagtcaatattttggtgggtgacaattaataaaaatgcagattggttaaacgacatctattacaaccaacagtgatgtattaactacactagagatgctgttaaaggaatagctgagcaattaggggctattagccagatggcttgggaaaataggatagccttagacatgatattagcagaaagaagatgagtttgcgttatgattaaaactcaatgttgcaccttcatcccaaacaacgccacccctaatggaagtataacaaaggcattgtgaggtctgactgctctatccaatgagttagccagcaactcacgggtaaatgatccctttacaggatggctagaaaagtggttcggtaaatggaaaggaataatagccccaattcttacctccctca

SEQ ID NO: 757111 - DNA, 584 bp, Homo sapiens
agtccagttggctatccctttcaccttggcattttatcaaccagaggaaggaaaaataagacatcataaagcgagagaagccccttatgggtctttcgactctcacgtctatttagatgcagttggagtcccacagggaatacgagatcaatttaaagcccgaaatcaaatagctgcaggatttgagtcaatattttggtgggtgacaattaataaaaatgyagattggttaaacgacatctattacaaccaacagtgatgtattaactacactagagatgctgttaaaggaatagctgagcaattaggggctattagccagatggcttgggaaaataggatagccttagacatgatattagcagaaagaagatgagtttgcgttatgattaaaactcaatgttgcaccttcatcccaaacaacgccacccctaatggaagtataacaaaggcattgtgaggtctgactgctctatccaatgagttagccagcaactcacgggtaaatgatccctttacaggatggctagaaaagtggttcggtaaatggaaaggaataatagccccaattcttacctccctca

SEQ ID NO: 757112 - DNA, 572 bp, Homo sapiens
acttttcagagaaattcccagatggatctgttgggctttgcccttcccaaagcaaagggagcacctctaggaggggttagggagccagttgggggtggatcaggcaaagtcttgcattatacctcagatccttgctcattcatacctctggactccgctgctttattaagcccactctgcaagacttctcttattttcagtaatagtcacatatttctcttcaggggaaccccttctccatcatacaggtttgtgtttgtgtgaactccaattctggaacataagctggttattttccattatatacctgaccaaggtggtctttgcaaacaggttttggcctccccgayctcttatcagcttgcctccccaacaacctctccaacaaccattgttcagtatcatctgaacaaaactatgtaaatgctgaagaaatgtcacataatcatctttttcagcctaattgacacaccaaaatctctcctatatagaaattctggagtcataattgaaataaagggaagtagctgatggctttttaaaaatggaactattctgacaggaggctgcag

SEQ ID NO: 757113 - DNA, 582 bp, Homo sapiens
aacaaaaagtcatcttcagtcacaatttttaatgcagattagtttattggttcacatcaacctttaaagggagatgtggaaaaagtgtaggagagatagccattactggggccaggaggcaggtgggaagaggaagaatatggagcaagggaaatcaaatctgggggcactttccctcctgtatttcactgcatgaaggctctgcagttagctgcctgcgttatccaatctgtggactaaagggaatgaaaggaggaaggcagtaggaaaggaagacaaaacaaggaaasaaggtggagttgggaagggctgatttgggagaaatgaggctgcagcaaggttagacaaagctcactgctcaagtgtgtaaccctgcaggctacataacctgattattcctccagcttcatggtgccctcttctttcctcacagccctggccatggctcactgcctttctttccattcttagggtagatctatctctttcccatcctggtcttcttcacatacacagtttcccctgtatggacgctctgcccttctagcactcactcttgaagtctcagcttctgagaagcct

SEQ ID NO: 757114 - DNA, 678 bp, Homo sapiens
gctcccacatcctgcactgatataaataatagtatgcagctgagcgaagttatttatgtaggttctaagtaaactttagtttatttatgtttattgttccagaatgttgagattcatctgaattcctaagtatgtatattgatatacttgataagtatttttttcttgctctgtcttatggtgctgattgataactatatttatactttttatatcttgactaaagtcattaataaagttgtcatctggctgggcgtggtggctcatgcctgtaatcccagcactttgggaggccaaggtgggcggatcacgtggtcaagagaccgagactatcctggccaacatggtgaaaccctgtctttactaaaaatacaaaaattagtcgggcgtggtggcgtgcacctgtagtcccagctacttgggaggctgaggcaggagaatcgcttggacccaggaggcggaggttgcagtgggccaaggtcatgccactgcactccagtctggcaacagagcgagactccgtctcaaaaaataaaaayaaaaaaataaaataaaaaaataaagttgtaatctaacacaatcccaagtacaaaatctcatactatgtaattaagtcctttgattgctagcagccagagtttttggatatggctactcagccagcaataaatcagcaac

SEQ ID NO: 757115 - DNA, 644 bp, Homo sapiens
tcaagtcgtgaattccattgcccctgtacaaggtacagattttatgcaatgttcttgcatgtttgaaaagcctatgcaatgaatgagacgtatgtatacaaaggaacataccaaaaagcttaaagtattttcttagctaccagcattaccaatttaggtaaatgtttgctttgccagtatataacaaaatctgactgctatttttggaattgatattagtgtaaataactttacaaagtcatttttaaacatcatagataagctgtcatgckgcttatatttaaagaatgagtctctttgaagaaagaagtaacttcatttgagatatgctcaaaaactgttttataaaaacttatataaaattcatattgagaaaatttgcaaagataactctcatacaatactaattaaaattcagtaggtatgaattttatcccacaccaattgttattgaaagcaatgaatatttttatcatctttactttttcgaaaactattttttattgctaaaacaatgtgtctactttggagaacatcagttcatcttttaaaatgaacttctttcagccatgaaagcacttcatatgcctctgaaaaaaatagattccaaatttgacaattgactccttttattgcagaatgca

SEQ ID NO: 757116 - DNA, 554 bp, Homo sapiens
ttataaggtgagagatgaggatccagtttcattcttctacatgtggcttgccaattatcccagcatcttttgttgaatagggtgtcttttccccactttatatttttgtttgcttttttgaaggtcagttggctgtaagtatttggctttatttctgggtcttctgttctgttccwttggtctatgtgccaatttttataccagtaccatactgtttgggtgactatggccttatagtatagtttgaagtcaggtaatgtgatgcctccagatttgttctttttgcttagtttcactttggcaatgtgggctctttttaagttccatataaattgtaggattgtttttctagttctgtaaagaatgatggtggtattttgatgggaatagcattgaatttgtagattgcttttggcagtatggtcattttcacaatattgattctatccatccatgagcatgggatgtgtttccatttgtttgtgtcctctatgatttatttcagcagtgttttatagttttccttgtagaggtcttttacctccttggttagg

SEQ ID NO: 757117 - DNA, 611 bp, Homo sapiens
ccagttccatctatgtggccacaaatgacaagattttgttcttttttatggcttaatagtattccattgtgtacatacattattttctttaaaaagaaaaaatacattatttatttatccatgtggctactgtgaataatgctgcaataaacagaagggtgcggatgtctcttttatatacttattttctttcctttggataaatgccagyattggaattgctggatcatgtgataattgtgtttatagttttcaaaagaaccttcatatagttctacatagtgactatactagtttacattcccaccaacagtgtatgagtcctttttttccacatcctgccagcattgtttatttttatccgtttgatattgaacatttttaaatatactttttggccttttatgtgtgttcttttgcaaaatggctcttcagatcatttgtttatttttcaatcagattatttattttgttgttgttagttgtttgagttccttctaaattctggatattagtctcctgtcagatgcatagtttgaaaatatttttccccattctgcaggtcacgtgttgattgttttatttgctgtacagaagcttttcaattggat

SEQ ID NO: 757118 - DNA, 622 bp, Homo sapiens; identical to SEQ ID NO: 748829

SEQ ID NO: 757119 - DNA, 532 bp, Homo sapiens
  misc_feature 374: n = A,T,C or G
tcaaaagtacaagtccaaagtctcatctgaagcaagacgagtaccttctgcctatgagccttttaaatctaaaacaattcagttacttccaagataccatgagaggataggcattaggtaaatattcccattccaaatgggagaaattgtcctaaacaaaggggctataggccccatgcaagtctgaaacccagcagggaagccattaaatcttaaagcgccaaaataatttcctttgattccatgtctcacatccaggacatgctgatgcaaggkgtgggcttgcaaggccttgggtagctctgcccctgtggctctgcaaggtatagcccctatggctgctttaatgatctgttgttgagtgcctgcagctnttccaggaggatggttctacaattctggtttctggaggacagctccactaggcaatgccccagtggggactttgtgtgagggcttcagccccacatttctcctctgcactgccctagtagaggttctccatgagggctccacccctgcagcagacttc

SEQ ID NO: 757120 - DNA, 574 bp, Homo sapiens
  misc_feature 524: n = A,T,C or G
gctccatgtctgaccagcaaaggaggtgctctctaaggaaggggtctcaggcagtgagcaaaggtcttggcaggggttctccttccctaaatgcaggagagcagaccaggtttcctgagctttgaggagagcttataggaagggcaagatatctgcataaaatggaagaatttgaaatggaagatatgtcaaatatttcctgagtttttttatgaaaagtgatagaaggagaaatggggactggaaactgggaagtcatctaaacaaggaggatgaagttgtcagagtcctgtgtctaggaaaagggagaaaggaggaggcagggctggcaggtgaaaatttgtatctgagctggggtttcaagtcacaaggggcaagtcaagaagcctcagtggtgygtgaagatttctaaacagaggcagagaatagaaagaagcaagttgcaggatcagtggcaggtggagctgaagagagaacagaggggtggcgtgtgctggggtggggagaaccttcaaaggaccagngatgccctcccctcacccaaggctacacctagcctcatgtcttcttcacc

SEQ ID NO: 757121 - DNA, 518 bp, Homo sapiens
agttgtcagggagtcccggcttccccatgggaagctcgcaggcccagtggctctgcagcttttgtatcgttttagaccgtgtcctccgcctttcaataccctattgccctttccaataatcccagttggcggctgctgagcgcctcacccttcatccacccatgtttcccagctgtcagcccctttgttctcgtgagcgstgactccacagtgtggatctttgcttggcatgctggatgaggactaccaaattcctgcttttgtgagaattggattaattgtctgtttttgtataacgttcagtcgttttgttgcctaaaatggtgtcacagtccacaccccatgtgagagttcttggatcttgcgcagtaaaaaattcaaggcgagggtccgagtgtagtgaggcgagagagtttattgaaagctaccagttacgcagtagggcgtcctcagaaagcagggggaacgcctcctcctgaagtttttcttacatagaggcctacgtaaaagcttttttt

SEQ ID NO: 757122 - DNA, 560 bp, Homo sapiens
agatagggatacattattcttttccatgtggatatccagttagttgtcccagcacatttgtagaagagatctattactttcttttatttatttacttatttcttttcttttattttgagacagagcatttctctgtcgcccaggctggagtgcartggcaggaactgggctcactgcagcctctgcctcctgggttcaagcgattcccctgcctcagcctccggagtacctgccattacaggcgcgtgccaccatgcccggctaatttttgtatttttgtaggtgggttccccatgttggccagctggtctcaacctcctgacttcaagtgatccacctgcctcggcctcccaaagtactgggattacaggcgtgagccactgtgcctggcccccccaaaatactttttacttcactgtctaattgttgagaaaatataattgaaaacaaacaaaaagtctttctccaaatgagaaatcatctccacgatgatcatagagaaagaaattaaaaccatttcattaataaataagccttagaccagattgtgatgcgaaata

SEQ ID NO: 757123 - DNA, 560 bp, Homo sapiens
agatagggatacattattcttttccatgtggatatccagttagttgtcccagcacatttgtagaagagatctattactttcttttatttatttacttatttcttttcttttattttgagacagagcatttctctgtcgcccaggctggagtgcagtggcaggaactgggctcactgcagcctctgcctcctgggttcaagcgattcccctgcctcagcctccggagtacctgccattacaggcgcgtgccaccatgcccggctaatttttgtatttttgtaggtgggttccccatgttggccagctggtctcaacctyctgacttcaagtgatccacctgcctcggcctcccaaagtactgggattacaggcgtgagccactgtgcctggcccccccaaaatactttttacttcactgtctaattgttgagaaaatataattgaaaacaaacaaaaagtctttctccaaatgagaaatcatctccacgatgatcatagagaaagaaattaaaaccatttcattaataaataagccttagaccagattgtgatgcgaaata

SEQ ID NO: 757124 - DNA, 604 bp, Homo sapiens
ggaatttttttgcgtctatattcacaagttaaataggtctatgtttctttttccatgttgttcttatctgctgttggaaccaagattatattaggcttataaaacaagctggagtagggaaaatgtaagaaaagcctttagcatcttgtaatgccagaaaataaaagttctggagaaaggataggggcattgttgcagagggcacaggagccaaactgaaagagacckcagtggccaaaactgaaacaacttgagcaacaaaatatttaacagcagtattggattataacccatggaataaaataaatgtccatgaggccatgctgatattaagtaattaattcatggaagaaaaaagatggcttttaaaaaaactagaattctaataaatattagaagaaatgagggaaatagaatatcaccattagaataccacagtaatcattactgcaggcaagatcaaccgatgaatgctaaaactagtgggcaaaactttaaggagaaacagtatttgcataacctcaaagtatcttcccccaatactttactaattacaaagggaaagatagcagctttacagtggagacatctgggagacatctcc

SEQ ID NO: 757125 - DNA, 604 bp, Homo sapiens
actacatttcaaagctttcttgatgataagttcttccttttcaccatgtccccactatgtaatgagctcagatcctgctatggtctgaatgtcttaatgtttatatcccccccaggtttgtatgttgaaaacctaatcaccaatgcattgattattaggtggrcctttagggggtgagtagagcataaggatggggccctcatgaatgggattagtgcccttataaaagcggcactagagagctctcttgcccctttgccatgtggaggatgcagcaagaggacaccttctatgaaccaggaagttggccctcaccagacatggaatctgctggtgccttgaccttggacttcctggcctccaaactgtgagaaataataagtttctattgtgtgtaatacaccaagtttatggtcttttgttatagtagcccaaacagactaaggtctcaagacagagtcacagagtgactctagcacaaatttactaatcttaagagatgaccaccctatttttcaggatcataaatgggtttccccaaaaggacctatttttctcaccaagttaagagcttaaaggaaacactcattcctttagaaatctg

SEQ ID NO: 757126 - DNA, 646 bp, Homo sapiens
tggcctaacaatgaaagagtgactgaagcctgaatgaaatcatggttaagtacacatttagctaaaataccagcccacaacattataggcaaattatgttagccagattacagtgaactatggagatcctcagtagtggtcactgatggccactcacccagattcagcagcaaaacacagaagaggggacaacaacactgcctggtccttggttctggcacatcagctgttaccacccagcacaccctggagcctgcttcttcctgtccggccccccgcagtcactgtcccccaagatcatgtgtggcaagcgcccacggagcctagctaaggccatcaccagtggctgatgttgtgttactgtcaatgataaaagctgtgaaagctctggagggtttgaataatttyatctagccttgaccactcttttaagtgtatatatcctattttcaatccactttcttatcaccgcctattctctgactttcttttctcccctgtagaaattgcttatcatgaagtaaacaaacataaataaggttttttgactagctgcaaaactccagtggtgaacagtacacacagcatttctgatgtaatccctacttatataaaccaggatgttcctgagagatttaagccacag

SEQ ID NO: 757127 - DNA, 579 bp, Homo sapiens
gcagctagcatataattaattttttggaaatatgagatagaaaatatttaacattagatgaaataagacaaaaattgaccatagttgggatatatagctcatgatataatttgataaaatacattttagatatcttactaagcatatacatccaatgtaaaaaaattattaaaattatccaagagttttctagtgtattttgaagatcatagtaatgcagaaaatactccatttacatttgaaagaataaacacagaagtctatactattttgactatttgtgtttttctttttagggtcgtgacattccagggaagactttgagaatagctgattattataacttttatttaaatatgggatgggggaaaagctstttctggagttcagtatttttctgtgctctttggtttggggccctgggactcttccttggaaataaggtattctgaccatagctgggggacagaagaagaaaagtaataaaaagtcattattctatcaaactgttccaccatagatctgagtttagaacatccaggtgtgggccaaaatgcccctagagctggggaagactgg

SEQ ID NO: 757128 - DNA, 593 bp, Homo sapiens
gaaaaggtagaatcatgtatcaaaaaatagctgtattaatttcattagacattcacccttatatttaatgagagagaaaagtatataccagtaaaagctaattatttggcagctagcatataattaattttttggaaatatgagatagaaaatatttaacattagatgaaataagacaaaaattgaccatagttgggatatatagctcatgatataatttgataaaatacattttagatatcttactaagcatatacatccaatgtaaaaaaattattaaaattatccaagagttttctagtgtattttgaagatcatagtaatgcagaaaatactccatttacatttgaaagaataaacacagaagtctatactattttgactatttgtgtttttctttttagggtcgtgacattccagggaagactttgagaatagctgattattataacttttatttaaatatgggatgggggaaaagctctttctggagttcagtawttttctgtgctctttggtttggggccctgggactcttccttggaaataaggtattctgaccatagctgggggacagaagaagaaaagtaata

SEQ ID NO: 757129 - DNA, 603 bp, Homo sapiens
ttctaatggaaaacatttatcatacagagcttgaggtatcttcagagcaaataaaaattggtctgtgtccctaataattttgtgcaactcaatttttttccatagtgagccacaaataggatgtgagcccctggcatgacaaccagtctggagtttatatctgaagcaaacactctaaattagtattataattcccttttctattcttcatatgccaatactgcacctgaaataaaacaactgaagtgtgctgtggggtgggcatgtgtttgtgtatgtatgtggcatgtataacacatgtayaaatttgtgaagtaagagcaaattgtgttacaattttttaagttgtgattgtgggagttgaactttaatcagtacttaacatatttggaatagtcaatatgggctatataagcaatgctgagaagaaacagaaatgaaaacaatccatacaatgaagatgagattatattaacaggagatatgatacagtacatcagtcctctctgctgtctgaactttgattcactctcatgctcttccttccctcaagaagaaggccactgttagggagccatggccttcacatcacaagccccgtgg

SEQ ID NO: 757130 - DNA, 579 bp, Homo sapiens
ccaagggcaggaatcagggagtcctgaagggaacaggagctaaagggaagtaggggtcatgtgcaaagcaacaagaagacaggagaaggggtgtgtggtgcattctccaagggctgagtctagcatctaccgctgagacagcattcccaccatcttccacgtctgttcattctagaagcatgtgacrgtccacatgctgtaaagccaccatgaatggcttctgacagtctgtcattcctctctgatctggggcattgttttccaatcaacattcaggacacttgaatccaattttgcactctaaagactattcctttgctagttaggggtcagaccttgactcaacttccaatattgctaggtactattgattaacttgattggttttgatctacaaaatggcaatttcacatggttcaacctaattttacctgaccttggacaggttacatcacttctccaagcctcggttttctttcctgtaacatgaagaaaataatacccaccattggccaggtacggtggcttacgcctgtaatcccagcactttgggaggccgaggtgggtggatcacgaggt

SEQ ID NO: 757131 - DNA, 518 bp, Homo sapiens
gaattattatgtaagacagattatttaaacattaaatatttggtaaaattccattgaaaatgattgtaccagagcctagttttttgtgtttttacagtgggggtggcactgaattatcgattttttttatttaccagctatagaatcattcacaatttataattaatattcagtcaattttggtaaggatatttgagaaatatataaatggcatttaaaatttcaaatttagtgttataagtttgtttattggcataaactccaacaactgtrgtatttattatttctaatgttatcaatgaacacatttcttattttcttgattaatattgccagagaattatccattttattagtatatatagagaaatatttaccattgttgagctttctttgctgttataatttcttttataatattttttactagtaattcatccccactaatttactttgttttattctgagaatttttttctaagatttttcaggttggaagctcagttcactaactttga

SEQ ID NO: 757132 - DNA, 573 bp, Homo sapiens
tgtgttctatccacaaaattagatgttatttggcaataaaaaagaaagaatgatgcatgttacgacattgatgaaccttgaaaacacagtaagtgaaataaaccagccagaaaagaccacatacggtgttattctatttctatgaaatatccaggataggcaaatggatagaaacagaaaacaaattaatggttgctcagtactgagtgaaaggaggtgtggattaagagtatggatatggcgctgggcgcagtgactcacgcctgtaatcccagcactttgggaggccaaggcaggtggatcacgaggtcaggagatsgagaccatcctggccgacgtagtgaaaccccatttctactaaaaatacaaaaattagccgggcatggtggcatatgcctgtagtcccagctacttgggaggctgagacaagacaatcacttgaacccaggaggtggaggctgcaatgagccaagaccgcaccactgaactccagactgggcgacagggcgagactccatctcaaaaaaaaataaagtatgaatatgggttgaggtgacgaaatagtctaaaatt

SEQ ID NO: 757133 - DNA, 628 bp, Homo sapiens
taacctcctgtggtatatatcaatatgattaagtaatttccactattaaatgttattggtatttttaaatggcacattataatatatagaaatatatagaagtgagctagaaggaatttataatctaagaagagaacagtggttatctgcaggtggtagaggcagctttctgttttattcttatctctatattcttaatgttatttaaaaatatgatacttttgtaatcataaaatcttattccgatgaaaacaggctttaaagaactactgggtctgggcatggtggatcacacttgtaatcccagtgctttgggaggctgaggtagtgggaatgcttgaggccaggagtttgagaccagcctgggcaacaacatagcaagtctctstctctaaaacaaacaaacaaacaaataaacaaaaagctgctgggtctacatcttgattaaagtcttaaagtatggcatcttagaaaagcactcctggacttttctatcagggccacccaccaatgtctcctttcttttcaaccttttttccttttgcttaactcctgttacatacattttggctggtggtcataataaaaaaagactaagaaaaatggcttaattaagagtgaaaatcaa

SEQ ID NO: 757134 - DNA, 623 bp, Homo sapiens
gaactattttccaaagtatctgccttattttatattttctgtcatattctctctaatttttggtggtgttactattttttattttagccttttaacaagtatgtagtgataacacattgtgacttttatttgcatatttctaatgctaatggtgttgaacatcatttaatgtgcatattttccacctgtatatgctctccagtgctattttgcccattttctaatttgtttcatttttcattttatttttttctgttgagttctgatttttaaaaaaatatttttgattctagtactttgtcaggtagatcttttccaaatatttatctcagtcttttgattgtctttcaatcttcttagcagagwcttttcgagagaaagtttttaatattaatgaaatttactttatcggcttttcatattaatatccatactgttggcatcaaatctaaaacttttttgcctagccttgcatcttgaaaaagtttcatgttttttgctaagacatttagagtttatgttttattttagttcatgatctatttgacttaattttagtaaaaattatgaggttgtttttgtatagagtttttgtcttggatttggttttttgtcatatgcat

SEQ ID NO: 757135 - DNA, 629 bp, Homo sapiens
tccaaagtatctgccttattttatattttctgtcatattctctctaatttttggtggtgttactattttttattttagccttttaacaagtatgtagtgataacacattgtgacttttatttgcatatttctaatgctaatggtgttgaacatcatttaatgtgcatattttccacctgtatatgctctccagtgctattttgcccattttctaatttgtttcatttttcattttatttttttctgttgagttctgatttttaaaaaaatatttttgattctagtactttgtcaggtagatcttttccaaatatttatctcagtcttttgattgtctttcaatcttcttagcagagtcttttcgagagaaagtttttaatattaatgaaatttactttatcggcttttcatattaatatccatactgttggcatcaaatctaaaacttttttgyctagccttgcatcttgaaaaagtttcatgttttttgctaagacatttagagtttatgttttattttagttcatgatctatttgacttaattttagtaaaaattatgaggttgtttttgtatagagtttttgtcttggatttggttttttgtcatatgcatttctaattgctttat

SEQ ID NO: 757136 - DNA, 602 bp, Homo sapiens
aaatctcaaagtaattatataatatcctcaatttttgttacttataatctaaatcagcagtcctcaatatttttggcacaaattaccggtttcatggaagacgattttttccatggggcagaaaattaggcattaggttcttacaaggagtatgcatgacctagatcccgttgcacatgcagttaacaatagagtttgtgcttttatgagaatctgatgccactgctgacctgatgaggcagagctcagatggtaatgctctctcgtagcgtacctcctgctgtgcaacccrtctcctgacatgccatagattgtactagactgtgtcctgagggctggggacccttgatataaattatgattgttatattaattatattattccgcagtaaacagtcacctagcatatgactgcaagactctcaatagcctttgacaagtctcaggatattatgtgacttcgatgctgggctcttcctgaaagtaacctgatactttgcctctttctcagtggaagtaatccaaggactatttccaaaggttgcttgctgtattagtttcccaggaccaccataaaaatttaccaccactggatggtatac

SEQ ID NO: 757137 - DNA, 602 bp, Homo sapiens
aaatctcaaagtaattatataatatcctcaatttttgttacttataatctaaatcagcagtcctcaatatttttggcacaaattaccggtttcatggaagacgattttttccatggggcagaaaattaggcattaggttcttacaaggagtatgcatgacctagatcccgttgcacatgcagttaacaatagagtttgtgcttttatgagaatctgatgccactgctgacctgatgaggcagagctcagatggtaatgctctctcgtagcgtacctcctgctgtgcaacccatctcctgacatgccatagattgtactagactgtgtcctgagggctggggacccttgatataaattatgattgttatattaattatattattccgcagtaaacagtcacctagcatatgactgcaagactctcaatagcctttgacaagtctcaggatattatgtgacytcgatgctgggctcttcctgaaagtaacctgatactttgcctctttctcagtggaagtaatccaaggactatttccaaaggttgcttgctgtattagtttcccaggaccaccataaaaatttaccaccactggatggtatac

SEQ ID NO: 757138 - DNA, 620 bp, Homo sapiens
cagactaatagattcattccattctatgctaaataacacatttaatgtacacatactatgtgccagggattggttgcttaatactgaatgaggtagtccttgccattagaaaaattacagtttggtggaagaggtagtcaagaacaccatcacagagcagagtgycatggtaggagagttataggaacacagtgggagaccttaggggagaagtagcttatttcatctggttattggccacaggaggcttctgtttttttttttttggttgagatggagtctcgctctgttgcccaggctggaatgcagtggctcacttggctcaccgaaagctctgcctcccgggcccacgccattcttggccacaggaggattcgaaaagaagctgttttagctgagatttagaggctaaaagtgatttctccaggaagtaagcaagtgatcagaatgtaggtcaaaaaatgagaatgtgctaagacagtctttttcaaactgatatctgtcctgcctatcttccagggatcctctgaagcactatacaaggttatggtgtaattattattgtgatccagactattcggtttatatgtacatgcataattatcatagctaatacttta

SEQ ID NO: 757139 - DNA, 380 bp, Homo sapiens
aggcttcaccttctcagcagtggcatcacatccagccagctgctccagcccaaatgtgatgagatcattttgattccccttctctccacatcctctccccatattcaattcaacagcaggtgctgtcagtgctgccccagcctctgtctccctcgtgtctctccagggctgcactgtgacaaggccacggtgtctacctggacggccacagggactcccagttggtcttcctgcctctactgcygcccccgttgctctattccaacagggaaagtgtgacctcgtaagtcctgctcatcccctcccaggatttttcactgcacatggaaaggatccacctttctgcaaggtcctgcgtgacctggcacttgcctcgtttt

SEQ ID NO: 757140 - DNA, 561 bp, Homo sapiens; identical to SEQ ID NO: 754046

SEQ ID NO: 757141 - DNA, 629 bp, Homo sapiens
tgcatgatttcatttataggcagttccagaaaaggcaaagcttttaaaagatttttgaagtttcatttactcatggtcaactggggtctgaaaacagatgaggcagtacaacaagatatataagatatatgagagagagagagagaaagaaagagagataaaccacattcacacaacttttattacagcatattggtataaatttttattttattattagcctttgttgctaatctcttcttgtgtttaatttagaaattaaactttatcatatgtatggatgtatcaaaaaaacagcacgttgtgtataaggtttggtactatgaatggtttaaggtactyattgggggtcttggaatgtatcccttgcagataatggggggctactctacactatagagtattatgaatcatggtcatcatactgtccattaaatctccagagttcattcatcttgcatagctgaaactttgtacccttgaccagtaacttctcaatcctctctcctgcttcttctgggctccctggaaaccaccattctgctctctgattctacgagtttgagtattttacataccacatagaagtcagatcatataggatttttgtcatgagtcatgagtatgtg

SEQ ID NO: 757142 - DNA, 594 bp, Homo sapiens
aatagaaccttggcagggtgtggtagctcacacctgtaatcccaacactttgggaagccaaggcgagtgggtcacttgaggtcaggagttcaagaccagcctggccaacatggagaaaccacgtctctactaaaaatacaaaaattagccaggtgtggtggcatgcatctgtggtcccagctactcrggaggctgaggcaggagaattgcttgaacctgggaggtggaggttgcagtaagccgatatcacgccactgtactccagcctaggcgacagagaaagactccgtctcaaaaaaaaaaaaaaaaaaaagaaccacatgtaagaaatactgctgtgtgggccatacgtctggcaggaaagcccactatgagaactcccgccatgttcgtccctaccctaatgtaccttaggtggcacacccagggagagcgagaaactctctcatcctaatcgctgtagtatagcagaataacatgacaggccagcaggacaatgaagtctacgctgcccagctctttttctgggtggaaagccctctttccctcacagaatttccatccatggagagcagtgagcaatgcaaagcatta

SEQ ID NO: 757143 - DNA, 478 bp, Homo sapiens
gatggctgcagcatcactaggtgataggagtccggcttcgttgtaattttatgggacattgtcgcatgtgcagtccatcactgactgaaacgtggtgatgcagcacccgactgtgtatgtcacctagtcagggatacaggccaggtgtggtggctcacgcctggaatcccagcattttgggaggccgaggtgggatgattgctagaggccaggagtttgagaccagcctgggcaacatagtgagaccctgtctctacmaaaaaaaaaaaaaatcaaaaattatccaggtgtggtggtgtatacctgtggtcccagctactagggaggatgaggcagggggattgcttgagactgggagtctgaggttacaatgggttatgatcatgccactgcactccaacctgagtgacagagcaagatcatgtctctaaaaaaatacagtgctatataactgggtttttttttttttttttttttg

SEQ ID NO: 757144 - DNA, 638 bp, Homo sapiens
agtttttgctatcgccattaatcagtgctcagcagggctgcccatccggctcatcctggacggtccacaggcctctgtaattccccctcagcagaaaagacaggacccggacagccctcccttccgttccttcagggctaccgtccagagagctgcttcggggaccgcctgttcctgagcagagtaatgggtttcacatagctttgcccagggcctgagaagggggcaagcctagggtttatttcaagtctgtttcctaccagcttccaggggctcttccgtcactggggaagctgcctgtgtcccacccccacacccccgagggtgctgcatctgtgaccttgctctccttggcctggacgtggtggtggcaggacccctggagtgccccaactgtgccaaatgctgtgatggccccacgggactcttgcctctggctgagccaatggggaaccctcaaagcacccggacagtagygggtagtgagtcggggaggaaaccagctctgcccagcatggggctccactggggcatcagggctgggccttggactcaggaataaacgggccttggactcataggaataagcagacctttgggggtgactgtggtggggtgggggtgtcggtggaaagagc

SEQ ID NO: 757145 - DNA, 611 bp, Homo sapiens
tctgttctccaaaagcaggttcctctgctggcccaccaggccactctggccccacccatcagaccaccgtgcagctattaaggggtgccctctcctccccaggagcaatgggacagctgggtgggcagggtctctggggaccgctgtggcagagcacctgtgccagggctsggccgcactgcgtggctgggagtctcacctgatatgacctccaggagcagcatgagcttgagcccgtctcggaagtcctcatcaatgttctcgatctgtgtgcctgccttccgcaggtgggagttgcaccatgccgtgaaggtctggggaagcagaacaaaggacagtgcgcagagtcagcctggctgtcggggctctctccacacacctgcagggccgcagctctgacctcaggagaaccgcagctgccacggagcactcgccgacacacaccgtacatggccgatacacacattgtttctgatccttacagtgaccccgggaggcagatgtgaggaaactgaggctcggggtggttaatgacccatcacaagaccatccaggcggtaagtggcagagcttggatttgaacccaggtctgtcaattttggcaacatgtg

SEQ ID NO: 757146 - DNA, 630 bp, Homo sapiens
attacacaaatgactcacatttattgagcacttagtgtgtaccagggtttgttctgcgtgctctaattttacagataaggctctgaatgctgggggatatacccatggccacagggctgttaagcagcagagctgggacccccgcaacccccaaactaaactcaagcctcaccaagtctgctttccacktcttgtgtttgctctgttaggccctgtgtgagctacttcacatggttcctctcatttgatctactctaaggaagacacaaaaccaagggcagtcccaggaggtccttggcagattccagcagccacagtgcagcaggccccatgctgagccactgggtgagtcatgggggagggcgggcaagtcaggtgaccgggtgagaatcagagctatgctgaggtggcctggttaccttgacattcctgtgattctgccaaggtaaaaagtaacccaaggagtttgccttatatgggcatgatgacagatttcaacaagacagcatgttaactgaccccatatcaaatcggttcccggactgcacaggcaacgcccgataaagctgctctggaaatataggaaataacaatttatgatgggctatcaccggtgactcacaaaggtgc

SEQ ID NO: 757147 - DNA, 640 bp, Homo sapiens
aatccagtctactattgagattctgactcgcatacttagaccaaacactcagaagatcttgactatgatctctagagctggaagtgtttgggattgtttatctcatccctgaatctttctgcaggtgtgattgtggcatatgtctttgcccataccctgagtgattttagtttcctgcctgagcccagcccatagatggaattgtgacatataccaaggccaagcaccaaggtaatatgactcttctcatctgcctgaacctgtcacttagaagtaattgtgacatatttctgaatccagcacgtrggtgatgtgactctcctcttgtgcctaggccttgcctacaagaaagattgtgtcatatcactgagcccagcacctatgtgatgtacttcttctgccatagttctccccacataagacactgtgacatatttctgggccaattacataagttaaatgagtctttgcttatgcctggatctcaccctcagaagaacttatgacatgttgctggacccagcacctaggtaatttgagtcttctctgctgcctggcccctgccaacagaagggattttaaactattgcttaaactagcacataaattttgtgactcacttcttttgctaagccctgct

SEQ ID NO: 757148 - DNA, 640 bp, Homo sapiens
aatccagtctactattgagattctgactcgcatacttagaccaaacactcagaagatcttgactatgatctctagagctggaagtgtttgggattgtttatctcatccctgaatctttctgcaggtgtgattgtggcatatgtctttgcccataccctgagtgattttagtttcctgcctgagcccagcccatagatggaattgtgacatataccaaggccaagcaccaaggtaatatgactcttctcatctgcctgaacctgtcacttagaagtaattgtgacatatttctgaatccagcacgtgggtgatgtgactctcctcttgtgcctaggccttgcctacaagaaagattgtgtcatatcactgagcccagcacctatgtgatgtacttcttctgccatagttctccccacataagacactgtgacatatttctgggccaattacataagttaaatgagtctttgcttatgcctggatctcaccctcrgaagaacttatgacatgttgctggacccagcacctaggtaatttgagtcttctctgctgcctggcccctgccaacagaagggattttaaactattgcttaaactagcacataaattttgtgactcacttcttttgctaagccctgct

SEQ ID NO: 757149 - DNA, 661 bp, Homo sapiens
agcaggaggactgctttagccgaggaaattgagatcagcctagacaatataacaagaccttatctctacaaaacaacaaaacaataaaaacagagaaggcttcttctatgtgaccttctacactttcaaccagtgacttttctgcaggtaaacactgtataagttcattttatctttacacatatttgcatgtgtatatgtgattttatggacctttagaaatagtattgcatgtgtgtttcctggatgacaccgtgtgttcaatggttagaagagcaggctcagagtacctgtgtaaccttgggcaagtttctcgacttctctgactcatttgttactcagggataataacgtgaataaaattagtgctgttctttgaatgcaataataaagtagataaactatttcaagaggagtaaaaattttacaaaagataaaagaagatatttagatatacattcaagattcaaacataatattttyttaaatgtcatgacattaaacttgaaaatttagatgaaattatctattttccaggaaagtatgtgacaaaaattgattgtggaagaaacatgagataaatagaaaaatcaaaaattatgtttttaattttacacccataaaaagcacatatattataaaataacagctttataagttt

SEQ ID NO: 757150 - DNA, 729 bp, Homo sapiens
catcaataataaaatgcttgtggtagaatcgatttattttgttgatttctattgagttcagataagatttgaccaaaagctagcaaatatagagcagaaaaaagaatattatctgaaatcagaatatggtaaatgaagttaatttgtcaatagaaataagaatattatgacctcatgctaatagtctcatctaaagttgtacaacaccaaatgctacgttttattatagactgtattttacataagtattcaatttatatcatcctctttcactatttcaatgccttctccactttgtatcagtggaaaacaggccagctacttccargaaagcaggcaatgctcttcttactttaacaatgatgatgaagagcacttgtttcagtgatgctcccatgccaaaaactgttattttggcggaagtactagttttctatttttctctatatttattaataataaaattcttaaccaagaggaatttatctcattcaagttttaaggaattttgtttacatttaagtgtctctgactttcctggaatattgaaatttttatgaatctaagttgagtactataaataaacaatcttttactaaaatactttttgaagtggggtgatatttataaaaacttttcataacattgaagatatgttttaaccatgttcccagtaatcactctgaacatagaattttcaattttcactgagtcactcaggggaaattg

SEQ ID NO: 757151 - DNA, 729 bp, Homo sapiens
catcaataataaaatgcttgtggtagaatcgatttattttgttgatttctattgagttcagataagatttgaccaaaagctagcaaatatagagcagaaaaaagaatattatctgaaatcagaatatggtaaatgaagttaatttgtcaatagaaataagaatattatgacctcatgctaatagtctcatctaaagttgtacaacaccaaatgctacgttttattatagactgtattttacataagtattcaatttatatcatcctctttcactatttcaatgccttctccactttgtatcagtggaaaacaggccagctacttccaagaaagcaggcaatgctcttcttactttaacaatgatgatgaagagcacttgtttcagtgatgctcccrtgccaaaaactgttattttggcggaagtactagttttctatttttctctatatttattaataataaaattcttaaccaagaggaatttatctcattcaagttttaaggaattttgtttacatttaagtgtctctgactttcctggaatattgaaatttttatgaatctaagttgagtactataaataaacaatcttttactaaaatactttttgaagtggggtgatatttataaaaacttttcataacattgaagatatgttttaaccatgttcccagtaatcactctgaacatagaattttcaattttcactgagtcactcaggggaaattg

SEQ ID NO: 757152 - DNA, 421 bp, Homo sapiens
cattgacccacttgcttatttacccatccactgtttcatatccatgcatccatccactcatccatccattcatccatcctcccatccatcctttctatagggagtgacaaggttggagaagactattctccatctagaggaagaaaactatctatttctctatctagaggaaactatgtggtggatgggagaatggactaacagatgaagggaatggagttgaatttagggtaacattaactcaagagaatctgtgtccacgccatcaagatagacccttyaaatgtctactcagtcatggacagcacttggggatcctcgagagggccctggagaacccagagcatggtgtgggtgccccttaagtcctctgcatgggtttagctcccaagcttggcttccttacttcctgacagacatc

SEQ ID NO: 757153 - DNA, 562 bp, Homo sapiens
gagccccccatgccctccgacccgcactactgccctggggggtggggcgtggggatggtgtgtggcccatttgttggggcaggagaagccaaggtggctgcaggcacccctgcaatgcccctactttccactcttcatcctcaattccctgggaaagggctctaccccccagcctccctgggaaacgacgccccacccctcccagcatccctgggacatggagccccaccttccagcctccctgggagatgaggacccccccttcccagacctccttgggagatggggcccctcccctcccagcctccctgagccttagtgggcacagttgcacaatggacagattctaggagagtgagagtagttgcttgctctcctatcctggggaggaatggaaggtctgagctgrtagggaatggagtaacagaagcagccctgtgaccctccctccattcccgtctctggtgtggctgcccgctggacagggtctgtgctgtggaggcgtggctgcgtcctgagtggggtggggaatggtgaagaccacataccctagaggcgacag

SEQ ID NO: 757154 - DNA, 622 bp, Homo sapiens
ttctaaaatacatagtgctggccgggcacagtggctaacacctataatcccagcactttgggaggccgaagcaggcagatcacttgaggttaggagttcgagaccagcctggccaacatggtgaaacccggtctcgactaaaatacaaaaattagctgggtgtggtggtatgcgcctgtaatccctgtygctcaggaggctgaggcaggagaatcacttgaacctgggaggcagaggttgcagtgagccaacatcgcgccactgcactccagcctgggtgacagagcaagacttcatcttgaaaacaaacaaacaaaaaacccatagtgctgaaagcgggaagtcatgtctcaccaaagtaataaaatttgacactcagaatatgtggaatgttctaactgctggctatttctcactcttctagttgacccaatagtaggctacatgagcaattcagaggagggttttttaaattattattatttttacttttttgctttcctttcaaggcactatgcttcaatggctttataggtcaataatatggaaaaacattaatacaaaaatttacagctgggcatagtggttcacgcctacaatcccaacactttgggaggccaag

SEQ ID NO: 757155 - DNA, 641 bp, Homo sapiens
caacctcctgcacagtctgcaacttcctgagtcctgttctgaaataaaacatgaggcttttaagaatcatgtgttcaatgtagacaatgcaaaatttgtagttaaatttgacctcagtgccctgactacaattggaaatgccaaaaactcactaataggggtgagcctttaattgtaatgactttgttttatcmacagttaagccttttctcattacatatttatgtatttcactgttatgtcaacatgtctgcagaatcactgtatgtaacaaacagccatatttaagacatgcctggataaataaaattggtaggaatgttttcttgccattatatttaacttttcttctttttccttgacaaatcttgataagtttttttatattagttttattttctagaaaatgtcttatgaatttctcctatttgctctagcatgcttacagaaaatgtcagtgtttcttacagctcaaatttgtatagttgttttaaaatgcgatctctttcttcttcccctggtacttttttctttctgtctactgaagttagttcttatacatggtcttatattttggctgtctctttttccctaggaacattcatacaggttgaatattccttatctgaaatacttgggac

SEQ ID NO: 757156 - DNA, 541 bp, Homo sapiens
actggtgctggtttaggctaagggatcccccctgagggttgcccagtagtgagagagcggagcttggctgcagattcagtctgtgttacagtgaatggaggtgcgggtcccaggttactctgggaaacagccatggggctcctattttggtgggcatggtgctggtgtgttcttcaccaggccagagagaactgcttttcaaaatagttttcttttctttttttttttttttttgagatggagtcttgctctgtcgccctggctggagtgcagtggcgcgctctcggctcactgcaagccccgcctccygggttcacgccattctcctgcctcagccttccgagtagctggggctacaggcgcccgccactacgcccggctaattttttttgtatttttagtagagacggggtttcaccgtgttagccaggatggtctcgatctcctgaccttgtgatccgcccgcctcggcctcccaaagtgctgggattacaggcgtgagccgccgtgcccggcctcaaaatagttttcttgtgggatt

SEQ ID NO: 757157 - DNA, 367 bp, Homo sapiens
atatatatagatttttaatattctttgctttttttttttttgagacggagttttgctcactgcaacctctgccttccaggttcaagcaattctcctgcctcagcctcccaagtagccgcgattacaggtgcccgccaccacacccagctaatttttgtatttttagtagagatggtgtttcaccatgtygttggccaggctggtcttgaactcctgacctcaggtaagccaccacgcccggcctctttgctattatcatgctgcgttgggcaggttttcttaaaaggcacacaacaattttgacagtaatttctatagtttcattttttatttttattttttattgtttgagatgtttgaaaaacca

SEQ ID NO: 757158 - DNA, 622 bp, Homo sapiens
cgtcctgagtcactgggattacaggtgtatgccacaatacctagctaattgttaattttttgtagagatgatgtctccctacattgcccaggctggtcttgaactctgagcctcaagtgatcctcccacctcagcctcccaaagtactgggactacaggcaagagccactgtgcccagaccaccattttttaagttaggttgattgtcattttataattgaattgtgacagttcttcacatattctacatagaagtttttatcgaataggcattttgttttgtaaatattttcttccagtctgtggttcacatttttcattttcttaaccatgtctctcaaagatcagargttttaaattttgaaatcaaacttactaattttttcacttatgatttgcaattgggtatcatatttaagaaaattttctcattccagagtcacaaagattttttcctatgttttattctaaaagatgtatggttttaaatattacatttaggtctaaaatccattggtgcaaggtatgggttgagattcatttttgttcttttcttggagcagggactaagtctctctctgtggcccaggccggggtgcagtgggatgatctcggctcactg

SEQ ID NO: 757159 - DNA, 605 bp, Homo sapiens
aactggtttggcattcttgggatgactcttactatgtcactctttgggtatatggctgaattctatttgctagtattttaactataatttttgtttctatattcatgagtaagactggtctgaagttttctttttttttttttttttttgacggagtttcgctcttgtcacccaggctggatggcacgatcttggctcaccgcaacctctacctcctgggtacaagcaattctcctgcctcatgcctcaacctcccaagtagctgggactacaggtgtgtgccaccacacccggctaatttttgtatttttagtagagatggggtttcaccatctcgaacttctgacctcatgatccacctgcctcggcctcccaaagtgttgrgattacaggcgtgagccaccgcacccagcagaagttttcttttttcaactatctgtatttgattttggtgttaaaatttattctgacttaataaaataaatgagtacagttcatggattgtattacatccatataataaataacactggtattactctttctttaaaagatagaactaagcatgaactcttctgagcctggagcattttcccattatagat

SEQ ID NO: 757160 - DNA, 608 bp, Homo sapiens
gctatgcatcagtagataacttcaatgctgtgttaaaatgctacaattgacatttcttctttttttttttttttgagacggagtttcgctcttgttgcctaggctggagtgcattggtgcaatttcagctcaccgcaacctctgcctcccgggttcaagcgattctcctgcctcagcctcctgagtagctgggattacaggcatgcaccaccacgccaggctaattttgtatttttagtagagacggggtttctccatgttggtcaggctggtctcgaactcccgacctcaggtgatccgcctgcctcgacctcccaaagtgctgggactacaggtgtgagccaccgcgcccaaccccatttctgaattctttaaataaagttcctaaasttgcgagattattctgtcagaggagattattaccagtttcctcttcttccttgcgatggaaaaattaaaggcctatggctctgctagatttttaaaatttaacaaagaggtcaagggtccttgcttcatttgatttaatataagtggtttatatgacaacactttgaagtgattatagtaattaatttaaaatcaccatttaggctgggcatggtagc

SEQ ID NO: 757161 - DNA, 562 bp, Homo sapiens
ggtacaccgatataggtagtttggaacacattttggcagtttcttataaagtgaaagttatattcgtcatataacccagcagttccatgcctatgaatccaactaagatgaattaagacatatgtccacacaatgatatgtatactcatgtttatagtagcattattgataacagccccaaactgtaaacaatacaaatgtccatcgctggtaaatagataagtaaaataaggtatatccctacaacagaacatattcagcaataaaagagaatatatcactgatacatgctgcttcataaatggacctccagaacattatgctaagttaaagaagccagagtcaaaagactgtacattgcatgatcccatttatatgaaatgttcagaaaaggaaaatcaacaaaaatggaaggtaggtcagtagstgcctaaagctgtagattgaagaagggattaactgcaaaggggcacaagggaagttttgggggtgatggaagtattctaaaactggattgtcatgattcctgcctaactataaattgactaaaagtcaccaagtg

SEQ ID NO: 757162 - DNA, 545 bp, Homo sapiens
ttagctgcattgttgatctccacgattcactcctttgtagttgtattacactctgtcttagtctcttggtgggttgagtgttcttttctcattgactttgggcttgggtgtgtgactttctttggctaatgggatattagtagaggaagaatcacaggcttgagtgaccttgcccagtagggtctgcctctttgtgatttcagcattgttaggagaagaatatttgctggggagttgctcccccttctgcttaagcctcaggatgagtcacaaggagcaggcctaaayctgatctgcatcctggagcaaaggcaagctgagctcagctaagatcaggtgaaccccaatagacctgtagaccccagaataagaaaagcaaatatttgtgtttaaaccaatgagattttttgaggttgtttgttacacagcattagctgactattacgagtgggaaaactgagaaaaaggcatgatttttttttgacatagcaattatttatattctgaaatgtgttaataaatgatgtatcttaacaactagtagc

SEQ ID NO: 757163 - DNA, 514 bp, Homo sapiens
tgcagtcccagctacttgggaggctgaggcaggagaattgcttgaaccccagaggtggaggttacagtgaaccgagatcgtgtcactgcactccagcctgggcaacagagtgagattgtctcaaaaaaaaaaaaaaaaaaaaaaaaaaaattcccacccatcttattttcacttcatgctacacagtccagggctctttgccttgctccaacaggttagaaagagactcctgcttataaaaagtaggaaacatgacatgttggaagttttctagatccccagccctatgtttctgtaggaaagaagacattacagatggacttaggaaaatatytcacaaattcctccactgactgcctccttctgaatctttaaagagcactgtaatatgtggacactgagctctcttcccagaactactgaatcaaaagcacaggagtagcaaatagggaactggatatctttaaagtctgccatgaggttttgttttgtttttgttttttgagacagaatc

SEQ ID NO: 757164 - DNA, 477 bp, Homo sapiens
acttgaaatgggcaggaaacatccctgtgatattaggggtaatatcacggcacatcagaaccaatccaccaatcagaactcggaggatttagtccaggcgggcaagaggatgacagcaggcgacatctggggcccagctgaggagagagcccgaacccgacccttgccggcccccacccttcagaacaacaccccctccagaccccgcccccaagatgacgataaccctctggttctgccctttcccrttgtatggcctggcccccaggcggcctcctccctcttgccccgccccagtcttgttccaggcaccgcccccacgctctagctctcctaggttcctgcttaagtttatacactcatggtccacagagtcctaagcagaaatatggaagacaccaagctctggtaatgtatctatctgacagactgagcgtctgcctcaagaacatagcaatagcaatactaagtgaaata

SEQ ID NO: 757165 - DNA, 584 bp, Homo sapiens
agatagtcaggatatattcacttttgaatgggaagattctcactctgggtgaaaacaacaatactgctggacagtcttaccccaaggatttacagattctcctaacttgtttggccaaattcttgaggaggtgttagaaaagatgagcatcccaaagtgtatatctatgctccagtatgtggatgatatactagtgtcagggaaagctgtagaacaagtatctggcttttccatcagccttctcaaccatctctgtggagagggactatgtggtgtggtggcacacatctgaaatccyagctacttgggaggcttagaaaagagaattgcttgaatgcaggaggtggaggttgcagtgaaccaagattgtgccattgcacgccagcttgggcgacaagagaaagactctgtctcaaaaaaaaaaaaaaaaaaaagaaagaaagaaaagaaaagaaagaaagaaggaaagaaaaaacaggctgggcaaactggttcaggtctgttggcccagctggtctcaaactgctgacctcaagtgatctgcctgccttggcctcccaaagtgctgggattataggtgtgag

SEQ ID NO: 757166 - DNA, 661 bp, Homo sapiens
taaactaagatatacttaggaataaacgtaaaaatgcgagaagtttctaccttgaaatctatgaacattgatcaaaatgattaaaaacatagagatacaaccaatattgatagattggaaaacttaatctcgttaaatgattatacaacccaagatgatttagatttaacacaacgcccatacaaatccctatcagtttttgtcaaagaaacaaaaaacyggctgggaaaagtggctaacctctgttggccaggctggtctaaaacttctgacatcaagtgatctacccaccttgggctcccaaagtgctgggattacaggcatgagccaccacggccagctactctaagctatttctgacaagacagtgaaatgagtgacacaggaaaaggggcatctaatcaccaatgtcactgaaggctgacaaatcttattaaacaaaggaagttcagaatctgtactataaagcttgcgttacttgaagccatctaatagcattaacttgttttaaaaacctgggggcaaattaacattacttctcaaataaggacaccaggcccacagtgttcatgtacttcaccccaatttgcatgtacggtaagtgagggacaagacttgatcctaggcctgaaggatcccacgacatgtacttaagcacaat

SEQ ID NO: 757167 - DNA, 581 bp, Homo sapiens
ggccaaaatggtgaaaccccatctctactaaaaatacaaaaaaaattagttgggggtggtggcactggactataatccccaactttttgggaggctaaaacaggagaattgcctgggaggcagagtttgcagtgatctgagatcatgccactgaactccagcctggataacagagactttgtctcaaaaaaaaaaaaaaaaggccagaagaggtggctcacgcctgtaatcccagcactttaaaacgctgaggcggacggatcacgaggttatgaaatccagactgtcatgactaacaaggtgaaataccatctctactgaaaataccaaaaaattatccgggcgtggtggcactcacrtgtagtcccacatacttgggagcctgaggtaggagaatcacttgaacccaggaggcagagtttgcagtgagccgagatcacgccacagcactccagcctggctaccgggtgagactccatctcaaaaaaaaaaaaaaaaaaaaattaaccggccatggtggaactcacctgtggtcccagctacttgggaggctgaggttgggaaatggcttgagcctgaag

SEQ ID NO: 757168 - DNA, 477 bp, Homo sapiens
tgactcagcacatgatccatgagggatggcttcagaaccactgtcagcagcgcagctcagcgcttgtgtcccagctcagcctttgtatcccccttgatgtacttctatctgttctccttgtattttctggtctggtcattttctgtactgcctgygctgactattgtgcctaagaacatgtcgtgggatccttcatgcccaggattaagtcttgtccctcacttaccttatgtgcaaactggggtcatgtccatgaacactgtgggcctcctgtcattatttgagaaataatgataatttgcctccagggttggttttttttttttgtttttgagatggagttttgctcccgttgcccaggctgaagttcaattgcacaatctcagttcaccacaacctccacctcctggatttaagcgattctccttcctcagccttctgagtagctgggattagaggcatgcaccaccacacctg

SEQ ID NO: 757169 - DNA, 665 bp, Homo sapiens
aagatatgaatggcaaatgaactccatcagcttttgtttaaaatgattgccagtgacgagcagctccgatggtaaaagtaggcaggtagaacccttcaacacctgaaaatgagcggtctgcttctagtggcttcatgagttattacagtcccatgttttaatagtaatactgcatttattttaaatgtgtctgcagcaatattgggggaaaagaaaaatagaaaagaaacagaaaattatgtctgaaatctaaaaatttaaactattgttttaaaacscttacatagttcacagctattagtccacacacagaaaaagatatctatgtatgggcaagaagtcttcactttggagtagtttttatacctgtttacgtttaaaaagacagaagagtgtacgagagttgttgcactgcaacgatcccatttttttcctgtggagtgcaatcctagttgcccacaagcctctcaactttgagatttttcttcttttgaaaatactaacttttctagttgttgagcatgagaggtaatattttccgaacttttttgatgaggggttcacatgatatagcccctcatttcttccttcaagagttaatggctttagagcgctgaagattaatgaaattatcagcgctgaaggaccttcactataaaagattt

SEQ ID NO: 757170 - DNA, 653 bp, Homo sapiens
agcagccagagactcatttcttctcttactttcccccaaacaaaaagagtctctctgtgctgagctttctggagttcgaagatgagtgatacaagcacccctgtggccactacacctaggacagcactgggtctgatctgaagcccacacagcactgttactgcccaaggcctctactgtaacaactccctggctgccagctattttgcagtaagccccaaggctctacaattagcaggtagtgaagccagagaaccttctgtccttcacttaagtgtagtaagttcccccggcccctggatgggttcagaggtgctgtctgggggctagggctggggttataaaccttagaaatccacctggtgctctgttttactgtgactgagctggcactaaaaccatcaaacacctttccactcttccytccccattacccaggcagagtagtctgtccccatgttcaccagcatcacaatcccctggggtgtactgccaggtcaccactgatgttcactaaggcccaagggctctcagtcagcttgtggtgaatgctgcctggcctggaactcactcgtcagagcagtgggctcccttctggcccagggaaagcccagagatgccatccaagagccaaggcctgaatcagggacccc

SEQ ID NO: 757171 - DNA, 542 bp, Homo sapiens
tgctactagttgttaagatacatcatttattaacacatttcagaatataaataattgctatgtcaaaaaaaaatcatgcctttttctcagttttcccactcgtaatagtcagctaatgctgtgtaacaaacaacctcaaaaaatctcattggtttaaacacaaatatttgcttttcttattctggggtctacaggtctattggggttcacctgatcttagctgagctcagcttgcctttgctccaggatgcagatcagrtttaggcctgctccttgtgactcatcctgaggcttaagcagaagggggagcaactccccagcaaatattcttctcctaacaatgctgaaatcacaaagaggcagaccctactgggcaaggtcactcaagcctgtgattcttcctctactaatatcccattagccaaagaaagtcacacacccaagcccaaagtcaatgagaaaagaacactcaacccaccaagagactaagacagagtgtaatacaactacaaaggagtgaatcgtggagatcaacaatgcag

SEQ ID NO: 757172 - DNA, 611 bp, Homo sapiens
gaaactgccagtgaaaatggtccacgtttttctctttttttttttttttttgagacggagtcttgctctgttgcccaggctggaatgcagtggcgtgatctctgcccactgcaacctcctcctcccgggttcaagcaattctcctgcctcagcctcccgagtagctgggattacaggcacgtgccaccacgcccagctaatttttatatttttagtagagacggggtttcaccatgttggtcaggctggtctcgttggtcaggctggtctcgaactcctgacctcaagtgatccgcccgcctcagcctcccaaagtgctgggattacaggcwtgagccactgtgcccggctaaaatggtttacgtttaatctcagcatccatttccagatcaagtgctaggattctcgttcttgaatattttctggggcatttcattcacttcgggacactgtatttgaaaggggagacaatgccaggtcaaagtgtgctcagggcaggtggaactggaggcagaaagagggtgggtctttgaggagtcactgaagagaggctgggtcattgaaggctagaatccttggggtggcatctttgtacacttgagatggtctca

SEQ ID NO: 757173 - DNA, 608 bp, Homo sapiens
aaataaggcattttatatacaaggtaatatggatataattcccttatgttttatagagacttactggctaatccttcatatccctttctaagttcatttttccatgatttatttaataacagtatcttagtcctagtgtgagcacatgaccatgttgggagctacttaacgcattccccataatgtcatgtcttcctataggcgattctagcaggcaattcaggagctattagagaaagagtgttaactgagacaaatgccatccatggagtttatattctggccggaagataggctttatttatttatttttttgggatggagtctcactcactctgtcgcccaggctggagtgctgtggcgcgatctcagctcactgcaacccccgcctcacaggctcaattgattctcctgcctcagcctcccaagtagcagcractataggcacaccatcacgcccagctgattttttgtatttttagtagagatggggtttcgccatgttggccaggctgtatgatatgcactgtattaaaacctttatgttattagctaatgtattcttcttcacaaacactttatgcagtactaggatccctgttctacag

SEQ ID NO: 757174 - DNA, 538 bp, Homo sapiens
tgttcattatttatgttcctgctcattagcgcctagatgtgttctcatgaaccacaggaaagagaaaagaccacaaaagctgctgtctttggctgacagctcacagacaaggcttttacaaacccaggttacctaagacattgtcctttckgacaccaggcaagtccaaaaggctctgtcatccaaacagaccaggtggggctctgacagcctgtgggagggctcctatctgggttcctcctggctcccttgcgacttgctgtggggcgcggtggtgactcactgcagaatatacctgagggagcctgagctctgcaaatggcaaatgagggctgtagtggacatctgctggctgcctgtgcaactcctcccttccttgagagataggagctcaactttccttgggggaaccatcctttctcacactttgaggattctccccacttctagcctaagtcccagggctgagtgagttcctgatccacacctgtcagttagtatcacacacatgtggatccagccatgcctgaagctagtg

SEQ ID NO: 757175 - DNA, 626 bp, Homo sapiens
gggtgctgcaggcatttggcggctggggctctttcctcgcttgggcttaggattctgagcaaggcctgcgcctacagaacgtcctcagctcacagggtctcttgaggaggtaggggacctcatgggctcaccattgctttagggaagggaaccttcctggttcctcaaaaagatcctgcagcagaaccaaggattcagtgccatctctaatcytgctttccttctccatttaggatgatgatcctcccactctcttctttcaaatccacccatcatcccttctccagccagccagccacacatcctgcaccacctacccaggatacctacctatcaaaccttgtgcacctacccatctatacatcatctacccatcagccaccccagttcatccatccactcacatcccttccaacccaccaccatcccctccactcttccctggcatctatctatcccttagttactcatccactcctgtttgatccaactcgcctcccacccattcattctctccttgatccactcatccattcacccatctactatgtatccatttacacctgctaggtggcagacactgagtggggtctgggccttaaggactttaacatttgacaaaggga

SEQ ID NO: 757176 - DNA, 655 bp, Homo sapiens
agtaactaataagtcacactagtataggctagtctacaatgaatcttcaagtgctggaattaagtccactgaggacagcgttcaagattcaatcaatatacatttattttatacctattatacaactgtttccaatttcacatcatgtaataccacataaaatcaatgcctgcacataccttttacgctagtaaatactatatgcagttgactggtatgcatgtagcaattagtagttttgtatatgatttgctcaaatgtaagaactaagaacattcttcctaacagtgacaacttttcccctttagaaatacatcaaagttcctcctcaaagaatctgatgagtagtcctccaaggaagtytgaccaagaatcatatacactcatgatatgagtgtatttctagtaagcaagactacaacaaactttgctttgagtaatttaaatttaaaaccaagaaacaaacttaattttccaaatgtgattattacaatattagatatgcttgttgaaacaatatccttcctctttctcctgccccagccccaggactaagaatttttgtattaaagaataagtagaggagtaaagaatttccagacaaggtaaaaacagcagcaagaacactgaatagaaaaatagtgtgatttctgca

SEQ ID NO: 757177 - DNA, 602 bp, Homo sapiens
atactttgttttcttacagtaacatttcacagtggactaaattaaatccttttgatttttcctgtggacaaaatcacaaagaaaacctaatcgccttaaattcaggctttctggactcggggaaaaagaaaacatacagaaaaataagagaaataatggaaaacattaactttaattgtcacttctgatagttgacatttgtttgtgggtgtgtcactttttagtaaggtatagtaaaagtagaagtaatgctaatatttgctgaacgtcttctatttgccaggcactatgcttggtgcttgcaataccgtgacaaatgagagagctcctgtccctgctctcacagaatttcaccacacaaaaatgaataatatatgatttcttactttccagaaagatttttatcatcaattttaagcaattttgagaaatctattttctmtgtccaattcagacattcatattaataatgtaaaacctaaagcgcttttctgctaatgaccccacaaccaaatagccactgggaaaggtaagtatgagatcatacaaactgtccatttgccaatgcatgacctgggcttattacttgttttttccctgac

SEQ ID NO: 757178 - DNA, 542 bp, Homo sapiens
cataacttttttgttatttgacattaaaatggatttgacattaaaagcataggaaacaaaagcaaagatagacaaatgagattacatcaaactagaaagcttctgcacatcaaaggaaacaattagcagagtaaaaagacaacctacagaattaagaaaatatctgcagtccatatatttggtaaagggctaatatccaaagtataagaggaaatcaaacagctctatagaaacaaaacagataatccaataaaaacgtgagctattgacctgaataggtatttgtcaaaagaatacatctgaataactgatagatacttgaaaaaaygctcaccatcactaatcattagggagatagaaattaaaatcacaattagatatcacctcctatctgtgagaatggccactatcaacaaaaacaacaaacacttgcaagaaggtggagaaaaagggaacctttgtatcctgttggtaggaacataaattagcataaccattacgggaaacagtatggaggatcctcaaaaaactaaaaatagaat

SEQ ID NO: 757179 - DNA, 639 bp, Homo sapiens
ggccaaatgtaactaatttgaattgaaatgaaacacatagaaattggatatattaacaaatattaaaggatcccctagacttcaacaatcaggtattattttacttatctactaaaaggtagtgtctctattaaaagataaagatgacttatatttagattattcatctcacaagaataaaaagggccggtcgtggtggctcacacctgtaatcctagcactttgggaggccgaggcctgtggattacctgaggtcaggagttcrcgaacagcctggccaacaaggtgaaactctgtctctactaaaaatacgaaaatcaaaacaaaacaaaaagcatttagccaagtgtggtggtgggtgcccataatcccagctacttgggaggctgaggcaggagaattgcttgaacccaggaggcagaggttgcagtgagccgaaatcacaccactgcactccagcctaggcaacaagagcaaaactccatctcaaaaaaaaaaaaaaaattaaaagaactgaaatcactgtggccacttactagctatgtgcctttcactgcatcagtttcctcatctgtcaaatggcaatgacaacatctacctcatagggttgctattattaaataagcttgtatttgcaaa

SEQ ID NO: 757180 - DNA, 611 bp, Homo sapiens
acttgtgtgtgtttgagcaactatgttgttgtttttttaatctatggacactgtgggtcatgtaagtgatgatttttcttcttgtcattttggataatagaaaggtcagagcctagttcatgatgtgtctctgagcaatgatgtttctattttaactttacttcgtgactttatttcttttcttgattttatttttctgtcctcttgaattactgtattgaaaaatttttccttatattctattacatatatttctaagagctgcctyaaatgtatctttgaacacagtaagggtataaacaaaataataaataagatagcaaaaacaaatttgtaatgcttactgtaagaatcatttttatgtctatacaaccttaaaaataaaataaaataaaataaaaccccccaaattaaaaaaaaagtgatggccaaaatataaaatattaaaattatttattatttcccataattagataacaaaaaaaattgttatatgcaataaaattgcctgtaactaagttaattttaactgatttatgtgatttgatttggactatataaagcagaatcttctaaatatctggcattgtatactaattgaaacaacatca

SEQ ID NO: 757181 - DNA, 625 bp, Homo sapiens
ttcaaagtaatatattttgatccagatttatgacttcccattcccccctaatgtgcatgagaataagagattttattaatgttcaactttttcagaatattaccttctttctgtttcctgagaaaccctgcaactaggtcagattttctcatgtcctactatcttagcctttctagagacatgatgggtttcttgcttgcttgcttgcttgctgtgtttttttctcctctgagatttcaagttaccaaactttcataataaagtttcctatcagtgtttttaaaaagttataagcaaggaaaatatgggagttgttaaacaaacaggtagaattagaaaraaaagtatgataaataggtaggtgaaaaacttaattttaatccattttaatattgagcctctataatcttaaatcttattttaggtcccaaattatatttaggctctgggtcctttccaagcaattttctcagcctggcactctctattctgtcccctaccccatccttcctttgccacacatcctttagatctaagtaaaaatagcatgttctaaggattgttttctctggtttatcagctctgtggatggagccatttaatttttttgttgctgtattcccaa

SEQ ID NO: 757182 - DNA, 527 bp, Homo sapiens
ccaatatatgtaggttctttgcatgctttatttatcatcttcaggatccctaaaggtctttcccattcattaggcctgttttccatgtgttgaaacccaggctcagagagcttagtggtttctcccagaggacatagtcagcaagtgtgttagtttcttgtgcctgccataacaaatcaccacaaaccgggtggcttaaagcaatagaaacttactctttctcatttctcagaggccagaagtctcaaattaargtgtgggcagcgttggttccttctgggaccctaaagaagaaattgtcccttagctcctatggctgctggcactcctccgcgttcccttggcttgcaggtgcgtcaccctatctgctcctccctcctcacgtggcttctctctgcgtccctgtatcttctgtatcttctcttcttcttttaaggatgccagccatagaatttgggcccaccttcatgtgggataatttcatcttgagattcttagctgagattcttaactgactgcctacaaag

SEQ ID NO: 757183 - DNA, 610 bp, Homo sapiens
gtcagagggatagagcgtgggaaaggcaccaatgctggctttgaagatggagggaagagccatgagccaaggaatgcaggtagcctctagatgatggacaaggcaaggaagcggattctcctctagagcctccagaaggaacactgacctgcagacacctttaatttcagcccagtgagacccagtttgggcttctgacttctagaactgaaagataaatttgtgtcattttaagccacaaagttcgtggtaatttgttacagcagtcatgggaaactaaatctctatttctactaagtctattaaatgaactctgtttcatttctactttaagtatgagtgcccagccaaaccacccaaatcccaggggaactgtactgtttctttggaaataagaatctgtcgkatgagttcagccttgttctttagtcgacataccgattatgatttctagttgtctaatttaagattatgaactcctccatgacaagcacagagactactatcaggctctgttcataccagagtcccgcacatgtttaagaaattttactgattcaagagaagtgctaaactgcaaattttctgggactatgaattcctcaaagaa

SEQ ID NO: 757184 - DNA, 587 bp, Homo sapiens
accccatacctctgagatctcttcatttagaggaaaggaacttaaggagagaatggaccctccatccaggagtcaatgaaggtctctaacagagaagccagtctctcacagacattgttggtagagcactcaatggtacaacacacccccttccaatagaaagtcattttattccatttttaaatttacattttatgtttctcattttcataggtagcccgtatccctccaagcacagcatmaaagatgggtttaatttggtcctaagaaaattgtctcccagccagtgattgtttcataaaaggcatgtgaatccatcgtgccactgggataccagtcacagtttgtcgggggcttcctccctcttctagaaatttctacagttgcactttcccacaaggtaaccccttgacacagatggctactgagcacttgaaacatggtgaatccaaattgacatcatcatctctccaacacttagtatgaaaaaggaatgcaaaataccttcttaacttttttcttcacggttgatcatgtgttgaaatgctggcattttacatatgttgggttaaagaaaatatatttta

SEQ ID NO: 757185 - DNA, 587 bp, Homo sapiens
accccatacctctgagatctcttcatttagaggaaaggaacttaaggagagaatggaccctccatccaggagtcaatgaaggtctctaacagagaagccagtctctcacagacattgttggtagagcactcaatggtacaacacacccccttccaatagaaagtcattttattccatttttaaatttacattttatgtttctcattttcataggtagcccgtatccctccaagcacagcatcaaagatgggtttaatttggtcctaagaaaattgtctcccagccagtgattgtttcataaaaggcatgtgaatccatcgtgccactgggataccagtcacagtttgtcrggggcttcctccctcttctagaaatttctacagttgcactttcccacaaggtaaccccttgacacagatggctactgagcacttgaaacatggtgaatccaaattgacatcatcatctctccaacacttagtatgaaaaaggaatgcaaaataccttcttaacttttttcttcacggttgatcatgtgttgaaatgctggcattttacatatgttgggttaaagaaaatatatttta

SEQ ID NO: 757186 - DNA, 605 bp, Homo sapiens
acatttagtttttgtccatgtggacaaaattaattgacttggcatcatttattgaaaagcccatttttttccgcttcactctagggtcatctatgccataaagtgagtgacacgtgcatgtttctgaactccctgataatagtttggatatttgtcccttccaaacctcatgttggaatttaattccccatgttggaagtggggtcccataggaggtgtttggatcatgggggyggatccctcatgaacagcttggggtggtcctgtggtaaagtgtgagttcttgcactattacttcatgggagatctggtttttttaaagggggtagcacccctccccttgctgtctcttgtttctctgtctccatgggatctgtacattctcagtctccttcccctcccaccatgattggaagctttctgagggcctcaccaaaagtaggcactggtcccatgcttcctgtacagcctacagatccgtgagctaaataaacgtattttctttataaattacccagcctcaggtattccttcatagcgacacaagatgaactgagacaccctcttttctttgcatcactttgttattctaaccttgcttcaat

SEQ ID NO: 757187 - DNA, 641 bp, Homo sapiens
caagttttagaagtttgtcgatttactaacacatagaaacctgtcaattgttaaataaagactgcattgaacatataggtacctttggaaataatcaacatattgctatatgcctccatttattaagtcttcctcaatttatttcaacgatattttatagttttctgtgtagaagtcttacacatctttcattaggctatttctaataatttaatgtgtgtgatgctattgttaatgccatcgttgtcttaattttattttctagttatttgcatatagaaatacaactgatttttgcacattgactttgtatttagcaaccttgataaattcggttcttagttcttatattttatttgtagatgcttttagatttctacttttcartaatgttaatgtctgctaacgatggttacattcctttatttcttattgttgcatttctaaaatttgtattccttcacttactgaaccctgtgatgcaacattacatagaagtcacaataggggacattcttgttttattctcaatttcaatggaatgctttaaatatttcaccattaagtataatttttggtgtggattatttgttagtttgatttttgcagatatcctttatcagaataatgcttttccttag

SEQ ID NO: 757188 - DNA, 565 bp, Homo sapiens
ttacaagtgtagcctcccaaagaaaatagtttagtcagaattatattaccttgagccaaaggctgctgaaagacatacaaatcaaagaccaggtgcatgggatctttcagttttaatattcaaaacagaaaacaaaaatggtatctgagagtaagaataggtagcattttaraattggtttcccaagaggagtcactagactcatacatcattttggtgactgttttaaccagaatgtctcaaataactttagctttgcaaatagattacaaagttctgtacatgtctaccttctccaggagaatcacaacccttcaagttcatctccaaacatctagctttattttgaaagcagagaatggaagaaaaatggattcagaccaggggtcacaaaaattgaggggttttggcttgaagtctgggggtaaagttggcatcctataaatatcactttgggatttatcattgtagggcctgccagccaaacttcttaggccagcatttgcatctctttgcctaagagctttgtaggtcagagtccattctgccccaagtgttaaagtgt

SEQ ID NO: 757189 - DNA, 526 bp, Homo sapiens
agcaccaacagacacttaacggagacctgcatgctcacacccaacatgcctcatggtagagtttggttacataattacacttatcacacgcaaggtcagcacaacgtggaaaaagctgaaactcatcttttctgtagacacacacacaagaagaaacagaagtgtgtattcaccaagtttcacctcagacttctaaactcccagagcttttyttattttgtgattttggtggttgtttgggagcaagataagattctcagaattaactgtgtctcgtaccttcccacccccaccccaagtagtaaaaggaagccacagagaacggtgccagaaagcaaagcaatcctcccacctccacgcccatctccctctgtacacaatgccacgacctgaacacacgaccgtcaccaagcgggaccagtgctgggggagacacctactgcgcagtaccattcaccagcaccttgccactccaggggttagctcccagccttggaaacactcaaatacacctaacggccttgtc

SEQ ID NO: 757190 - DNA, 617 bp, Homo sapiens
cgggggagtctgtaccaaacatgtacagatttttttctgtgtcattattcccaaaacaatagtctaccaactatttacatagcatttacactgtattagatattataagccacgtagagataatttaaactatataggaagatgtgtgaagattatatgcaaatactacactgttttgtatgaggaagacttgagcatctgtggattttgacaccctgagaggggtcctggaaccaatccaccattaataccaagggacagggagagatcccatacccttttcctagyttccccttacagcagcactttgcaaaactaccctgcctgcagtatcaacagccagggtcctgatgtaacccaccaacccaatgaagatgtctccacatttacatgtacttacgtgtatttagttctctacaattttatttactgtgtagatttgtgtgtccactaccaccacagttaagatcctgaacagttccaacaccacaaggatccctccagtggccctgttacgaccacccaccccggcgtgcgtgctcccccattatccccggcaaccctcatatgttctgcatctctgggatcttgtcacttcaccaatgctatataaatgg

SEQ ID NO: 757191 - DNA, 602 bp, Homo sapiens
agctaggattatcagctttattttacagatgaggaaactaaggctctgaaattaagggacctgcccaaacttacatagtaaatgtcagagctaggatttgaacctacgtcttctgattaagtccagtgatcaattcctggtttatagtacgctgtgacacttttctaagtcctctagaatttataatatgtattacgttattcaaagtcttattttctgtcctctattttgtgkcacataatgcatatttatatagacaacaatgagagcatatttatttgttgtcctctaattgctgcctatataacttatctctctactggagcaaatcagacactaactcttttgtggactttatatagcctagcacagtgctatgcaggtcataagcactaaatacatcctggttagatgactgatcctttgcactacatcactttatatctttcttaagatatatcatctttctttcacacacacattatgctctagtaaatatttccttaaagaatcagtacattaatgatggaagttctttctccctgggagcactgcctcactaaataaggagtagcccttaagactccttttcactgcctttc

SEQ ID NO: 757192 - DNA, 523 bp, Homo sapiens
tgtgatggactgggtaagacaacctcttggccttcaggtgacacttgcaaggaggtaccaggtgatgtgatggtggctgggagtttaggcccaaccataggccccagaaagatgctcaggtacccaaggtggtggattgaattgcacagttcccaggaccccagaatatgtgccctgtctgaaagagggggcaaagctgggctgtgcaggtttgtgctcaggccccttggtgagagcaggcaccaccattggtggccaggataaggtgatcctcaggccccaggcagagtgctcaggtaagggatgatggcagctgtgctaaagtgctaccactggacagagtgtggctgtgytctgtggccacagcctgggctggtaggtgagaatgtatgtccttcccacagtcccagtggggcttgctttccagccttgacaatgttagcccatgcctgtctcaccctcccaccctggctgcaggaggccccatttcagctggtgagcaagtcccagtggcaacttacac

SEQ ID NO: 757193 - DNA, 628 bp, Homo sapiens
ataattatgtaatcctccttattttcctctaagaaccattgtcttcctttacctcttcaaaaacacgcatagtttactatggcacatgtattcccattgcaatgccctattccccaatacatatcattttctttcttttagagagcctctctctgttatctatctaggttgacagagatgatggagtagagctgccccagttaaggtattccaacagacagaggccccagttgacccacattcaactgagcccaacytaagtcagctgactgaccccctactaacccccgagctatgataataaatgactgttgctttaagccattgaattttaagacaagacagtttgttacacagaaatagataagtgatacaatgccttatgagctaatgatggcaacttggaaagcaatgctccaggtggtttttacatgatctctttgtaatgtttgcttctgcctagtgaatgtcccaggccataacattttaggcactttgcttatagctggttgcaatcctacagtctcatcatacatagggcaataaccaggaacagagcaatcagaaccttccccactcaccccccgacccaccaccccaaatacaaagagagctcacattacggtag

SEQ ID NO: 757194 - DNA, 604 bp, Homo sapiens
tcccagaaacaaaccctgagaacagtatttgagtttatatggaaggtgaaaggaacacctgtaaggaggtgggaggagtaagacaagaaagggcaggtggcgggtaaagggtgtcttgacaagccagctggacctgtgggtgaacagcgcttaaaccctctgggattytaggaaagtcagcagtcattagttgaaggcttctctggaggatgttaattcttcagcacctctggtctgctgtgcacgcaaggaaccaggctctgacagcagataaaaccctcaggcaaagaaatgtaagtgctggccacaaggagtcaggctagggtatgccgaagagaagattaggagggggcttaggtggagcatcaacggcacctactgcagtatatttaactgaagagcccacaccagcttctgatgcctagaaaaagttcctctttttttttttttttttttttgacagagtcttgctttgtcacacaggctagagtgcagtggagcaatctcagctcactgcaacctctacctcccaagttcaagccattctcatgcctcagcctcccgagtagctaagattacaggtgcgcaccacaattcccagcta

SEQ ID NO: 757195 - DNA, 609 bp, Homo sapiens
ttattcaaattcttatttttttacccattttactgtgttccattcctcgatgaatgattagcataagtgcttttattactgacttgtatctgaagtttaatgaggtacctctcaatatgtcctgggatccaggctttctctgggttatcactccggttcacttcatgaactcttcttttctgttagccttctctgatccaagtcaaccaagtaataactcacatatcactgcccatattattaataccattcaaaaaacaataagttctgagtatatctgtggaagatgagccatacaaaaggcagacatttttgccttactttttttttttactctgaggtattgcaagtgcctaagaaagtattttttaaatgaataaataaatctatatttttagcctgtcatctaaatctagtttggctkcaatgaccttgcctccttttaagtatgcccctcctgtatgccttgatacttccacagtgcgcttgctatttccagagctaaaatcacttcctgagcttcattcatctaacatcttgaaatttctctgatgtcccaatttcttatagtctttcagttctaacaaattctctacagtaaaataccct

SEQ ID NO: 757196 - DNA, 486 bp, Homo sapiens
cattctcccattttatcactgggatcccatttggggttgttcaatggcactgcttctcttccaactgaataaaactcatctccttccctgatactacatgagatacaaagctcatccccaaatctctcttccacttgcagagcatcctgcttctcagtgttagggtgtgtktcaaaagtaacataatgtctttccaggagagttcaaatacttgggctaaggtctggaaagcctatacatatctgtcagtgtcattggaacttttgccaagatcccccttaatttgccttaagtcctggagagagaaggtgacttggaccttactggggccatattcactaggcatcttttgtaggggcaggagtgagactggggattgtctagagtgagggtttctaggaggggacaagtggaagagagaaactgaatagggaggacagggtggacccagaggagcagggctggaaagagctggctcccctgttg

SEQ ID NO: 757197 - DNA, 615 bp, Homo sapiens
tggaagcaaaacctgtatgtgttgtttggcaagtagtcaactaggagagatcaggaagggatgaaaggatgaggaggaaagaagcatgaggagattagcatgggtgagtgcaaccttcttttacagcagtggatttggttaaatatgtttcactcttccaaggttattaaatataagtattttagaaaagaaaatgtacagatgattctgcttttcctaccaaatataatgcaactaggccttaacgagtgaagattcccccttttttttgcactttaagagtagctttcatcccaaatctgtacaatgcctacycattcagccaattattcaaaaaggttacatttgctacttcatctttaatgaaaagaataataaaccaaatcaggaacaaggattttagtattcttttctactttaaacttgggcaacagtcagctcctctttgactcattttcttacctggataatacaaattaataaaaacttgcttatctgtctcataaaaatctcgatgagcaatgatctctcagtgtgtttgaatgtataataaaaactattactccagacattttacacagcaagaagaactgtttaaatctctgtcatggaaat

SEQ ID NO: 757198 - DNA, 563 bp, Homo sapiens
tcaacatgagccattttggggaaacatgaaaatgaaaacctataagcagaaacctatgtttttaagaatcaaatataaatgaaatatatctgaaagtatggtctcatcaacctataaatatgttatactatgaggtaaaattaaatggttaaaaccctagttttgaaactaacactttcaaatgaccttttcataaataatatattcaraattatttttatttttcaaatatcaggtttttttgcattgttttgttttacttaataaagtgtttttcacatagaatcattctttttgcaagaaaaatgataattaaaattttcatctgaaaggattccaaaggctaaattatttttaaaaacaaatgcatcaatttattactaaaatttattttgcaacccattcagtttatttttgcctttgagaatcacctagtttctactcagttacttaaaaatctgaaagttggcaaacagcctctttaagcagggcttttaaatcagaacttctttctccccgccccaatatttgtaggatttttcatttttccattgttgtagggg

SEQ ID NO: 757199 - DNA, 551 bp, Homo sapiens
ctcctgggttcaagtgattctccttcctcagcttcctgagtacctgggactacagtcacccaccaccacacccggctaatttttgtattgttagtagagacagggtttcaccatgttggccaggttggtctggaactcctgacctcaggtgatccacccacgttggcctcccaaagtactgggattacaggcatgagccacygcgcccggtgtagtgaaagttgtaacgattcaactgtaattcccaccattgatggcgctcttactgcaagctggttggggattaatgcagctctaaaactccatcttatgaccagtttgctcagaccacttccaacagtactttcactggcagccatactccaacatagaggttaatgggcagtacttattaaggagtgcttttgagagggaaacctatggaaggaatggaaagaaagtaggacggggtagagaaataagtagagctgtaatccaggacagggataagactcagctaatcacatagaaagcagagagctcttgggctaaaaccaccaatcagaatatca

SEQ ID NO: 757200 - DNA, 521 bp, Homo sapiens
tagcatggaatggaatggaatagaatgtaatggtatcgaatggaatggaacggaacggaatagaatggaatggaacgaaatggaatggaatggattcaagccagttggaatggattggaatggaatggaattgggtggaatggaatggaatggaaaggagtgtaaatgaattgaaaagaatcaacccgaatggaatggcwtggaatggaacggaatggaatggaaaggaaaggaatttaatggaatcaacgcgaacggaatggaatggaaaggaatggaacggaatggaatggaatggaatggaacggaacggaatcaacccgaatggattggagtggagtggaatcaacccgagtggaatggcatggaatggaatggaatggaaaggaatggaatggtacggaatagaatggaatggaacgaaattgaatggaatggattcaacaaaattggaatggagtggaatggaatggaatggtgtggaatggaatggaatggaacggagtgtaaaggaattgaat

SEQ ID NO: 757201 - DNA, 521 bp, Homo sapiens
tagcatggaatggaatggaatagaatgtaatggtatcgaatggaatggaacggaacggaatagaatggaatggaacgaaatggaatggaatggattcaagccagttggaatggattggaatggaatggaattgggtggaatggaatggaatggaaaggagtgtaaatgaattgaaaagaatcaacccgaatggaatggcttggaatggaacggaatggaatggaaaggaaaggaatttaatggaatcaacgcgaacggaatggaatggaaaggaatggaacggaatggaatggaatggawtggaacggaacggaatcaacccgaatggattggagtggagtggaatcaacccgagtggaatggcatggaatggaatggaatggaaaggaatggaatggtacggaatagaatggaatggaacgaaattgaatggaatggattcaacaaaattggaatggagtggaatggaatggaatggtgtggaatggaatggaatggaacggagtgtaaaggaattgaat

SEQ ID NO: 757202 - DNA, 545 bp, Homo sapiens
  misc_feature 1, 2: n = A,T,C or G
nngtcctgggtggtcagtgcagagatatgtaacaatgcctccataggcagagtctagacaagtgttacctaacccaggtgacccgtgcagagtgatgtcacacgcccttctttagcacagactagaaagtgttacatcacctggctgatcagtgcagagatatgtcacaakgcgccctgtatgcagagcatagagaagagttgcatcacctgggtaatcagtgcagagatatgtcaccatttcccctgtagtcagagcatagagaagcgttgcatcacctgggtgatcattgcagagatatgtcacaatgtcccctgtaggcaaagcctaggcaagggttacatcacgtttgtcatcagttcagggatttgtgaaaaggtccctggaggcagggcctagacaacagtaatatcccctaatgatcagtgcagagatatttcacaatactcctgtaggccgatcctagacaacagttgaatcacctgggtcatcagtgcagagatatgtcacaaagctcctgtaggcagaacttagatgagttacat

SEQ ID NO: 757203 - DNA, 652 bp, Homo sapiens
aaagttggactagaagatttttaggatcccttctagttctatgattatatgacatatgctgaagaaaaaatagtttctagttcaggaaaaggataatcaaatttataaatacagaaagcctttataaattcaagtaatttggacsaaggctgatgtgaattggttaaatgtctgaatttgtgaatacttgtaaatcattaacactgcaactattcacgttaagctgtaacttgaattaggctagcaatattaacatgtagcgagatatttgagaaacctgctactttgaataattctgacttagaatatgaattattttggatgactaaaggtaatattttctaaagtagcttaggtattacagtaatacttattaaccttttaaaatgtggtttaaaggcaaagttcagcccctgaatactaaaaataattgaacatacagtacttgcggatcactctgtatgagacaaagggagtagtatgaagttttatgttttttcccccttaaataaaatctacattagtcttttaaaaatatgtatttttaataaccctagctgacagaactccatcgcaaggttattgacttattttggcagaatgtgtttattattttgtacctctgtacacaagcacgtatgtctcacttgac

SEQ ID NO: 757204 - DNA, 533 bp, Homo sapiens
ctaaacccagaaggtggagggatccgaagggcaggcacagaggctctgcagggctgggctgcagctgaccctctcaggcttctgggtcaaatcctccccctgccaaccctggccctgggggggatgggagattccagccaggctctcaatgagccagcagaagcagcactaaaggacagtggaggactgactgcccttgagggcaaggaggcctttgctggggcrtggagattgcccacgctctgtgcactttccccaagacaggcaagaagaaatggtggttccaggccctgacagccctgggatttgccagagttttcaccagttgaatggggggcagtggcaggagcaacaagggacaaggagcctgtgggacagatgcacatgttgttgacagcccctctctctggcctctttgcttctactctactgaccccttccttttggaagcactcagctacagctgctaagacctggagcagagtcagaggagactctaagccccagaccaaactcagtgcctcccttgcaaa

SEQ ID NO: 757205 - DNA, 537 bp, Homo sapiens
gcatgaaaccaagaaaagcattatgtgaattctggctgttagtttaagactttccatgtactttcacaacatttcttccttggtgaaacttagcacatagtaatgacagggttccattccttatatctggtctaatcaaggagaagcacaaggagaaggtcctgttttttccctccccactcctgccccatgcaggggctggggagggaaggaagggaagtcttggcaccctcctgcccactcccagccatgttcagtcagcccagccacatccagggtgccgacactgaagggcragaaggcagctgggagagggatgagaagcgaaggaggagttgtgggaacctgggagggccaggacagtggtggggcaggagcgttagctggttcttgactaagagaggagccagcaaaacagcctttccagactgaccccaggggatgccatcacccaaggaagaagagtcagaggccgagcttgggatatgccttcttcttccagagcttgggatcctctcaggtccccgggcttccctt

SEQ ID NO: 757206 - DNA, 517 bp, Homo sapiens
cacgtgggatatggcactcaggagagtcacttcttggatctctcccgaggaaatagtgctactttagaaatactgttattaataatatttgtataagcaaaaattagaaagaatcagaatgcatccatgtagaataatgcttattattatttcagatggtagtgtgggaaaaagcaggagacaaaattatacacacaatatgtaagtatgatttaaaagaaaaacaagactagaagaaaacaaaatacaatgatggtatctttgggtggtggaagcatggatgatttgtttaattctttctgcatttgtgcttggtgatcagatttcttacaatgattgtgcattacttttawtatggaaaaaataaactttattgtaatactggagatgtagaaagaataggaagagagctcacaccatggaagacaaatccaacagacaagtgcattcctgtggtccagtgtcagggatccttaaagcttcaagtggatctggcttatgggcagagctacaatca

SEQ ID NO: 757207 - DNA, 479 bp, Homo sapiens
gagagagagagagggccattcccagttgagagaaaggcctggttagaagcttggagtcatggaggagcccagtgcatatgggagcacagatgcatacagtgtggcagaagcatgtgacaatagaaagaagggaagggtgggagcttcgctagagatggaaggggctgccccacttyccaagcctgagcctcaccccaagattctcccctgcaccctcacagtgagtcagttactaagcccaacagaaaaggacgaataggtacaataagtacctatctgtcctctctttcccatccccagtgtcattgccttggctcaggcctttcctgcctggactgatgcagtagcctgctaactggtttccctgtctctactttcatccccatccaatacatccaccacactgctttcaaggtgatctttcaaagatgaatattttttcctatcatttaaaatccttcactggaaatctgctgatt

SEQ ID NO: 757208 - DNA, 634 bp, Homo sapiens
cagaagcctgtgtcagctctagccccttgggggcagggccactagaggatccctggcccttcagggtctctggttcctgaatgtgggaaggagatcccagtttctgtataacaaatttaggccctattcaaatttgctgcctgacttgaacagggaaagaggtaagatttccatttctgggatgactgtcagggaacaggaggtagggaaaccctgaccttgggtgaagaggtaggagataggtgtgtatgggacacaaaggatgacggacagagccagaagataaatcttaaggtggcaacttaacagaccaggtcaggataaataaaagcagaggcagaggggacagcagggcaaggagccaaccataaaggcacacagaaggtgataggctggaggtgggaaccaattggattcactayacaattatatgtaaattgttatgtaataattattatacattttggagctagctttcgtaacctttatagctttgtgatggtcggcatacacagatctgttctgaaattctggatttcttcctccataacgacattaacttccctttgagcctttacacccaaggcaagccctgctacctgggaggttatccgtgcaagcagaaggccagtag

SEQ ID NO: 757209 - DNA, 650 bp, Homo sapiens
acatctaattcatctttgaatccccaatgcctggcacactgtttatacgtaatagggactcaacaaacctttgttggagaaatgatccccaaactcaaatttcctgctaatttgggtaaggcaatcttagaaacactctaagacaacctggaagatgggagatcaatatgatacatttacagagctttaagaaccacctgcataccggctgtggtggctcatgcctgtaatcccagtactttgggaggcaaaggtgggaggattgcttgaacccasgagttcaaggctggtctgtgcaacactggagaccccatctctacaaaaaatacaagaactagccaggtgtggtggcacacacctgtagtcccaaatacttatgaagatgggtgggaggatcactggagcccacaagttcaaggttgcagtgagcaatgatccgccactgcactccagcctatgtgacaaagcgacaccgtctcaaaaaaaaaaaaacaaactctgcagttaccaacaatagccagagcactacattaccatgaatcaagtcaaatgtgaagtctcacattaatctagtcagtaagtaaaagaagaatccctgtctgtattaccaagtagtgacaaaattgacatatatggtagctttattctat

SEQ ID NO: 757210 - DNA, 650 bp, Homo sapiens
acatctaattcatctttgaatccccaatgcctggcacactgtttatacgtaatagggactcaacaaacctttgttggagaaatgatccccaaactcaaatttcctgctaatttgggtaaggcaatcttagaaacactctaagacaacctggaagatgggagatcaatatgatacatttacagagctttaagaaccacctgcataccggctgtggtggctcatgcctgtaatcccagtactttgggaggcaaaggtgggaggattgcttgaacccacgagttcaaggctggtctgtgcaacactggagaccccatctctacaaaaaatacaagaactagccaggtgtggtggcacacacctgtagtcccaaatacttakgaagatgggtgggaggatcactggagcccacaagttcaaggttgcagtgagcaatgatccgccactgcactccagcctatgtgacaaagcgacaccgtctcaaaaaaaaaaaaacaaactctgcagttaccaacaatagccagagcactacattaccatgaatcaagtcaaatgtgaagtctcacattaatctagtcagtaagtaaaagaagaatccctgtctgtattaccaagtagtgacaaaattgacatatatggtagctttattctat

SEQ ID NO: 757211 - DNA, 650 bp, Homo sapiens
acatctaattcatctttgaatccccaatgcctggcacactgtttatacgtaatagggactcaacaaacctttgttggagaaatgatccccaaactcaaatttcctgctaatttgggtaaggcaatcttagaaacactctaagacaacctggaagatgggagatcaatatgatacatttacagagctttaagaaccacctgcataccggctgtggtggctcatgcctgtaatcccagtactttgggaggcaaaggtgggaggattgcttgaacccacgagttcaaggctggtctgtgcaacactggagaccccatctctacaaaaaatacaagaactagccaggtgtggtggcacacacctgtagtcccaaatacttatgaagatgggtgggaggatcactggagcccasaagttcaaggttgcagtgagcaatgatccgccactgcactccagcctatgtgacaaagcgacaccgtctcaaaaaaaaaaaaacaaactctgcagttaccaacaatagccagagcactacattaccatgaatcaagtcaaatgtgaagtctcacattaatctagtcagtaagtaaaagaagaatccctgtctgtattaccaagtagtgacaaaattgacatatatggtagctttattctat

SEQ ID NO: 757212 - DNA, 637 bp, Homo sapiens
gctgtctcccagcctcccccgggataaataacagtgggatccctgtctcttctctggcagagcagcccatctacctcctccaaccagacccaactagcccagatgcttaattctccatgacttgtaacacctcaatacctttgtatttgctgttccatctacctggagagcctttccagggagctagaggagggagagattcctatgaactgaaaaggtgagagtgacacttagactcagaatgggtgttaagattcaaatgatctcatccaatcattttgcactggaggcttctgaacccagaggaaaagaaaacaggccaggcgcggtggctcacgcctgtgatcccagcactttgggaggccgaggtgggcggatcacaaggtcaggagatcaagaccatcctggctaacatggtgaaaccctgtctctactagaaaaaaaatacaaaaagttagccgggcgtggtggtgggcacctgtagtcmcagctactcggtaggctgaggtaggagaatggcgtgaacccgggaagcagagcttgcagtgagccgagatcacaccactgcactctagcctgggcaacagagcgagactccgtctcaaaagaaaaaaaaaaaagaaaaagaaaacagtat

SEQ ID NO: 757213 - DNA, 527 bp, Homo sapiens
ctagctggctacctcccaacgtggaaaatacccatttttacatgtgtctcatggcttatggggtgactagcctcaggaattaggaaagagggagaactagcaaaagcctgagcccatgcccactgcacagccaccccccaccatggagattgcctgactggctttggaagagaaccccaggtgatcctccctcaggcttcagaccagattcctctctgcccaaggcccacattgattaattgtcccatttaacaccactgcctcagtctttarggaggaaggtggcgtgttagctcttctttcgagaaaggggcccaatttattcttgtccaggcagcataataaataacctgccccttttggcagggagtttattagagactgatgggacatttaacaataactgggggcctatgatttattaggtagggaggttcatggcatctctgaagacggaatgtggaatttaattgataaagcggctgtcagcagcaatgagatgcactcaatagaatatgcatttgagg

SEQ ID NO: 757214 - DNA, 523 bp, Homo sapiens
gttagtcaggctgggcttgaactcccaacctcaggtgggttccgcccaccttggcctcccaaagtgctgggattacaggcatgagccactgcacccggccagataagcaaactttatagagcacccaggagtccactatcgctggtctgaagtttgttgagtaatggaaggggaatccagaaaaggtgtttgaggtcatacttgggcagtcttgaaggacagtctgcaattaacgtgaatggcaatggrgagcctttgcagggtggtagtatgcctgcagccacacaaagaccactctcagctaggaattcataatagtgcaatgtatttttactattgtagagatcatgtcttaaatatacacgatagcctgtcccagaagagatctactcaaaactttttcagggcatgagaatgtacactcagtctttgagagtgatattaagtcaattgcaataaaccagcaacttgcacttgtcatagatttagtacacacacactcatgcatacacagtaatagatc

SEQ ID NO: 757215 - DNA, 552 bp, Homo sapiens
caggtagttgacactataagccacaaaactcaatgatcctaacaagcttcaagtgaagatgtagaagtatccagctcaatgagttgccattgcttatactttgatttccagcacaaaatggctggcctttggctggctgtttggtgaagcatgcttwtgagacatgaggagccagttctaacttctaattacatgaggaaatgctgtttgaacataatgcatttcctgggacttcttggtgtactccatcatccctcctccccatacacaaactgtcactccctgacatcctcaaatccatgatccatgactcctactgactgccccaagaacaatgagggtgctcccttagaagaagggcatggggggggtggagtgaccgttgagtatactctgattttttaaaaaactgtcatatggcgagatagtgggtttcaatgctgtcacctattcagtcagcccagatgaactagaatcaccatttcagttatatcatagctccaggcaagaacatgtcaccccctttatttccagcttccaacaagctgctta

SEQ ID NO: 757216 - DNA, 552 bp, Homo sapiens
caggtagttgacactataagccacaaaactcaatgatcctaacaagcttcaagtgaagatgtagaagtatccagctcaatgagttgccattgcttatactttgatttccagcacaaaatggctggcctttggctggctgtttggtgaagcatgcttatgagacatgaggagccagttctaacttctaattacaygaggaaatgctgtttgaacataatgcatttcctgggacttcttggtgtactccatcatccctcctccccatacacaaactgtcactccctgacatcctcaaatccatgatccatgactcctactgactgccccaagaacaatgagggtgctcccttagaagaagggcatggggggggtggagtgaccgttgagtatactctgattttttaaaaaactgtcatatggcgagatagtgggtttcaatgctgtcacctattcagtcagcccagatgaactagaatcaccatttcagttatatcatagctccaggcaagaacatgtcaccccctttatttccagcttccaacaagctgctta

SEQ ID NO: 757217 - DNA, 612 bp, Homo sapiens
ctgacaattaatgccaaggtattcacaaccttaatggtggactgcatagagctgtgggaattattctggtggtttttggatcaagtgtcctgtgagttttaggactaattggacccttttcaccaatgacatcatcaaggatatctacaggtggacagcagaactttataaattagaacttctaaaatagcgtctgccttctttacagtgtttactgtttccaattttacaacctcagacttcgcaggttctgagttcatggacaagacatttaaaaccaaagaaaatcctgctacttcacytttagagtcctcagcccatatacattggtaataccatcagcaataaataaaacaagcctaatctcttaaaaatcaacaggggtcaactccaagaatataatcctcaaagttgaatcatgaaagtttcttgttgcaataaaggctgactgccaaggcacttttttttcttggagatccattcagcagggttggaagaggagttggaaatgacagtggctacatgcatataaagcatttttgcagcttatccttgggtgactttgaggaagctactgtccgtggacttctacgagctttttcatcaagtcct

SEQ ID NO: 757218 - DNA, 577 bp, Homo sapiens
accaacaacaggcagagagccaaatcatgaatgaactcccattcacaattgctacaaagagaataaaatacctaggaatttagctaacaagggaagtaaaggatcctttaaagagaactataaaccattgctcaaagaaatcacagaaaacacaagcaaatsgaaaaacatttcatgctcataaataggaagaatcaatatcatgaaaatggccaaactgcccaaagtaattgatagattcaatgtcattcctattcaactaccattggcattctttatagaattagaaagaagagttttaaattcatatggaagcaagagcccaaatagccaagataatcctaagcaaaaagaacgaggcatcatgctactcaacttcaaactatactacaaggctacagtaaccaaaacagcatgatactggtacaaggacaggcatacagaccagtggaacagaatagagaactcagaaataagaccacagacctacaaccatttgatccttgacaaagctcacaaaaacaagcaatgaggaaaggattccttatttaataaatgatgctgggataactggcta

SEQ ID NO: 757219 - DNA, 577 bp, Homo sapiens
accaacaacaggcagagagccaaatcatgaatgaactcccattcacaattgctacaaagagaataaaatacctaggaatttagctaacaagggaagtaaaggatcctttaaagagaactataaaccattgctcaaagaaatcacagaaaacacaagcaaatggaaaaacatttcatgctcataaataggaagaatcaatatcatgaaaatggccaaactgcccaaagtaattgatagattcaatgtcattcctattcaactaccattggcattctttatagaattagaaagaagagttttaaattcatatggaagcaagagcccaaatagccaagayaatcctaagcaaaaagaacgaggcatcatgctactcaacttcaaactatactacaaggctacagtaaccaaaacagcatgatactggtacaaggacaggcatacagaccagtggaacagaatagagaactcagaaataagaccacagacctacaaccatttgatccttgacaaagctcacaaaaacaagcaatgaggaaaggattccttatttaataaatgatgctgggataactggcta

SEQ ID NO: 757220 - DNA, 398 bp, Homo sapiens
agggctgtcatgagaagcttcactgcttctggctggggaccaatcaactggagaagaacaagaaaagaagtgcattttcaaaaccccagtgaagccatgcaagtgcctactagtgggctcttcttcaagtgctcattggttccaggactttgtcarggattaagaacaagattatcgatctgttgttcccataatctaccatcttccccataaaactggttatttccctgtctcaagtcttctggcatttgttcatttattcattcaacaaatgcttattcatgatccacatgccaggcattggccatgcatgcaatatgaatggagatgaagaatcgtacatataaatattcaactacaggggttctcattctcaagttgggaggtatgtttattat

SEQ ID NO: 757221 - DNA, 623 bp, Homo sapiens
tctctaaaggtctacacaatttctacctccaatattgaagatgatgcaaagatgaaatacatagcatagcaaatagatgctatgcgtgaagggtcagaagtcacacatgattgactaatttggcattggagatttcttgtatttttcgcctgcattttcagttcatgtatgatcttcaraacactcactgcacttgtatttggagagtgattgtggtttacaaattttgtaaagatgtgttgtccattagaaagtctggttattgcttgaccattgccattaagcaattttctgcttttgcagcaccagtaattattagtctttaaacttttatgtttcaccattaagtagccttgtcacttaacttatcacagcctttttctgagggaaaaattttacagatctcttctgttgtgttgtaaggaatacagtaagaagaaataatattcagcttccccaagaccaaatttatattaatcagggttctccagagagacagaaccaataggatatgtatatagacatatgagaggtgatttactaggggaattggctcacaaaactatggtggctgataagtcccttggcagtctgtctacaagctaaagaccctgggatgtcag

SEQ ID NO: 757222 - DNA, 623 bp, Homo sapiens
tctctaaaggtctacacaatttctacctccaatattgaagatgatgcaaagatgaaatacatagcatagcaaatagatgctatgcgtgaagggtcagaagtcacacatgattgactaatttggcattggagatttcttgtatttttcgcctgcattttcagttcatgtatgatcttcagaacactcactgcacttgtatttggagagtgattgtggtttacaaattttgtaaagatgtgttgtccattagaaagtctggttattgcttgrccattgccattaagcaattttctgcttttgcagcaccagtaattattagtctttaaacttttatgtttcaccattaagtagccttgtcacttaacttatcacagcctttttctgagggaaaaattttacagatctcttctgttgtgttgtaaggaatacagtaagaagaaataatattcagcttccccaagaccaaatttatattaatcagggttctccagagagacagaaccaataggatatgtatatagacatatgagaggtgatttactaggggaattggctcacaaaactatggtggctgataagtcccttggcagtctgtctacaagctaaagaccctgggatgtcag

SEQ ID NO: 757223 - DNA, 625 bp, Homo sapiens
tcagaatatgcaagcctatggggcaaagatacaagaaaaattcacttactgacatcttgctatgtcccattcagtacttgaaaaatggcaattactcagtgaatgagttatccatgtggctggcactacagtggattgatgaaatagcaacaagggctatttgatttgaagattcccttattaaaaagcatgaaatcatccctcagccctgcartgatgctctaaatttaaaagcaaacaaagcaacaagaaaccaaaaccagaaaaaaaaaaaaaaccaccaaaacaaaactgggtgagtgcttcgcaaagtccagcagaggcctgctgcctcaaagcaccagagggtcaaagtggcctgtgcctgccttcactgccccacgacccagaatgaaacttcctccctttcaggaagcctttgggagtcttgaccctccaactctgaatctggagagggagttaggtcccatggacaagggtgggccaagcaaaggcaagacgtgtgtttattcaatgtacattcactgagaaccttatggaagcattgtttctgccctcgggcttgcagtcaactggaggagacagctgtatgggggaagataaacctcagtgcagtgatgagggt

SEQ ID NO: 757224 - DNA, 500 bp, Homo sapiens
cttgggacaagcctggggccaggaagggaccctttcactagccacactctgtcccctgctctgttccatgtggaaatctctctgggccacagtgtgtgcggtgagggtaccgtgggcagctagagctcaaaagcatgaggtctgaggctctcaacctggtccagaagccctggcagcctcagcttggtgtcagggccatacgtccttgtggccctgtgcaggtgtcataatcaccatactgcctacctccagggcacactgctgtggtgtctccagcrgagctgtgctgaggggggccatttacataggtgacagtgtgagtggtgtccctggagttgtgcagtggctctgacaggtgccctcaacactccctagggaaagaagttctgatagtgatggggcaggggcacagggccaaagggaagagagcttgtctgaggggtacactgcagggcttctgggacagcctcccaaggccagcagtaatggggaaacgaggg

SEQ ID NO: 757225 - DNA, 518 bp, Homo sapiens
aaccaatacagattctccctggcaatggatctcttccgcaattcaaagatgtctacattagaagtgatgacgtttacatatcagaaaatccacccctataattaatcatgtcaattaccagaaaggaaatagttttgtgatcatcttaactgacatcaaaaactcatttgacagaactgaatatccattctgctgaaaacccttagtaaaataaaaataaaagaacatttccttggcataataataataaaaaaaacctatctgcaaccaaccgtcaacatcattcttagcaataaaacacctagccagggtcattcatattttagtcagggtagaatgagaaagcctgctattaacacaattattytacattgttttggaagttttagccaaggcaagagtacattaatacacaaaaggaaacacaacatttggaaaggaggagaaattgtcatcattatttgtacatgatattattgtttatccagaaaactcaagagaatcaactagaaaagtaa

SEQ ID NO: 757226 - DNA, 578 bp, Homo sapiens
gtaagccagaagagagtgggggccaatattcaacattcttaaaggaaagaattttcaacccagaatttcatatccagccaaactaagtttcataagtgaaggaggaataaattcctttccagacaagcaaatgctgagggattttgtcaacatcaggcctgccttacaagagctcccgaaggaagcactaaatatggaaaggaaaaaccagtaccagacaccacaaaaacacaccaaaatataaagacaatgacactacaaagaaactgcatcaactaatgtgcaaaataaccagctagcatcatgattacaggcccaaattcacacataacaatattagccttaaatgtaaatgggctaaatgccccaattaagacactggcaaattagataaagcgtcaagacccatcrgtgtgttgtattctggagacccatctaacgtgaaaagacacacattggctcaaaataaagggatggaggaatatttaccaagcaaatggaaagcaaaaaaaagcaggggttgcaatcctggtctctgataaaacagactttaaaccaacaaagatgaaaaaagacaa

SEQ ID NO: 757227 - DNA, 477 bp, Homo sapiens
acaggggaggctgttcacattcctcttggtgtcctcatgtcacgtgctttcctcccagatgtaggacaagccaggatgctctcccaggaggctcttcaggagagaagggagggagaaggtcagagagtcaccttcccaggtttcatggctgctgcagggagaaagggcgaggggaaggtgagcaaggcttcctgcttctgttgttttctcaaacgcccaggcaccatgttttggggtggcatgtcctgaacctggyctggcctcacctcactataggctcctgtttcttttcttttttttttttctgtttccgcctccctccctctaaacattctaatttaccccaagctctcttccccagaactctcgtgtctgacagagctcgaattctgtcaaccaggctggtcagctccagactctgactaatgaaatgcacttgttattaacttatctccttcaggagcaactctcaatcca

SEQ ID NO: 757228 - DNA, 596 bp, Homo sapiens
tacaaaaagaggctaattgactcatggtttcacagactgtacaggaagcatggctaggaaggccttaggaaacttagaatcatggcagaaggcaaaaaggaaggaggcacattttacataactggagcaggaggaaaagagagaagggagaggtgttacacacttttaaacaaccagatctcatgagaactcactattatgagaatagcaagggagaagtttacatccatgacctaattaccttccaccagacccctcctccaacattggagattacaatttgacatgatatttgggcagggacacaaatccaaaccatattattcttcccctggtccctcccaaatttcatgtccttctcacattgcaaaatgcaattatttctcctcaacattcccccaagtctcattyatatgtgggagctaaaaaagttgagttctgaattagaaaagagaattgtggttattagagaatatgaagggtagaggggaagggagaacaaggagagtctgattaatggatataaagttatggctaaataggaggaataagttatagtgttctatagcactgtagggtgactacagttaataata

SEQ ID NO: 757229 - DNA, 569 bp, Homo sapiens
ctatggaaatgcagcttcatgacaaaaaccttgctttctactatctgccatctctcagaaacttttaaaaagacatgtgaaatcactctatttcctccaaataaactgaattatcaatgttaatgggagacagggataaggtraaataaagctcaagtaattaaactattttattgtaaatattcatattacctccgagctaatttttactagaggtgctggcaaattcaaaacaaaataaaaattagtttcagattacttcttactcactagctaggtgacttcctaaccaatcaacttactcattctcacatcaaattcagaattcaagcttgtgtctcagcaaaattacaaatttaatggacctctagaatgctttaaatatagtggaaccacaaatgttacatccacatatgccaagagtttattttaaggccttcatcacttaatgatgaagtcattggtttgactctcagacaactgataggataataaatatgtagttaacattagttcaattcacacctcatctgaaagatcttttgtttcactcccattttagaagtcct

SEQ ID NO: 757230 - DNA, 626 bp, Homo sapiens
aacacatggaaagatgctaaatataattattaattagaaaagcataaatgaaaaccacaatgagataccacttcacacccataagaatggctaaaatcacaaacaataacaagcattggtcaggatgtgaagaagttggaacctcatacattatgcgtaggaatgtaaaatggtgcaaacaccttgaaaaataacttggcagtacctcaaagttaaacacagagttatcatatgacccrgccattccactatcatatctcatatacctaagagaaatgaaaacatatgtccacacaaaatgttcttagccacattactcataatcaccccaaagggaaaacaacccaaatgtccatcaactgacgaaatggataaacaaaatataggacagccacacaatagaatacgattcagcaaataaaaaggaatgaagtactaatacatattacaacatgaatgaccagagtagggaatggatccactcacctcccaactccaagcatgaaggtagaaacttttccatttcttattcttcattctgtaaatattttttgagcacccactatgtgccagttgccctcctcaacagtgagcagaaaatattatgctaagtaaaataaaacagt

SEQ ID NO: 757231 - DNA, 627 bp, Homo sapiens
acattgttttgcaataaagacacttagtgtgtaatttcatagattgtttggcttttctgtattctctcaattttgttatgtagggtttttgtttttcttctgttcctaaagagtttgtaattttcccatttgtgctttttaatacagattcaaagcatctttaaatttccaatagtatatcaatcagggtaaatgtttgttgttaattttatccttattgtattttgatggatgatgtggtctgtatgacttctgccttttaaaatgtgttgacctaagcctggacatcaaaatgagaccccttctctaaggaatttaaaaaatagctgggtgtactggcacgtgcctgtagtctcacctacacaggaggctgaggcgggaggatcacttgagcccaggaggctgagactgcagtgagctgtgactgtgcctctcygctccaacctgggcgacagagtgagaccctgtctccaaaataaaaataaaaataaaagtgttgacctatagtttgtgatctagttaagtttcgagaatgttctatagttgtatggaaaacatgttaatatgtattctccgtttggaggtgctaagatattcataaagatgttcctgtgtgtggttataata

SEQ ID NO: 757232 - DNA, 599 bp, Homo sapiens
aaatatatatatttgtaaataatacaaagaagcatacatttgtacgtattattattactatcatattgtataaagctgcaacagaaaaattcaacaacttcttataagtgttgtctaaactctacatttgtaatcaaacataatatcactactactcactaaattagataccgtagaaagtgcttactcaattttcatgggctttatgaataatatatgttaaatagccccagttcctctaacaatcctttaaataagttatttcacagtctggtcatgcagctttttaatgtaattatttgtcatcataaacaaggcaactgtttaagcaataacaagctgtaccttgatcattcccactctcacagttatcaattttgattagctatagattctratttgtttcttgtttatagaatcaaaaaaataaattcttatatttggtggggaatgagtctaaaataatcaatgctgtggagtacaaatttgatttttagaaggaaaagcaaaaagtagttaagaaacaaagtgaacaacttaaaaaatttgatgtgaactctttaccaaaggtctgtcatggggaggtggagtcgcagtac

SEQ ID NO: 757233 - DNA, 650 bp, Homo sapiens
accagatgttcaaagaagaactggtactaatcttactgaaagtattgcaaaaaatcaagtcagacgtattcttctctaactcattctgtaaagccagtatcatcctgataccaaaatctggcaaggacaaaacaaaaaggaaactacaagccaatatccttgataaacacaracacaaaaatcctcagcaaactactagcaaaccaaatccagcagtgcatcaaaaagataatttatcacaatcaagagggttttattcctgggatgcaaggatgtttcaacatatgcaaatcaataaatgtgattcatcacataaacaaaattaaaaaccaaaattatatgatcatctcaatagacagaaaaagcatttgataaaaaaatccaatgtctcttcatgataaaaaccctcaacaaactaggcattaacaaactaggcactgaaggaacatatctcaaaataataagagccatttattgcaaacccacagctgacatgatattcaatgggcaaaagcttgaagcaagcattccccctaagaactggcacaaaacatggatgcccacttgtaccactcctatacaacatattactgaaagtgctagctacacaattcagaaaaaatatagaaatataaggcgtccacatatga

SEQ ID NO: 757234 - DNA, 650 bp, Homo sapiens
accagatgttcaaagaagaactggtactaatcttactgaaagtattgcaaaaaatcaagtcagacgtattcttctctaactcattctgtaaagccagtatcatcctgataccaaaatctggcaaggacaaaacaaaaaggaaactacaagccaatatccttgataaacacaaacacaaaaatcctcagcaaactactagcaaaccaaatccagcagtgcatcaaaaagataatttatcacaatcaagagggttttrttcctgggatgcaaggatgtttcaacatatgcaaatcaataaatgtgattcatcacataaacaaaattaaaaaccaaaattatatgatcatctcaatagacagaaaaagcatttgataaaaaaatccaatgtctcttcatgataaaaaccctcaacaaactaggcattaacaaactaggcactgaaggaacatatctcaaaataataagagccatttattgcaaacccacagctgacatgatattcaatgggcaaaagcttgaagcaagcattccccctaagaactggcacaaaacatggatgcccacttgtaccactcctatacaacatattactgaaagtgctagctacacaattcagaaaaaatatagaaatataaggcgtccacatatga

SEQ ID NO: 757235 - DNA, 607 bp, Homo sapiens
aactacctctcaacctcaaagtcaaattcactgtatcaggccaaactgaaggaccagctaaaggttggcccttctgataggaaatgagagtgccagaattccaggtcaaatagaaggcacagaacagaggttattagggtgaaagtggataacattcatgctcagagccaacctggacaagaatgtcaaggtaasacattcttggaaaggaaagaatatcacatgcatccattctggatttagggtttggggtatagcaaggaaaggggatgggaaaattatcaggcagttgaacagatgggcagatcaatagaacaactggagtttgattgttgacctgagaacaggaactctaccatctgccatggctttaaatatccttcctggtgtaagttgataagaatatggaatgggcagctcctcagagggagacaggattttattagttgtcaggcactatcagggaaggagctaacgtttgtaaggccatgcgccttagatacgtaagctcactaaatcttcattataattccagaagggtaaatattatgcctccccaccatcgccacttttcttgagccaggaaatggaggctcagaaggttaag

SEQ ID NO: 757236 - DNA, 595 bp, Homo sapiens
aatataccacattataacaaaattccacacattgtacgtagatatagttttggttctgagctggggaacacaatttccttgaatgttatagtttttatattctattttagtgctataatttttccaagcaataaataatgtacttctactgaattcaaaattacagtaaacgtgctctctgcagataatttaacacctgtgtatttctatgccctacaactgcagactgcgtatctcagaggcttaaggatctgaattatattgcaaaaataatgagctgaagactgattgtaaatgtatatttattaacatagccactaattttttcgactgcagagaakaaatggatcctccagtgtgagaccctcagtaactacagcaatatgttggatttagtaggtttcgatttttcaatgattaaaactgaaatcacagctaatattctttttcgggggattaagcagggagagtgtatcagcaccagcccaatgcgagggcactggcgaggtgtaccttggatgtatggctccagcgctggggagggctgaatagagagtaaagctgagccagggccctgacaaagaaccacacatac

SEQ ID NO: 757237 - DNA, 579 bp, Homo sapiens
tttattgatatgataatatctttaattctaggtatttaccttgtgtgttattttgaatattttagggcttaaaaatcattaacaatgtgatccattttcttgtcttatttgcagaagtcttctgacagttaagagaacttgcatttttctataattttataaatataactcaacaatgctatatttatagaatataagattttaaatatgtgttatatgtataattttatattctcaccttttaaagtaaatatyaatgctttctattttaagaaataaattagtgtaatatttccttctatttcttccttgccaccaaattaaaattattatttttttttggtggaggggggtatatctttgtactaataaatgtgcttatacctcttttatgtgatttttcatcattaaataatgttatttaccccttacctctcctcctgttattagtgtatcttcattgttagggtatataacatttaaattctctcctgttactgtattgctcatgtttgttttggtctgaggtctgtaattagatacattcaaaatgtcccagtaagcattttgctgtagtta

SEQ ID NO: 757238 - DNA, 527 bp, Homo sapiens
  misc_feature 1, 2, 3, 4, 5, 6, 7, 8, 9, 10, 11, 12, 13, 14, 15, 16, 17,18, 19, 20, 21, 22, 23, 24, 25, 26, 27, 28, 29, 30, 31,32, 33, 34, 35, 36: n = A,T,C or G
nnnnnnnnnnnnnnnnnnnnnnnnnnnnnnnnnnnncattaatatcccaccagttgtgagatctactgtttttttcttgtacccaaattctttgacctctctgctatattttactacctcttgacaacctcttttgttttaatattcttctctttttatttaatgaagttatacaattctggtcctttcctatctttctaataacttctcaatctcctttgctgcatcttmttctttctttcactacataaacgtagaatacccccaagtttctatcctcagctcagtcaatttcttgtttctttttatgctatcttttttattatctcatttcctgacataacttttactgatgcatttacatagatgacttccaaagctggaccttccacatatatttttctaagagtgcaaatcttaaatttattgctaaacctctgctggatggcttataacacctaaaatttcaaatatttattctcaatttattattaaatttctctttattggctttttcaaatccttct

SEQ ID NO: 757239 - DNA, 618 bp, Homo sapiens
tgtgtgtgtgcacacgtgcctgtgtggtacatatatatttcctaattctgcacaccaagaggacagggagcaagcccctcacaccctggagcaatgagcacaactagtgcctggatattgatttccaattactattctctgctaaaaggaactggagctctatgaasaaatgtctgattttaaggaacatttttgtgtcagaaaataaagtattcaaagaatagggacatgtcaaaaggaaacagcagctagcttaaggacatgctagcttaggacaagcttaaggacaagctagcttaggacaaatcaggtataatttgagcatcaaggccaagtgcagtggctcatgcctgtaatcccagccctttgggaggccaaggtgggaggattgcttgagaccaaaaattcgagaccagcctgggtaacataacaagaccctgtctctacccaaaaaaaaaaataataataataatgaaaagaaaaaggaaaaagcatcaaaagtcataacagtaacttaataagtacacactagtccacattaatataaataaaaggagaaagcaaaaactctttcttacaatagaatgtcaacaaataaataaatgtagatggaatttt

SEQ ID NO: 757240 - DNA, 618 bp, Homo sapiens
tgtgtgtgtgcacacgtgcctgtgtggtacatatatatttcctaattctgcacaccaagaggacagggagcaagcccctcacaccctggagcaatgagcacaactagtgcctggatattgatttccaattactattctctgctaaaaggaactggagctctatgaagaaatgtctgattttaaggaacatttttgtgtcagaaaataaagtattcaaagaatagggacatgtcaaaaggaaacagcagctagcttaaggacatgctagcttaggacaagcttaaggacaagctagcttaggacaaatcaggtataatttgagcatcaaggccaagtgcagtggctcatgcctgtaatcccagccctttgggaggccaaggtgggaggattgcttgagaccaaaarttcgagaccagcctgggtaacataacaagaccctgtctctacccaaaaaaaaaaataataataataatgaaaagaaaaaggaaaaagcatcaaaagtcataacagtaacttaataagtacacactagtccacattaatataaataaaaggagaaagcaaaaactctttcttacaatagaatgtcaacaaataaataaatgtagatggaatttt

SEQ ID NO: 757241 - DNA, 618 bp, Homo sapiens
tgtgtgtgtgcacacgtgcctgtgtggtacatatatatttcctaattctgcacaccaagaggacagggagcaagcccctcacaccctggagcaatgagcacaactagtgcctggatattgatttccaattactattctctgctaaaaggaactggagctctatgaagaaatgtctgattttaaggaacatttttgtgtcagaaaataaagtattcaaagaatagggacatgtcaaaaggaaacagcagctagcttaaggacatgctagcttaggacaagcttaaggacaagctagcttaggacaaatcaggtataatttgagcatcaaggccaagtgcagtggctcatgcctgtaatcccagccctttgggaggccaaggtgggaggattgcttgagaccaaaaattcgagaccagcctgggtaacataacaagaccctgtctctacccaaaaaaaaaaawaataataataatgaaaagaaaaaggaaaaagcatcaaaagtcataacagtaacttaataagtacacactagtccacattaatataaataaaaggagaaagcaaaaactctttcttacaatagaatgtcaacaaataaataaatgtagatggaatttt

SEQ ID NO: 757242 - DNA, 586 bp, Homo sapiens
attctttagtctgttttaatactcttacctatttctatcccctatatataatttgaaactattatgtctttgtaatacatcctaatatctgatacaaatctttgttatttctcaagtttgataggtactggtattttgtgtgtgtgtgtgtgtgtgtgtgwgagacagagttttgctctttttgtccaggctggagtgcaatggcgcaatctcggctcacttcaacctccacctcctggtttcaagtgattctcctgcctcagcctcccaagtagctgagattacaggcacccgccaccacacccggctaattttttgtatttttagtagagagggggttttgccatgttggccaggatagtctcgatctcttgacctcgtgatgcacctgcctcggcctcccaacgtgctgggattacaggcgtgagccaccacgcccggccaggtactggtttttcttcaggtgagttttaagatactatctatctaaaaaatataaaatcctgatgagactttgatggaattaaagttatagattaaaaattaatgaagttttttgttggcatcgcttcctctgggacatctt

SEQ ID NO: 757243 - DNA, 586 bp, Homo sapiens
attctttagtctgttttaatactcttacctatttctatcccctatatataatttgaaactattatgtctttgtaatacatcctaatatctgatacaaatctttgttatttctcaagtttgataggtactggtattttgtgtgtgtgtgtgtgtgtgtgtgagagacagagttttgctctttttgtccaggctggagtgcaatggcrcaatctcggctcacttcaacctccacctcctggtttcaagtgattctcctgcctcagcctcccaagtagctgagattacaggcacccgccaccacacccggctaattttttgtatttttagtagagagggggttttgccatgttggccaggatagtctcgatctcttgacctcgtgatgcacctgcctcggcctcccaacgtgctgggattacaggcgtgagccaccacgcccggccaggtactggtttttcttcaggtgagttttaagatactatctatctaaaaaatataaaatcctgatgagactttgatggaattaaagttatagattaaaaattaatgaagttttttgttggcatcgcttcctctgggacatctt

SEQ ID NO: 757244 - DNA, 586 bp, Homo sapiens
attctttagtctgttttaatactcttacctatttctatcccctatatataatttgaaactattatgtctttgtaatacatcctaatatctgatacaaatctttgttatttctcaagtttgataggtactggtattttgtgtgtgtgtgtgtgtgtgtgtgagagacagagttttgctctttttgtccaggctggagtgcaatggcgcaatctcggctcacttcaacctccacctcctggtttcaagtgattctcctgcctcagcctcccaagtagctgagattacaggcacccgccaccacacccggctaattttttgtatttttagtagagagggggttttgccatgttggccaggatagtctcgatctcttgacctcgtgatgcacctgcctcggcctcccaaygtgctgggattacaggcgtgagccaccacgcccggccaggtactggtttttcttcaggtgagttttaagatactatctatctaaaaaatataaaatcctgatgagactttgatggaattaaagttatagattaaaaattaatgaagttttttgttggcatcgcttcctctgggacatctt

SEQ ID NO: 757245 - DNA, 618 bp, Homo sapiens
tatcattaagaaataaatgaggctgggcgcagtggtgcacacctgtaatcccagcactttgggaggctgaggtgggtggatcacctgaggtcagaagttctcgaccagcctgactaacatagtgaaaccctgtctctactaaatacaaaaaaattagcygggcttggtggcacatgcctgtaatctgagctacttgggaggctgagacaggagaatcacttgtacctgggaggcagaggttgcagtgagccaagatcgggccattgcactccagcctgggcaacaagagtgaaactccatctcaaaaaaaaaaaaaaaaagatttctgtgatttctgtgatgtgtaggtaaacacacttctaaatgattcaaagaaaattccagttccagctttaccaccatacaggtcagtctgtgatggttgcccaacgccaacaatccataacaattaggagaaatatcccattggtaggtgatttttcccatccataggggaaccatccaccaatgaatataattagaaattaaactgatgacattacactcaccagacctcacttgaaatgtccttgtttcccacagagccccttaattttttttttttttttgagcttcatg

SEQ ID NO: 757246 - DNA, 618 bp, Homo sapiens
tatcattaagaaataaatgaggctgggcgcagtggtgcacacctgtaatcccagcactttgggaggctgaggtgggtggatcacctgaggtcagaagttctcgaccagcctgactaacatagtgaaaccctgtctctactaaatacaaaaaaattagccgggcttggtggcacatgcctgtaatctgagctacttgggaggctgagacaggagaatcacttgtacctgggaggcagaggttgcagtgagccaagatcgggccattgcactccagcctgggcaacaagagtgaaactccatctcaaaaaaaaaaaaaaaaagatttctgtgatttctgtgatgtgtaggtaaacacacttctaaatgattcaaagaaaattccagttccagctttaccaccatacaggtcagtctgtgatggttgcccaacgccaacaatccataacaattaggaraaatatcccattggtaggtgatttttcccatccataggggaaccatccaccaatgaatataattagaaattaaactgatgacattacactcaccagacctcacttgaaatgtccttgtttcccacagagccccttaattttttttttttttttgagcttcatg

SEQ ID NO: 757247 - DNA, 486 bp, Homo sapiens
gcctaaaatgctcttgtatcagctctttacctggctgatttcccttcacccttctggtcatagattaaatatcatctcctccaacaggccttctcttatggccgcatctaaagcaaagacaattccctatgagattctatcccattactctgtttgtttacataatagcaattaacacattatcaaattttaataattatctgattatcaaagaggaactcaaaagggaaattagaaaatattttgaactaaatgaaaataaaaatttgtggtatggcactgaagtagtactttgggaaaaatatattgccaaatgcttagattagaaaaagatacacrtctcaaatcaattacttcagcttctgcctaaagaaaatgaaaaaaaaagatgcttaccaggggagataccataatcatcaagaaagtgcaaaaagaagagtaaattaaatccaaagtaaacaaaaaagaaatgataaaaatcaaaac

SEQ ID NO: 757248 - DNA, 633 bp, Homo sapiens
ggacaaacttggtcatctaaagatgacccccaaataaataaaattcctgatctctgcttagactactcctgccagaaacctccaaagtcaggttctccagaaacagtctagtcctggattctgactcattcaagtctttccccttactttctcctgaaaatgtggagcacagggagctgctcctgtccagagtgtggacaactggagtgagatacttggcaggtgaagcatttgccaccaccttcacatataggtctytactttgtttttgccttacccttccaatttgagctgagttgttttcttcatagcctttaaaaccaggtttgatttctaattactttttaaaatcatctcatcaagtcaatgatttcatgactgtttttctggttaaaacccccagtttaattaatctcagaggaatctttttgtgtggtctctccttacggtcatctcccatcccatctgtcccatccttatgagggggatacagccgctcagcaatcatgattcttccatgctgctatccaccctttctgtctggttttcccgagttgcagggattacacacccatttggattgtgagacttctcagaaccagcttcttcacagaaattctttctaactcttcc

SEQ ID NO: 757249 - DNA, 547 bp, Homo sapiens
actctccaaccctatcactcccctccaactcaacctactggcatcattgcctgctccaaactgtgagtgggaaagtgagagtagaaatttctgcatcaggatccataagctgaagtgagtgggagaaggacttgaatacagtctgttaacacctcagggagagttaattaaaacctgaggaaccagagataccagatagtcctagcatatctcaacaatggcaacttagcagtttttattagtgccacaatcatactaaagaaggaagtgagtggagaggtgcaaagaaaacaaaaagarcacagaagatgatggggaggacagaagcctagcttttgctgacttcttggactgcttagttgaaatccaggagttctgagaaagtttagtcatgcctgtccagctttgcccgtcgctggactttttctgaattgccagtgccaaatatttgaaaatttttgagagattattttttgtggaaatatagccaaaagtttcagggaaatagacaagtttctaagaagctggactccaagaatgggttccg

SEQ ID NO: 757250 - DNA, 599 bp, Homo sapiens
cattttacagctcttctagtcttgccctctaggaattacattaatccatttctcaagcatacgttgagaaagaagacatggcgtctcattagctcctctactgcacacaactccagtgcctttgggagccttggactaaatgtggtgaagaccagtgctcctgtgaacgygatcaactaaaaaattcttcctgatggaatggagattggggttttgcacaggaagggactgctctcattttatgtataattcaacctgcaatatctcatgaactgtctcctggcggccatttcagcattagggctttctgtagaagaaaacagggtcagcacaaacatctcccaattcattgagctagaaaccttggaaatatgaacttatgggacgtcttttaggtttctcagagaaggggcccagaggctggggtacaaggcaaggtctgagtcacagaggaactgtgggaccaggcagcaatccagttacaggaaatccataattcaaggcaaaaacggaacttgcaacaagatcaacttgtgctgcactgatgaactcttgaacttctcttctttcctttggaacatgtttaaggcaggtttgac

SEQ ID NO: 757251 - DNA, 599 bp, Homo sapiens
cattttacagctcttctagtcttgccctctaggaattacattaatccatttctcaagcatacgttgagaaagaagacatggcgtctcattagctcctctactgcacacaactccagtgcctttgggagccttggactaaatgtggtgaagaccagtgctcctgtgaacgtgatcaactaaaaaattcttccwgatggaatggagattggggttttgcacaggaagggactgctctcattttatgtataattcaacctgcaatatctcatgaactgtctcctggcggccatttcagcattagggctttctgtagaagaaaacagggtcagcacaaacatctcccaattcattgagctagaaaccttggaaatatgaacttatgggacgtcttttaggtttctcagagaaggggcccagaggctggggtacaaggcaaggtctgagtcacagaggaactgtgggaccaggcagcaatccagttacaggaaatccataattcaaggcaaaaacggaacttgcaacaagatcaacttgtgctgcactgatgaactcttgaacttctcttctttcctttggaacatgtttaaggcaggtttgac

SEQ ID NO: 757252 - DNA, 533 bp, Homo sapiens
ttctcaggccaggatcctggagaaatcccttctccagacccaacttttggacttagttgcttcccaccatcccgaggaggaaaaggcgggagggacttccccaggagggtgtgggggtgggaaggcctgggggactcgaggcgggcctgggcgagrcagcggcaagcttccaactccgaggggagcccacactcaccccacaggcatgccacagtgtccccaagcaggggaagccagcacttcccttcccaacccagagtcccctccctggctgccgggcctgtggtctggccccggcccatggcagtcccagccttgtggtccgggaagcccctggctcgcgggcaccttcaccccctgccctgggcctgggcctggccctgctccacagtcccttgggccggctcttcctctccacccgcccacccgccgcagaggccagctcacagcccacgtcccccaccagcactcacagacccctcctctgctgccatgactgggagaggccccttgagtccacatggctgcgttcg

SEQ ID NO: 757253 - DNA, 533 bp, Homo sapiens
ttctcaggccaggatcctggagaaatcccttctccagacccaacttttggacttagttgcttcccaccatcccgaggaggaaaaggcgggagggacttccccaggagggtgtgggggtgggaaggcctgggggactcgaggcgggcctgggcgagacagcggcaagcttccaactccgaggggagcccacactcaccccacaggcatgccmcagtgtccccaagcaggggaagccagcacttcccttcccaacccagagtcccctccctggctgccgggcctgtggtctggccccggcccatggcagtcccagccttgtggtccgggaagcccctggctcgcgggcaccttcaccccctgccctgggcctgggcctggccctgctccacagtcccttgggccggctcttcctctccacccgcccacccgccgcagaggccagctcacagcccacgtcccccaccagcactcacagacccctcctctgctgccatgactgggagaggccccttgagtccacatggctgcgttcg

SEQ ID NO: 757254 - DNA, 590 bp, Homo sapiens
ggtccctctgacctatctccagcaagaattctgtttggtcagcttaggcagaacccacctacctcacctgtttcctcttcatgattttccacctgctgacccccaccctgctccttggttttaaattcctctctgccaatgttacactggagttgaacccagtctttyttttccatttacaaaatcccattgctgtcgtccctatacttatcacagtgatccggaataaagtctgccttactgtgctttaacaaatatcattgagtgtttttgtttgttttttgttttttctttaacaccacatctcatcggctggagaggagcaggatggtgccaggtaccagaatttctcgcatgttgacttctgaatgctgcccatttcagaagtcccttattgcaggctgagactcactgttagccagccctaagccagttctgcactaggcttgttactgaggcctgggccagaagaatgctctgctgtagcctgaccttagggcacagagctctgtctgctgcaccgaccttcttcccccagcagctgtctcaccaagtgggtggatctggctttaggtctcaaaacatctgtt

SEQ ID NO: 757255 - DNA, 372 bp, Homo sapiens
atgttgtttttgccatcttgaaattcttaatttttgaacaagggtccctgaatattcactttgcactggactccacacaccatgtaggccctgtgcaggctcttgggccccacatctgagctgctgaacaagactctgaattttgtcttcaggtgatctatctccctgtgccctaaaatttaagaaacattattttcaaccataaagaacaattttaataygtagtattttttttctcttgtatcacgtgtaccattcacatgttttattgttcattgctcctgctttaagttagtgggggattcacttacataacctactatacgaatgaccttcattgttggtattttgtgtaactgctgatgaatgtgt

SEQ ID NO: 757256 - DNA, 624 bp, Homo sapiens
ctgggggttagacacatgaaaggactttcctgttgctttaagctcatgttttttgtctgttgcctttgtggcagtttgaagttactctaggtgttttaccatgttatttctctctctggccctaggaaccccaaaggcggactcctctgtatttaagaagccaactaatgttgtagttagttccattgggcacactgtacaggaactggcttagccataggcactgaagacttgagttttccaagctcagagagaaaaacagtcctcaagcacacattaacccytcctgcaccaaaggtggggtgcagccttctcaactctggcttttcctttattccagtctcttctgctttctatcccctagaattgcattaacatttcttttccatattggctgtaaacattagaggtaaacccatgaaatggtgtttaaatggaaatcggtcctgcaggcttgtaaagtgcttttgtgctttctctcttactgctagagattcaactgctgtaatttcctcagaaaaactgactctctctttaattctcaaagctaatttggttataacataattctttcctttaaaaatcatatttttgtttgctcttaaatataatagttcccttatt

SEQ ID NO: 757257 - DNA, 624 bp, Homo sapiens
ctgggggttagacacatgaaaggactttcctgttgctttaagctcatgttttttgtctgttgcctttgtggcagtttgaagttactctaggtgttttaccatgttatttctctctctggccctaggaaccccaaaggcggactcctctgtatttaagaagccaactaatgttgtagttagttccattgggcacactgtacaggaactggcttagccataggcactgaagacttgagttttccaagctcagagagaaaaacagtcctcaagcacacattaacccctcctgcaccaaaggtggggtgcagccttctcaactctggcttytcctttattccagtctcttctgctttctatcccctagaattgcattaacatttcttttccatattggctgtaaacattagaggtaaacccatgaaatggtgtttaaatggaaatcggtcctgcaggcttgtaaagtgcttttgtgctttctctcttactgctagagattcaactgctgtaatttcctcagaaaaactgactctctctttaattctcaaagctaatttggttataacataattctttcctttaaaaatcatatttttgtttgctcttaaatataatagttcccttatt

SEQ ID NO: 757258 - DNA, 654 bp, Homo sapiens
cagatcatcactttcattactagaaaactgatttttgtgcaggaaggtcaaccaggttggttcttgccaaataagtttcccaaagacacaatttctcaagagtgagcaaatgaaatcatacgtttgaggaactacttgtgaatgcccttcaaaggcattttggaggtgttgtcttracaaagaaaagtaacaagaattgatccaattttatttggtgagctgaggtggggacttttcctcagatgacatgaatgatgcaattttcctacccatagttgaaacaattgcttttgtatgaggacactagttagccaaataacctctgtgtagggcagcagattgccatactgtgaagacaattcatcgtgactctgggtcaagccggagtgggaatcttgtgtacagagttaattactacagtcatcatgcattatctttttaatgttttaccgacaaagagattcctggtgaatgacacaatgaatttaaatcctattttcttgctgaatgatgccaccatggaaaagtttcatgagaggtcccatgttagcaccaacatcacagcagcactgtttatatttatattgactaattttgacctgtctacatttaacttctcaagaatgttctctatgcaaaataatttattcccta

SEQ ID NO: 757259 - DNA, 654 bp, Homo sapiens
cagatcatcactttcattactagaaaactgatttttgtgcaggaaggtcaaccaggttggttcttgccaaataagtttcccaaagacacaatttctcaagagtgagcaaatgaaatcatacgtttgaggaactacttgtgaatgcccttcaaaggcattttggaggtgttgtcttgacaaagaaaagtaacaagaattgatccaattttatttggtgagctgaggtggggacttttcctcagatgacatgaatgatgcaattttcctacccatagttgaaacaattgcttttgtatgaggacactagttagccaaataacctctgtgtagggcagcagattgccatactgtgaagacaattcatcgtgactctgggtcaagccggagtgggaatcttgtgtacagagttaattactacagtcatcatgcrttatctttttaatgttttaccgacaaagagattcctggtgaatgacacaatgaatttaaatcctattttcttgctgaatgatgccaccatggaaaagtttcatgagaggtcccatgttagcaccaacatcacagcagcactgtttatatttatattgactaattttgacctgtctacatttaacttctcaagaatgttctctatgcaaaataatttattcccta

SEQ ID NO: 757260 - DNA, 585 bp, Homo sapiens
gtttgaggctgcagtgagccatcatcgtgcctctgcactccagcctaggcaataaagcaagaccctttctaaaaaaaaaaaaaaaaaaattctacacattccttaagtttgaatatacctgctctaggctgcactatcggagactacaccctctgctggtggcgggcggggtgggggggtccctttgggtttctgtgctcactaccatgcctttccaaccatcccttgctttctagacttctctactgtgtcacaccttctaatccacaattggaatctgacaaccaaccaatgccaacctgtgggctttgctggtgggtgagtgagggcttaggcaagtcccttgggcacagggagaatgaatgaacctgaagttggcaccatagttttgcatgtgtctccaggtcccagtagcaggrgtcactgtatgtaaggttataaccagggtgccagcttttcaccagcttcctggtgttagtgcagggaaatcggggtggcttggcgcccatgagggaccagtgggctgatgggagtcacaggtagaatcagaagtactaaagctattcctggaatttttttttttag

SEQ ID NO: 757261 - DNA, 450 bp, Homo sapiens
tcataaaaaatatttcctgtgtattcagagccatatacagaacactatatatgacacagtgtcatatactaaagaactacatgacccagtcctagactccagggagcttacagttttcccaggaagacaagatacttacatgaaatagtctgagaatagtcaagacaaaaaagccatggcctctgttgggctgaacagaggctcaagtgctcaaatggatgatacagtcagtaaatttcaagactggtgaggtgggagagagatcagagatggctgcaattttcaagaaagacttcaaggrgaggacatgggccttgctttgttcttggcattttaaaatgggaccagtgatactaagtttatgcagcaattcaggctcttaaaggatcaggaagaattccttagactcttttagaagtgggacattgggttaagggagaaaggttttag

SEQ ID NO: 757262 - DNA, 457 bp, Homo sapiens
gatgttagaatcttagaggacacagtgaccttcagtttgggcaaggttatgccagcatctttagagttgtggctagtgactgaggtgaggcaataggaggttctgagtgaggccctagttctagagatgtgtgtgggaggcaaagcagggttatagccagcaggagagggttaaggtagaakgtaccaggtcccagagagggggctagtgaatactaggtgaggagtgagagcgagaacatgttagacaaggagtcagggctagtgtatgctaggcaaggagtcaaggctagagcgtgctagacaaagagtcagggctagtacatgctagacgaagagtctgagctacagcatgctagacaaggagtcagggctagtgcatgctagacaaagagtcagagctagtacatgcaagacaaggaatcagggctagtacatgctagacaaagagtcagagc

SEQ ID NO: 757263 - DNA, 632 bp, Homo sapiens
attctacatgcaaggtgttttttggtgaaagtttataagaggtcatggaaatgtggatttttttctgcctagattgaagtgttaaaagattgttttaagtaagaaaaaaatctaaaggtttaaacaagttgtggaaggtttataaaattaattgtaagagatcctgtgtgtggacatattggctaaagttaaargggtattattcagttttccataaattaaacattggaataaaagcacaataggtttttctaaaagtactgatctgctctttcacaccaatcaatgtaaaagtttataaaaggtttataagaatcttaccttatggttaaacattaaaattgggtaaatatgtctattaggttttattgggtttgacattaatagtacattaatgtaaagatgaaatttggcttatgtggtataaaaatcttacaggacgcatcaaatttgaaatgatgttttcctttttttggactatatttgcataaatttgttattggtatatgttccaaagttatgggaaacttctattattctaatatgacagtgtatgttattaataattatcattgttatgtaaaattttgtgtgccacagaggtaaccaaatttccttatcagttgtggctt

SEQ ID NO: 757264 - DNA, 633 bp, Homo sapiens
tgtaccccatacatttgtataaataacttaaaaagaaccacaagagtttactatcttgtttgtttataaatgcaaatacattatgaatgtttcccatgacattaactattattgatgcaggagctaaaaagaaattttaattttaataaaaacagcccccatattatttcttttctaacatagagcagtrtgtaaaattgagctgcagacatagataagcaagacggaagcttgcacagataaacgccggcagctgtgtcaataagaaaaggtgctacctggggactaggcatgttcagaatggtggctctatcttccctttcctttgtaaaccatgtgtacagtaagaagcaggcaacatggcatcagccaggcaaagaccgcatctgcattatagaagattaggtgggggcagtcagcttccccgtgcactgtgtaaacatcacacctggctcaaccaatatttgggccatatgtaaatcagaccctgcctcctcaagccggtctataaaatctggtgcgctttgctgcaggccggaagtccactcaggcaaccctctccctcacaggagagagagctattttcctttctctttcttttgcctattaaacctccacttctaaacctacttc

SEQ ID NO: 757265 - DNA, 633 bp, Homo sapiens
tgtaccccatacatttgtataaataacttaaaaagaaccacaagagtttactatcttgtttgtttataaatgcaaatacattatgaatgtttcccatgacattaactattattgatgcaggagctaaaaagaaattttaattttaataaaaacagcccccatattatttcttttctaacatagagcagtgtgtaaaattgagctgcagacatagataagcaagacggaagcttgcacagataaacgccggcagctgtgtcaataagaaaaggtgctacctggggactaggcatgttcagaatggtggctctatcttccctttcctttgtaaaccatgtgtacagtaagaagcaggcaacatggcatcagccaggcaaagaccscatctgcattatagaagattaggtgggggcagtcagcttccccgtgcactgtgtaaacatcacacctggctcaaccaatatttgggccatatgtaaatcagaccctgcctcctcaagccggtctataaaatctggtgcgctttgctgcaggccggaagtccactcaggcaaccctctccctcacaggagagagagctattttcctttctctttcttttgcctattaaacctccacttctaaacctacttc

SEQ ID NO: 757266 - DNA, 613 bp, Homo sapiens
atactcaatttccttggcatgagacgacaaaacccaagtatttaccccagacagacgacactgcttcattataagtgataaatttattagttaaaattgctatattaagaaatatagcacattttaaggctgctgatgcacagtgcaataactgccatatacaaataggacaccaattatacttagagcccaggcacagagactcacacctgtaatcccagcactttaggctcccagggcaggtggatcacttgaagtcagaggtttaagatcagcctgaccaaaatggtgaaaccccatctcyactaaaaatatgaacttttttttttagtagaaaaaaacttttttctattagtaggcatggtggtgcactcctgtaaccctacaagggtgagttaagagaattgcttgaacccaggaggcagaggatgcagtgagttgagatcacatcactccagcctgggtgacagagtgagaccccgtctcaaaaaaaaaaaaaaaaagtattacaaagctcttgtttccctgcacttaccatttatgaatagttcaatgaaatatgttatttttaaaaacattttccattttggtatgtaaaaaactggcatctcat

SEQ ID NO: 757267 - DNA, 613 bp, Homo sapiens
atactcaatttccttggcatgagacgacaaaacccaagtatttaccccagacagacgacactgcttcattataagtgataaatttattagttaaaattgctatattaagaaatatagcacattttaaggctgctgatgcacagtgcaataactgccatatacaaataggacaccaattatacttagagcccaggcacagagactcacacctgtaatcccagcactttaggctcccagggcaggtggatcacttgaagtcagaggtttaagatcagcctgaccaaaatggtgaaaccccatctccactaaaaatatgaacttttttttttagtagaaaaaaacttttttctattagtrggcatggtggtgcactcctgtaaccctacaagggtgagttaagagaattgcttgaacccaggaggcagaggatgcagtgagttgagatcacatcactccagcctgggtgacagagtgagaccccgtctcaaaaaaaaaaaaaaaaagtattacaaagctcttgtttccctgcacttaccatttatgaatagttcaatgaaatatgttatttttaaaaacattttccattttggtatgtaaaaaactggcatctcat

SEQ ID NO: 757268 - DNA, 613 bp, Homo sapiens
atactcaatttccttggcatgagacgacaaaacccaagtatttaccccagacagacgacactgcttcattataagtgataaatttattagttaaaattgctatattaagaaatatagcacattttaaggctgctgatgcacagtgcaataactgccatatacaaataggacaccaattatacttagagcccaggcacagagactcacacctgtaatcccagcactttaggctcccagggcaggtggatcacttgaagtcagaggtttaagatcagcctgaccaaaatggtgaaaccccatctccactaaaaatatgaacttttttttttagtagaaaaaaacttttttctattagtaggcatggtggtgcactcctgtaaccctacaagggtgagttaagagaaytgcttgaacccaggaggcagaggatgcagtgagttgagatcacatcactccagcctgggtgacagagtgagaccccgtctcaaaaaaaaaaaaaaaaagtattacaaagctcttgtttccctgcacttaccatttatgaatagttcaatgaaatatgttatttttaaaaacattttccattttggtatgtaaaaaactggcatctcat

SEQ ID NO: 757269 - DNA, 636 bp, Homo sapiens
tcgtatactccctccccttttgaaagtccctaataaaaacttgctggttttgcggcttgtggggcatcatggaacctaccgacatgtgatgtctcccccggatgcccagctttaaaatttctctctttcgtacgctgtccctttatttctcaaactggccgacacgtagggaaaatagaaaagaacctatgtgactatcgggrcaggttccccgataaagaggattgtgacatctcactggacccacacccacccaggcaatgtggtttttctaccttctccctgcccacaggtgatattgtgccatatacctgagaccagtcctcttatacctgaagccaggacatgtgcagaatggtgactctcatctctggacctttccacaggtgtttttgtgacatatacctttgcccagctcctgagtgatttaataacccttcctaggtctagctcacacatgagattttgatatataccagggccacactccgtaatgatttgactctcctgtcttaacagtgtcctcaggggggggattatagcatacctttatacccagcatctaggttacatgattctcctctcctgcctgaaccctgcttcctgtggagattgtagcattttcaagcactgctt

SEQ ID NO: 757270 - DNA, 625 bp, Homo sapiens
taattttcttttcataaaacattctttgtataatcacctcagagattatgaaagtgactttgataaaatttaatggtgttcacaaaataattttcacgtgagtaatttcacagtgcgtgtattgtatgttatttagtgtattttatattttgtttcaattagagaatgctattgaatccagtttttgtttagttactgttcattttactttataaaattgacataattgagtttattaaatttattgggccaatttaagtaaacagttgaacgtttcataagtcatgaggtctttttggcatatacatgaagtaaacaaagacaatactagctatgtaatagaagctacataattagaagtaaatattctttttgaaattggcytgtggtctcaggtgaaaaatggaaaatatctatagtaaaaaaaatgacattaattctgcatatgaagagagcataattgtacccatgccacacaattgactcacaattgaaacaagatgaagagatggacattttagcaaaactaagtgaaaaccttgtaaaattttcagattatgtttctacatttaaacatctactgggggaggcagaggccaattctatgcagtcaaacctggaattg

SEQ ID NO: 757271 - DNA, 573 bp, Homo sapiens
tgataactttggagcttgtgacattggcatataggaaaaacatacaggactcatgaagagctaaaatgttcatgaatatcaaacacaacaagagttaactgaatggactggactaacagaaaactgaagtaatcgttcygacttttgcttgtaacattattgatccttgtattgtttaccagcatcaaagaaacttatgttgagctatttacagcctttaatatttgactaaggtgtactcctgtgaacaaaatttggagcatgtttgtctctctctgcctggcttctccagaatttgaaaaatagtgtgagtattcttaacctatggcaatatggctgtttgcattgggtatgcttccctttatggagtcaagctcaacttgcagagccaataaaagccccttggaaaaactggcctcataactcatctacacagtccttgtgcagggttccgttcctgatctatggtaagtaaagaatgacactttctgataggcccaggagccccaagtttatcttgggaccacaagaggagaggatcacccaactcataagtatttgatagtacgaacc

SEQ ID NO: 757272 - DNA, 595 bp, Homo sapiens
aaaaagggatgggtaatgtaaaaatctggattaatattctacttctgggcaattattctgcaaatcctgcagaggaatgggaataaatagggtgcccatcgcaatctcagcaagcataactatagccactagttatctgggtgtgtcaaaagacattcttttctctcccttgtggaaagaggacttaattccacagcttcatcttagcattcagctcatggtaaggagtctatgcaatcccctgagacatatttttgtcccaacctcaattccaagcttcaagttgaagccttaggaaagaatactggatytgagaaatctacaggcagataatggaggttaaaaggcacagtgcaggtgagcatgactaattccagccgattaaaccaagcctcccatttcatagataaatatcatgctaggatctgtggaataagtgaggtctagtgaactccagaaccactgacagaaggggaaataggataagagcaaatatttccacccccctaggcctccctgttaaccagggtggaagctgcttggacaccaatgggtggcaccctgtcacaatcactgggacttggggatacaagga

SEQ ID NO: 757273 - DNA, 736 bp, Homo sapiens
  misc_feature 686: n = A,T,C or G
ttcccaagcgtaacaatgagagtgaacgtctcttctgttagcttggttcaagtgtaagagacaacactgtgcctgtgagttagtcaagaaatgacttccctttgacctgtggccaaatccacatacgacagtcacgattccaactgtggtctgcatccatatgtgagatttataacctcaccagtgggctgtgtctaggtttaagggtgacaatcccattgttggctgggtgcrcctgtgggagtcacaatctcacctgcgtgttggaccgtgttatgacatagcttataccacccaagggctttgtaaaatatttgtgtcataatctcccatgaccttttataagaaaacccagaaccttacctgtgtccctaagtctagccagaagagtaaaaaatctgttgttttggttgagtctatgtatgagagtcattatcatgtccactaactgggcctgggtatatgtaaaaatttcacctctgggtgtggatcaggcaagagtcacatcacctgaattctgggccaggaatatgtcaacattcttcttgtgtgcagtgccatagcaggaaagccacatcgcctgagtgctgggcttagtgagatgttacaacgccttctgtggacataaaatgatagtcacgtcacttatatattgggtccagaaatatgtcacaattcccactgtntgcatggcccaggcagaagagtcacatcatttgggtgcaggatccagcga

SEQ ID NO: 757274 - DNA, 736 bp, Homo sapiens
  misc_feature 686: n = A,T,C or G
ttcccaagcgtaacaatgagagtgaacgtctcttctgttagcttggttcaagtgtaagagacaacactgtgcctgtgagttagtcaagaaatgacttccctttgacctgtggccaaatccacatacgacagtcacgattccaactgtggtctgcatccatatgtgagatttataacctcaccagtgggctgtgtctaggtttaagggtgacaatcccattgttggctgggtgcacctrtgggagtcacaatctcacctgcgtgttggaccgtgttatgacatagcttataccacccaagggctttgtaaaatatttgtgtcataatctcccatgaccttttataagaaaacccagaaccttacctgtgtccctaagtctagccagaagagtaaaaaatctgttgttttggttgagtctatgtatgagagtcattatcatgtccactaactgggcctgggtatatgtaaaaatttcacctctgggtgtggatcaggcaagagtcacatcacctgaattctgggccaggaatatgtcaacattcttcttgtgtgcagtgccatagcaggaaagccacatcgcctgagtgctgggcttagtgagatgttacaacgccttctgtggacataaaatgatagtcacgtcacttatatattgggtccagaaatatgtcacaattcccactgtntgcatggcccaggcagaagagtcacatcatttgggtgcaggatccagcga

SEQ ID NO: 757275 - DNA, 479 bp, Homo sapiens
ttgtagacacatgtagccaacaatcgcaattgtcaccttcacacgtggacagagcgctctggtgagattctgaatctcacacatggatgcagtccagagttggaattgtgactgtcatatgtggatctggcctcaggctgcatggtgagtcatttctagatccagcttacaagcatggtgttgactctcatgcttagaccaagccaatcrgacagatattgactcatagctagacttaggaccatgggtaaggtcctgcttttcctacctgtacagaggtcacagaggactatgaaaccctaacatatggtataactggtataattccctcaggtggtacaggcagagtaggtctaaacagggcccagcacagagttaagattgttaatctcatatacacatctagtcaaaaattaagattgtcaccctcacacacagacagtgatcactgctgaggtcctaaatctcttgtgggtgca

SEQ ID NO: 757276 - DNA, 605 bp, Homo sapiens
  misc_feature 584, 585, 586, 587, 588, 589, 590, 591, 592, 593, 594, 595,596, 597, 598, 599, 600, 601, 602, 603, 604, 605: n = A,T,C or G
ctccttacaacgtcctgaatctcacactcagaggcagtcaaaagttggaattgtgactctcatacgtgaatgcagtccacaggtaggatggtgactctcacaccaaggttcagtgttgcgggaagtcagggaccccaaatggatggaccagctgaagccatggcagaagaacataaattgtgaagatttcatgggcatttattagttccccaaattaatacttttataatttcttatgcctgtctttactgcaatctctgaacataaattgtgaagatttaatggacacttatcacttccccaatcaatactcttgtgatttcctatgcctgtctttactttaatctcttaatcccatcatcttcrtaagctgaggatgaatgttgcctcaggaccctgtgataattgtgttaactgcacaaattgtctaaacaatatgaaatctgggcaccttgaaaaaagaacaggatagcagcaatgtttagggaacaagggagataaccttaaactctggctgcctgtgggctgggcggaacagagccatatttctcttctttcaaaagcaaataggagaaatattactnnnnnnnnnnnnnnnnnnnnnn

SEQ ID NO: 757277 - DNA, 605 bp, Homo sapiens
  misc_feature 584, 585, 586, 587, 588, 589, 590, 591, 592, 593, 594, 595,596, 597, 598, 599, 600, 601, 602, 603, 604, 605: n = A,T,C or G
ctccttacaacgtcctgaatctcacactcagaggcagtcaaaagttggaattgtgactctcatacgtgaatgcagtccacaggtaggatggtgactctcacaccaaggttcagtgttgcgggaagtcagggaccccaaatggatggaccagctgaagccatggcagaagaacataaattgtgaagatttcatgggcatttattagttccccaaattaatacttttataatttcttatgcctgtctttactgcaatctctgaacataaattgtgaagatttaatggacacttatcacttccccaatcaatactcttgtgatttcctatgcctgtctttactttaatctcttaatcccatcatcttcgtaagctgaggatgaatgttgcctcaggaccctgtgataattgygttaactgcacaaattgtctaaacaatatgaaatctgggcaccttgaaaaaagaacaggatagcagcaatgtttagggaacaagggagataaccttaaactctggctgcctgtgggctgggcggaacagagccatatttctcttctttcaaaagcaaataggagaaatattactnnnnnnnnnnnnnnnnnnnnnn

SEQ ID NO: 757278 - DNA, 625 bp, Homo sapiens
gcccactcctctctctcgtcccttcctttcaccatgtgacacacaggatcccttaagtgtgaagatatctaaatcaggaaacagacaaaaatattgcagtattgtgtattagaaattatggattcctgacatggggaaataatagtgaaaatgaaatagatagttttgaaatattgttgactggatatgagagagggaggagtcaagggtcactyccatatttctgccttggagattcattcgatagctacttgtttcaccatgagaatacaggggaatactcaggttgtggtggatagacatgagaagcaatgagttcagtttcataagttctgagttacaggcacttgtgagctgtcctaatatattaccggtgagactaaattgaatgaaagcaacattctgacatgaaaattatatttgtaagccacacacatacagataatatgtgaagttatcagagtattagagtaggacccaacaaacatcaatatttaagaggtaagtgaaggaagagagagagaaaaagaagtagtcaccgcagcccattggttctcaatcagtaaaaagagggcaatattgcactccatggaatctttttaaatgtctggaatcactgtcaatg

SEQ ID NO: 757279 - DNA, 599 bp, Homo sapiens
gagatacatgggcttgggcctttaagctgctctcttaatattatgtggattaaagaaaaacaagcaatgccaatatttagtgatttttgctttatcctaaatttataagtatatatagatattttatcactatcatatttatccataacctaaatattgtaatgtattttattttttcacataaaaatgaaaatggcatatttcaaattgacagaaactgcagaacaattcattttgaaagaaaaawttgattttaataagaatattaataacacttgtgaatttttttttttttttgagacagagtctttctctgtcacccagactggagtgcaatggctcgatatcagctcactgcaacctctgcctcccagttccaagtcattatcctgcctccacctcccgagtagctggaattacaggtgcccaccaccacgcctggctagtttttgtatttttagtagagatggggtttcaccatgttggccaggctggtttcagactcctaacttcaggtgatctgcctgcctcagcctcccaaagtgctgagagtgcaggcgtgagccactgtgccaaacctaatttcttttggtatacta

SEQ ID NO: 757280 - DNA, 599 bp, Homo sapiens
gagatacatgggcttgggcctttaagctgctctcttaatattatgtggattaaagaaaaacaagcaatgccaatatttagtgatttttgctttatcctaaatttataagtatatatagatattttatcactatcatatttatccataacctaaatattgtaatgtattttattttttcacataaaaatgaaaatggcatatttcaaattgacagaaactgcagaacaattcattttgaaagaaaaaattgattttaataagaatattaataacacttgtgaatttttttttttttttgagacagagtctttctctgtcacccagactggagtgcaatggctcgatatcagctcactgcaacctctgcctcccagttccaagtcattatcctgcctccacctcccgagtagctggaattacaggtgcccaccaccacgcctsgctagtttttgtatttttagtagagatggggtttcaccatgttggccaggctggtttcagactcctaacttcaggtgatctgcctgcctcagcctcccaaagtgctgagagtgcaggcgtgagccactgtgccaaacctaatttcttttggtatacta

SEQ ID NO: 757281 - DNA, 595 bp, Homo sapiens
ggcaaccaccggtgccccactcgagctggcgagagtgcaccctgccatactgcctgctattggtacatgcacatgagcacagttcccattgccactgctgcagtgaagcactttggctggcaccatctgttgaagtattgtgaccagctgctgtgacccatctagcacagcaggttcctaaactcaagtggccagttgacaaagccaggggcctgataccaaccttccagagttatggcataaatcccaagagtgctgagctgagccttggctccctaaaatcttccagaaatgaagccagctgactgaagccaccttataccacaatgaaaccccgaagagcataaaaacaagataaaagcaaaaaagacaacamctttaaagacttaaggaatattggcacacacagatgagaaagaataagccagaactctggcaaatcaaaaagccagagtgtcttaacaatgaatgcctgcactagttagttctccagaaatgcttcttagccaggctgaaatggcagaaattacagaaatggaattcagaatatgaaaaaaaaatgaagatgatcaagattcagcagaaagttgaagcc

SEQ ID NO: 757282 - DNA, 659 bp, Homo sapiens
tatataatgtgcaaaaacatttattgacattaaaaaaggagtgatgagaagaccacctaattttaagtgagatgatgatggttaaattttgttttggacttcatattttgtttttattttccaaattttataaaattatatatatcaattttataagcagaacaaataatttgaaaatcatatgtcgtcaatgatttacagcattttaatctactaatttatagaaaaaacattgcaaatgtttgtgttgctttgtttcatatttatatatttggaaatatatgatgtgatggtttatataaatttttattttaataagawtactgaaatgggcttgattgcaataataacagtttttcaattaatatatttcctcttttgaaaacttactttttcttttaatgtttctgaaattaagatccattttaaaatcaataaattgaaaaacaagttaattttttataaaaatgaaagttattaaattataacactcttataacaagtgatatgtatattctaagaaattctctatgtgaacaatgcaaataccacatcatgtctcttatagcttatcttaatgtcttgccatcaagaatttttttagtgagattcagctaattgttgatccagggaagatacaaatattgacactcatatga

SEQ ID NO: 757283 - DNA, 616 bp, Homo sapiens
attaacacaacaaatagtaaaggtttttttcctattactaaatctcaaaatcttgactgttaatgtaagatcagaactatgcacttccatatctatgtgaatttctattttttctgctttgataatttcaatgaaattagtacattttgaagctggagaaaaaatggctttgagtaacatgcattgatttacttaactttatacaactaaaggaaagcacttccaagtgtttcagggtgaattttcaacaatctccataacacataacataaagacgacctatttaaatcttatactaattcatgtgaggtaatttgcattayatgctgatttggtttcatcaatatcccaacatcagcatttaagattcttctttttttatgtatttgacataacaaagaagaaagtggtctttttacacttgacaaagctatattatacaaagaaacaaccataaacaatatatctctgtgctgcctttcaactcactttgtttttcctccttaaattacaactcaatttcaaagtatcactgacaatttacatataacagcaatatcataacatggactgcttgcctaaaatgcagtggagaggctgtcaagtcagcttgttt

SEQ ID NO: 757284 - DNA, 552 bp, Homo sapiens
aaataaaaagttgttttatatgccatcttgtagaacgctgtcttccaactgtaaaaacaaacacttacaatgataagtgcttggccacggataaaggtataggcagcattaatcttacactcatgctagatcctcatggtattatggtgttcattttattgtttttttttttttttttttttactttttaacaacaaggtgcatatggcagtgtacacaaagaataattgaataagtagtaagatcaaaaggagagttagataattaaagcgacaactgttgctgagttatattaggaatgctttcaaatgccctcaattcctccacagctgagctcaaaatattataagtaatatcgatgttggatttgaaaaacaatgtgaaaatgtcttactccaaaaatgtgtatttcactaratttcacttgtctgatatgccttcttttaatgtgtttattcacatttattaaatattagtgtatgtgaaagtagggtgacagatgaggaatacaaatttgaacttctgtatttttcagtatttcctagcaccaac

SEQ ID NO: 757285 - DNA, 629 bp, Homo sapiens
gaaaatattttacttggaatttgatggaaactttggaatttcatgttagaaattgttcatagaaaacatcaaagttaaccacgagaactgaaatatgaaaaatttacctaacaatttgatgcagtagtaaatcagatgggaacaataaattactccaattaatcataccaagaaaacatttagtttaatctggactaattagtaatctaaaaatgctattttatttaaactagtagtcatttctgatccactcattaggcaaatattacagaatatttatatcataatagtattatgttaagtatcagacatacaaagacaaatatagctgctcctaaccaaaaagwttcatagtctattcagcctattcaacaccaagagctggtcatattaattagttatatatttactttttgtatattttttgataaagaaacacattttaatttcaaacaactatagacgttttaccatgatggaaattcaaagtcattgttttatgtaacatgcacctgactgacacatttagttattccgaaatcttgtagaaaaatatcaaatttctgcttttattaaaacacaaatttagatgtgattaagcagaagagacaatatgtagcaaattaaaa

SEQ ID NO: 757286 - DNA, 628 bp, Homo sapiens
tataattttctcctatctggagactcacctggctcttcaatacttccattttttcttccaaattattcccccaaggaaaacgtttttattcttaaaacataaaagccaaaaatcaatttctatattttgctgtatcatctctcctctgaggtaatacatgtataaagttgagttgcttataaaagggataggagagaaggatgagaatgaagagagaaaagaaatgggctaaggatgaatacccagcaaaaatcaaattggccaatcttttcaaagcattatcttatcaagtacagactaagctaacattttatttagcactcattttgagtcaggctatctgctgacaactttccaacatgtctcctaaatttcaaaattataaatttaaagaagaaatttgatatttctcctgaagtgcaaagaaaccaaagcattttgtcaagattgtacaagtgaaagtgagtgaagaggaaaaattgcaatctyggctttttcttccaaagtcaggtaacatagctcctttgacccatgctgactaaaatgactaaattaaaatttcattagtcaatagttaaaagtccttaatttatctttacatataaataccattgattttcttcttctg

SEQ ID NO: 757287 - DNA, 601 bp, Homo sapiens
aaatccaaactccttagcctgacacccatgaatctgccctttgcctatcttccagcctcttctttcaccaacggctgatccagactctacatttcactcactaggaacccctgcaggttgatgaatgtgccacgccccatgccctgtaactttcacctaaatctgaaattcctttcttccacctccgcataaagtcagattaagagcttagatttgggcgtaaaacagcctggggtgaaatcctatctgcttcttcctagctatgtacattttttttcttttttttttcttttttttgagacggtgwctccctctgtcgtctaggctggagtgcagtggcgcgatctccgctcactgcaagctccgcctccctggttcacaccattctcctgcctcagcctcccgagtagctgagattagagacgcccgccactacgcccagctaagctatgtacattttttaaaaaacttctttaagcttctgttttcttgtctataaaatggagatgacagttgtggctggctaccttacaggcagaattgcatgaaactatccatgctaaagcacttaatatagttccaggcactcagtaagtactta

SEQ ID NO: 757288 - DNA, 656 bp, Homo sapiens
cttagaatgttaaccatcaactagctcatgacacacagtccctgttgtgccatatacagtcactaactctacccatgacaaacccgacgtccagaatgttccctcaggcagggcacagtggctcacgcctgtaatcccagcattctgaggggatcacttgagcccaggagtttgagaccagcatgggcaacatgatgaaaccctatctctagaaaaaatttaacaattagctgggcgtggtggtgcatgcctgcagtcccagctacccaggaagctaagatgggaggatcacctgagcctgggaggtcaaggctgcagtgagctgtgatcatgccactgcaccgtgacactccagcctgggcgacagagtgagactccgtctcaaaacatacaaacaatcaaaaaaaaaaataaaaacaaaaatgctccctcattcctgtgtttaaatatttttgttctttcaagtctggtcaaactcyttccttttggtgatgttttctgcagtaactccaaacttcaattaggtattcttccagaatgatttatttatcctattcattcagcatttatttctacctagaaacagctgtctgtcttaacatgatcagtttccccagtaagactaagactacaagctccttaaaggcagacgctgt

SEQ ID NO: 757289 - DNA, 602 bp, Homo sapiens
atgtcagacccaatcaatcgatcactgcctaattattattgcaaatgatccatatccaagccgcaaaccttaaagggaatttaatgaagcagtaagcacatcagtaataagatctactttggtctctattaaatctcatgattcataaatatcctggcatgttttattctttctttaaatcctgcgaagacatctacaaaagtgaatgcttgaaagcgactatttaacacttcactaaagacaattctaaggctctcagtaagacttaggctctgtatcagatccttcttcacatataggctaagggaatccaatagtctatggatagacaaagaatggagttcctatacaaaggtagaattgagaaagatattttcatctctcttctccagcccgaatttcctcagggaatgcccctgcaaacagtggcttaactggaatccgaygagtgtgagtaagaggagtgtttcttttctaacagagaagtaggcacaggcaggaccatttctgcctgtatgtttggttgtgagttagaaaaagcaccctcctctgggtggggccagcccagcatgggtgcaaacactggtagcttatgtaaattt

SEQ ID NO: 757290 - DNA, 636 bp, Homo sapiens
ttttcccatccctggaaaaaattgtcttccatgaaaccagtccctaatgccaaaaaggttggggagtgctggtctagaggctacaagtagccctgtgaagaagatctgctccagaatgaagtcagcactcaggagggagttgaaggatgacgamcaagtaaagacattagtgacattagtttaacccctttaccctgccctgcttgaagacaacatatcttttgcagtcctaatttcatgagccaataaatctcactgtcaaaaaatataaagtttaaatacgttggaatttggtttctgttgactgtaatcagaaccattctgaatccaagtgaaggcaagaaaaatgtggcccatctcccattctatgagtgacttttaaaaatttactttcccagtgagatctgatttttgccaaggtagcctctagttcagcaaccatctttcttttgggataagtttacataggacattgctggttggagcttaataaaacagttcctgaaagtagaatacacttaacagcctctgtcatttgagggagagaacttctgtgctaccacaaaaataattttggaaaggagcgtatctgctttcagaaagtgtctgccaagatgtggcccaatgtaatttaaa

SEQ ID NO: 757291 - DNA, 636 bp, Homo sapiens
ttttcccatccctggaaaaaattgtcttccatgaaaccagtccctaatgccaaaaaggttggggagtgctggtctagaggctacaagtagccctgtgaagaagatctgctccagaatgaagtcagcactcaggagggagttgaaggatgacgaacaagtaaagacattagtgacatkagtttaacccctttaccctgccctgcttgaagacaacatatcttttgcagtcctaatttcatgagccaataaatctcactgtcaaaaaatataaagtttaaatacgttggaatttggtttctgttgactgtaatcagaaccattctgaatccaagtgaaggcaagaaaaatgtggcccatctcccattctatgagtgacttttaaaaatttactttcccagtgagatctgatttttgccaaggtagcctctagttcagcaaccatctttcttttgggataagtttacataggacattgctggttggagcttaataaaacagttcctgaaagtagaatacacttaacagcctctgtcatttgagggagagaacttctgtgctaccacaaaaataattttggaaaggagcgtatctgctttcagaaagtgtctgccaagatgtggcccaatgtaatttaaa

SEQ ID NO: 757292 - DNA, 636 bp, Homo sapiens
ttttcccatccctggaaaaaattgtcttccatgaaaccagtccctaatgccaaaaaggttggggagtgctggtctagaggctacaagtagccctgtgaagaagatctgctccagaatgaagtcagcactcaggagggagttgaaggatgacgaacaagtaaagacattagtgacattagtttaacccctttaccctgccctgcttgaagacaacatatcttttgcagtcctaatttcatgagccaataaatctcactgtcaaaaaatataaagtttaaatacgttggaatttggtttctgttgaytgtaatcagaaccattctgaatccaagtgaaggcaagaaaaatgtggcccatctcccattctatgagtgacttttaaaaatttactttcccagtgagatctgatttttgccaaggtagcctctagttcagcaaccatctttcttttgggataagtttacataggacattgctggttggagcttaataaaacagttcctgaaagtagaatacacttaacagcctctgtcatttgagggagagaacttctgtgctaccacaaaaataattttggaaaggagcgtatctgctttcagaaagtgtctgccaagatgtggcccaatgtaatttaaa

SEQ ID NO: 757293 - DNA, 631 bp, Homo sapiens
gatgcaggaaaacattttattttctcatatgtaggtgggagggagactatctggggaaagcggagggaagctgctctgcagagtgaaaaccatcatttaatgaatgctggcaggaagggagggctctctatggcatcactaaatgttcagacttgaactttctaaataggtctagattcaggcgcagtagctcatgcatgtaattccagctctttttgcggctgaggcaggaacatcrcttgagcctgggacgttaaggctgcagtgagctgctgtgtgtgtgccaccactgcactccagccagaacaacagaggggccctgactcaaaaaaaaaaaaaaaaaaaaagaagaaagaaaaagaaagagaaaagaagaagttttaacctgggtggccatggatagtgtccaaggatgggtaccagaaagtgtgaaccctaaagtgacggtacaaaatggtgttatctttgtgcatatatcaattcctctggggaggaagttctttgctttcattaaacactcaaataattccaagacccctcaaaatgaggaaatctttaagaggagaaatggagtctatccgtctatccatgtcctttcttaaacaatcatttttgcaaactagagagatat

SEQ ID NO: 757294 - DNA, 631 bp, Homo sapiens
gatgcaggaaaacattttattttctcatatgtaggtgggagggagactatctggggaaagcggagggaagctgctctgcagagtgaaaaccatcatttaatgaatgctggcaggaagggagggctctctatggcatcactaaatgttcagacttgaactttctaaataggtctagattcaggcgcagtagctcatgcatgtaattccagctctttttgcggctgaggcaggaacatcgcttgagcstgggacgttaaggctgcagtgagctgctgtgtgtgtgccaccactgcactccagccagaacaacagaggggccctgactcaaaaaaaaaaaaaaaaaaaaagaagaaagaaaaagaaagagaaaagaagaagttttaacctgggtggccatggatagtgtccaaggatgggtaccagaaagtgtgaaccctaaagtgacggtacaaaatggtgttatctttgtgcatatatcaattcctctggggaggaagttctttgctttcattaaacactcaaataattccaagacccctcaaaatgaggaaatctttaagaggagaaatggagtctatccgtctatccatgtcctttcttaaacaatcatttttgcaaactagagagatat

SEQ ID NO: 757295 - DNA, 631 bp, Homo sapiens
gatgcaggaaaacattttattttctcatatgtaggtgggagggagactatctggggaaagcggagggaagctgctctgcagagtgaaaaccatcatttaatgaatgctggcaggaagggagggctctctatggcatcactaaatgttcagacttgaactttctaaataggtctagattcaggcgcagtagctcatgcatgtaattccagctctttttgcggctgaggcaggaacatcgcttgagcctgggacgttaaggctgcagtgagctgctgtgtgtgtgccaccactgcactccagccagwacaacagaggggccctgactcaaaaaaaaaaaaaaaaaaaaagaagaaagaaaaagaaagagaaaagaagaagttttaacctgggtggccatggatagtgtccaaggatgggtaccagaaagtgtgaaccctaaagtgacggtacaaaatggtgttatctttgtgcatatatcaattcctctggggaggaagttctttgctttcattaaacactcaaataattccaagacccctcaaaatgaggaaatctttaagaggagaaatggagtctatccgtctatccatgtcctttcttaaacaatcatttttgcaaactagagagatat

SEQ ID NO: 757296 - DNA, 416 bp, Homo sapiens
cacacagagtcagggccagggtaggaaatacataagttgaccaggaacaccttgtcacctcacaaagcaaggaatctctccatccatctgaacaaggagacagcagaaagacattcccactggccaacaacagagcttcagaatggacatttaraatgatcattagtctcctttggaatatgcaagcaaactaactcaaacggatttgaaaactggaaaaaaatgaaggaagatacagatgcccctatttttctcacatgaactctaccttggggtaagcaaagaatcagtaaaagatttttctctgtacaagtattctatctaataaatgaaaaaggagtgatggtaatggttgctagtgactgataaaaatttccaaaaaggacttcaataaagaaaagcattatgtggttcct

SEQ ID NO: 757297 - DNA, 543 bp, Homo sapiens
tctggtcaccttcacctcttagcacagtagtagctagctacctatctcctattccctcagtcccatggcaggcagctatgcatgtgttcctggagcaacatacacacagtttgcaggagccaaagtaggcaaaaagaactctgctccaaatagccaagatctgtgctctaattactaaaagcwgcttctgatcacaggcacagacaaagaaacatggccactgttgttgcacttcccttacttgtggcaagctcctcctttctgcataaagtgacttccggaagagtggaagaaccagcatcctttctcttttcattctgtagtcgattttctgtttttttctcttttgggggccagatcaggataactataacattccaaagcaacagcatacatgagggaaattaaaaagtcaccacagatgttcagggtgaggtgcaggctcaataaaaatctgagaaaaccttaattttacacctcaggctaatccttggcaccaagacaacataaaacaatcaaaaaagcaaaaacaaaataaaacat

SEQ ID NO: 757298 - DNA, 581 bp, Homo sapiens
atttatacattgcatcaacattcttgtccccatgttgtatttggtttggcttagaacagaagccagcaatagatttgagagagtcagatcaaaataaggttgggatggctgccttgctgtactaaagaacagagatcctatcaggtgawttttttttaatagttgtagcattctattggttccagttaacactccttctacttgccccttcaggccaagaagtgtaaaagttctgttgtatgatctgtgtggctattacctaaccttgttcacaatttctaaatagccctctcataaagcgttttctcacttatcccaattcaggagtaccatctctttcctgctaggaacctgaatgatacacagaaatgcacccaccagttagtgatgaaataagagcaactcttccattccgttttaagctttggttagtaggttctgctgtccctactttggaagcattcttacacaatagaagtcaaaacacatctaacttctgtaagactttttgagtgattgtcctcttgacagcccctttcacttcattgttcctcaggccgtagatgatggggtttagcata

SEQ ID NO: 757299 - DNA, 629 bp, Homo sapiens
ttccaggagcatgagcttcttctctatttcggtgagattctctgcctgagatgggtgttctgaggagcattcagaaattgtttgttctgaatttctaaaacatgaactattagaaaaggacaaaaagaaatctacagactgtgggaaaagttagtgtcaaacaaatacaaaaaggaaaagttgagaacagcaaagggtggctgtgttatgcggaagtgacagagttgaaaaatgatgcattgataaagggacaaaaaaaatccttaggaggaggaggagcaggaggagaaggagaaggaggagaaggaagctgaaataaccattcttggttatatatggatttacatttcttcttcattagggttgtttattgcagcatttctgccatttttccctatcagtttcttcttatccagagaccctggagtctttgcccagggrccactgcctggtgatgaaagtcatattgttcagcttccataaacaacatccactctcatgattagctttggaaaatcagctgaatcttagcctttagcttcacagtgtatgtatgtctgtctgtctatttaatttttacaaaaagctgggaaaatcaaatacttaaaaataacaattgagtaatttca

SEQ ID NO: 757300 - DNA, 644 bp, Homo sapiens
atcatgtggtgtttgaatgacaggatttattgtcgaggcaatgggtaagtacacaaaggtctggataggatgtggccatatcagagatctgccccaggaagactgctctggcatcgatgccaagatagagtcagtggaccaggggaagcagagaccagctcagagcaggattcccagtgaaggaaaggacgaagaggcaaacgggagtctgtgagggggtggtgatatttgtgctggaagaggtgtctgagttgcttatctgggaatcactgtagagaattgtcaggccaagttttgaatyaagcataaggagaaataatttatgtagctataaaagcccagagtgggtgactgagttggtggcttacatggtctctaaattgagtaatgctatgtcagagacaggaaggcaaaggcatctcagccgtgggattcatctgcaatgtcttcttcaaggcgtaaatatgtttttattagctttatgcatataaccataaggaattagaacatcagagagaagaagaccctcataaaattgggatcttttttagcacaggtgccaggatgtcaggtatcaggtcactttcagatgattcaccacagcgtccctttccttgctgctggtggtcactctacacaaggcc

SEQ ID NO: 757301 - DNA, 621 bp, Homo sapiens
gatgttaggtcgttttgactttatccttagaaacagctgctgagagtgtctgccagtgttctacaatgtgccgaagaagccagccagcatctttttaccctgcctgtacctccaaatcactggggaacctatgcctcacccgaggccrattgacccagaacggctttggctaagacacaggtgttaatagtctttaaagcactctttgtgaaatctaatttgcattcagagctaagaaacactgtgctagatttttttaaagatgcacacagctatatgccatgattcttcttccggttgaaggagacagaacttgtgaacataagaattatcagccacaggaggtagcagatgccaaatgctgagcgctatcactaaatgccaatcatgaggagacacgaactaatatgaggtgatgcaggaagtcttcccagaggaggtgagacttgtgacaggaagggaagcagggttaggacttaaacaaatggagggggcatctttgatgtcagaatcccaagagcaaatgcaccaaggctgtgcatgtaaggtgaagtgaggaactgaccctcaagcccacctctgctgggggaaacaaggtggttcagtgtcgtgagtgctttt

SEQ ID NO: 757302 - DNA, 621 bp, Homo sapiens
gatgttaggtcgttttgactttatccttagaaacagctgctgagagtgtctgccagtgttctacaatgtgccgaagaagccagccagcatctttttaccctgcctgtacctccaaatcactggggaacctatgcctcacccgaggccgattgacccagaasggctttggctaagacacaggtgttaatagtctttaaagcactctttgtgaaatctaatttgcattcagagctaagaaacactgtgctagatttttttaaagatgcacacagctatatgccatgattcttcttccggttgaaggagacagaacttgtgaacataagaattatcagccacaggaggtagcagatgccaaatgctgagcgctatcactaaatgccaatcatgaggagacacgaactaatatgaggtgatgcaggaagtcttcccagaggaggtgagacttgtgacaggaagggaagcagggttaggacttaaacaaatggagggggcatctttgatgtcagaatcccaagagcaaatgcaccaaggctgtgcatgtaaggtgaagtgaggaactgaccctcaagcccacctctgctgggggaaacaaggtggttcagtgtcgtgagtgctttt

SEQ ID NO: 757303 - DNA, 621 bp, Homo sapiens
gatgttaggtcgttttgactttatccttagaaacagctgctgagagtgtctgccagtgttctacaatgtgccgaagaagccagccagcatctttttaccctgcctgtacctccaaatcactggggaacctatgcctcacccgaggccgattgacccagaacggctttggctaagacacaggtgttaatagtctttaaagcactctttgtgaaatctaatttgcattcagagctaagaaacactgtgctagatttttttaaagatgcacacagctatatgccatgattcttcttccggttgaaggagacagaacttgtgaacataagaattatcagccacaggaggtagcagatgccaaatgctgagcgctatcactaaatgccaatcatgaggagacacgaactaatatgaggtgatgcaggaagtcttcccagaggaggtgagacttgtgacaggaagggragcagggttaggacttaaacaaatggagggggcatctttgatgtcagaatcccaagagcaaatgcaccaaggctgtgcatgtaaggtgaagtgaggaactgaccctcaagcccacctctgctgggggaaacaaggtggttcagtgtcgtgagtgctttt

SEQ ID NO: 757304 - DNA, 591 bp, Homo sapiens
ctggcccctctccttcaagtttacagtggctgatgcagctgagcgaggagcagctctggggcctgggaggggaacatctcactacaggcaacgctggctccccactgctgaagaagctggaaatggatctctgtggttttgagccattgcagtttcaagtctgctgatgacagtggctgarcctacactaacacacagaattctgccaacaacaatagctctgggacaaaatacagactgccttttactgagacatatgtgaggtctgtgtgcctgcaatagcttcacctacattctaaggcctggaagagcagggctgtgatttgtgcttcagtatttaggacagcatttgccttttcccctagtttagttatggaagcatttgtgtaagtcctgggttccttcttccttaaatgtttgaaaggattcactggaaaaccctttctggcctgaatttgtgtgtgtgaaggttttcaatcgagtatttaatttctctaatgcttgttacaagtgatctctttgtctgattattctatgtcattctaaagcacaatctttaaaaagttgtgcttttctgggaatctgtctgtc

SEQ ID NO: 757305 - DNA, 670 bp, Homo sapiens
taaaatgtcttcctttggctttactcttaatgcactagtgatttgttatgtctcccttgctgtgttttttttttcccctttacctattccttgttagactatgcagagaaaaactcagaactatgctgtatatctcattttttacagaatctatcctgagttccatagaattgagtgtttgtggacagaagccccatgacctcagatgggaaaaacaaaaacaaaaacaaaacaaaaaactttccattagcctccagttaaaatgtatctttttctttaaatgtaggctacagaatacattagtattagcaatgtgtgaaaatttgtcatgaataaaataagtgataatttcatatrattacataccacaatcacaatgtgatatatcacattataattgtttcaagaatctcaaaatattatttatctctatccaaatttgaaattggcatactttttttaggagatgagtgtccttcttggttgcccaggctggagtgcagtggtgcaatcatagcttactgcagcctcaaactcctgggctcaagcaatccccctgcctcagcctcctaagtggctgattataattaaacatcagatacatcttgatattgaatgtgtcaatgaagaagcacatgcattgactatattgcaaatttgcttaaaaata

SEQ ID NO: 757306 - DNA, 628 bp, Homo sapiens
ggcaatactctccaaactaatctaccgattcgacataattccattcaaaatcctagttggcttctttgcagaaactgacaagctgaatctaaaatacagaaatgaaacggacacagaatacccaaaataatattgaaaaagaacaaagttggaagactcactcttcttgatttcaaagcttactatgaagctacagaaatcaagacagtgtagtactggcataaagacagacatgtaggcttggcatggtggctcacgcctgcaatctcagcactttgggaggctgaggcaggyagatcactttgagctcaggagtttgataccagtttgggcaatgtggaaaaaccccatctccacaaaaaatttaaaaatcagctaggcgtggtggcttccacctgtgatcccaattacttggaaggctgagggtggaggattgcttgagcctgggaagcggaggctgcagtgagccaagatcgcaccactgcactccagcctgggtgaaagtgagactctgtgtcaaaaaacaaacaaaaacaccaggcatatagatcaatgtgaatagactgagagtctagaaataaaccctcatttatagtcaacctatttttaacaagagtgccaagacaat

SEQ ID NO: 757307 - DNA, 559 bp, Homo sapiens
gaaaatgaatgttgcagaaaacctcaggattaccattcttgttagtccaactcgttcattagtaacagtggcctcaagagctgagcccccatgcctggccagtctttccaagagatgcaacatgctaacagcaacccctgccctgatctggctggctgactgccgtgacctccacttggcccccgaggccccatcagctatcggaatactgtcctggcatctggcaactggtcattttatgacctgggtaaaggaagtgtggggtgttctttccttcttccttctttcttgccaragatctgttgtttcctgggtaggaagttccttttgccacatgaatggcgatcaatacggggcctggcctcacagactaatcttagtggccttagctgaggaagactgtctgcccaggtcccctccccctgcagaccatagggcgccgtggccatgggagcgtcaaagatctgctttccttcttgtgatggcccctgtagaacttcctcatgggccagaatcccggcttaaaagggagcctctctccaaaagtgcatgaacacgc

SEQ ID NO: 757308 - DNA, 398 bp, Homo sapiens
tgcgtgttctccgcggtcgctgtagccggatccttcctcatggctgtggcggtgccgacggcgggcaactgagaggaagccacaggagaaagagaccgccacacagagacgacggtgagtgaggccaggcccctgttggcaagtggttgctgccactgtagttccactgccaccgytgatgggaacacttgaggccagactgaagccctggctgacatggagagagagcaggggcttctctaggggcctgcaggcccccaagcatggaaataaaggaaaatcttgagtcccttcatgaaattccaggcacctagctagccctgagaagcaagtgagcaactcgataagcaagaaggtaatagttagcttaaaacaatagccaaggaagtcagaatcag

SEQ ID NO: 757309 - DNA, 627 bp, Homo sapiens
agagaaacttttggaacaaggtgatatttataaaactgttattctttgtttggcatcagtatcagtctgtcagaaacaccaagtagctttatttccttcttgaaatgttacttctaagcaggcctatttatgttttttytaagcctcaattttctatttaatatttctcagaataaagaaaacagctcattttaaacaagaagtttatttaaacaacaagacgcttgacttgaagggaaaactatctaggattcttttttgttttagagtaatttatccctacttaaagacagattgccctacatgtaacagctacgtacaaaaaagttataaaattgtccttggttttacaatgataaatgaaaaacattaaaattctccaattgaacaaggtatgcaaggatttttatgttgttgttttttttttttgttaaaacagtgagagcaaaataacttactggaatataaagataagagctgaatgagcatgccactaatggagaaagggggtattttcacagaatcagtatttttccccatcccgtctccacttgatgtcaatcaaaacataccattggctgtttagttaaaaaaaaaaaaaatgcaatatgcttgtgcacatatacc

SEQ ID NO: 757310 - DNA, 585 bp, Homo sapiens
tatgccactgatacttactgagcagcacctactatgtgcaagggatagactgtgtaactaaaacagtctaggttcctatatctcctgaagtgtgttttttagtaagacagtaagtaattacagatttgggtaagtattaaaggaaattaaaaagcggtgcttttttaaagctattccaggaagttcaagggtgtaggttggggcattttaggtcggttttgttgttgttgttgttgtttttgatattgaatctggtctgtcacccaggctggagtgctagggcacgatcttggctcactgcaaactccgcctcccaggttcaagcgatcctcctgcctcagcctcccgaatagctgggattacaggcggatgccaccacactcggctaatttttgtattttcagtagaggcggggtttcaccatrttggccaggctgatcttgaactccagacctcagatgatctgccttggtctcctaaagtgttggaattacagtgtgagcccccgagctcagactggagtctttaaatgggcatttttttcctttaaatttcctgttagtggccagccaggcggatcacgag

SEQ ID NO: 757311 - DNA, 628 bp, Homo sapiens
ttctctcttttgtcctccattggagagcatggttgtgccaaggctctctagccaggacagcccatcctcaggccacccagctccgtgagtgagttccctgcacagcctgtgactgactcaccgatgcagtggggctgatcttcacatggcaccccaagcaggcttttccagttcacatctgccaacaaggyagccaagggggtggtttaggaagtagagaaaaggtgaaaaggcagcggagggagccggctgtcctgtgtctcctctttttcctgcccccagtgacttgcattttctctgagacagctgccattctagtctcccagccattcttaggaagagacgtgcctgtctctgggaagaggcaacttctctgcatgtcagaggtaaggggaatcatgtgacatgtagatgggggaagagtgggagttaggggtgggagagggcccaatctaaagtcaacaaaaatcctatttttcttcccttaactttacactctgttgttttcccaggctgtgtattatctgcacacacacacacacacacagacacacacaatgcaggaattctctccacagtgccccttgttgatggctatccggacacctgccttaaatacttccagtga

SEQ ID NO: 757312 - DNA, 621 bp, Homo sapiens
catgttcatgaattgaaagaactaatattgataaattttctcactacccaaagtgatctttgaaaatacagagtcaatgcaatccctatcaaaattaaaatggcatttttcatagaaatagtaaaaacaattctaatatttgtatggaatcccaaaagacctagagtagccaaaacactgtttggaaagaagaacaaaactggagatatcacattctctaatttcaaactatattacaagactctagtaatcaaaagagtatggttctgrtataagaacagacacatagatcaatggggcagaatagagagaccagaaataaacccacatataaaataagctttaacaagggtggcaaggattgacattggagaaaggaaagtttcttcaacagtgttggggaaactggatattcacatgcaaaagaataaaattggacccttgtctgatatgatatacaaaaattaacttgaatcggattaaagttgtcaatgtaaaatctgaaactgtaaaactccttgaagaagacaggaaaaaagctccttgacattgattggcaagcactggcaagaatttcttggctatgaaaccaaaagtgctggcaacaaaagcaaaaaataa

SEQ ID NO: 757313 - DNA, 575 bp, Homo sapiens
tcactgcaacctccgcctcccaggttcaagtgattctcctgcttcagctccccagctggctgggattacaggtgcccgccaccacaccctgctaattttttgtatttttagtagagacagggtttcaccgtgttggccaggctggtctcraactcctgacctcagtcagggtgatccacctgccttggcctcccaaagcactaggatttcaactgcacccaaccccctcatgttcctttctgatcaatcatcctcctcaccccatctcccacacaaccactgttctgatttttatcttcatataattagttttggcggttcttgaacttcatattaagagagtcgtacagtgtgttctctttgatgtcttgcttctttcacttaacataatatttttgagatttacccatgttctcgcataagtcagtagttcattcctttttattgctgagtagttttccattttataaacgtccatgacttgtttattcattcttttgttgatggacattaaagttgttttcattttttttttttagctatcatgcacaaagctgtaaataatattctagtgc

SEQ ID NO: 757314 - DNA, 635 bp, Homo sapiens
tcaattaaagacttaaacgtaaaacccaaaactataaaaaccctggaggacaacctaggcaataccattctggacctaggaatgggcaaagatttcatgacaaagactccaaaatcaattgcagcaaaagcagaaattgacaaatgggatctaattaaacttaagaacttctgcacagcaaaagaatctattaacagagtgaacagacaacctacagaatggaaagaaaattgcaaactacacatgtaatgaaagtctaatatccagcatttttcaagaacttaaacaaatttacaagaaaaaaaacaaacatccccattaaaaagtgggctcaagacataaacagacacttttcaaaagaagacatacatgaggccaacaacaagcatatgaaaaagacttagggctgaggagtttatctcccagtgcaagacaagaaatggggatgtgaggccaggtgtggtggctsacacctgtaatcccagcactttgggaggcccagggggtggatcacttgaggccaggagttcaagaccagcctggccaacacagggtgtttcacagggtgtttcacagggtgaaaccctgtctctattaaaaatacaaaaaaaaatcagccaggcatggtggcaagc

SEQ ID NO: 757315 - DNA, 564 bp, Homo sapiens
tttatagtaattccattttgctcttaataacaaacattagttttgactattatgcaatttctcttttatttctttcagaaaatggaagatttctccttaaaagacaaggagagagaaatatgccaaaaatgagaatagggagtagaggctaaaaccaaaattagtattcagaaatttcaaatgatgctgaaattcccagagagaagtatttatttatataagtatattcggttaattatttatagraataaaactcaggaaaattccactctcactgtttttatctgcgtacactgtccctagagggcttgtatgtgggtttccattctcagaatcagaaagtccctgtttgttcttgtccttgttatcattttattttaaaataaaatttgtgagagtagtgatcacactaatttttctctgtgtttagaaggcccgctattttaaagactgattattcatatttttaaaaatcacatttttttcatatatatatgaaagacataaatttggaatgctttaataaagttcaaaagtcaggatatgtgctcattaggctgacat

SEQ ID NO: 757316 - DNA, 572 bp, Homo sapiens
atctgtacccattctttttgtgaaggcttttcaggtatttgaaaggacttgagtgttgtgatataagctgtttctgcttttggaggcacctcaagtcccataatactgtgattcttgcagacttgtaggggtaccaccttgattgtcttagacaaaatgtgggagaattatctgtattactaggcagagactcttgctctcgtctcttactttcttctaaacaaacagtctcatctctctgttctgagccacctaaagcttgtagtagagtgacamaagcactcccatggccaccaccactatgactatgctgggtcagatgtgaagccagcacagccctggatctcacacaagagatactgtaactactccctggctactgcctatgttcactcaaggccctgggcctctgcattcagcaggcagcaaagccagccaggcctgtgtccttcccttcagggcagcgagctctcccaggccctgggtggggtccagagatgctatccaggagacaggaaccagagccaaaatccctaaaagtctacctggtgttctactgtactgcagctgag

SEQ ID NO: 757317 - DNA, 637 bp, Homo sapiens
tagtagaagatttcatttcctctgggtagatatccagtagtgggattgctgggctaaatggaagttctattttctaaattctttgttgtcatttcaatgatgttcatggtgtcttcactgggagtagatcccatctcaagaaaccaccttctttgcttttccataaaacgcaacttctcatttgttcaggtttaatcataaggttgcagtaattcagtcacatctataggctccacttctaattctagttatcttggtatgtctaccacatccgcagttacttyttctactgaagtcttgaaccccttaaagtcatccataaggttttacatccacgttcttcaaacttcaaacttaatgttgatattttgacctcctctcatgaattataatgttctcagtggcatatagaatggcaaatgctttccagaaggtttcaatttacttcacccagatccatcagaggaatcactatctatggcagctatagcctcaggaaatgtatttctgaaataataagacttaaaagtttaaatgactctttgattcatgtgccacagaatgggtattgtgttagcagacatgaaaacaacattaatcttcttgcacaactccattagaactcttgggtgaccag

SEQ ID NO: 757318 - DNA, 624 bp, Homo sapiens
aattctagttatcttggtatgtctaccacatccgcagttactttttctactgaagtcttgaaccccttaaagtcatccataaggttttacatccaygttcttcaaacttcaaacttaatgttgatattttgacctcctctcatgaattataatgttctcagtggcatatagaatggcaaatgctttccagaaggtttcaatttacttcacccagatccatcagaggaatcactatctatggcagctatagcctcaggaaatgtatttctgaaataataagacttaaaagtttaaatgactctttgattcatgtgccacagaatgggtattgtgttagcagacatgaaaacaacattaatcttcttgcacaactccattagaactcttgggtgaccagctgtactgccaatgagcagcactgttttgaaaggaatctttcaaggcaatatgtctccacagtgggcttaaaatattcagtaattcaggcttattgttccatttatagagtacaggaagagtagatttagcaaaattatcaaggatttttggaatggtaaataagcattggtttcaacttagtcatcatctgcattggtccctaacaagagagtcagcctgtctttg

SEQ ID NO: 757319 - DNA, 611 bp, Homo sapiens
tctatttcttgtttgtattttctattgatgtgtaccaaatctagacatttggttttaagtgttgttttaaaaaatttacagaaaaaaataaagaagaaaacagggtaattttaaccacccttgacctacttttaaaaaattctattaatacacwtacacaaacaaaaggaaaaaatattgatgtatgtctgcatgccaaagtatttactaacatgcttaattttttatctggggtaaccaatgcaatcataaaaaatgatcaattgaaattattttaagatcaggaatttttaataatgataattatttatctgtagccatgactgcttctaattattatgggaagatgatcatctcactttgaacaagcggctgagtggaatgaaagaggagcatagtccctccatgctgatttttttttctttccgcacacttgatctctaattgcttctgtaccaaactgggaatagaaatgcccaagtccatcagaatgtctagtttcgtcacaagaagtatgtatcaaaaagccatgttcctgaaaagatttgtaactgaaaatgcaaatagaaaacaatacattgctacatacgtagcctgaaggatttaatgac

SEQ ID NO: 757320 - DNA, 576 bp, Homo sapiens
ttcatttctttctggtaaataacaaagagtagaattttagttttaagtattcgtctgaagtttttgatgcttattctacttttttttctgccagggaactctgttccttatccttcacatccatgttccaatttgtattaatacttattgagataaaataggatgaaatgtgatgtatatacaactatatggtcaaaatttataaaagtgagaaagtatttctaaaatatctgttctttgttggtacatatctaccaaatagctttgctaacaacctcagaacaaaatacaaacctaggagactctgatttacatgaattcttctttcacatgaactctcttttatttaggaagkattgcagaacaaaaatgaaactcagggggttgtgcaaattctgaaaagaaaaggtctgccccaagtgtaaaagaagtgaaacgctctaagtgttctggaagctttatgacacattttcttgacctatatggtgtgaaaccttacttatcattctcggcaggaaaaagagataatataagaaagagatttgtgggaagataacatttaaatctctactatca

SEQ ID NO: 757321 - DNA, 633 bp, Homo sapiens
ttgattgtgttggtggtttacagatgtatacacatgtcaaaatgtatcagattgcacattttgaatatgtgcaccttattgtctgtcactttaataaagctgtttttaaaatctagatgcctctgggcaagttactaaaccttgactttacaaatctgtaaaatggtaataacaacctatcaactttagaagtctattgcttggattaaacgaggtatttgtgtgtttaagaggcttaacacattacttagcacattagaagggcttggtgaatctccagacttctttgcagaggaccaaatggtatctattatccttccttctaccccccmactgacagtggatagcacagtgtacataaccatgaacttttatcatgccctataaaacaagtcatcactatggcacttctgtgagtttgttggcaataaatcaatcttccggcattgctgggctgtctaaatgcttggctacagtaaattaagtcttatgtgctgttcctgccctgttgcctgtctgtgggagccaaacttctattatgccaagatttctgttggacaaagtgacaggagcaggatggagtgggagaaagctgcaactggaataactctgacaggaattttgatattctaa

SEQ ID NO: 757322 - DNA, 619 bp, Homo sapiens
caaatgtttggattttacttttctactttttgcaaagtctatttttatctgggctcactggacttttcgagtcctcatatgaattttttcctttctaccatctagttttccacatataagcctaaaaaatgaattatgacttgctactatgagatcacatgcaaataaaagtgactcgatttgcccaatactagtttcctcaaagcactagccaaaccactcaggcccatggacaccagcacctccgcaaagggaagcacatcactgtgattatgcagaattcaccagcatcagccacaggattctctgcctctgaggctaatggcaattagctgagggcttgccagccagtcctctccaacagctcaactccagmcgcagacccagcagcacaccttccatcccacggcttcctccccaggtcagaacccacagaggggtcttgcctgtgcaaatacagaattcagggcagttttatttctcatcaaaaaacccaaaaccacagaccacccaaatgtgtctgaactgggaaacagacaactaaaccataacccatctacataatggaacccaactcagacatcgaaagcacacatcatggatgcacgcaagacacggg

SEQ ID NO: 757323 - DNA, 631 bp, Homo sapiens
tgacatcttgacccagagctgcctgaaggtgggtcttctaccacaatttctcaactgcatcttctaaaaaatgggactaataggccaggagctgtgacttatgcctgttaccccagcactttgggaagccgatgtaggcagatcatttgaggccaggagttcaagaccagcctggtcaacatggtgaaaccccatctctactaaagtacaaaaaattagccaggcatggtggcacacgcctgtaaccccagctattcggggagctgaggcrtgagaacagctgaaacctgggaaggggaggttgcagtgtgccaagatcttgccactgcactccagcctgggcaacagagtgagactctgtctcaaaaaataaaaataaaaataaaaaaattatagtaatactagtatattcttttcacaaataagaagagatacatatgtatgtataaatttcaattttctaaaacagtcacaagaaactgttcacagtcgtttcctttggggagaagtatacattttcgtgtcgtttgaactttctaatcgtgtgcatgtccagtttttaattgtcaacataaacctttattttatggaaataagatccacttttgctttctttgttaaaagtaataat

SEQ ID NO: 757324 - DNA, 631 bp, Homo sapiens
tgacatcttgacccagagctgcctgaaggtgggtcttctaccacaatttctcaactgcatcttctaaaaaatgggactaataggccaggagctgtgacttatgcctgttaccccagcactttgggaagccgatgtaggcagatcatttgaggccaggagttcaagaccagcctggtcaacatggtgaaaccccatctctactaaagtacaaaaaattagccaggcatggtggcacacgcctgtaaccccagctattcggggagctgaggcgtgagaacagctgaaacctgggaaggggaggttgcagtgtgccaagatcttgccactgcactccrgcctgggcaacagagtgagactctgtctcaaaaaataaaaataaaaataaaaaaattatagtaatactagtatattcttttcacaaataagaagagatacatatgtatgtataaatttcaattttctaaaacagtcacaagaaactgttcacagtcgtttcctttggggagaagtatacattttcgtgtcgtttgaactttctaatcgtgtgcatgtccagtttttaattgtcaacataaacctttattttatggaaataagatccacttttgctttctttgttaaaagtaataat

SEQ ID NO: 757325 - DNA, 555 bp, Homo sapiens
ccaacgccaccctaaccaaacttatccccaccacagagcaggcaagtgcagagaacaacatggcggcgcctgtggcgtgctcagaccaacacgacccatctggaacctgctcctgagaagtagggaggtatgtccaaattgaaggacttctgcaaaatgactgacctgagctcttcaaaaacattaatgtaatgaaagaaaaataggctaggaatttctagatgaaccaaatctaaagacacatgaaatcaaatgcaatccatgatcttggattgaatcctataygccaatttttaaaggcataaaggatattattggaacaattcaggtatttaaagttggacaatgtatgttagatagtactatttgaaaaattaaactgagtgtgataactgtattgcgcttatgtaggagactgtcccagttcttaggaggtaaactaccatgatgtctacagtcagccctcagatgattcagaaaaaggtacagacataaaaccagttagcaagaagctaacaattgatgaatccatataaatgtatacaatattcattt

SEQ ID NO: 757326 - DNA, 624 bp, Homo sapiens
tttccgcgatggaaccatctccctgctcagatgtagttactgccaagggaaacactgcattgagtccaaagaatttctagtgagaaggtagtaactttttaaacacagaagtttggggatgttactcctccctcctccttaaaaaaaaaaagaaacttcagtgggctgggtgcggtggctcacgcctgtaatcccagcactttgggaggctgaggcgggcggatcacaaggtcaagagatcaagaccatcctggctaacacggtgaaaccccgtatctactaaaaatacaaaaaattagccgggcgtggtggcgggtgsctgtagtcccagctacttgggaggctgaggcaggagaatggcctgaacccgggaggcggagcttgcagtaagccgagatagggccactgcactacagcctgggcgacagagtgagactccgtcacaaaaaaacaaaaacaaacaaacaaacaaaaaacttaggtgtactaaaacaaagtacacgaatcctaagtacatagtttgatgcatttttacatatgtatgtattcatataatcatcacccagatagaaatgtgaaacttttctaggaccccagcaagctccctcatgctcattcccaaaa

SEQ ID NO: 757327 - DNA, 624 bp, Homo sapiens
tttccgcgatggaaccatctccctgctcagatgtagttactgccaagggaaacactgcattgagtccaaagaatttctagtgagaaggtagtaactttttaaacacagaagtttggggatgttactcctccctcctccttaaaaaaaaaaagaaacttcagtgggctgggtgcggtggctcacgcctgtaatcccagcactttgggaggctgaggcgggcggatcacaaggtcaagagatcaagaccatcctggctaacacggtgaaaccccgtatctactaaaaatacaaaaaattagccgggcgtggtggcgggtggctgtagtcccagctacttgggaggctgaggcaggagaayggcctgaacccgggaggcggagcttgcagtaagccgagatagggccactgcactacagcctgggcgacagagtgagactccgtcacaaaaaaacaaaaacaaacaaacaaacaaaaaacttaggtgtactaaaacaaagtacacgaatcctaagtacatagtttgatgcatttttacatatgtatgtattcatataatcatcacccagatagaaatgtgaaacttttctaggaccccagcaagctccctcatgctcattcccaaaa

SEQ ID NO: 757328 - DNA, 485 bp, Homo sapiens
caacattggatttaacattttgcaagtatttactgagcaccatggtggacagactctaaattgactcccaacagtccctacctcttggcattcacaccctatgtaatcccctccacttgagtgttggcaggccctgagacctgcttctaacaatagaatatggcaaggcaatgaaacaacacttctatgattatgttacataagaagcaacttctgtcttgttggcagactttgttctttactggctttgatgaagcaagatgccwtattgtgagctactctatggagaaaaccccctggaaatcaactgagattgggctctggccacagccagcaagaactgagactctcagtccagtaactcacaaggaactgaatcctgccaagaaccacatgagcttggaagtaggatcttcctcaatcagacctgcagatgagactccagttctggccaacaccttgattgcagcctgatgagaaagtct

SEQ ID NO: 757329 - DNA, 626 bp, Homo sapiens
tttccatcactttacctagtctccattcttctttacttttgccccgtttaattttatttcatctgtagagtgaaattgcatattcacagttggtcaagtttctccgcattcaagtaaaatcatgtgttcaattactctaaatacagcccctggcctagctctgtaaaagsaaactgtaggcctctctgatcttttctcattgcacaaggaattttaaaaaattaaattattttgcagaacaaaattgtatattttcataaatgatgagtcttcacttcagtgggtttataaacctgagtctatgtgtacaactgtaaggatgtttgtatgtatatgcttttctaatattgtctatccccatgtgcctgatactttgtgtgattgcatgtacgtatgtgtgtttgtgtgtgtgttcagagagttaaccatagtttaagatcaaatttgttggagacaaattgcttgtgttcaaattctggctcctccacttactatctgtgtgaatttagacaatttacttaatctctctatacctcagttttctctaacaaaggtaaataaaaataatatctatcttatagtgctgtttggtggattaaaagaaataatttatgtaaaatgattag

SEQ ID NO: 757330 - DNA, 660 bp, Homo sapiens
acattattcagatggagggcattttgaaatagcagacaacgtatttcccagaaaagcagaagccagaacaccaaccttggaatactattttgatgtgatgccaagtggtattgatctgccactattcccttttcactcttccctcattcgtgaactctgcaggtgattctttcttacagcagtagaaagtggttgtgaattttagaagataagaatcccaaaggtgcaatggatactaagtcacactccagaggagaatcaacagggtaataaaatacattttaagtgtcttcttccaaaataaacaggtaaagggttgtgttagttgtttgacatgtctgttaatattggagtcatatataaatcacacaaaaaattaagctcatttctggagattttccagagctggttgtggattttgattctgcctttaagcactacaaggcccttgggaaagttaattttgctttcagagcatcagtgaattttcactaaaatgagacgaatcacacctacctcygaagtttgctcttaggatgaaatgagaaaataaacataaaactcctcacttggtacctagcacataacatgtattcaataaatgttgtcatactgttttaataagtatagttttcaaaattaaaatactgtaaacatttc

SEQ ID NO: 757331 - DNA, 529 bp, Homo sapiens
tattttagcaagctacagataatacaaaaaaaaaaggtagatctcaaaaaataaggagacccaattgctgaaccatatgtaatcaaagctaacattttcatggaactttagaatttcaaaagtactctttatcctcatttaatctccggaaattgtataatgtaggtttattattattattctattgtatagatggagcaatcgtggctctaagaggttaaattgttcaagttcacactgttactttggtgatactatagtgcatccttgatttatatattccttttaaacacttctcctcaagacaaactctcactcttgggctttctctctctctctctctctctcwcacacacacacacacacacatgaacacgctcagtggtttcatgtgactataatgcaaaagtatatgtttaagaatgagacttacccactttctaattgtagtctatatatttgctgtgtgattttgggaaaattaattcaactctgaattatacgttatgttatgtctaaaagggcatga

SEQ ID NO: 757332 - DNA, 518 bp, Homo sapiens
gttcaagcaattctcctgcctcagcctcccaactagctgggactacaggcgcataccaccatgcccagctaatttttgtatttttagtagagatggggtttctccatgttggccaggttggtctcgaactcctgacctcaggtgatccacccaccttggcctcccaaagtgctgggattacaggtgtgagtcaccatgcctggccaaaaaccctccaattttaaaaagcacaaaaaatgtgaatggatatttctccaaacaagacatacaaatggccaagatcttgaaaagatgctcaaaatctctattcatcagggaaatgcaaataaaaatcacaatgaaatggcacctcatacctgttaggatggctattaccrgaaaaacaaaagacatgttggcaagatgtggggagagggaatgcttgtacaccgttggtggggaggaaagatagtgcagccactatggaaaacaggaagaagatttctcaacaaattaaaaatagagctaccataggatcc

SEQ ID NO: 757333 - DNA, 604 bp, Homo sapiens
ctgcatggccagagcaaagggcttctactcagtggagctcccctctcctttgatttaaaatgaagattaaaactccctctctcaggtgacaagggaatcgatgtctgcaccccaaagtgtgtatacagtggtagatgctccttgcgtgccagttcacgcacacccccactcctgggaccccataagccctcctcccttctcttggaatgcaaagagagccggaccacatgccacccacctcctcacggtggggcctgtggcagagggctgagcatggactggacacttgatgaatgcttgatgaatgcacactgaagcggaggaaggygcatggggatggtcgaaccctcagtagaacccaggtcctggagccttgaagttcacagagcttaaagagtgcaggtttgctgggcacacatggctcatcctccaaggtgcaaacgtgaagcactgaatccattctcaccattccgcagtgagcccaagccctgagagtatttcctagttaagctgggccccctgacacctgggcactcagggacctgaagtatgccaagggagccccagactagccagcttctcagagctgagcatttctctcttt

SEQ ID NO: 757334 - DNA, 604 bp, Homo sapiens
ctgcatggccagagcaaagggcttctactcagtggagctcccctctcctttgatttaaaatgaagattaaaactccctctctcaggtgacaagggaatcgatgtctgcaccccaaagtgtgtatacagtggtagatgctccttgcgtgccagttcacgcacacccccactcctgggaccccataagccctcctcccttctcttggaatgcaaagagagccggaccacatgccacccacctcctcacggtggggcctgtggcagagggctgagcatggactggacacttgatgaatgcttgatgaatgcacactgaagcggaggaaggtgcatggggatggtcgaaccctcagtagaacccaggtcctggagccttgaagttcacagagcttaaagagtgcaggtttgctgggcayacatggctcatcctccaaggtgcaaacgtgaagcactgaatccattctcaccattccgcagtgagcccaagccctgagagtatttcctagttaagctgggccccctgacacctgggcactcagggacctgaagtatgccaagggagccccagactagccagcttctcagagctgagcatttctctcttt

SEQ ID NO: 757335 - DNA, 514 bp, Homo sapiens
aacatgcagggttgtggcagaggcagatgggacctgcactgtgacttggccaacgtggactgtgccgattgtctccttcttagagcctcagtttcctcctcaggaatacagagcagctgcctccgtgactgctggattagaggagatggtagttgaggtcacacaagacctragtaggggaaactcactctgaacttcccccaggttctgtcactggccctttctccaaggttgtggtgggacagggcttcaaaaaacccaggggagaatggtgagggctcgggttccaaaagcagagtcaatggacagtttccccctgtgtaaatagaggggaaccgcagtgctggttcctccgggaggattcagaagggacaacactagcacggggtctggggtagggtgacgtggtgaaccaaagccttcccctagagcatatgccgggacctgacctctgcgttcccttttcattcattcactcattcattcattcattcattcattcattcattcagtg

SEQ ID NO: 757336 - DNA, 514 bp, Homo sapiens
aacatgcagggttgtggcagaggcagatgggacctgcactgtgacttggccaacgtggactgtgccgattgtctccttcttagagcctcagtttcctcctcaggaatacagagcagctgcctccgtgactgctggattagaggagatggtagttgaggtcacacaagacctgagtaggggaaactcactctgaacttcccccaggttctgtcactggccctttctccaaggttgtggtgggacagggcttcaaaaaacccaggggagaatggtgagggctcgggttccaaaagcagagtcaatggacagtttccccctgtgtaaatagaggggaaccgcagtgctggttcctccrggaggattcagaagggacaacactagcacggggtctggggtagggtgacgtggtgaaccaaagccttcccctagagcatatgccgggacctgacctctgcgttcccttttcattcattcactcattcattcattcattcattcattcattcattcagtg

SEQ ID NO: 757337 - DNA, 571 bp, Homo sapiens
attgcatcaggaatctgtctcttcccatccccaggttcttctttgttttcctctggcctcgtcttgaggcaggcttccccttgtgctggcaaaatgtgtgcctgtagctccaggctgatattttcccactcagcaatgccaggagataaagattaccacttcccccgtacctcctgaaaggctcctgggctgacccccaagggtctggcttaggtcacagcctaaacagtggctccaggggtttggagagtgctgattggcyaggcctaggctggcagccaggccctcaaacctggggtggagtcaccctcatcctacacacacagactcagatggaagaagagtggttccctaaagaagagtctgggcagtgcagccagagaaggaggtattgggaggctaaaccatcaggtgtcttggacagagtcaggaaagcttctgggaggaggaagagtctgagctgagacctgatgaagaagttagtcaaggggagagaagcaggctgggtacattagttatctattgctgcaaaacacgttacccaaaatttaaaactttaaaacaatacaca

SEQ ID NO: 757338 - DNA, 521 bp, Homo sapiens
ttccttgtacaaatgaaaactacagatgaggctaaatctccctttgatctccagctccaatcttggcttccttccacctctccagcggcaacccctattttcgatttggtgtgactccttccaacttttttctctgcattttacatacatgtgtgttttgctttattagtcttttaagattaatgatattgtgcatattatccagccacttaatttctgggttaacaatatatctgggagatcaggtgagtacaaatctacaaaaacatttcattggatgttcccacaccgcccccactttgcagatgagcagaggctcagcraatgttgaagtgactcatcacagctggtgagtagtgaggcaggattcagacagggatgtgtctctccaagtttagcatgaatctgtcctctccctaatctgcctatagtttctttctttcttttcttttttttttttttgtttccctgacatcatcaagtgggccatttaaatagaagattggtcataatgcaaagga

SEQ ID NO: 757339 - DNA, 623 bp, Homo sapiens
ggggatagaatagggctcatgatataagtggtgggcttggtgcttactgtgtgtcactgtgctgaggactttcctgtgaacctatctcctcctcaccctcccaaatgaagtgtgtcccactgtcctggtaccatacacatccatccgtccttgctctgyccactgtgtccagggttcttgcttcactcaggggagaaaccccccatccttttgatggcctgagaggcctgcaaagtctggtcccctacctttctgcactctttcctcctctctccccctcacttatgctgtccccctacactggcctcctctctctctccttccttctcttcattcattcttcctgtctctctgtttctttcatataacatgtttttatcatccagatgcatcagcttctccaaccaaagttttcgtttacctatatttttctcttactttctattctccaccaaccctttttagggaaacagtaggttgtttgctcacttcgttcacgttaagtgggctattttcccttttgcccagggttctcttatatctaggataaaatcacattaggttaaatatattgtacttttgccatgctaagtttttctttttttcttattctcacactaatg

SEQ ID NO: 757340 - DNA, 623 bp, Homo sapiens
ggggatagaatagggctcatgatataagtggtgggcttggtgcttactgtgtgtcactgtgctgaggactttcctgtgaacctatctcctcctcaccctcccaaatgaagtgtgtcccactgtcctggtaccatacacatccatccgtccttgctctgcccactgtgtccagggttcttgcttcactcaggggagaaaccccccatccttttgatggcctgagaggcctgcaaagtctggtcccctacctttctgcactctttcctcctctctccccctcacttatgctrtccccctacactggcctcctctctctctccttccttctcttcattcattcttcctgtctctctgtttctttcatataacatgtttttatcatccagatgcatcagcttctccaaccaaagttttcgtttacctatatttttctcttactttctattctccaccaaccctttttagggaaacagtaggttgtttgctcacttcgttcacgttaagtgggctattttcccttttgcccagggttctcttatatctaggataaaatcacattaggttaaatatattgtacttttgccatgctaagtttttctttttttcttattctcacactaatg

SEQ ID NO: 757341 - DNA, 558 bp, Homo sapiens
cggggcatgaatggaatgcgtttggccccaagagacgcgctgttccttccgcaggccgcgcgtcagcgacggagcaggaagggccggggcctcctcgcgttcccagcggcccccttcgggctgggaaagtggctgaacaatagggctgcccggctggctgccggggctgctgggaggcactgatgcccggtgtgtgtgtgtgtgtttgtgcgcgcgcacgatccttagggtgggagggccgtagagccctatgcttcctgactgggaaaarggaggacttcttactgggtttccccaagtgtcaggcccttctgccttatctcatttggtacccacagccaccctgggagggaggtattagcattcttatctgcagaccgggccacagaggtgaactggatttgtgtcttgcttagaatttgtgcattgcttagagagggtcctacgggcattggccgtctttcaacagtgggtttgggactgaggctggggccagggaagaggctggaaaaccttgtgaggtgccctggaaagcatgcatatgcacacagcatttgc

SEQ ID NO: 757342 - DNA, 600 bp, Homo sapiens
ctccccatcaacgccttggcactatacctctggaacttggccatgaccttgagtgaaagggaaggcaccccagtgaaatgcagtctcaaaatagaaatgaagttgttgggaagacaagctcattaaatgcatgcctgagtttatgggttgagactcacacctgttgcacacaggtgtctgcctcagtctggaaggttcccacccacaccccaagaacacacacacacacacacacactcacactcacacagcctggatcatgcctccttacctgctcaccatccaaaccttggtttccatatgacctcctmcagaaagcctcccccgacagacctcacccctgcccccacatcaccgggctggattaatctgtaagcattttcttctctgtctccttcagtacctatcagctcctcaagaacagggacaagatctagttcactgtggcatccctattgctcagaacagtgcctggcacgtagtgggcaccccacaaatatttcttcacttaaacaaatgaccacatggcagatgaggaagacaggacttggggaaggtatcctaagaggaagttttctgacggctacagacatcggcgtc

SEQ ID NO: 757343 - DNA, 549 bp, Homo sapiens
aatattataaatttaaatttgaaaaatcaatatagaactattaaggttatattattttcctgtagtgagttttagtgcttctctttcaaaaaaatttgtctatttaatgtgacttgttaaaaatattgacataaagttgccttattccatgattatccttttatcatttgtagaatctgtatggatgccatacctctgattcttgaataytacaatttatgtcttctctcttttttcccctagtattactatagatttgtcaatattattaatatgctctaagaatgagttttggcttcattgattttctctattgtttttctgttacctacatcactgatttccactctgattttgatcatttttttccttttgcatgctttggattcagctggctctcctttttatagtttaataagatggacattgacatcattgtttcgagacttctttttcttttcaatacatgtgctttcatttttagtcagcttaaaatatcttctactttccctttttatatcttacttgatccatgggtaatttagaagt

SEQ ID NO: 757344 - DNA, 606 bp, Homo sapiens
tgaagaagagtgttgaattagcaaataaggagacaaagttttatagagcaaggagccttataaggcacatatttatttatttattgaatcttatgactaagggcttggaggaatgagggactcacagtcttgctgatgaggcagagggagtaatggggaaaggagatagatgggtgcagtcccagagaagaactacagtattatagacattgaagacagtatatttacaaccaagctaggggtggaggaatgacagtgaagtagagtggagayggaaagcactagggcttcctcccttccagcaggagaaatttctctctttctgatagagattactatctccatctgtgctgtgtataactcaggcaaactgcctcaatccatcatccctcctcctcctcaagctctgggctattttcctgtggcttctttagcagataagcatatacaccagttaaaaacacttctatcatggaaggaagaaaggaaacaaaaagaaaatgtgatggtcaactttatgtgtcaacttggaaaatgtttttgaatgaaatttacagttatatcagtgaactttcagtaagcaaatggccctccgtaacatgtgtg

SEQ ID NO: 757345 - DNA, 518 bp, Homo sapiens
tattgaaaggaggaataagattgatagaatgttagctagactaataaagaaaaaagaatatccaaataaacacagtcagaagtgacaaaggtatcataaccactgatcccacagaaataccaagatccttggaaactattatgaacacctctrtgcacacaaactcgaaaacctagaagaaatcaataaatccttggagacatacaacctcccaagattgaaccaggaagaaattaaaaacctgaacagaccagtaacaagttctgaagttgaatcagcaattaaaaacctaccaaccaaaaagccctggaccagacagattcataggcaaattctacccgaggtatgaagaagagctggtgccaatcctactgaaattattccacaaaattgaggaggaaggattcctcactaactcattctatgaggccagcatcattctgacaccaaaacctggcagacacacacacacaaatttcaggccgatatccctgatgaacatggatgcaaaaatcctc

SEQ ID NO: 757346 - DNA, 568 bp, Homo sapiens
attcttttaagtaaagtgttgtttcctgaaaaaagcagtttagctcacaacataaaataactgtacaagtgatttttctcaagacaggcatcacatcacatacacagaagtattatgtgtttgcttcccattttgtcacacagaattttaaaaaggtgtgtactcagagtatggcagtgaagactataatgactcctgattcattctggcaccaatgccttggtttgtgctaaggcaccatcagtgcagatgtcaacacagtaaaaaggcaagtaacatcttaccattactatgaaaatagttttgatcacacagacaccctgaaaaggtctcctcaaggttttgcagaccgcactttgagaaccactttgtctagcccatgttgcagattcttgctcaaagtaaattaaatagctccttggtttttaaactwtgtgatgtggcatacatggactttacagtctgtctctgaagattacttgtacagtcccatcagctatactttttcaccccacagtccagctgccagcctcgccagaatccccttattatttgaaatttattgttg

SEQ ID NO: 757347 - DNA, 427 bp, Homo sapiens
tttgatacatgctgtgatgttgatgcctgtagattaatggaacaaggaattctagatggataaaaaatcatttacagtccttccacccttataagaagagtatttattttaagaatttcaactctggagtggtggcatacaagtgctgaaatatttcagttgccataagagccagtttaaacatatttgtcctcataaatgtcatcttatttttagtatcagctgaacaaatmttcatttattgaatgcctatactgcactagaaaccatggttggtacattacagatattgtttcatttcaaccttatatcaacctcgtgaaataggcattatctgtgttttgcgggagaaatatggaggctcagataattaaagtaactagtccaaggctatatagaaaattgtagagctactgttacacagaca

SEQ ID NO: 757348 - DNA, 638 bp, Homo sapiens
ggccaaaaactataaagaaaaatgaaatgcaacacaaaataaagccggctgagggattagagggttcgggggaattctgacactcaccagatgggcagctgtgtagagcaaggggattgactcaggtctgtgttttcaaacagtgttcactcaraagagccccaggagtttgggagggtgcctcaggggtcttcataagatagcagggaggggcgaattggttggaggctgacttgttagacccctttcccttactcctaaccagagcagcacctttaaaaaatttcttttaccggctggccacggtggctcatgcctgtaatcccagcactttgggaggccgaagcaggcggatcacaaggtcaggagctcgagaccagccagctggagaccagcccggccaacatggtgaaaccccgtctctactaaaaatacaaaaattggccaggcatggtggcatgcacctgtaatcccagctactggggagactgagacatgagaatcgcttgaacctgggaggcagaagttgcagtgagctgagatcatgccactgcactccagcctgggcgacagaacaagacttcatccccaaaaaaaaaaaattcttttacctacagggcctctgcatgaaattccac

SEQ ID NO: 757349 - DNA, 638 bp, Homo sapiens
ggccaaaaactataaagaaaaatgaaatgcaacacaaaataaagccggctgagggattagagggttcgggggaattctgacactcaccagatgggcagctgtgtagagcaaggggattgactcaggtctgtgttttcaaacagtgttcactcagaagagccccaggagtttgggagggtgcctcaggggtcttcataagatagcagggaggggcgaattggttggaggctgacttgttagacccctttcccttactcctaaccagagcagcacctttaaaaaatttcttttaccggctggccacggtggctcaygcctgtaatcccagcactttgggaggccgaagcaggcggatcacaaggtcaggagctcgagaccagccagctggagaccagcccggccaacatggtgaaaccccgtctctactaaaaatacaaaaattggccaggcatggtggcatgcacctgtaatcccagctactggggagactgagacatgagaatcgcttgaacctgggaggcagaagttgcagtgagctgagatcatgccactgcactccagcctgggcgacagaacaagacttcatccccaaaaaaaaaaaattcttttacctacagggcctctgcatgaaattccac

SEQ ID NO: 757350 - DNA, 558 bp, Homo sapiens
aggattttatacatacctctatcattatgtggaaataatccaaactagtttttttatgagcctggcacacagtaggtgctttataagtgttgaactgagatgaatgcttacagagtgattctcaaactttattctacctatgcatcattcacatgcaaaacacactcccacactttatatcgtgcatgagacatagtgtttcttcatccagggtaatgggtttagaataggtaggcacatccttccaggggaatcaggatatgagtgggaggtaggctgggactagttagaaataccctccttttgccacctagattctaatgtgtgtcttgttctcaagttgagagctrctgaattactataggccaggtggtgagctaggcacttttaaaattatttctagaatgttcacattagtcttgctaggtggttattattatcctcattttatggatgatgaaactgaggttaaaggatttgtgcaaagccacatagctggtgtgctaggccattcttgcactgctacaaagaaataccggagactgagtaatttataag

SEQ ID NO: 757351 - DNA, 648 bp, Homo sapiens
  misc_feature 590: n = A,T,C or G
aggtctagagctggtaagtggtatggccagccaggatttgaaccgaggtccatctatggccaaagccaaccctgccctccagacatctgatagcaagtgccgccctaggccccactgccctgcccagccttttgctgattaaacaatctcttggctgggtgcggtagctcacacctgtaatcccagcactctgaaaggccaaggcgggcagatcacttgaggtcaggagttcaagactagcctggccaacatggtgaaatcctgtctctactaaaaatacaaaaaattagccaggcatggtggtgtgtgcctgtaatcctagctatttgggaggctgaggtgggaggagtccttgaacctgggaggcagaggttgtagtgagctgagatgacrccactgcactccagcctgggtgacagagcaagactctgtctcaaaaaacaaacaaaacaaaacaaaacccttgaggtgggtctgggcatcagagttttatgtttcttcaaatagttctagtgggcagccagcaatgagcaccgctgagccatgctgtgatttcttgagctcagagagccagccgggttggcctttgntgccagtgcccagggaacaacccttaatggttgttacacaaatgagtctctgatcgct

SEQ ID NO: 757352 - DNA, 555 bp, Homo sapiens
taggagggaaaatctttgtataacatacacacttatagtatatttttgaagagcgatacaaatatacatttcaaaaaagagagtaatagtaaacaaggtgaatatacatttgagaaaagagtcaaatttaaatttttrtggctagaaaattcacaggagatctaatgaaagcctgtgaagaggtttaaatataaatagggaaaattttaaactatttttttttgaagcaacaaaagcagagatttattggaaacaaaaagtacactccacagggtgggagtgggccctagcaagcagtttgggagcaattttaaacttttagaaatgaacaaaacacaactcttgcctgcagagtgtttttgctttaatagggaaggtaagaggtgataaatgtgtgcagtcccagttcctttacatttaatagcaccaacctaatagtagtgctctaaacggtgaaatactgtgttctagtacatggtagggatccagaaaatgatagtttcccttcttttatggattgcttgtttatgaaaaactgccaattggcagactgtg

SEQ ID NO: 757353 - DNA, 555 bp, Homo sapiens
taggagggaaaatctttgtataacatacacacttatagtatatttttgaagagcgatacaaatatacatttcaaaaaagagagtaatagtaaacaaggtgaatatacatttgagaaaagagtcaaatttaaatttttatggctagaaaattcacaggagatctaatgaaagcctgtgaagaggtttaaatataaatagggaaaattttaaactatttttttttgaagcaacaaaagcagagatttattggaaacaaaaagtacactccacagggtgggagtgggccctagcaagcagyttgggagcaattttaaacttttagaaatgaacaaaacacaactcttgcctgcagagtgtttttgctttaatagggaaggtaagaggtgataaatgtgtgcagtcccagttcctttacatttaatagcaccaacctaatagtagtgctctaaacggtgaaatactgtgttctagtacatggtagggatccagaaaatgatagtttcccttcttttatggattgcttgtttatgaaaaactgccaattggcagactgtg

SEQ ID NO: 757354 - DNA, 595 bp, Homo sapiens
  misc_feature 521, 524: n = A,T,C or G
tattatcatctcgaagcatgtaaatatagaatatactttttgaagttagttttcttcaaaacgagagatatttctcaccattgctttttgctgagtaaataccagaattagaatcttatgccaaaaatatatttggagtacacatttgcacaggaatttgtttttttccagactttttaatagaaaatctttaggtataaattacatacggcaaatataaaaagttttatttttaatcaattttaatcaggtgtaatttatatgcaataaaatttatacattttaagtgtatgartcaatcaattttgacagatacacacatcaatataactaccacccaaattaagatctagaacatttcatcttcccaaaacgttctctttgcctttttgcagtggttttctccccacctccacctcccactccaagcaactactgttctgatttctgcacctatggatcgtttagactgttttagaatttcacatacgtggagtcagtacagagcatacttttcctcnccngctcgttttactcagcataatgcctatgcaattcacccatgttgttgagtgtatcagtagttcattccttt

SEQ ID NO: 757355 - DNA, 644 bp, Homo sapiens
ttcctatccacgagcatgaaatgttcttccatttgtttgtgtcctgttttattttgctgagcagtggtttgtagttctccttgaagaggtacttcacatcccttgtaagttggattcctaggtattttattctctttgaagcaactgtgaatggagttcactcatgatttgtctctccgtttgtctgttattggtgtataggaatgcttgtgaattttgcacactgagtttgtatcctgagattttgctgaagttgcttatcagcttaaggagattttgggctgagatgttggggttttctaaatatacaatcatgtcctctgcaacaggracaatttgacttcctcttttcctaattgaataccctttatttctttctcttccctgattgccctggccagaacttccaacactatgttgaataggagtggtgagagagggcatccctatcttgtgcccattttcaaagggaatgcttccagtttttgcccattcagtatgatattgcctgtgggtttgtcataaatagatcatattattttgagatacatcccatcaatacctagtttattgagagttttcagcatgaagagctgttaaattttgtcaaaggccttttcttcatctattgagataatcatgtg

SEQ ID NO: 757356 - DNA, 603 bp, Homo sapiens
gtacatggagatgaatgttgttttcatgcctgctaacacaacatccattgtgtggccacaaatcaggagtaacttggactttcaagtcttattatgtaagacacacagtttgtaaggatattgctgttataaatagtgattcttctgatggatctaagtaacataaattgaaaaccttctcraaagaattcactattctacattccactaggaaaaggagaggagggcaaaatctcaacattaacaggaattttgaaaagttgactcaaatcctcttagataaccctgaggggttcaagatttcagtgaacaaagtcacaagactttagtggaggaagtcactgcagatgtggaaagagaaagagaactagaatttaagatggaacctgaagatgtgacttaattgctgcaatctcataataaaacttgaataaatgaagactttctgtttatggacaagcaaataatgtggcttcctgtgatggaatctactactgatgaagagcctgtgaaaactgttgaaatgacaactaatgttttagaacattacacaaagttaggtgataaggcagcagtagggcttgcaaggattgactccaattt

SEQ ID NO: 757357 - DNA, 603 bp, Homo sapiens
gtacatggagatgaatgttgttttcatgcctgctaacacaacatccattgtgtggccacaaatcaggagtaacttggactttcaagtcttattatgtaagacacacagtttgtaaggatattgctgttataaatagtgattcttctgatggatctaagtaacataaattgaaaaccttctcgaaagaattcactattctacattccactaggaaaaggagaggagggcaaaatctcaacattaacaggaattttgaaaagttgactcaaatcctcttagataaccctgaggggttcaagatttcagtgaacaaagtcacaagactttagtggaggaagtcactgcagatgtggaaagagaaagagaactagaatttaagatggaacctgaagatgtgacttaattgctgcaatctcataataaarcttgaataaatgaagactttctgtttatggacaagcaaataatgtggcttcctgtgatggaatctactactgatgaagagcctgtgaaaactgttgaaatgacaactaatgttttagaacattacacaaagttaggtgataaggcagcagtagggcttgcaaggattgactccaattt

SEQ ID NO: 757358 - DNA, 458 bp, Homo sapiens
taatggaagcagcacaccaacatggcacatgtatacatatgtaacaaacctgcactttgtgcacatgtaccctaaaacttaaagtataataaaaaatttgtctgtagtctcaatttgatattttacatatctagtcttcagaaataatttaatgttaaagcttctctttcagccagctcaggcccactgaaggtggaaagcctgctgagartaggggacaaaatttggctttttcattagtttctctgcttgcttcagcttcctaactaagcttcaattcttgattactccactgttgaaatgggaagggagaataaaagagagcacaaaccgttttacttggtccactttgaaatgtgtctgtcataacttcttgaggcacgtgtttagagttgagtcggtttcatgtggaataatagtataaattctctgaagatctccactatctctggggattc

SEQ ID NO: 757359 - DNA, 458 bp, Homo sapiens
taatggaagcagcacaccaacatggcacatgtatacatatgtaacaaacctgcactttgtgcacatgtaccctaaaacttaaagtataataaaaaatttgtctgtagtctcaatttgatattttacatatctagtcttcagaaataatttaatgttaaagcttctctttcagccagctcaggcccactgaaggtggaaagcctgctgagaataggggacaaaatttgrctttttcattagtttctctgcttgcttcagcttcctaactaagcttcaattcttgattactccactgttgaaatgggaagggagaataaaagagagcacaaaccgttttacttggtccactttgaaatgtgtctgtcataacttcttgaggcacgtgtttagagttgagtcggtttcatgtggaataatagtataaattctctgaagatctccactatctctggggattc

SEQ ID NO: 757360 - DNA, 617 bp, Homo sapiens
ttgccaaggatttaggagatctgtgtcaggaactgaggtcaaagtccaaatattggaacagaagattctcttagtacccctatctataaaagtttcaggagccgtatgtcaagaactgaaggaaaaaaacaaatagatatttcttcttatattacaacagtacagatattcaacaagggcaggtaataataactataaaatatttacgtaaataaatttgagttatgtttgttaaagtaggtgactagatgtcctgaaaacaaaaaggctgyagttaggagtacgtgaactctttatgaaagttcttaaattcattaaagaaggagctagatagaatatttaagggaacatggggacccagaatcagagacagttttgtcctggagacattatcacaaaaattatgaacttgacaaattttggttctccttgacacagtatataccaagagatgagaacacagtcccaaacaccttccccagttgatttcaataaccttttgatataaatctactatcagattatttaatcacccaggtactaagtctagtacccagtagttattttttctgctatcaaaccccgatgacatgagtttacctacataacagacctat

SEQ ID NO: 757361 - DNA, 678 bp, Homo sapiens
attgggtgatgaaatttgggataaggatcccatcactcaggcaatgagcataggactcaataggtagtttttcaacccatcccccccttgccctccctgttccagcagtcttcaatgtctattattccaacattgatattcatgtgtgctcaatgtctagctcccacttataagttagaacatgccgtatttgtttgtctgttcctgcattaattcacttaagattataacctcccactgcatccatgttgctgcaagggacrtgattctattttttatggctgcatagaattaatggtgtatatgcaccacattttctttatccagtctaccattgatgtacacctggtttgattccatgtctttgctatcatgaatagcacagcaataagcatacatctgcatgtgtccttttggtagaatcatttatttgcctttgggtacatacccagtaattaaattgctgggttgaatggtagctctgttttaaggtttttgagaaatctccagactgctttccacagtggctgtactaatttacattcctaccaacagtgtataagttttccctttcttccacactctcaccagcatctgtttattgactttttaatagtagctattctgactggtgtgcagtggtatcccattgtgattttgatttgcatttcttgcatg

SEQ ID NO: 757362 - DNA, 524 bp, Homo sapiens
aaaagtgggttaaagacatgaataacaattctcaaaagaagatatacaaatggtgaacaaacatgaaaaaatgttcaacatcattatcaagaaaagtgaaaatcaaaaccacaatgtgataccaccttactcctgcaagaatggctataatttaaaaatcraagagtaatagatgttggcatggatgtggtgaaatggaaacattcttacactgttggtggaaatgtagacttgtacaactgctatggaaaagagtgtggagattccttaaagaattaaaagtagaactaccagttgatccagcaatcccactagtgaatatctacctagaggaaaagatgtcagtatataaaaaagacacttgcacacacaggtttatagcagcacaattcacaattgcaaaaatatggaaccaacctaaatgtccatcaaccaatgagtggataaagaatttgtgatatataaatgccataaaatactactcaaccaaaaaaagaaataaaataatggcattcgtgcaacct

SEQ ID NO: 757363 - DNA, 457 bp, Homo sapiens
tgcaatctaaagaagacaggagaaaagaatgaagataagtgaagggagttccagagaaatacaccaacatacacatcatagaagcacaaaggacaagagggagataagaagcagaaaaaaaatttgaagaattatagggcaaaacttacaaaattatgatgcaaacattaatttatataccaaagaagatttaaaaaatgctaagtaggaaaagccgaagggttgtctcgcccagacacagcatagtaaaaatataggaagctaaagacaatgtcccgaaaacaacagagaaaaatcactcttcaggtawaaggaaaccctaataaaataacacctaacttcttagcaggaaaaacaatggagtctagaaatcactgggaatacatttatagcaaagaaagttaaggctatcaagtatcttatctgcagaaaactatctttcaaaaataaagacaaa

SEQ ID NO: 757364 - DNA, 524 bp, Homo sapiens
tgaacccgggggccggagcctgcagtgagccgagattgcgccactgcactccagcctgggcgacagaatgagactccatctcaaaaaaaaaaaaaaaaaagactttatgaaaatggcaaacaggccgggtgcagtggctccagcctgtgatcccagcacattgggaggccgtggcggggggatcacaggtcaggagatcaagatcatcctggccaacatggtgaaaccccgtctctactaaaaatacaaaaattagcccagcgggtgcctgtaatcccaactattctggaggctaaggcaggagaatcatttgaggyggaggctgcagtgagtcgagaccaggccactgcactccagcctgggcaacagagcgagactccttctcaaaaaaaaaaaaaaaaaaaaaagaaagaaagaaaatagcagaccatgcagacagcaaaagattagtgttttgcagtgttttgtgaagaaaagggagggtttcatatataaagaatagggatttggggggagatataaaa

SEQ ID NO: 757365 - DNA, 622 bp, Homo sapiens
agctgtgtacctaacggcatcccctgcatatgtgaagattcattttctcatttctaatatgcacgtggttacagattgcttttcacataaatatgtgaaatgttgtgtgacatgtgaacattttcccatctggatgattgttcataaaactcattttctatgatttaataaacctaggaacccacaagcaagaacagctttagccctagtatttcaatgtttgtaggtgttacaatcacttgtatgttccataacaygttcctacttttatcaactattaatttgtgcttaaaaggtaataaacctagcactctgacccttggctgtcattaatggcaacataaattagacgattacatgctttaatatttttcaaacccttctattctacttctccccaaaccccacctttcataaaaatttactggtttagaagagctgaatgtcttggaaaaaattgattatgtagtttagcagaagctgttgctggcactgcataaaataaagcatagattatatgattcaaatgtaccaaaacaaatgacatttttggaatgaaattagaattgtattgctttctctgatcattttggaaaccactttgtaataaaagattattacc

SEQ ID NO: 757366 - DNA, 448 bp, Homo sapiens
aatatatctgtatatgactgtattgcaccaaaatatagtaaagaagtaacaatgaaggaatactgcaaacgttttcttcattctctggagccatgtggaagaataaagtaccagtggtgaaattacagttgtcattttcggtagctggtcaaaattttccatccmagcttcatgtttaagaacgtgaagtttgccaccagacatgacgaagctgaagttctagtctgtcactgactagctgggttgtttagagaagtcgcttctctctaaccatgtttcatgaactatatgaggcgatagaaactagtcgaaatcacaggttgttctgagcattaagtgagataatacatattatctttagcatatgtctgaatcatatgaagtatacaaaaatgtatgttaactttatatatcattttatgaatttgagatatatctctgtgctttg

SEQ ID NO: 757367 - DNA, 448 bp, Homo sapiens
aatatatctgtatatgactgtattgcaccaaaatatagtaaagaagtaacaatgaaggaatactgcaaacgttttcttcattctctggagccatgtggaagaataaagtaccagtggtgaaattacagttgtcattttcggtagctggtcaaaattttccatcccagcttcatgtttaagaacgtgaagtttgccaccagacatgacgaagctgaagttctagtctgtcactgactagctgggttgtttagagaagtcgcttctctctaaccatgtttcatgaactatatgaggygatagaaactagtcgaaatcacaggttgttctgagcattaagtgagataatacatattatctttagcatatgtctgaatcatatgaagtatacaaaaatgtatgttaactttatatatcattttatgaatttgagatatatctctgtgctttg

SEQ ID NO: 757368 - DNA, 599 bp, Homo sapiens
cctaataatgtagacttatgattatctgcaatgtaaaatagcctattctacttttagcatttcatctcttgaaattatatgaatcatcatctgctacttagcccagtaagataaatgagagtatgaactgcattgcagtgccagtaaagacaaggagatccwcaagactaggtatattgttagttatctgagcaaacaagttagctagaaagaaaaaaaaaaaaagcctagtaacttacttcaataatataggcaaagtctatcagagccctcatgcttctgagggtttaatatagcagtatgcagcacttataatcatataaaatagctaaactacactttttctaaatcgagaacactattttcagaaatgtaatttaaattatgaaattcaatgtttaaaaaatgtgtaaagtgtctctagaattatatatttataaaatgaacaccaaacatagcaataagccaaaggtacaaatgttcaacctattaaaaaaaaaaaagttttatcttgagtttgatacaatcaagtatatttaaccattttaatctatcagagaataaagattgattatggttaagtaaggcctttgtcagct

SEQ ID NO: 757369 - DNA, 596 bp, Homo sapiens
tacagtttattaatatgaattttatttaatcaacatattacatggcagtcttagtattatgctaatcaagacagcaatgaataagaatctgtgactaaaatatttttaaatgaatatgttattatgttaccaatagtcttatttctaagatataacagagtttacatcatgaaacataaaatagtatgataaatacatatgtattacataaaagtatgatatatatgtatatatgtgtacatacatacatgtatgtatctacaaataaatacataaaagtataatatatacatacttataggtagttgaataccagactgatttctcagacttgaactaaattgtgaaacatggaagacctaccctggrgtacttaacgtctggtgctgtgcttaattgtgcgtaagatcaagtgcagttcttctttgaccgtcaggcttcttggtacaacagtgctcctgcagtgttcattatgttttctaatctgattcagtgactagtcattctatgcttcagactatggaataaaaaccaatggggaagaactgggtaaaataatttcagtatcataatgaggctggaacctctgcttggag

SEQ ID NO: 757370 - DNA, 621 bp, Homo sapiens
tcttttatgaaaattataacagttttatctcctagggttatggtgaatacctagggcaggaccgggcacttagaaagctctcatccaatgtcccctaactcttggagacaataatcaagacttagaggaactgactgggggaaacgtcaacactttcttggttctctcagaggccggtggagacgstgctccattctgcctggatcatttcccagggcaggtaaaagtggtgggacccctcgccgggaggccaggaaagatgcaaagatggatggatgggtgtgttccccaggagtgagtgtgtcctggggtgggtgggtcacggggagtggggtgtcatgaaggcgggtggctatggtaccatgacgggggtggttatgggaagtgctgtagaagtgtgggtgtgttataagaagtggggtttcagagggctgggtgggctgtaggggtctgtccaagaggaataggactagagttgaggggagcaatcttccaagtccagagcaccctcaacccagcaagcctgaacaagtgtgtagggcctctggcaaaataatagccaggcagacgggcagaagagatggagcaggccaagcgtcggatggagagaggtgaacatgg

SEQ ID NO: 757371 - DNA, 621 bp, Homo sapiens
tcttttatgaaaattataacagttttatctcctagggttatggtgaatacctagggcaggaccgggcacttagaaagctctcatccaatgtcccctaactcttggagacaataatcaagacttagaggaactgactgggggaaacgtcaacactttcttggttctctcagaggccggtggagacgctgctccattctgcctggatcatttcccagggcaggtaaaagtggtgggacccctcgccgggaggccaggaaagatgcaaagatggatggatgggtgtgttccccaggagtgagtgtgtcctggggtgggtgggtcayggggagtggggtgtcatgaaggcgggtggctatggtaccatgacgggggtggttatgggaagtgctgtagaagtgtgggtgtgttataagaagtggggtttcagagggctgggtgggctgtaggggtctgtccaagaggaataggactagagttgaggggagcaatcttccaagtccagagcaccctcaacccagcaagcctgaacaagtgtgtagggcctctggcaaaataatagccaggcagacgggcagaagagatggagcaggccaagcgtcggatggagagaggtgaacatgg

SEQ ID NO: 757372 - DNA, 610 bp, Homo sapiens
gagtttttattctgggatctcgttcagtcacttggaaacagtttattcctttcaagacttgcatgagatctgctagcaccagaacagccttaagtcaagggctaattggactaattgtcactactgaggcggcagctttctaaatgctcctcctgatgcccygtgtcttacaagctgtctccactctggctagcaggaccaggttcctgatagcgtgagctctgggaattggtatgcccgttccttcaaggggctgtttccccaggctccagtagtttccttgtgtgaatgccacggtctggtccagtccatcgtctgctgaatgttcagcggggaccttctgcaggtctccagagctctctctctgtgcagctctctccagggacctgcagctgcctgtcctccccagattcccgggtccgcctctgctcgtggagaccaccaggctccacctgactctcccgtcccagtcctgcagcgtagaaactccccaggcaggccgggcggagtggctcatgcctgtaatccgagcactttgggaggccgaggcgggcggatcacgaggtcaggagatcaagaccatcctggctaaagcggtgaaaccccatct

SEQ ID NO: 757373 - DNA, 610 bp, Homo sapiens
gagtttttattctgggatctcgttcagtcacttggaaacagtttattcctttcaagacttgcatgagatctgctagcaccagaacagccttaagtcaagggctaattggactaattgtcactactgaggcggcagctttctaaatgctcctcctgatgccctgtgtcttacaagctgtctccactctggctagcaggaccaggttcctgatagcgtgagctctgggaattggtatgcccgttccttcaaggggctgtttccccaggctccagtagtttccttgtgtgaatgccacggtctggtccagtccatcgtctgctgaatrttcagcggggaccttctgcaggtctccagagctctctctctgtgcagctctctccagggacctgcagctgcctgtcctccccagattcccgggtccgcctctgctcgtggagaccaccaggctccacctgactctcccgtcccagtcctgcagcgtagaaactccccaggcaggccgggcggagtggctcatgcctgtaatccgagcactttgggaggccgaggcgggcggatcacgaggtcaggagatcaagaccatcctggctaaagcggtgaaaccccatct

SEQ ID NO: 757374 - DNA, 610 bp, Homo sapiens
gagtttttattctgggatctcgttcagtcacttggaaacagtttattcctttcaagacttgcatgagatctgctagcaccagaacagccttaagtcaagggctaattggactaattgtcactactgaggcggcagctttctaaatgctcctcctgatgccctgtgtcttacaagctgtctccactctggctagcaggaccaggttcctgatagcgtgagctctgggaattggtatgcccgttccttcaaggggctgtttccccaggctccagtagtttccttgtgtgaatgccacggtctggtccagtccatcgtctgctgaatgttcagcggggaccttctgcargtctccagagctctctctctgtgcagctctctccagggacctgcagctgcctgtcctccccagattcccgggtccgcctctgctcgtggagaccaccaggctccacctgactctcccgtcccagtcctgcagcgtagaaactccccaggcaggccgggcggagtggctcatgcctgtaatccgagcactttgggaggccgaggcgggcggatcacgaggtcaggagatcaagaccatcctggctaaagcggtgaaaccccatct

SEQ ID NO: 757375 - DNA, 612 bp, Homo sapiens
ggaagcttcagggacaaagtgattttggagaaaatcagttaaagatttttaaagaggggatttaattggagggaggcagaagaggtgccaacttgatttctgaaaattgtaatccctactgctctcagagccactgcctggtacggaaagtgtatcttctcccactggctttgcacaccatttaacaggaaattcaagtcgaaatatcagggggaaaaaaagcctcctagccttattactagaagaagacccctccctcccaccatttgtaatagaaccctcttcaggacgaggcctccggaattgctgtttatctcttattcgtgctctaataaaatcaatatgtgtgtcctactaaacttggatctaccgacagtgaatttcaaaagattctgaactctcygcaggcctacatcagtggttctcaaccaggggattttgtccccagggaacatttgacagtctctggagatgttttgggttgttacaacttggaggtgggggcaggagtgcaacctacgtctaatggacagaggccagagatgctgctaaacagcctaccctgcacagcaggaaagaatctcttctttgtgtctccccagcaaagaatcc

SEQ ID NO: 757376 - DNA, 592 bp, Homo sapiens
tgttaaagaaagaaaaagaaaagaaaaggtctcaggcctttaacatgcttgggttgattgtaattactgagtggatctagagacacagatgtcctgctagagaggcagagatttaaaattaactcataaaacggttgcaggatttgcctatcacataaaacatgaatactaatgatgctggcacagtgcctagtacaccttctgactcaaggctgggcattttactgcatgcttttcatgtattatatgtagccctgacagcagacatataccttcccattttacagatgaagaaactcaggctccttgaggcttaaggkcttgctgaaggtacagtaagtcacagaactgttattcaaaaaccaattttatccacaggtaacttaacagtgtgccacatgcaagtgtgacactctctaaagaaacacgataatattcagcgctcactaatcatattcagcactcatagtgcctgtcatccagtaacaattgccaggcatgcaaagaaacagaaaaacatgactctcaactaggagaaaagttaattgagaggaacatgagcagaaattgcacacattttgatattagtaga

SEQ ID NO: 757377 - DNA, 537 bp, Homo sapiens
gaaatcttgccataaaaagcatatttaacattctttaatgcaccattttccaaattcatttgatcacatggaaagcctgttaacgtctcactggatactagtattccatgcacctgaatttgggaaacacagcattatagaaatattgagaaggcagaaacaacaaaacgtagtatttgattgcctgagaaagaagagaattcaaagatgatgttaagttttagccactctgactaagaaaacacgctataccgtaattatcakgtttatgagaacagatttttgggtgggaattagtgtaggcttgggttagttaagtgtcaggtgtcagggtatcaacatttgaagatattcatataataaacataaatatctgcaaaaattatttcaaaaacagtaatggaaattcaggtaaactacttgcaattatttcataaactgttgctaccaaccaaaatgaatgcctagcagagcgctccagcacatggcacagctagaccatgccatgccccatgatgtgtcacacatcggggataa

SEQ ID NO: 757378 - DNA, 620 bp, Homo sapiens
caagcagtcaattagaaattaccaggcatgccaagaaatgacaaaaaacaaaaaagaaaaaggatcacaggtgttttaaatattggtgttactaaaaacagtcttttaaaataatcatgatcaatatgttcatggatatatacaacaaaaatgaaaatttaatcagagaactgaaatctgtttcctcagaaaaagaattgtatattcccaaattgataaatgcaataattaaaattaacatccagttgtattcagatttatttgtctyaaaaatgttttatattttggaggttttaaaaaataattttaaatgtgatttaaataaagtcatatattttgctcggttgatatatctaccaagtgtctcttaaactacaggtttaaaactgcctcaccacaaaacagtaagtatgtgaggtgatgcttgtgttaattagcttgattgagccattccacaaaacatcatgttgtacaacatcaatatatacaatttttacttgttaattaaaaaactataattaaaaaatagaagaatgtggatttcaacctatagttttcttttcatttctttgctttttctttacagagtttccttataaagccaggttatttgtcctgta

SEQ ID NO: 757379 - DNA, 616 bp, Homo sapiens
agcggtgaagctgatacatatacctaccaggctcaagtagccaatctttagccttataccatactgcctctttgaaaataaaaatagcatggaaaattagaagacaaagatgtacccaaacctcattttaatcaataatgtcatacattccaagtatagcttttgcaagaccraagattggaagtggcatttgctgttttgattctcaattattcagcaattagttactgattgccaagaattgggataaatgttgagaattcacaaagtccctgcctttaaggatctgcttagaaaaataaaatgaaaacatttaaaaaccactagaaaacattacaaaagtatatgcactcaaatgctaagtggaataacactttatttttttagtggagttcaagagacaaatccaggcaccgtcagtgcttaaatgtaagttctccaaaaaaagcaaaataggagaatcagccaggtgcatgggcaaactatagactgcatttctatgtgttggtagctgttatgtttattcattcttaaccttcattacaatgggagttatttcatagtcaaattacagtagtccccccatcctcggggagatcttctgagacagcagata

SEQ ID NO: 757380 - DNA, 628 bp, Homo sapiens
tttctctttctatgcagaagttcattagtttaattacgtgctactcgtcaatttttgtttttgttggaattgctttttgggacttagtcataaattctttgccaaagcagatgtctagaagagtatttcttaggcattcttctaggacttttacagtgtgaggtcatayggttaagtctttaatccaccttaagttaatttttatgtgtggtggttggtaggggtccaggttcattcttttgcatatggctagctagttatcccagcatcatgtagtgaatagggagtccttttaccattgcttatttttgtttactttgtcaaaggtcagctagttgtaggtgtatggctttatttctgggttttctattcttttccatcagtctatgtgtctgtttttgtaccagtaccatgctgttttggttatggtaactttgtagtatagtttgaagttgggtaatgtgctgcgctcctcaactttgttctttttgcttgggattgctttggctatttgggctctttttttggttgttccatatgaattttggaacagatttttttttttctaattctgtgagaaatgatgttggtagtttgagaggaataacagtgaatctgcaaatagctt

SEQ ID NO: 757381 - DNA, 610 bp, Homo sapiens
aagacaagatgaaatggggttcttataagaaacttgcctaacacaccaacatttctcattcataagggtatgcttactctgtttctgggaagtaggagaaaaagactctgcttcccattgctttcataaggggtaaacaatggcctcctttagrcacaaattgatgaccctcttcagcctccactttctgtgctgaatgtaccagagtttacagccagccaagaagtaagaggtggacatgctccttgatgagtggtttcaggcaacagcctgcagcaccaagtcttctgaaaaacctcccaggtctgaaaacgactatgagaagagtgaaaaaaaaaaagtgtgttggggctgcttctagccagatcctattcagagttccacagctgaacttccctttggactgtgtttagagttcctaaacaaaatagatgggagatgtatcccactgaggagcaaaacagacaaagccattacccctctaagtaagcacagccctgagccaggaacaaaaattggcccagtgtgtgggaacgtgggcctgccaggcctatctagaatccactcccaggcagtggcagtaaggaacatgctgggaaatgttatgcta

SEQ ID NO: 757382 - DNA, 590 bp, Homo sapiens
cgggcacggtggctcaggtctataatcccagcactttgggaggccgatgcaggtggactgcttgagctcaggagctggggaccagcctggacaacatggtgaaattctgtctctacaaaaatacaaaaattagctgggcatggcagtgtatacctgtagtcccagctactggggaggctgaggtgggagagtagcttgagcctgggaggcagaagttgtagtgagccaagattgcaccactaccctctagcctgggcgatagagccaaaccctgtctcaaaaaaaaaaaaaaaaaaaaagggaaaagaaaatgcagcatatatatatatatatatatatatatatatttattattcagccatgaaatagaacaaaatcctgtcatttstggcaaaacagattaacctggaggacttacattaagtgaaataaatcagacacagaaggacaaatagtgcacgatcttactcatatgtggaatctaaaaagttgttctcattgaactcatagaagtagagagcagaatagcagttaccagaggatgggatggtgaaggataggggtggttagaaattggttaataggtacaa

SEQ ID NO: 757383 - DNA, 535 bp, Homo sapiens
agcataaccatcaccttaagcatttctttgggtagtgaacattcaaaatcctctctttggccaggtacggtggctcatgcctgtgatccaagcactttgggaggccaaggcaggcggttcacttgaggccaggagtttgagaccagcctagccaacaaaatacagaaatacaaaaattagccaggcrtggtggtgcacgcctgtggctgaggcatgacaatcgcttgaacccaggaggtggaggttgcagtgagccaagattgtgtcattgcactccagcctgggcgactgagggagacactgtctcaaaaacaaaaacaaaaacaaacaaaaaaaatcctctcttctagctttttgaaaatattcactaaattactgttaaccatattcaccctacaatgccacagacactagaacttattcttcccatctagttgtaactttgtatctgttaaccaatctctccctatccttccctcccctctacctttccctaccaccccaataaccacaattctaattctttaagctcaac

SEQ ID NO: 757384 - DNA, 597 bp, Homo sapiens
tgaaagcttcaacaacagaatagactaagcaggtgaaagaatttcaaaacttgcagacaggccttttgaactaacccagtcagacaacaattaaaaaaaaaaggaatgaacagctgagcacagtggctcatgcctgtaattcaagcactttgggaggccaaggcaggcaaatcacgaggtcaggagcttgaggccatcctggccaacatggtgaaaccctgtctctattaaaaatacaaaaattaggccgggcgcagtggctcacacctgtaatcctagcactttgggaggcagaggtgggcagacttcctgaggtcaggagttcgagaccagtctggtcaacatgatgaaaccccatctctactaaaaatacaaaaaattagccrgctgtggtggtgggtgcccataatcccagctactcaggaggctgaggcaggggaattgcttaaactcaggaggcagaggttgcagtgagccgagattgcgccattacactccagcctggtgacagagcaagactcagtctcaaaaaaaaaacaaaccaacaaacaaacaaaaaaaacaaaaaagaatggacaaagccttcaacaagtatgg

SEQ ID NO: 757385 - DNA, 634 bp, Homo sapiens
ctctgtctccaaaacaaaaaacaaaaaaaccttaaatttatggtcagttgatttttgacaaagacgcagagttcaatcaacagggaaaataatatttccaataaatggtatggggacaactgggtagccacatgcaaaaaaataaagttggacccttaactcataccatatacaaaaattaactcaaaacagggctgggtgcagtggctcacatctgtaatcccaacactttgggaggccgaggcaggcagatcatttgaggccagaagttcaagaccagcctggccaacctggtaaaacccccatctctactaaaaaaaaattagccaggcatggtgrtgtgcgcctgtaatcccagctactaaggaggccaaggcaggagaatcatttgaacccaggaggcggaggctgcagtgagccgagatcataccactgtactccagcctgggtgacagagtgagactccatctcaaaaaaaaaaaaaaaaaaaaaaaaaaaatcaattcaaaatagatcatagatctaaatataagaaggaaaactgtaaaatgctattttctacataaaagtaaatcttcataagattaagatgctcttagacacagcatgagaaacaaaataaaaattagataaa

SEQ ID NO: 757386 - DNA, 653 bp, Homo sapiens
ggaattccagcaaccacagggagcttgaccccacatatttacggttgaccaggctgtgtgcattgccacagagaccagagagggcccatatatccctggctgatggagcctgcaggcatgtgcaggtgggacatgagaggtcccaaaaggaaataaaacccagagcagcctgaagtttgaatgtgctccgaagctcacacacagatccatcaggagagactggaagtctcacygtcttaaggtgtttcagcgtaacttctgaccagtctttggttgatcactaagctatgcagacacaaggacaacaactaggaagccagacttacaaataaaaggaagggataaaatagtgagaagagacgtcacaactgcacattgtgaaggatacagacttcaaaggtttagtccaggcaagtaataaaactaacaacaaccaaggtcaccaacagaagggaaaagtgagaaactagagttgctacaatatattgtctaaaatattcagtattcaacagaaagttaggagtcatgcaagaaaccagaacatatgatccatacaaaagcagtcattagaaactatctctaagtgtctttaagatattataagcaaagggttcaaaacagctattataaatatgctcaaaaaactaaaaacc

SEQ ID NO: 757387 - DNA, 639 bp, Homo sapiens
aaaataatattttaaaaagaggaaattctgtgcaccaaggttaattccatacttagtcctgcagcatcggctaaaaattgtgtaatttttccccttcacacaatgttgtttttgtttcttcctcaccagttcagacaaacatctgttatactgcagaaggacaactatctcccaaaccacggactgcgcctgcagccaaaatcaacaacrcgagccccaagcatcgagcacagtcagcctttatatccagccgggataacatttcacatgttttgattaaaattagctaatttgtaattctagaacctatgaaacttaaaagctgccatccatatagatcacattaggcagcgttttaaagggccagagctccttgtgatttcctagtggctttcacctctctcccccttccccacccccaacctaaaatgaaatgcaaaagtaaactggaaatgcaggacaggaggtaagggtaagtgaggaagaatggttattatggactgtttgaattttgttcccatcaaaaaacaacaacttctaccggtcttaaaaaaaataaaataaaactgtccatcattggaatcaacagtggtttccaccataagaaacagcattgatttccaaggcaaatctccctta

SEQ ID NO: 757388 - DNA, 639 bp, Homo sapiens
aaaataatattttaaaaagaggaaattctgtgcaccaaggttaattccatacttagtcctgcagcatcggctaaaaattgtgtaatttttccccttcacacaatgttgtttttgtttcttcctcaccagttcagacaaacatctgttatactgcagaaggacaactatctcccaaaccacggactgcgcctgcagccaaaatcaacaacgcgagcsccaagcatcgagcacagtcagcctttatatccagccgggataacatttcacatgttttgattaaaattagctaatttgtaattctagaacctatgaaacttaaaagctgccatccatatagatcacattaggcagcgttttaaagggccagagctccttgtgatttcctagtggctttcacctctctcccccttccccacccccaacctaaaatgaaatgcaaaagtaaactggaaatgcaggacaggaggtaagggtaagtgaggaagaatggttattatggactgtttgaattttgttcccatcaaaaaacaacaacttctaccggtcttaaaaaaaataaaataaaactgtccatcattggaatcaacagtggtttccaccataagaaacagcattgatttccaaggcaaatctccctta

SEQ ID NO: 757389 - DNA, 679 bp, Homo sapiens
tgaatggaggatacacaggtgtccataatgttattctgtatatgttttctgcctcaaatatttcatcattagctgtttaaaaatgcattgcacgttatgtattttttacaacaggaatggccctggctctcatgctgccactctcctgtcccatgcccggagggtackttattgatagtcatgaccctctttctgtctcaaaccggtcatagcctcagaaccattctcatcacagcatgccctgacatcatcagccactgatcagagttggcatgagagagaaaccattttgctctttctaatttggagcttgtattagctttttatctcagtagtttaattagcctgacaattctaggttttcatttcagaaaacataatatttttaaatagaatctttttatgatatgaaggagaaacaaagagaagggagatccctcaacatttatcattagataaatttgtctccacaggggaaactacacggtgttcagtaagctgttttgttggcctgtgcctcctttcttctatatcttttatccccccgcttctttccatcccttcctcaaaattatatatgagtaatgaggcagcgcctctggggcagggtgggtggaggtgttttcttagggtccagtaaacattcagattcaaacgactatcacaggccacacacctg

SEQ ID NO: 757390 - DNA, 626 bp, Homo sapiens
aaacttgccaacctgtctggtttattttagaagggtccggatgcaacaagcctgagagctgtgtctgggggaggagagagcacaaatggattcatcctccttycaccactgcccaacaactgaagaccaccaactgcggaccacagactgaagagaaacaactgagggtgccaactgagggcactaactgaaggcaaccaatgagggcacccactgaaggccaccaagtgaaggccagttgccctgccaaccagaatgcatcctggttcagaggaaacaatcaggtccagaatcccctgcatgcatccccagaaccctggaacttgagaacacaggcacatggctcacaaggcccctcactgccagtggccctgcccccgcttgcattcattgctggctgctaggaactttcaggtttctcactgtgaagaagttcctaggaatcatcaccttacaatgaatgatactaaaattactgaaaccaaaactgcttcatgcagtgtcagggattcatagaatcccctttcccccataatctctgaaacattaacaaactagaaataagagagatttctgcaggtactttcacaaaaaaaacattgccatgagctaagcctaccctataa

SEQ ID NO: 757391 - DNA, 626 bp, Homo sapiens
aaacttgccaacctgtctggtttattttagaagggtccggatgcaacaagcctgagagctgtgtctgggggaggagagagcacaaatggattcatcctcctttcaccactgcccaacaactgaagaccaccaactgcggaccacagactgaagagaaacaactgagggtgccaactgagggcactaactgaaggcaaccaatgagggcacccactgaaggccaccaagtgaaggccagttgccctgccaaccagaatgcatcctggttcagaggaaacaatcaggtccagaatcccctgcatgcatccccagaaccctggaacttgagaacacaggcacatggctcacaaggcccctcactgccagtggccctgcccccgcttgcattcattgctggctgctaggaactttcaggtttctcactgtgaagaagttcctaggratcatcaccttacaatgaatgatactaaaattactgaaaccaaaactgcttcatgcagtgtcagggattcatagaatcccctttcccccataatctctgaaacattaacaaactagaaataagagagatttctgcaggtactttcacaaaaaaaacattgccatgagctaagcctaccctataa

SEQ ID NO: 757392 - DNA, 557 bp, Homo sapiens
gtaaactaaaactccaaaaaaagtaacacatctaagcttatcttttaagaccaataataaaatctaacaactcctagatcacataatcttttgaagcttaaaaacaagcacacaaacacacagtaatccagtcatcccttggtatatcaaggaggcttggttccaggacccccatggataccaaaatccaaggatgctcaaatccctcatataaactggtgtagtatacgcatataactaacactaccctccagtatactttacatcatctctcaattacttataatacctaatacaaggtaaatggtatgtaaatagtagttatattgtatttatttgtattattttttactcttgtattgtcctcgtattttttactttttctttctggaatttttttatccaaggttggytaaatccacagatgcaaacttagagatacaaagggccaactacatatgaaaagtcctttgtaaattatgatccaggctgttaattattactagtgttcatcaaaataaatgtaaatttctttgctaagtattcaagccttctct

SEQ ID NO: 757393 - DNA, 464 bp, Homo sapiens
acaggtctggagtggacctccagcaaactccaacagacctgcagctgaggatcctgttagaaggaaaactaacaaacagaaaggacatccacaccaaaaccccatgtgtacatcaccatcatcaaagaccaaaggaaaataaaaccmcaaagatggggagaaaccagagcagaaaagctgaaaattctaaaaatcagagggcctctactcttccaaaggaatgcagctccttgccagcaacagaacaaacctggatggagaatgactttgacgagttgagagaagaaggcttcagaggatcggtaataacaaagttctccaagctaaaggaggatgttcgaacccatcacaaagaaggtaaaaaccttgaaaaaagattagacgaatggctaactagaataaagaatgtagagaagaccttaaatgacctgatggagctgaaaaccatggcaccagaactacat

SEQ ID NO: 757394 - DNA, 695 bp, Homo sapiens
gtcccctccctgaaaaattcctgtattgaaatcctaatccccttaagaggtgggacctttgaggaggtgatgaggtcagaaggcacagcagcagagccctcatgaatgggattagtgcccttataaaagactccagagagctgccctgccccttccaccatatgaggacacagctagaaggtgccatctatgagccagaaattagccytcagcagacactgaatctgccgctatttagaagctgcccaggctatggtattctgttatagcagcctgaaaggatgaagacacaacaaaataaaagaagtggacaaaatatctgagcagacacttcaccaaagaagagatgcaaactgaatgaaaatcacatgtaaagattctcagcattattgatcattaagtaaatgcaaatcaaaaccacgtgatactactgtacccctattggaatgactaaaaaagaaagaaaaaccaacaataccaagagtcagtgagaacgcacagcagccagaattctcctacattgctggtgggaatgcaaaatgatactgacactttgaaaaatagtagagccgtttcttataaagtcaaacatatgctttcagacaacataacaatcccacgtatacgtttttacccaagtgaaatgaaaacctatgttcacacaaaaacctgtatgcaaatatttacagcagttt

SEQ ID NO: 757395 - DNA, 547 bp, Homo sapiens
agactggggtccccatgtatttaatttctgccctttaagaaagaggaggtttgagtgacaccccagtattttttaatataaaccacaagatgactgtgttgaactgaaagagatattttggaatgcctgaccccagctcaaaaggcaatacaaagagcccataaccgatgcagcaggcagcatgcagcactgagctcctggggcagggctggcatggggattgraattatggccccattatccacaaagtgaacatttttctaacaataacacaatgatttcagaagcaattttaaaaacaagaatctttccccccaaactccagagcttttctgatttttgtcagtaacaaaagaattcagcttccaaaaagcaggctgcatctctgaatattaaaactcccaccttgggaaattttgtaagccttcagacaacctcttttaaagttaaaaatgaaagtcactcaacagacgacagtgctcatgggccccttttatctatggaagaaagacagaaagaaacacagagtgataacttaggagcagag

SEQ ID NO: 757396 - DNA, 630 bp, Homo sapiens
tttatatagtttataaacgtaaatccctctctattcctcagaagtaaaattctagtatttgcagatttagtgttgtataaaacttttttgtagttgccagaattccagtttgcatataagcaaagcttgagtcactcctattaaggataattagaaaaagaaggagctggatatagagaaggggaaaagagagaagcatgaaaacagtagaaatattttttcagtgccacattataaaaacaaataaattaaaatgtaatatttcttcccccaaacatgaagatttgtagctctaaaaactcctgagctgacttttggttctggtcatgatgaactaagaagtatcagacttaacacttccaaaataataagcacaaaactggacaaaatgcatgaagcagctgttttcagtcatagacaacagasagcaaagggttgtgatttttagaagaaaggaaacagtacacttgccatgacaggcttggaaggtacccgggggcagcttccacactgtgcaagaggaaagtggaacccaaacagatagcagtggtctcactgtgctaaggaaacagcaatttggttcaaggctgttaaggcagctagaatttgggggttagaatgctatagagg

SEQ ID NO: 757397 - DNA, 554 bp, Homo sapiens
tcttggcgggttgcggtggctcacacctgttatcccaacactgtgggaggctgaggcaggcaaatcacttgaggtcaggaattcgagaccagtctggccaacatggtgaaatcccatctctacaaaaaatacaaaaatcatcagggcctggtggcatatgcctgtaatcccagctacttgggaggctgagcaggagaactgcttgagcccrggaagcagaggatgcagtgagccgataccatgccactacattctagcctgggcaacagagcaagactctgtgtttaaaaaaagaaagaaagaaagaaactagttctcagtgctgcaatactaaacaaacaggaaagtcaaatttttactcagagttagtatttcctcaaaaaacagattaccgataaattgtttccttaaaacatgcctgtaatcttccctaaatgaatctaagagataaatatgagctataaattacacaaaaatttggagattattttcagggaagaaagaatgatcaggtagttatccttatttttaattacgttgatatttgcaaataa

SEQ ID NO: 757398 - DNA, 638 bp, Homo sapiens
ctatacctgctctgctgagttcgccagaaaacacatgcaccgaacagattggcaccactaactcagagtctctaacctcaacgggaccatcaatgtttctccacaatgtttttatctgtttgcagtctgctctctgttccatcccacaaaacagcaatttttaatctttattgctgagtgacatcagtagaaatggtagagaaagaatctccaaaaatcctcttctccacagaattaatgagaacactggcaaaaaactatgcaaatgaaatttttcatagctctggaaattaactaaaggctggcaaaagccagggagtgtttatttgataaaaatgtccaaatgttggtaagaacagcaaactagtgatgttttaatttgctcctgctgcatcaccctctctctaattccacagcatattgaaaaccaaaggmccctcaatcatagtgaaaatcagccacccataagcccttgtagtgggcagaacagagctggagttcctccaaagcccagttcccagataactgtcattatgttcccttttctggaaaattccatcggtaagacttgtctttattccacttgacttagagcttgcccagtgcaaatagttgtttctccaaggacatttgttgaa

SEQ ID NO: 757399 - DNA, 598 bp, Homo sapiens
tagtatatgtattatatgctatactacataatagtataattaacaattgtatatattacattatatatgtaaagtatatattatacattatataatatagtataaactatatactatagagtatattatacattaataatatactatatcagcatatactattagtatatactaatatatactrtatataatgtataacaaatatataatatataataaatatatataatatataacaacatatatcatatattttatatacactatatatgttttcatttttcttctggatatattaataaatatattcttgaagtagatgagagaggggaggaacctgtatttgttaggtaataatatagtttaatctttaaattacaaaatgtagccacaaggttaatagctttcatttttactctagcatagtgtgattctactatctttggatttctggatgattttttttctccttgattcttgattatattttttgttcttcataaattaagatgatatacatctttgtattagaggaaagccctgaaacataacataattaataattttagaagtttggacaacatttcttctgacaaga

SEQ ID NO: 757400 - DNA, 598 bp, Homo sapiens
tagtatatgtattatatgctatactacataatagtataattaacaattgtatatattacattatatatgtaaagtatatattatacattatataatatagtataaactatatactatagagtatattatacattaataatatactatatcagcatatactattagtatatactaatatatactatatataatgtataacmaatatataatatataataaatatatataatatataacaacatatatcatatattttatatacactatatatgttttcatttttcttctggatatattaataaatatattcttgaagtagatgagagaggggaggaacctgtatttgttaggtaataatatagtttaatctttaaattacaaaatgtagccacaaggttaatagctttcatttttactctagcatagtgtgattctactatctttggatttctggatgattttttttctccttgattcttgattatattttttgttcttcataaattaagatgatatacatctttgtattagaggaaagccctgaaacataacataattaataattttagaagtttggacaacatttcttctgacaaga

SEQ ID NO: 757401 - DNA, 598 bp, Homo sapiens
tagtatatgtattatatgctatactacataatagtataattaacaattgtatatattacattatatatgtaaagtatatattatacattatataatatagtataaactatatactatagagtatattatacattaataatatactatatcagcatatactattagtatatactaatatatactatatataatgtataacaaatatataatatataataaatatatataatatataacaacatatatcatatattttatatayactatatatgttttcatttttcttctggatatattaataaatatattcttgaagtagatgagagaggggaggaacctgtatttgttaggtaataatatagtttaatctttaaattacaaaatgtagccacaaggttaatagctttcatttttactctagcatagtgtgattctactatctttggatttctggatgattttttttctccttgattcttgattatattttttgttcttcataaattaagatgatatacatctttgtattagaggaaagccctgaaacataacataattaataattttagaagtttggacaacatttcttctgacaaga

SEQ ID NO: 757402 - DNA, 598 bp, Homo sapiens
tagtatatgtattatatgctatactacataatagtataattaacaattgtatatattacattatatatgtaaagtatatattatacattatataatatagtataaactatatactatagagtatattatacattaataatatactatatcagcatatactattagtatatactaatatatactatatataatgtataacaaatatataatatataataaatatatataatatataacaacatatatcatatattttatatacactatatatgttttcatttttcttctggatatattaataaatatattcttgaagtagatgagagaggggaggaacctgtatttgttaggtaataatatagtttaatctttaaattacaaaatgtagccayaaggttaatagctttcatttttactctagcatagtgtgattctactatctttggatttctggatgattttttttctccttgattcttgattatattttttgttcttcataaattaagatgatatacatctttgtattagaggaaagccctgaaacataacataattaataattttagaagtttggacaacatttcttctgacaaga

SEQ ID NO: 757403 - DNA, 627 bp, Homo sapiens
aattttaccaacattggtcttgactgatcagggatccactgttgaaactgggtcaactccttggactgcctatctgtcatatagggaatgaatgttatagaggatggtggccaagaagctgaagtgtccatcccaaatgttgactcatctacttcctcaaagggttttatgaactgaattctaatcagaatgcttttattcactacctagcactatgcttgaatagagtaggcagtcaataaatatttgcttgaattatttaataaatacgttacagagatttccattracttttctgtagcagggtgcatttggctatcaaattagtgtattaaaaaccagtggaactcttactcctctttcattaggttcctttcttgaaaaataagcacctgaactttcattcaggcatatagcaagtggcatctattgttactataaatattacctgtaaaatggcaatagtcattcccctcataaggttgttgggtggcttaaatgttataatatatagaaaatgctcagcatcgcatattgttgttcttcttatcattattcccatttcttttggatgtttgttatcatcctttcccttgttaacatagtaaaacttttgtctccaacctc

SEQ ID NO: 757404 - DNA, 620 bp, Homo sapiens
tacacaataaaattttatttataaaaataggcagtatgcgtctgacaagggtctcatatccagaatctataaggaacttaaataacccaacgagcaaaagccaaataaccccattaaaaaattgtcaaaagacttgaacagacacttctcaaaagaagacagacaagcagccaacaaacatatgaaaaatagtctacccacatctccaatcaccagagagaaatgcaaatcagaactacaatgagataccatctcataccagtcacacttggctattgttaaaaagtcaggctgggyacggtggctcacacctgtaatcccagcactttaggagaccaaggtgggcggatcgcctgagatcaggagttcgagaccagcctggccaacatggtgaaaccccatctctactaaaaatacaaaaattgcctgggcatggcggtgggtgcccataatcccagctactccagaggctgaggcaggagagttgcttgaacccgggtggtagaggttgcagtgaagtgaaattgtgccattgcattccagcctgggtaacaaaagcgaaactccatctcaaaaagaaaaaaggcttatattgttggtgggaatgtaaattagttcag

SEQ ID NO: 757405 - DNA, 556 bp, Homo sapiens
cactgttgcaggattacactttcagtgccaagaagcttcataaactggccctaacccacctgtcccctcccccactcactctgtacatgaggcacaccagatatgccccacgttcaagactttactcatgcacatactgcccttcctttcctggaaagcctgaaaatggtcatgaacgtattctttaaggccccacctctgtgttgcttcgtgtackccctccttcgggtagcgttaccggcttcctctgctaaacaccacgtctcagttgtttgccttttcttccctcaactgtgatgtcttcatctttggatattagtcccctctcccaaacaccacctgtcacctatcacagtgccttgtaacagtcacattgagcacagataattacatgttgtactgaatgcacctatgtagaaaaaggaagacactggtcattgtacaccaattaatcatgtgttttttttcctctttctttgttttatctttaggcattctggaagttttacactgtgttttagtagaaagtccagaagctctaaatattattaaagaa

SEQ ID NO: 757406 - DNA, 618 bp, Homo sapiens
tttatgccaaacattccatcttaatatcatttatcattttctgacactgtatgatgtagacagtggtatacaatggtaactagttttttatttacctgttacctgtcttttgtattcaaagttgtgctccagaaagtcaggggttatttttgattttgttcacagctatattcccagtgtgtagaacagttsctggcacatggtaggtgttcattaaatatttgctgaatggagacacctgatactctatgaagacaatgtagaacagtaacttagaaaagggattgccaaactaaggcccaaatccagctcaccacctgtttttttttttttttttttttttttttgagacagggtctcgccttgctctgtcacctagtctagagtagtgtggagtgatcatagttcattgcagtcttcaactcctgggctcaggtgatcctcccatctcggcttcccaagtagttgggaccacaggcacatgccaccatgcccagctaatttttaattttttaaaatagctctttgaaaaacaaagctaactcctaagcagtgtgcccagagtcaacctaatttgttaattttttttttccttgtagaatcagggtctcgccatgt

SEQ ID NO: 757407 - DNA, 618 bp, Homo sapiens
tttatgccaaacattccatcttaatatcatttatcattttctgacactgtatgatgtagacagtggtatacaatggtaactagttttttatttacctgttacctgtcttttgtattcaaagttgtgctccagaaagtcaggggttatttttgattttgttcacagctatattcccagtgtgtagaacagttcctggcacatggtaggtgttcattaaatatttgctgaatggagacacctgatactctatgaagacaatgtagaacagtaacttagaaaagggattgccaaactaaggcccaaatccagctcaccacctgtttttttttttttttttttttttttttgagacagggtctygccttgctctgtcacctagtctagagtagtgtggagtgatcatagttcattgcagtcttcaactcctgggctcaggtgatcctcccatctcggcttcccaagtagttgggaccacaggcacatgccaccatgcccagctaatttttaattttttaaaatagctctttgaaaaacaaagctaactcctaagcagtgtgcccagagtcaacctaatttgttaattttttttttccttgtagaatcagggtctcgccatgt

SEQ ID NO: 757408 - DNA, 599 bp, Homo sapiens
gttttttgaaaagacaaaatcagtaaacctttagctagacaaagaaaaagatgactcaaataaataaaatccacattgaaaagaagacattacaacctataccacagaaatacaaaggataatgagaaaatattatgaaaaattrtatgccaacaaattggataacctagaagaaatggataaattcctagatgtatacaacctaccaagactgacttatgaagaaatagaaaatctgagcagattaatagtgagtgaggaaattgtatcaataatgaaaagtctctatcaaagaaaagcccaggactaaatgggggaaaagttgaaagcttttttttctaaggtctggaacaagacaaagatgcccactttcaccacttctgttcaacataatactagaagtgctagccagagaatttggcaagaaaaagaaataaaaggcatccaaattggaaaagaagtcatcaaattgtctcagtttgtagatgacatgatcctatatataaaaatacctttaaaagtttactaaaaaactgttaaaactaatacattcagtaaatttgcaggatacaaaatcagcatacaaaaatcagtatttc

SEQ ID NO: 757409 - DNA, 599 bp, Homo sapiens
gttttttgaaaagacaaaatcagtaaacctttagctagacaaagaaaaagatgactcaaataaataaaatccacattgaaaagaagacattacaacctataccacagaaatacaaaggataatgagaaaatattatgaaaaattatatgccaacaaattggataacctagaagaaatggataaattcctagatgtatacaacctaccaagactgacttatgaagaaatagaaaatctgagcagattaatagtgagtgaggaaattgtatcaataatgaaaagtytctatcaaagaaaagcccaggactaaatgggggaaaagttgaaagcttttttttctaaggtctggaacaagacaaagatgcccactttcaccacttctgttcaacataatactagaagtgctagccagagaatttggcaagaaaaagaaataaaaggcatccaaattggaaaagaagtcatcaaattgtctcagtttgtagatgacatgatcctatatataaaaatacctttaaaagtttactaaaaaactgttaaaactaatacattcagtaaatttgcaggatacaaaatcagcatacaaaaatcagtatttc

SEQ ID NO: 757410 - DNA, 574 bp, Homo sapiens
agtgaataagtctcatgagatttgatgcttttataaatgggagttaccctgcacaatatgtcttgcctactgctatataaggcatgggattgtgaggcctcctcagccatgtggaactttgagtccattaaacctcttctctttataaattactyagtctcaggtatacctttattagcagtgtgaaacagactaatacaaatgtgtttgaaaaataataaaaggagagcctatttattctattatagtttatctttactaatcattctttgtgttcttcattcatttctaaagatttaagattcatcttttgtcattttattttattatggagttcttgcttttgaatttcatgtgacactgtttccatgatgaataactcttcaagattttatttagaagtaaataatatcattttatttctattttgtagggtgatttaaatggaaacagatttatatgttaacttatttttctttcagaatttagtgatatctttccattgccttctgttcaaatttttaaatatatgtgacctgagacataatttatatcattgttactttatatttaa

SEQ ID NO: 757411 - DNA, 557 bp, Homo sapiens
  misc_feature 413: n = A,T,C or G
aaatccattctatagacatctgccctcatgttgaaatcacacacacacacacacacacacacacacacacacacacacacaattattttgttgtgatattgtttggggtagcccaaaactagaaaaagcctaaataataaagaactgattgactcctgtaatcccagcactttgggaggccgaggcgggtggatcatgaggtcaacagatcgagaccatcttgaccaacatggtgaaaccccatctctactaaaaatacaaaaastagctggtgtggtggcacttgcctgtagtcccagctactcgggaggctaaggcaggagaatcgcttaaacccgggaggcggaggttgccgtgagcagagatcacgccactgcactccagcctggcaacaaagcaagactccatctcanaaaaaaaaaaaaaaaaaaaaaaaaggacctgattgactaatttacagtaacttatgaaatatcatgtagccactaagaggaatgagataaatctatgtacacctacccagaaagaggtataagagacatttctaagagaaaaaa

SEQ ID NO: 757412 - DNA, 557 bp, Homo sapiens
  misc_feature 413: n = A,T,C or G
aaatccattctatagacatctgccctcatgttgaaatcacacacacacacacacacacacacacacacacacacacacacaattattttgttgtgatattgtttggggtagcccaaaactagaaaaagcctaaataataaagaactgattgactcctgtaatcccagcactttgggaggccgaggcgggtggatcatgaggtcaacagatcgagaccatcttgaccaacatggtgaaaccccatctctactaaaaatacaaaaactagctggtgtggtggcacktgcctgtagtcccagctactcgggaggctaaggcaggagaatcgcttaaacccgggaggcggaggttgccgtgagcagagatcacgccactgcactccagcctggcaacaaagcaagactccatctcanaaaaaaaaaaaaaaaaaaaaaaaaggacctgattgactaatttacagtaacttatgaaatatcatgtagccactaagaggaatgagataaatctatgtacacctacccagaaagaggtataagagacatttctaagagaaaaaa

SEQ ID NO: 757413 - DNA, 648 bp, Homo sapiens
agctattctgtttaaaaaggctaaagataggaccccaatcccttctggccagtaaggtttctgctgagaagtctgctgttagtctgaaaggttatcttttgtaggttacctgatgcttttgtatcactgctcttagaatttttcattcatgttgactttagacagcctgatgactgtatgcattggtgatgtcctttttgcaatgaatctccaaggaattctttgagcttcttgtatttggakgtctaaatctttagcaaggccagggaagttttcctcaactattccctcagataagttttccaaacttttggctttttcttttccctcaggaataccaaggagtcttaggtttggccattgtacatattcccgtatttcttggagactttgttcatttcttttaattctttttttctttatttttgtctgttgggttaattcaaaagtcttgcctttgacctctgaaattctttcttctacttggtctagcctattgttaaaactttcctctgcattttgtaatcccctaaatgtgtctttcatttccagaagttctggttggtttttctttaaaatatatatctgttcagaaaatttttcattcatatcctgaattgtttaaaaaatttctttaagttggttttc

SEQ ID NO: 757414 - DNA, 583 bp, Homo sapiens
tgcaatgaatctccaaggaattctttgagcttcttgtatttggatgtctaaatctttagcaaggccagggaagttttcctcaactattccctcagataagttttccaaacttttggctttttcttttccctcaggaataccaaggagtcttaggtttggccattgtacatattcccgtatttcttggagactttgttcatttcttttaattctttttttctttatttttgtctgttgggttaattcaaaagtcttgyctttgacctctgaaattctttcttctacttggtctagcctattgttaaaactttcctctgcattttgtaatcccctaaatgtgtctttcatttccagaagttctggttggtttttctttaaaatatatatctgttcagaaaatttttcattcatatcctgaattgtttaaaaaatttctttaagttggttttcacttttctcttgtatcttcttgagtaacttaataatcaagcttttgaaatctttgtctggtatttcagatttctttctttttttttttttttttcttgagatggagtctcactctgtcgcctaggctggagtg

SEQ ID NO: 757415 - DNA, 542 bp, Homo sapiens
aatgggattagttcccttataaaagggatccccaaagagctctctggatctctttctgccacgtatggatataagaggttggcagtctgcaaccctgaagagagccctcaccagaacccaacaatgctggtaccctgatttcagacttctgttctccagaactgtgagaaataaatcyctgttgttgataagccacgcagcttattgtgctttgtgatagcagcctgaattgactaacacaacgatcccagggcccagtgaggttgaataactcacccaaagtcacacaggtatttaggccacttattgtagacatcattcttgttccaggtccccttttgagattgctctcctgacctgaatacagaataaatcagatccacaagactctagtccgaataggtttattgtctgtgtcccttgtcctaatggggaggcctctgctcaccaagagtgtcctgaccacctggggctaggggtgctggagaggagcacagagaggaggaagggcctgaagatgatttccccaacaactctgtact

SEQ ID NO: 757416 - DNA, 582 bp, Homo sapiens
aaaccttgaatatctagacacttgtcactggccccatattcacagtgtggacatgctgcagactccacctttcaggggtgagtcctcagtatcatctggagcagatgtccattctcctctggcatcctccctcctgatccctctgggcatctgcgtggcccaaaactgccggaggcagccagcatatcccccactgtacagcctgcccagtcctatccaaggcccctgccagagcagccaccacagccccctttaaacaggccagtggcacaattctgccattcacaaggatcagcttcctccgacaaactcatgagtgtcggcaccccaagtgtctagccacctcaccatggcccactggagtcatcctgtgccccatccaacacmgtacaacactggtcctgcggctgctctgtaagtacaggccctagaatgactcacagacacctctggaaacattttttttctcccagtggtccatttctggcctattactctgtgtagaaacacatagatctgctcagatgaaaagtggagagctgcttgacccccttaggtgcctgcgtactgtctaggatggct

SEQ ID NO: 757417 - DNA, 582 bp, Homo sapiens
aaaccttgaatatctagacacttgtcactggccccatattcacagtgtggacatgctgcagactccacctttcaggggtgagtcctcagtatcatctggagcagatgtccattctcctctggcatcctccctcctgatccctctgggcatctgcgtggcccaaaactgccggaggcagccagcatatcccccactgtacagcctgcccagtcctatccaaggcccctgccagagcagccaccacagccccctttaaacaggccagtggcacaattctgccattcacaaggatcagcttcctccgacaaactcatgagtgtcggcaccccaagtgtctagccacctcaccatggcccactggagtcatcctgtgccccatccaacaccgtacaacactggtcctgyggctgctctgtaagtacaggccctagaatgactcacagacacctctggaaacattttttttctcccagtggtccatttctggcctattactctgtgtagaaacacatagatctgctcagatgaaaagtggagagctgcttgacccccttaggtgcctgcgtactgtctaggatggct

SEQ ID NO: 757418 - DNA, 629 bp, Homo sapiens
cactcgccttcactcctgcaaagtgggggtccatgtgcccatcctacagatgcagatatgcaggcccaggcaaagtccatggcccttcctggagtcagcagcggaaccgggtctgggcccaccaggaccgcaattgttctccctccttttgatgttcccgagaacagggagtcccctgccgtgaggagcgctggtctyacctatgatcccaaagagcctggtccaggcagcggaaacccagagggtacggcctcccgccaaatccggaccctctccagcctcagtctctggtccgcaacaggagtgaggtggccccggagctctgagcaccttctcaccggctccaaggcccccgccttctcctcacttttggtctcgggttggggcccggcaggccccgcccagcctccttcacttccttgggccagggccgccgccgcgccgggctctgccctatgtggccgttggattaatatccagatattaagtaaacactaaattagcaaaactacaagaaaattttacagccctttgcatttggcaatcattgagtgttaattagaaattcattacaattaaaaccctgcctaaacagggcctgcgcgccttaattacatctgatttttaat

SEQ ID NO: 757419 - DNA, 629 bp, Homo sapiens
cactcgccttcactcctgcaaagtgggggtccatgtgcccatcctacagatgcagatatgcaggcccaggcaaagtccatggcccttcctggagtcagcagcggaaccgggtctgggcccaccaggaccgcaattgttctccctccttttgatgttcccgagaacagggagtcccctgccgtgaggagcgctggtcttacctatgatcccaaagagcctggtccaggcagcggaaacccagagggtacggcctcccrccaaatccggaccctctccagcctcagtctctggtccgcaacaggagtgaggtggccccggagctctgagcaccttctcaccggctccaaggcccccgccttctcctcacttttggtctcgggttggggcccggcaggccccgcccagcctccttcacttccttgggccagggccgccgccgcgccgggctctgccctatgtggccgttggattaatatccagatattaagtaaacactaaattagcaaaactacaagaaaattttacagccctttgcatttggcaatcattgagtgttaattagaaattcattacaattaaaaccctgcctaaacagggcctgcgcgccttaattacatctgatttttaat

SEQ ID NO: 757420 - DNA, 629 bp, Homo sapiens
cactcgccttcactcctgcaaagtgggggtccatgtgcccatcctacagatgcagatatgcaggcccaggcaaagtccatggcccttcctggagtcagcagcggaaccgggtctgggcccaccaggaccgcaattgttctccctccttttgatgttcccgagaacagggagtcccctgccgtgaggagcgctggtcttacctatgatcccaaagagcctggtccaggcagcggaaacccagagggtacggcctcccgccaaatccggaccctctccagcctcagtctctggtccgcaacaggagtgaggtggscccggagctctgagcaccttctcaccggctccaaggcccccgccttctcctcacttttggtctcgggttggggcccggcaggccccgcccagcctccttcacttccttgggccagggccgccgccgcgccgggctctgccctatgtggccgttggattaatatccagatattaagtaaacactaaattagcaaaactacaagaaaattttacagccctttgcatttggcaatcattgagtgttaattagaaattcattacaattaaaaccctgcctaaacagggcctgcgcgccttaattacatctgatttttaat

SEQ ID NO: 757421 - DNA, 606 bp, Homo sapiens
atccagagtccggctttccgacccctggtgccaccgggaagcggataaaagagagagaatcttcaataatgggggtcaggaaggccaagggcagcgacgcctgcccgctctggacagggcctcaggacccagagcccccactgaggaagaggagtcccgcccatcccttcggagcctgggttgcggtcccagctctgccactcactgcctgcctgaacctgagcaagtgccctggctgtgccaggccttcctcctctacatcgtctaatgagggcgatactgaaacgcagcrctgcgccctccttaccgtcccttcttcaagctaggctctctctgcagcgtgccaagcaccactttttgagtctaggagatcagcttgcgtcccttgtgggctgagggccttggctagggagaagggcaggggttggcttccactgccggatcctcagtttcctgcctgtaaaatgggaataagtggttcctatctattcccagggcccttgttgagaatcggctctgcaatcggtaaagtgcggtccgcggtgatattaacccgccggacgccggcccatagtagagccccagctcctacccccacgacctgct

SEQ ID NO: 757422 - DNA, 525 bp, Homo sapiens
aaatacaggtattttcaaacataaaaatactcagaagatttactcactccttcccttccagatcctttttggggaaaaagaaaagcaattagatgttgtactctagttaagaaaaaaacccaagaggaaacagtggcatgcaaaaaccaaaggtgaatttcttttattgagtcaaggtctctctctgtggcccagactagagtatagtggcacaaacatggctcactgcaaccttgaactcctgggctcaagcaatcctgggtgtagctgggagcctttcaagtagttgggaccacaggtgtgcaccaccatgcccagctattttttattttttgttgaaacagggtctcaccatgttgtccaggctggtcttgaactccctgactcaagcaatcctcctgcctcrgcctcccaaagtgctgagattataggcatgagccaccacactcagctgtgaatttcttaaaatgattgaataaatcttatttttatctaaataacttcctgaaaagttataacaacctg

SEQ ID NO: 757423 - DNA, 631 bp, Homo sapiens
tctactaggaaaataaatttgaatagatttatcaactacgttttgagctgccccaatggacatgaataaagctgcattctttaagcattaaaagaaaaaaaaatgggggcagctctggtggcagctgcgagccgtgagggccccaggtccctcccagcacactgcctggggcagccccttcctgcactcagtcctggccaggccggcgggggctgctccggccccyagcactgagaaccacgtgtgtgtcccagaagtggtgctgcactcgggaaggacaggcctggcccctcgccggcagcgtggccttgggaggctgcgtcactctcaggccttggcttcgttccccggcagaggggcctcccggggctgggccagctcccgacccgcttgggaggctgcagtttcccgagtcctctgcccacaccagtgtctctcgcacagcccatcagccgcccaccgcagcaggtggctgagcgtccctctgctcccagacccctggccccagccatcctcccttccctctgctcctggtgcccacaggcctggccaccacagaactgtgtcttcccctgggtcctggctgtcctcggcctccaccgcagccaaggaggggaccaggaaggcccag

SEQ ID NO: 757424 - DNA, 459 bp, Homo sapiens
aaaaataagcaacgagggagcaactgtccattagataaatagtgttaggatagctggctaggcatatgcagaagaatgaaactggacccctacgtttcaccgtatacaaaaattaactcaagatggattaaagatctaaatgtaatacttcaaactakatgaatcctagaagaaaaccttagaaacaccattctggacatgggccttgggaaggaatgtattactaagtcctgaaaagcaattacaacaaaaacaaattttgacaagtgggcctaattaaactaaagagcttctgcccagcaaaagaaactatcaacagagtaaacagacaacctacagaataggaagaaatattttgcaaactatgcatctaacaaaggtctaatatccagaatctataaagaacttaaaccattgaacaagaaaaaaacaaatagcccatttaaatgtgagcaaaag

SEQ ID NO: 757425 - DNA, 488 bp, Homo sapiens
tcacatcccttgtaagttggattcctaggtattttattctttttgtagtaattgtgaatgggagttcactcatgatttggctctctgtttgtctgttattggtgtatagcaatgcttgcgatttttgcacattgattttatatcctgagactttgctgaagttgcttatcagcttaaggagattttgggctgagacgatggggttttctaaatatgcaatcatgtcatctgcagacagggacaatttgacttcctcttttcctaattgaatacttttatttttttctgcctcctaattgccctggccagaacttccaacactatgttgaatgsgagtggtgagagagggtatccctttcttgtgccagttttcaaagggaatgcttccagttttttcccattcagtatgatattggctgtgagtttgtcataaatacctcttattattttgagatacgtcccatcaatatctagtttattgagagttt

SEQ ID NO: 757426 - DNA, 601 bp, Homo sapiens
gtcttttaaaaatgtatttgaggcttccatttttattctgaatgttttagatgtatcatatttagttctcaaatgtgtggagacttctctgtaatctttctgttataatttctcgtttgatttccttttgggtagagaacacactctgtataatttctatttttaaaatttgtttcatacgtggtctatcttggtgaataytccattcgacacattaaaagaatgtgtattcttttgtttttgggtggagtgttctacaaatattggttaaatcctgttggttgatgatgttgttgatttctcctatatcattgctatttttaagttggtctgttaattgagtgaaggatgttgaactctcactttaatttggatttgtctatttcttctttcagttagattaggattggcttaatatatttttcagctttgttgtttggggcatacacatttaagattgctatgtcctcttggtggattgacccttttgtcagtcttcagtatccctgtctgattaatgtagccactcctgttttcctttgattaatgcgtgcatgatacatcatttttctattcttttactttgaaccttcataaacta

SEQ ID NO: 757427 - DNA, 613 bp, Homo sapiens
tttcctgcagtgccgagagtcctcggggcctgtcattgttctaaaggacagaggacactgttcagatgtgacgtctgtcgccatttctgtctcctcttagcaaactttaaagcccggaaaaccttctattttcaaagtmggaaaattagattacagcaaagccataaccctgtatctctcctaaccttgctccctaatcaggaataaaagggaaattatctgaagaattatctaatatgttcttcatcaggagatcataattaaatcataattgccatccggcagcaaaatgtgatgaaattaccagggcaaactattaattacttcaaagatccattttaatcgtaaacagtttaatatacctctataaaaattgccatcaggcaggcgcttaatgagggagctgtgaaggctctgctgtccttggtgactggaggatgttttcacgagatcttcacggttattttccatttccagttccttaggcctggctcttacattctctaatactatggggagtagaaatttctgcgtcctcctgggtggagtgtgtgagtgtgtgcatacatatgtgtttatatgtgtgtgtgtgcactgtgtaggtgatatgcgt

SEQ ID NO: 757428 - DNA, 612 bp, Homo sapiens
tgtactccaccctgaagcttctgaaggcatttgtattgatcagctccttgaagagtttgcagtggtcagagataattgagaaagaataaaacggtctcagtaagaggatacttggagtcttccaggtaggaagacatttggaatcttctgggtaagaggacatttggagtcttctgggtaggaggacatttggagtcttctgggtaagaggmcatttggagtcttttgtgtaggaggacatttgaagtcttctgggtaagaggacatttggaatagcttctctccctttgcctgtctcctgcagataaccctgatatttaatattgagccctcagccaagctctcttcttaatatttccatagtgctagccactttaagaatcagatgcaatattcttaaacataaaatacacttaattttgcatatcattacttgccttaaattgtcatcatagccatcacagaaacatacttacatgcaattttacaaagaaaagtgtctcacatttttcagaaaatagaggggtggccacttcttgaaacatgaactcaaatgaagaaattccagtgaaactcgcctttggttttgcctcacagtggattctgaggtag

SEQ ID NO: 757429 - DNA, 612 bp, Homo sapiens
tgtactccaccctgaagcttctgaaggcatttgtattgatcagctccttgaagagtttgcagtggtcagagataattgagaaagaataaaacggtctcagtaagaggatacttggagtcttccaggtaggaagacatttggaatcttctgggtaagaggacatttggagtcttctgggtaggaggacatttggagtcttctgggtaagaggccatttggagtcttttgtgtaggaggacatttgaagtcttctgggtaagaggacatttggaatagcttctctccctttgcctgtctcctgcagataaccctgatatttaatattgagccctcagccaagctctcttcttaatatttccatagtgctagccactttaagaatcagatgcaatattcttaaayataaaatacacttaattttgcatatcattacttgccttaaattgtcatcatagccatcacagaaacatacttacatgcaattttacaaagaaaagtgtctcacatttttcagaaaatagaggggtggccacttcttgaaacatgaactcaaatgaagaaattccagtgaaactcgcctttggttttgcctcacagtggattctgaggtag

SEQ ID NO: 757430 - DNA, 621 bp, Homo sapiens
  misc_feature 106: n = A,T,C or G
ggtgcagagggagaatgccatgacctcagacatctgctcttccatgccactgggcacgtggttgtggaatgcgccttactggccttttgctgttttctcccaaatntcataccatgagtcttcatctcaagctcctcttcgttgatttgaagcccctagtccgtctccagttttatttcattacaagacaacatcagcctctggatctgctgtgatgtcctccctctgctccctacatctgtctatcctgctccctgkaggggacgtccctcacatttcccaaagtcttactccacaccaccagctcaggctgaactagcttagagagtttattccatttgccccaaatactgccctttggaacccgccaacgatccatgtgtgcttcagatagcctcgtccaggcaggagtagctttctgaaatttaaatttttatctatttacaaacatttttatgtgtaacaaaaagtaaaaatgtgcctaacaagtataattaaccctgaaatggaaaaaaaaaaaaaagaatataaagtatatcaagggtatccacagaggaggtagtactttgggtggaaagagcatggttttgaggtttggatacattttgtctgagaattttg

SEQ ID NO: 757431 - DNA, 621 bp, Homo sapiens
  misc_feature 106: n = A,T,C or G
ggtgcagagggagaatgccatgacctcagacatctgctcttccatgccactgggcacgtggttgtggaatgcgccttactggccttttgctgttttctcccaaatntcataccatgagtcttcatctcaagctcctcttcgttgatttgaagcccctagtccgtctccagttttatttcattacaagacaacatcagcctctggatctgctgtgatgtcctccctctgctccctacatctgtctatcctgctccctggaggggacgtccctcacatttcccaaagtcttactccacaccaccagctcaggctgaactagcttagagagtttattccatttgccccaaatactgccctttggaacccgccaacgatccatgtgtgcttcagatagcctcgtccaggcaggagtagctttctgaaatttaaatttttatctatttacaaacatttttatgtktaacaaaaagtaaaaatgtgcctaacaagtataattaaccctgaaatggaaaaaaaaaaaaaagaatataaagtatatcaagggtatccacagaggaggtagtactttgggtggaaagagcatggttttgaggtttggatacattttgtctgagaattttg

SEQ ID NO: 757432 - DNA, 645 bp, Homo sapiens
tgtacggaaggaccccaggatcctgatagcccccatggaacagggcttcgtggattcaggcgtcagaatcaagcctagagagaggagatgtttaccgctcatggcagagtgaggcctcgcggtgaatggaaagcatggctgggcacaggggtggtcctgatggaggggccagaggctgatgatggcgtggaggccctgacacagggcagccccgccagcctctgcatggccgggggagttacacccttgaggacgggttccaggaataagatgtgtgatatgcagaagacaacagggcctttgtgtggaaaggcatccgtgaattaacaccaatggcggagagcaggcagtagggaagcggccgcggtgggcgctgttccgcaccccrtgtggtctggcttgcacggccagggcagcccaggcgtcggcctcctgtttctctcctgccatgatcctctttctacccccaaagctcttacctggcccctgtatccaagccttcctcgggtactgccctggccaggagagaagaaagcacccagcctcctggtcagtgttccgctgaagcattgtatgagtccgggttctctagagggacaggactaatgggataggtgtatacatgaaggggagttcattaaggag

SEQ ID NO: 757433 - DNA, 483 bp, Homo sapiens
  misc_feature 476, 477, 478, 479, 480, 481, 482, 483: n = A,T,C or G
tgatctttttatttaaaatgtttaaacaacttgctgctcctctagcatctacggtctacactatcacatagaacagagatactcacagattcaggacataaggcatgacaaaatctgcatttttttagagaattaggtcattgcatagccaagtcagtaccccaagtccctgcccttcatcgtctggggtcccttccctgccaggcgcagggttccagtggcaggtcctgactcagtgggacctttctcagcatctctgacagaaggactgtctggaattacagggcacgatcaattgtctgccttgctaggaagtctcatctrttcttatgaaagcggcccaattagtctttagttgaatcgccactggatgtataaccttttccatctattgctgtttgggagtggatatcttcaccaagtgatcttttttcctctctatttaatactgaggttacttactgggtaagcaaaannnnnnnn

SEQ ID NO: 757434 - DNA, 666 bp, Homo sapiens
acctgggcttaataaagttgatattccacctgtttgaacgctcaggagcacacaatatttccataaaccccagcgatcacagcatgcttcttagtcaccatggtatccaaatcacttaatagaggaatagctctgaacggctctacgacaccgattgatccctcacaaggcaaatacgtaggaggcgagtgtgcgctggacaccgcgcaggtgacaagaacgcggctgtaaggagggctacggcccctattatggcctagcttacaggcgggctggaaaggtggacgtttcactggtaattaaccagaatcccatagaggagcttgtggtgggaagcctctcctggttcagacattaggaaagrcctctcggagcggcactgaagctgaggtatgcaggagcaagtcgtgtggaaacggaggagatggtggggaaagccacgaccagcggaacccttcaaatgcccaaaacgcagggccctgagcttcctgtgctcagctatcaagaggggctactgaacttgaacctcagatgacgtcggggctgggggaatgaagttggagagaaaggtgggccctgagtttgagagggtttcgtaagctatgttaagggatctggacatcttcccaagggccaatgaaagatgagaaatgaatttaacataaa

SEQ ID NO: 757435 - DNA, 626 bp, Homo sapiens
aatagcaaagaacaattgaaaacccaaacttacaaggttttcaacaaaagtgaagtttgctaaagttaacagtgtaacatgtattatggtaacttctaatcttgtggccttagacagtctagttcaaagacataaagttcgctttaaaaaaaagaaatggttatcttcaaaaaaaccaaaattataaggagacataaaaatgtaaatttttacctacattaagaggttaaaaaaattattgttttaaaagtttaagcaagttttaaaacgttaattgtaaagaaaattctgtgtgtaaacatattagctaaagttaaaaaggtatcatccagtttttctgtgaactggacattaaaaatgcaamaggtttttcttaaagcatcaatctgctctttaacaaaaaatataaaaggttaaaaagagtctataaaatcttacattatggtcaaacatgaaaaattgaataaatatatctacaagattttattaaaattaagtttaacattaataacacactaatataaaggtaaaatttaacttatctggtataaaaatcatacaagaagcgttattagatataaaatgatgtttagcttcctttggtctaaaaactaataaaaacaggt

SEQ ID NO: 757436 - DNA, 642 bp, Homo sapiens
actaggctgagacaacttcagtgccttttgttcctactaaacagaccaaaacccaaaacatgccagggccaaccatgaggatactcagaaaattcccaacccggagtcagatctgaataaccattaggaacaaagtgggcttgggaacatttcctaagatttatttctcaaggttcctcaactgcctgccacttttattgtttaaggatcaggtgaatcctacaacctgttataaaataaaaaacatgatacacaggtaaaattgggttattggttttaatgttgattttgagaaaaattaatctaacaatacttttaattaaagtttgttataaattaattctatatcaacttccaacttcttaaaacacacttttgattataggttctgtcagtgaatcctccaagtaaaacaaaactccttagcctggaagtcaaagctttcctagatttggcagascatcttttctcagactcatatacctaagtctggtcaaactgaatgactattcatgatttatattcacagaccgaatatttatttattccttttctagtgttgtttctgctgtgtggaatactttttcttctccatctccatttgtctaattcttactcatccttcaagtttcaaacatcatt

SEQ ID NO: 757437 - DNA, 624 bp, Homo sapiens
gggtgatagagggaaacaagaagagaagcaaagatgagcaaggttgcaatgtttggattaagttctgtagaagaattgaaaagtctcaggggaaacccacacagaactgacattcttacagaaccttagaatgactgagaaataactttagaacatttctagtctggtggtttttaaatgtgttttgacgtggcaaagccaggttttcaagcaaatctaacaaggtcttyttgatcattgccgatggaacccttctttatgctgacaatctattgtcagatatgcaggattaaccatatgtagctacttttatcagtgtttagcatgaaaatttcagaaaactgcattcagggagccatgttgatacaccagaagaaatctgccaggactaaagaccgacccaataattcccgaggtaccttcaggaaagtcaatttatttttgagtcaaaggaatctcaaattatcctaaatggcattgcttccaccagagttctgttcttaatttaataagctgctacaagttccaagccaatgttccttcttagaaatatgctatgctatgggatgtaaatctttttaagtgcatttcattgtaccaattttttcattttgaaaaagccca

SEQ ID NO: 757438 - DNA, 633 bp, Homo sapiens
aaccaaactcttatctattttctaaggtagaaatttctgaaaatctggacagtgaactctccaattgggaaaagtccattttaaagcatttagctgcattaaagatgtttattttcttaaaataacattagtaacacatttttccttaaaattattttgcttttatttcctgcttaatctaagatttacttcagagttttttaaaattccaagcacatagattggagaagatggtacrtagacttatttttttattgttaatctttcttcctcttttctcctttcctctcgctctcttctctccttcctacttttcttttgtttttccttcctgctcttctttttttccctctcttctgattggttgtcagataatgtagcctgtatgaattatatatgagtgaaagtaattttattgttattgttgagtatgaatttctgtctctctcattctttcatatgtatatgtgtatcatttgtatgtgtgtatacgcatacatacacatataaatatacaaagacatatatacacatgtgtgtaccatacaattttacaataattttattgttgttgagtatggatttctgtctctcttattcttccatgtgtgtatgtcatttgtatatgtgtat

SEQ ID NO: 757439 - DNA, 635 bp, Homo sapiens
tttcctgtctccgtgacttatttcctctctcttgaatattcttctccattttgtttgtctagttaacagaccagggcatggagcaagctggtttaatcactgcatcaaacagaagagtagatacagataagctcattttacagattaagaacctgagctcagagaatttaaataatgtgccaagttaacacagctattggtggagctggtgtctcaaatctctgtcttagtcatgtctggcttttttcagctgcgtcatatatcaagcaatctatttctggtttaatgtccgttaaatgaactgatgtcaggaaagcaccaggcatatgcctgttacaagagagtatggtggttaagaacatggacttttgagtcagatagaactsgttatgtgtcctcttctgtcgttttctctctgggtgaccttggttatctgattttggttttctgagcttcagtttccttatctggaaaatgaagatagtaacagcatctaccttgttggatgataggaaatgcctgtagagattccttaatgtaaatatgttctccataaatatgagatatttttattgatttaggcactgaatatttttgagcaatttctatatgataagcagtttttaggtaagtat

SEQ ID NO: 757440 - DNA, 611 bp, Homo sapiens
attctccatcttttcttttctattataacacccatgaataatacaaaagagagcaaaaaaaaaaaaaaagaagaagaagaactgatgggcattactttaaatcacaaggcagcttttaaaattattattacatttttgctccccaaggaagtagttaaaattccctcctgaatagattgcatctggtttagttaagttcattgaaggggtcttttaattattgtaaaaattaagtctcaagctttaagccaggaaaactgggaaaggatacaaatgaatgaacaaacaaaatttggtctatgtttcaatctcttgtaagagataatattcataacctgagagttagtcttattgcttaagattagatcatcttactgttcgccctagttgaatttcggagaaaacaaggcaattgatatggratatttggctgaaggagtttgtaatgacccctctggtttctgttaattgtaggtagagcacctagattaattaccctaccaaacctctacaaaatgagtggaaaccattcctaaaggtagactggaaagctgttacaaaggcgaaatatgtgctaagcagcaaaaaataaaaataaatatccaacagag

SEQ ID NO: 757441 - DNA, 608 bp, Homo sapiens
tatttgaccattctgcaggccaagatatatattatcatcaaacaaaaagcacctgtcaggcccatttctggtcactacccccatctgtctccttagaggtaacaacattcttacctctcataccaatggcttttggtcagtgttgtgtttgtgataccattattttgtatgtagcaatacattgtacacttttcttttcttttcttttttaacacagattttcgttctcattgcccaggctggagtgcaatggcatgatttcggctcactgcaacctctgccttttgggttcaagtgattctcctgcttcagcctcctgagtagctgggattacagatgcccaccaccatgcccagctaattttttgtatttttagcaraggtggggttttatcatgttaaccaggctggtctcgaactcctgacctcatgtgatccacccccttggcctcccaaagtgctgggattacaggtgtgagccaccacacccggccaaattgtacattttcattgctatagaataattcattgtataaatatgatccaatgtaattattaatttcactgttgtttgatatttaatctgtctactttgggcttattataaat

SEQ ID NO: 757442 - DNA, 663 bp, Homo sapiens
cattgaagagatgctagtagttatatgagcagataattgatcagtgagtatatttgacagaagttgaatattagggttattaatctgtcattaaaatgaatgatagattataaagtaaataattatcaatttaaataacagcatgctaggtgataaaaaggtgaaaatagaatatcttaccctcaagttcatgattgcatctagaaatcaaacaagttaactatcctcttcctacaaaaaaaaaaaagacataaaaggaaatgctttgaaacatctattaaaatatggctgggactcaaatgtcctagtgaccaaacctatggatggttgtaccatgttagaaaaaaatgataccaagacagggcatgaggagagtcttaaaaggtgattactatttcctcagattagccagtaaaccagtcaaaaaaaaaaaaactggcttactstactagcaccttaaactgacagttactattctgcacctgctcattaatttcaaggcagacactccaaactggcacatccctgccatttttacccacttgccaaagaagttcctagcttcaggcatctctgttaaaatttctggcacaacgaaaagcattcacaccaaaagaagaatgaccggagactcaaagtcattaaaatatccaggcatctctt

SEQ ID NO: 757443 - DNA, 600 bp, Homo sapiens
tctgatgggaagtctgatgtaattttcatcattgtttctttttaggtaagttgtattttccttctctggctttcttcaagatcttctccttgtctttggtttcctgtagttttaacatgatattcctaggtaaagatttttggtatttatactgtttkgtgttctttgaacttcctgaatctgtgatttgatgcctgacactaattttggaaaattctcagtcattattacttcaaatatttattctgcttggttcttattttcttttccttctggtattccagttatgcatgtatcatgccttttgaagttgtctcacatttcttggatgagttgttctggtttttttttaattattgttattttttctctttgcctttctgcttgggaagttgtattggcatatcttcaagttcactgattcttttcttggccatatccagtctactggtgagctcataacaggcattctgtatttctgttgcagtgttttttaaatttatttattgcatttccatttgattcttttttagattacctgtctctgcttatattatctatttactcttaaattttgtctttcttccattagattcattc

SEQ ID NO: 757444 - DNA, 600 bp, Homo sapiens
tctgatgggaagtctgatgtaattttcatcattgtttctttttaggtaagttgtattttccttctctggctttcttcaagatcttctccttgtctttggtttcctgtagttttaacatgatattcctaggtaaagatttttggtatttatactgttttgtgttctttgaacttcctgaatctgtgatttgatgcctgacactaattttggaaaattctcagtcattattacttcaaatatttattctgcttggttcttattttcttttccttctggtattccagttatgcatgtatcatgccttttsaagttgtctcacatttcttggatgagttgttctggtttttttttaattattgttattttttctctttgcctttctgcttgggaagttgtattggcatatcttcaagttcactgattcttttcttggccatatccagtctactggtgagctcataacaggcattctgtatttctgttgcagtgttttttaaatttatttattgcatttccatttgattcttttttagattacctgtctctgcttatattatctatttactcttaaattttgtctttcttccattagattcattc

SEQ ID NO: 757445 - DNA, 600 bp, Homo sapiens
tctgatgggaagtctgatgtaattttcatcattgtttctttttaggtaagttgtattttccttctctggctttcttcaagatcttctccttgtctttggtttcctgtagttttaacatgatattcctaggtaaagatttttggtatttatactgttttgtgttctttgaacttcctgaatctgtgatttgatgcctgacactaattttggaaaattctcagtcattattacttcaaatatttattctgcttggttcttattttcttttccttctggtattccagttatgcatgtatcatgccttttgaagttgtctcacatttcttggatgagttgttctggtttttttttaattattgttattttttctctttgcctttctgcttgggaagytgtattggcatatcttcaagttcactgattcttttcttggccatatccagtctactggtgagctcataacaggcattctgtatttctgttgcagtgttttttaaatttatttattgcatttccatttgattcttttttagattacctgtctctgcttatattatctatttactcttaaattttgtctttcttccattagattcattc

SEQ ID NO: 757446 - DNA, 626 bp, Homo sapiens
tacaatcttatttgccacctgtatctcactgcatcaaaccacaggtgagaacttcggtaattgaaatgccagaggttatgccatgctgctgcatgacttcaggaatgggtcccttatggccatctgacttgtgagcaaaccagtttcagaatcccatcctgaagcctactctaaaggtccactacaagtactrtagacaggttccccaatatgcagagcctgagacaaagctcaaactccaacactttattggcagctatgatctaggaagtaaaggtaagagatagtgaaagcaaagcaggaaagcatagaaagctaatacaaagacgggttgtcaagttggctaccaccatggatgactggttatgtgatagtcagaattctaaagatctccccgaagatactcatcacctggttatttaaccaaactcaaatataggcactactatgaaagggctttgcagatgtaattaaggtgactaaaaagctgatcttaaaatagggagattatctgaaattaatagatgagccagcccaatctaatcacatatgctcttagaggcagagaacttccctaactggagacaagagcagtcttggagacatggcatggattcttccagcaa

SEQ ID NO: 757447 - DNA, 583 bp, Homo sapiens
ttgatttagaatgggagagatttaaatgtttagatgtggttgagaggatccagcagagaaagtaggtttgtatttagggaagacacaggaacatttgaagaaaccacgtacctgaacaggtaaggaagggcatcttttttgttgcttttttttttttttagcagagcttctcaaacttgaattatgttgttaaaaagcagtttctaggccgggcgcggtggctcacgcctgtaatcccagcactttgggaggccgaggcgggcggatcacgaggtcaggagatcgagaccatcctggctaatacggtgaaacctcgtctctactaaaaatacaaaaaattagccgggcgcggtggygggtgcctgtagtcccagctactcgggaggctgaggcaggagaatggtgtgaaccagggcggcggagcttgcggtgagccgagatagcgccactgcactctcgcccgagcaacagagggagactctgtcctctgtctcaaaaaaaaaaaaaaaaaaagaaaaagaaaaaaaaagcagattctgactcagtaggtctacgtgggtctgaagttctgcatttccaagat

SEQ ID NO: 757448 - DNA, 567 bp, Homo sapiens
atctaactaaaattttgtgtcctttgactaattccttgttcccaccccaccccaagtctgataattctaacatctgtgtcatagctgagtctggttctaatgaatgcctgtcactgccactgtgattttttcttgccttttgtcatgccttataattttctttggaaagctagacatgttgtattgggttataggatctggagtaaactgaccttcagtgtrtggatttgggatttgtgttcatctggctaggagctgagctatgtttaatgcttgctgtaactataggtgccagagcctttgagttcctttagtttccttgtttttgtattccctttgcactttgggcttcccaaagtactcttcctcagaaagtctgtgtcttgtagctcctaacaattgccgtctgctgttattctacctcagccctgttggtagggtggtaacgtgtagggaggggaagccttctataatcttatgattaaatctcagtcttttagtggatgtatgtctcaaagctatgactttcacaagtacttctctagtggtaaggcttcttttttccct

SEQ ID NO: 757449 - DNA, 544 bp, Homo sapiens
ctggctatataatcagttgatcccccatatatatatattctacatcgtttattgtaactcttgtcagttgttaagctgttgcctcttagcgccgcaaccacacttctgtatcaacttgtgtagtgctggggctggggttcagaaattcactttccagcatatatatatatatatatatatacgtatatatatayacacatatatatgtatatatatatatatatatatatatatacacacacacatacacatatatatatatacacatactgttgtcacctctgctttgggtgaccctcaccagtttctttacagattaagaaaccgatgtgaggtttctactgcctgctgagtttactaatcccaattaagtattcagggatggggaaaatagtcacaggagggtgtgaagacccactggactcactgtaaaatgggctttggcaaagactccatttatcatcttgcctccatatctccttactttaacaggagggctatagtggcaatttggatcccctggaatcagtgtcagtccggactc

SEQ ID NO: 757450 - DNA, 669 bp, Homo sapiens
gacctctggtcctgctcaggcctagttcatgacaacgttccatgtccacccttcaatggattactgttgcacatactcgactatacagttgggtggatctgacagtacacaacttacaatgggaaactctggctatataatcagttgatcccccatatatatatattctacatcgtttattgtaactcttgtcagttgttaagctgttgcctcttagcgccgcaaccacacttctgtatcaacttgtgtagtgctggggctggggttcagaaattcactttccagcatatatatatatatatatatatacgtatatatatatacacatatatatgtatatatatatatatatatatatatatacacacacacatacacatatatatatatacacatactgttgtcacctctgctttrggtgaccctcaccagtttctttacagattaagaaaccgatgtgaggtttctactgcctgctgagtttactaatcccaattaagtattcagggatggggaaaatagtcacaggagggtgtgaagacccactggactcactgtaaaatgggctttggcaaagactccatttatcatcttgcctccatatctccttactttaacaggagggctatagtggcaatttggatcccctggaatcagtgtcagtccgga

SEQ ID NO: 757451 - DNA, 480 bp, Homo sapiens
tctaagaaataaattcctttcctttataaattacccaggttcagggattctgttataagcaacagaaaatggattaagacaggtgctaataacagctgctatttttggaactttctgtgtcccaggtaataggcaaagtgctttgcatgcatytttttatttgctccttccaacaaccctctggagaagatattattaaacctatcttacagtggagaaaactgagactcagaaagctgaagcaagttggcagggtcatagaactactaagtgatgtggcagctttagatagaaatccagatttgtctagttctcaaacccagaggcagggaagcagtaaccatagacttgaaaacacttttttcatctattccctgtgatgcttttcatgggagaatgagccacacattctgctatcagggaaaagtccacaaatctcaacccagactccctaggtcaatgtataaaggtattagactg

SEQ ID NO: 757452 - DNA, 512 bp, Homo sapiens
cgtagggcaacactcagggtgctgataaacagaataagagaatccatcggcatttttttcctggctagaattcatccccccttttcacgttacaacaccccatttttctactggagaaccataccttccccactctcattctatattgtaagaatggggctgatctcatcttgggcaaggggctcaagccccaggtctggccaatcagagatgtgcacatcaaggaacctggcctaggaggcagtggctggggtccagggtggattggaggataagcgtgtgtggtgkgggggggttgctgagagcctgcctgaggtagaagcccactccaaggaaggcagcactgagactcgaagcagaacagatcccagtgacatttttgagctcttggatttagtctttgtgtcaacttttatccctcagtgactttgtcacataaggcaatgaatgccctttttgcttgagacagtttgagttgggttttcccctactcaaaatgaagaaatgcgttt

SEQ ID NO: 757453 - DNA, 634 bp, Homo sapiens
tttgattcagaaggctggaaatcctctttttgtagattatatgaaaggacattacaaagctcattgaggcctatagtgaaaagctaaatatcctgcaatgaaaactagaaacaggctatgtgtaaaaaggtcctgtgatgtgtggaatcatctctcagagttaaacctttgtttttattcagcagattggaaacactctttttgtagaatatacaatgggacattttggagcccataaacaagtacattgaaacaccgatatcctgcaataaaaactaaagacaagctacctctgaaaatgttttgcattgtgtggattaatctcacagagttaaacattctttttcattcagcagattggaaattctctctttgtagaatctactaamggccattttgaagcccatttaggcctacagtgaaagaccaaatatcccatgataaaaactagaaacaagctatctgcaaaaatgttttgtgatgtgtgaatttatctcacaaagttaaacctttgttttaatccagcagtttggaaaactctttttgtagaatctatgaagaaacattttaaagcatattgaagccaatagtgaaaaaaaagtggaaataaaaactagaaacaggctatctgtga

SEQ ID NO: 757454 - DNA, 635 bp, Homo sapiens
cactaatgatcctttgagttcctgcagtatcagatgcaatgtctcctttgtcatttttgattttatttatatgaatatttctctttttattagtctagataaagttttgttatttttttttaacttttcaagaaaccagggtttcttttttttcattgattttctttctttytttctttctttttttttgagacagagtttcactcttgttgcccaggctggagtggaatggtgcgatctcggcttactgcaacctctgcctcccgggttcaagcaattcttctgtctcagcctcctgagttgctaggattacaagcatgcaccaccacacccagctaatttcatatttttagtagagacggggtttctccatgttggtcagcctggtctcaaactcctgacctcaggtgatctgcccacctcggcctcccaaagtgctgggattacaggtgtgagccaccgcacccagccacactgatttttttttatttcaattttatttatttattttttgctctagtctttattagttcttttattctactaattttgggtttgtttcctcttgcttttctagttttttaagatgcattgttagattgtttacttgaaatttttcctcttttttgatatag

SEQ ID NO: 757455 - DNA, 640 bp, Homo sapiens
taatgtaattgtgcagttttgagtgcttttcttaattctgagttctaatatgattgcactgtggtccgagagactgttttttatcatttttgttcttttgcattttctgaggagtgttttacttccaattatgtggtcaattttagaataagtgtgatatagtgctaagaaaaatgtatattctgttgatttgaggtggagagttccatagatgtctattgtctgcttggtccagagctgagttcaagtcctgaatatccttgtttattttctctctcgttgatctgtctaatattgacagtgaggtgttaagtatcccactattattgtgtgggagtctaagtctttttgtagttctgtaagagcttrctttatgaatcgggatgctcctgtattaggtgcatatatatttaggctagttagctattcttgttgcattgatccctttaccattatgtaatgcccatctttgtcttttttgatctttgttagtttaaagtctgttttaacagggactaggattgcaacctctccttttttttttatttgctttccatttgcttggtaaatcttcctccatttctttattttgagcctgtgtgtgtctttgcacatgagatgggtctcctgaatacagcac

SEQ ID NO: 757456 - DNA, 533 bp, Homo sapiens
ggaagagcaaagggatgttttacatggcggcaggcaagagagcttgtgcagagtcactcccctgtataaaaccatcagatctcgtgagacttattcattatcatgagaacagcaggggaaaaacctgcccccatgactcacttacctcccactgggtccatggcatgacaygtggggattattacaattcaaggtgaaatttgtaggggggcacacagagccaaaccatgtcaccagcctcgggatacacccaccacataaaatgatcaaagtttgttatcatagcactgcttcatttgggggagactatttaaaagaaattggcaaaagaaagggtgtgtgagaaaagaaaaataaaaagtatggtatactgtagactgttgagattttctgaggacatgtctagagattttcttccttcccaaattgttcctttcactccagcatataattttccctaaaagaaaaatgcagtatgagtagagaataacaaaagtatattgagattcagatgttgatattaagttatgaga

SEQ ID NO: 757457 - DNA, 517 bp, Homo sapiens
gatatttggattgtttcctatgtggagcttctgtgaatattctagatgtctttcatttttgttgggcatgttttcatttctcttgggtaaatacctaggagtgaaatggctagatcctaaggtagatgtatgcttaactttttaagcaattacccaagtgttttctaaagttgcattcccgtcagcagtatataaggtycccttttgccacatccttgccaacagttagcatatagtgtctttgtagttttagctaatgcaataggtgcttagcactatagtttaaaacatgtatctttatttatttatttatttatttatttatttatttattttttgagatggagtctcactctgtcacccaggctggagtgcagtggcgcgatctcggctcactgcaaactctgcctcctgggttcaagagattctcctgcctcagcctcccaagtagttgggattacaggtgcccgccaccaggcccagctaatttttttttgtatttttagtacagacgggg

SEQ ID NO: 757458 - DNA, 578 bp, Homo sapiens
taggtttggggaattctgaacaaaaacaaattaaataggattctttatgtgggactcgacagaacttttactatgcgaatgtgtcctgtgaatccctaggaagaaggatgtagtatgcagtatttcaatattcctttgaccgtagaccctttttccactgagaatatccaatggcatgtattaaaggtaccactaattgaagttattacagtgtattcacttttgcataggtgaactcatataatatttaccacaactatttaagattgatattattatcaacagttcaaagatgagaaaactaaggctagcargtaatttgcctaaggtcatatagcttataaatccctgagccactattcaagcaataaagagtgcattcttaaacatccactactgtgcctctcaaggaggctgcagcctcactagggagctactcatatggccctgaatcatcatactggtcctgagtcactaggctcagatgtctgcctgcctccagctgcctgattgaggctctgatacttactgggactctacttgtcctgcttccagtttctactgaacacccagtgttt

SEQ ID NO: 757459 - DNA, 581 bp, Homo sapiens
ttatactaatggttgataattgtccatgatcatctctatatctaatttgtattatgactattcttattctattttctttattatactgaaacagtttgtgccttcactctcttgcctcggcacctaggtaatccttcgcccacactgtcacaggttggaggagactgaggggccagagcagctaaaagcaatgtgggatactggcttggattctggagcagaaaagggttattaggggaaaaactggtgaaatctgaataggtctatagttcatagttaatagtattgtaacaatgttaatttattggttttgctaattgtattatggttatataggttaayattaggaaaggctgagtgaaggaatacatgaactctgtaaaatttctgcaaactttttgtaaatttaaaattatttaaaaattaaatataaaaacattaaaattccataagtaaatgaaaaaaagtaatcaacagtttggaagatacagtgaggaaacctcttaccaagtagagaaaaaaaaagacacgagatggaaaataaaagggaaaatataagaaaattagagtatcagtccatg

SEQ ID NO: 757460 - DNA, 575 bp, Homo sapiens
ggcacccacctgtagtcccagctacttgggaggctgaggtgggaggattgcttgagcccaggaggttgaggctatagcaagccgtaaactgtacttcagcctgggtgacagagcaaaaccctgtctcaaaaaaaacccctaaaaactgtaaccataatctcaacaaatctaaaaatcctaaatctccaattactaacgataacaattcatgtaatgtatataggaaaataacttggagcaagatttagaagaagataaatatattaatatrtttatcttctgattaatcctcagttgttatcaaacaattcttattccaatattggcttaaaaccctcttaaaattaccctaaatcttttaagatcaaaactcagtgtaaccttccttccctatcactccttatctttctattttatttatccgtttatcatctataatttctcttatttatcagaattaaggacttccagctaagttgaaattttaaaaaaaggctttgcattccagcttatccactttatttgatttgctcatctactagttggttagtacacaatgcttagtaatgtcatag

SEQ ID NO: 757461 - DNA, 600 bp, Homo sapiens
ataattagggccagtgtgtatcataattcttcttatgaaaggcctactgatgacatgaagaaaaatgctaatgaagttgtcaaaggtgtctatatatggttcaaattcaaccagaaaagttatttttaagtttgttttcatcaaaaggtgcttccatatactcaattccaaatatctttaagcaataaaatctttcttctgctacttgatttgtgagattgcttcaatatttaataatcattmtatgtcataatattactgtcatacctctaaagcttaggagcaagaaaaaaccttggtttacctctttctcttcttttctgagtctggaaatagttctctctcccttcctctcttcctctctctttctctctctctttctttcccctctctcttcaccttactttctcaatcttctgtctttttcattgctacttgggaaacagccttgttctttcctttctactgcatccccagaggcaaggatatggaggagaaaaggttattaaaccttgcaactggcaagcttagagtggttcttctgtttttgagtagatagtgaaagaaagaggaggttctgaagggaatgctggggcaatg

SEQ ID NO: 757462 - DNA, 693 bp, Homo sapiens
attaatattcctctgcatataccgttgacttcatcctatacattttattattatggactatttgttgttaatttctgaacaagctgtcatttcagttttgatttctattttgatccaagaattattcaaaagagtatcttttaatatccagcaattcattagactttgcttaacattttcatttacagttgattagatataaaggcattcgttttattattcttttgttataaacatgatcagctatttaatttattagtaatattgacagtctttttaacttttctttcttgtatttgtctgatatgtatttttgcccggtattttgttttcaagttttctttgccatgtatctcttttttattttattttattttattttatttttattattatactttaagttttagggtacatgtgcacaatgtgcaggttagttacatatgtatacatgtgccatgctggtgtgctgcacccattaactcgtcatttagcattaggtatatctcctaatgctatccctcccccytccccccaccgccatgtatctctttaattaatatataagatttttaaaaatctcaccctgacggccctgctcttttaatataggaatttaattcatttacatatatttgacaatgatatatttgttcttttataacagcattattgagatagaatttatacact

SEQ ID NO: 757463 - DNA, 555 bp, Homo sapiens
tctcatcaaatgattagcaactccaaaaataattgtcagggattttataggagggattcttacatggggatagaacagtgaaagtcagaaagaacataaaaggttacataatccaaatgtcatgactctataaacaagcttttactgaaagctgaaaagaatgaatattaaccactctgccttttgaggatttacatattatttgtaaaattgttctgcattgatttaaaaactttgaatgaatattactttatatatagacttcaatgtgaaattttatgagacagttttaatttatttatttattgtagaaacagggtcttgctctggtgtacaggctggtctcaaagtcctggcctcaagtcatcctcccaccttggcctcccaaaatgmtgggattacaggcatgagccaccatgccaaccatagtttcatttatttttagctatcttatattgttgataataataaaaataattactgatattcatgtaatttgctcaaaatctggctgtgtgctaaaaattttacatgggattattttctttaatcttt

SEQ ID NO: 757464 - DNA, 518 bp, Homo sapiens
cagggtccattaatggatggtaatccacaatatgtaaaacactgccctaagaagaccagagcattgccatgcctacattgcctcttttctggtggggttcgtggcaggtggtatgcagtagggggcatattcaagggtagcarcaaggttagtgaagagacagtgaaggtgatgagaaatggtcagattccagatgttttctgagagaaattgatgggaagatatggcatttgagagaaagagaagagtcaagaataactccaaggttttgggctttaatcacaagaaggatgaagtctgtatccaatgagatggaaaagatcatgaatggaagtcggaagtttctttttcgacatgttggctggtccatcaaacattcaaaagtagatggttcgtaggcagtaggacacacaatctggagttcaattgagaggttggggtggagatctaaattcaaattttttggtaatgtgaatgaagtcttgagggtggattatcaacaaaagtgtgtagacata

SEQ ID NO: 757465 - DNA, 620 bp, Homo sapiens
atacatatgtgtatattgcatatgtcatacagatatgtaatatatgacatatactttaatactttaataatatattattacatatatagtaatacctgttattaaaatatatattatatattgcaaatatgtcttatgcatgtaatatagacatatgtatatagtaatatattattaaagtatatatttattatattacatatatgcgtatacatgtaacatatacatatatacatatatgcgtatacatgtaacatatacatatatacatatatgcgtatacatgtaacatatacatatatacatatatgcgtrtacatgtaacatatacatatatacatatattacatgcataagacataggcatgtatacacataatatattaaacacatgtatattgaatatatgatatgttaatattaaatatcaatatattaatattatatgtgtgtaatatatacatatgtgtatattacacataccatacatgtatgcatttttattacatatatgtattgtatatttatatactgcatatgtatatatcatatatatgcatatattatatacatgatacatatgtgtatgatatataatatatagcatatactttaattat

SEQ ID NO: 757466 - DNA, 569 bp, Homo sapiens
ctgggacttaggtgagaaaacaaatgggaggccagctagttggcttcaagataccttgttggtaatacctgtgttttagctcacaaatcattttttgtttgatccagaatttcttccagaggaatcccaagcttaagggctttgatatgtccagcatctctaatatctgaaactttgctcaggccgtatttctaacttcagctgcaatcagtgrgagcaatggctatataaagaaatttaatgcaaatttaaaaataattgtagtacactttatttgttccttctaataaacagctgtgtcttccatacttaaaagatacttgagaccctccaaggaaatgacaagagagggaaaaccagtgccttccaaaaggatattataatctagatggtgaaatatttcaaaaattacaaagtaacatgtaaatatattttaaaatattatatacaaacatacttctctctttcaaaattgtatatgtgtaagttgaatacaaaggtggaaaaatgagttgtgtctttaaggagacttcgagcaaaggacacatggtataaaaatgtatttaaaa

SEQ ID NO: 757467 - DNA, 577 bp, Homo sapiens
tcctagagcctatcactcaaaattcacaataatcttgcaatgtaggtgctgcagataaagaaattaagacatctagaggtcaaataagttgccctaggtaacaatctagtagatgcttaaccagtacttgaatctggctacctgtaaatgttgctctattaactactaccctgcagtttaactccatgaaaatgcctctgaactaagtattttactgcatttgaggttcccttagctaacagacagctcagtcactckgtcgttaaatgtgacacttccactggtctaacctaaatgttattctttatgtactgatcattaaaaggaactcagtaataaatcctagacactatcaaacctctaatctttaatgtcataaacatgaatgtttgcatattgatttgtattcaagaaatatttccccctgtggatccatcttgatatagatatggtcacaaatgtagacacaagtagaactgatttgagtcagaaacattaactaatggtattgtaattcctgtttataaccccaacaaaaaggaaagaaaagcacatatctttcaaaaaccactaatgt

SEQ ID NO: 757468 - DNA, 577 bp, Homo sapiens
tcctagagcctatcactcaaaattcacaataatcttgcaatgtaggtgctgcagataaagaaattaagacatctagaggtcaaataagttgccctaggtaacaatctagtagatgcttaaccagtacttgaatctggctacctgtaaatgttgctctattaactactaccctgcagtttaactccatgaaaatgcctctgaactaagtattttactgcatttgaggttcccttagctaacagacagctcagtcactcggtcgttaaatgtgacacttccactggtctaacctaaatgttattctttatgtactgatcattaaaaggaactcagtaataaatcctagacactatcaaacctctaatctttaatgtcataaacatgaatgtttgcataytgatttgtattcaagaaatatttccccctgtggatccatcttgatatagatatggtcacaaatgtagacacaagtagaactgatttgagtcagaaacattaactaatggtattgtaattcctgtttataaccccaacaaaaaggaaagaaaagcacatatctttcaaaaaccactaatgt

SEQ ID NO: 757469 - DNA, 537 bp, Homo sapiens
agaccccctagaacatctgtggaaaatccctatgcagggtttggttatccagtggacaacaagaggtcatggaggaagcttaatatgagaccagatagaggttctggggaggacataggaggcgattatttctactttaggagttttgcctagggctggcctgctgaaggggtaaacaaataaataaatcatactcaataaagactcagttgcaaagagcttcagggcagaaaatagttaagaagccttgctaaagagaaaccatttcatgtctacatttttacaattctttctcatttctcctgttatgtgtttcttgtgttcaatagtcattacttgggcgtttgaattttttgagmgatttctagttcagtagttattttctgcttgtaaagtccagggatggcctcttctgcgtggctccacggaagggcagtctccgcaggcctgctctctgacctgccatggctagctgcccatcggcagcagattgctcatcggcatcccataccttatcacgaaaagtagaataatgat

SEQ ID NO: 757470 - DNA, 632 bp, Homo sapiens
aaacattcaaaaagtgacattctagtcctgctggcatgagagtcacttgctctcttttagttgactttgtatttcttggctcttgagcatgtcagtttaacagtgtaattcccaaaagactatcttatttcccttattttcagagttggtgttccccaatgtcagatgttcctccaaactctctcatgcaaataatagataataaccacatcagtaatcatcatatatcatataaggatacatagttggaaatgatttgaaactatttgctctttaagatttctacttagttttgggtattgtgattatatctttcctaggattcttatttctaagttttaatctatatattcataaagcttagaagtgaccttagggatcatttgattcaatagtttcattttataggcaaagaaagtgctgctccagagatttttragccatacaatatgtaagttgtacattgtggaaactgaagttggggttcactgactttcagcctcccctattttctgccaccttacaggtataagacttcaagaattagatctccacatagagttcccctgtattcttcaggctagtaactccatctttgaatatttctcttttttaaatacttctaccatagt

SEQ ID NO: 757471 - DNA, 589 bp, Homo sapiens
atggaaatttctattggacagtgctactctagaataaacttgccgctgaaccaaagggattagaagcaaagtggaacataggttataggattgctttcctggatgtcgataaaaataagctagatcctcgtcctctcagatgtgtgtgaatgcaaatggatatattttgttatccatgtatgtcctgttctcttggccaagtgatgagaggaagcagttaactcataaaagaaattcagaattttactgataggaaatagtgttttaaggggaaaaaaacaagtgttaayttatcatctgccaaagcattttgcaaagaacaaaccttctaaaattcccatatagttgtaactgttttacagatgagatggagaatatgaagggagatagtaaaccatgaaatcactttttcctggtgctaagtcctgattcactagcaatcgtagttctcttcagcttctaattttaaagtattatttaccataaagtttttcataatagcatgagttttgaaaataattcagaaatattctaagttgaaatggctaagatagcctattttaagattgaatttaaagggttttttttt

SEQ ID NO: 757472 - DNA, 594 bp, Homo sapiens
gtgaacccaggaggcagagcttgcagtgagccaagattgagccactgcactccagcctgggcaacactgcgagaccccatctcaaaaaaaataaaaatgaaaaataaaaataaaaaaaaaataagataacttctcttgggagataatggttgaatttgggttgggatttcagcccggtacatggcacatagtagttgctgaataaatggaaactattgagcatcatatggcaaagagatgacgattttctaattacatgcttttcctgcctcctggctctggggccatgaggatgcttgcaaacaccccagagggcttctttgcccttcctctgtttcccaaacagtaggggagcgactcgtgttgttctcagggraaagctactcctgaaatgctcatttccttccttatctgctcatcttcactccagctgacaaaagcagacccccacctgcccaagacacctcattccactcaaaaatcggatatagagtgtctacaatgtgccattcattcatttatgtattcaataataattactggatgctgagtatggaccaggctcaggcccatggggaaagaggagaaaacgga

SEQ ID NO: 757473 - DNA, 579 bp, Homo sapiens
gtagaaacaaaataaagaaaggagctatttggagtttattattgaaaatgactcattcaactctgtatgattttgttttcttattctccagtgattggctgcatggcttgaatagctctgcacattcaaagaataaaaaatctttagacctgggaaataatgacaaaatgcagtgggcactaggacaaagatgtgtgcattttcaatgagaatttttccataatgcaaaatgttattttctggagtgaccactccaaataaggtacaatatactgtccacttcagttgcttcttcagaggtaaagaaagtaatattaggcagtgtaatgaaacaggagaaycaattcagtgtagaagagttctactcaaggtgagattaaaaacctcaggttcatctttagacgttaactttttattataccacatatatccctaaatagatgtatgcctcctttttgacaaatacgaaaccaaattttttcaagttgtttttaagtcagtgaagtcgaatacaaaaaaaaattacctagataatttcagattaaatagcatatcctatatcaatgcagtctatggatg

SEQ ID NO: 757474 - DNA, 652 bp, Homo sapiens
cacaggtaaacttgtgtcatggttgtttgttgtacagattattttatcactcagatacttaaactagtacccattagttacttttcctgatcctctccctcctactaccatccatcctctgatagaccccagtgtgtgttgttgccttctatgtgtccatgtgttttaatcatttagggcccacttataagtaagaacatgcagtatttggttttctgtccctgtgttagttttctaaggataatggtctccagctccatgcacgtccctgaaaaggacatgatctcattctttcttatggctgtgtagtattccatggtgttttgtaccacctttttgttatgaagtctatcatggatgggcatttatgttgattccctgtctttgctattgtgaatagtgctataatgaacatatgcatgcatgtctctttgtaatagaatgatttacactcttttggtatatacccagtaatgggattgctgagttgaatgrcatttctgtctttaggtctttgaggaattgccacactgtctttcacaatggttgaactaatatacactcccatcaacagtgtgtaagtgtcccattttcttcacagcctcaccagcatctgttattctttgactttttaatgataactattctgact

SEQ ID NO: 757475 - DNA, 572 bp, Homo sapiens
tgccttgatttcctgggaaactccttgcaaagctgttactatgtttagttgattgtcagggatgaagatacaacattgcattcccaaaagagcacagctgccaccttgggcagcagtctctgacaggggtactcctgtgcgcatgctgggcacctctggcaggacccccagatatctggcgttggcacagacagaccccaatgcttattgacctaatgcattagtttacyccctgcatagcccaattttagatgcagccatagggctatatcttgtgtagctgctgacttcaaccactgaaccttggccaaggcatttgtctcgttatttccaggggcagccaaaggcataaggcctgacatatgataaatagttacattcttttggtgtcccatttcccataggtcttgccacatggcttagctccaaatgggttggtggccaactaatcagttctgtaacttccaggtagttaaccacaaggtagaccttcataaactgcccagctataggtgcagatcaccataggtgtttcctccttggtgatcactatccacactgccctgagttca

SEQ ID NO: 757476 - DNA, 572 bp, Homo sapiens
tgccttgatttcctgggaaactccttgcaaagctgttactatgtttagttgattgtcagggatgaagatacaacattgcattcccaaaagagcacagctgccaccttgggcagcagtctctgacaggggtactcctgtgcgcatgctgggcacctctggcaggacccccagatatctggcgttggcacagacagaccccaatgcttattgacctaatgcattagtttaccccctgcatagcccaattttagatgcagccatagggctatatcttgtgtagctgctgacttcaaccacygaaccttggccaaggcatttgtctcgttatttccaggggcagccaaaggcataaggcctgacatatgataaatagttacattcttttggtgtcccatttcccataggtcttgccacatggcttagctccaaatgggttggtggccaactaatcagttctgtaacttccaggtagttaaccacaaggtagaccttcataaactgcccagctataggtgcagatcaccataggtgtttcctccttggtgatcactatccacactgccctgagttca

SEQ ID NO: 757477 - DNA, 572 bp, Homo sapiens
tgccttgatttcctgggaaactccttgcaaagctgttactatgtttagttgattgtcagggatgaagatacaacattgcattcccaaaagagcacagctgccaccttgggcagcagtctctgacaggggtactcctgtgcgcatgctgggcacctctggcaggacccccagatatctggcgttggcacagacagaccccaatgcttattgacctaatgcattagtttaccccctgcatagcccaattttagatgcagccatagggctatatcttgtgtagctgctgacttcaaccactgaaccttggccaaggcatttgtctcgttatttccaggggcagccaaaggcatamggcctgacatatgataaatagttacattcttttggtgtcccatttcccataggtcttgccacatggcttagctccaaatgggttggtggccaactaatcagttctgtaacttccaggtagttaaccacaaggtagaccttcataaactgcccagctataggtgcagatcaccataggtgtttcctccttggtgatcactatccacactgccctgagttca

SEQ ID NO: 757478 - DNA, 572 bp, Homo sapiens
tgccttgatttcctgggaaactccttgcaaagctgttactatgtttagttgattgtcagggatgaagatacaacattgcattcccaaaagagcacagctgccaccttgggcagcagtctctgacaggggtactcctgtgcgcatgctgggcacctctggcaggacccccagatatctggcgttggcacagacagaccccaatgcttattgacctaatgcattagtttaccccctgcatagcccaattttagatgcagccatagggctatatcttgtgtagctgctgacttcaaccactgaaccttggccaaggcatttgtctcgttatttccaggggcagccaaaggcataaggcctgacatatgataaatagttacattcttttggtgtccsatttcccataggtcttgccacatggcttagctccaaatgggttggtggccaactaatcagttctgtaacttccaggtagttaaccacaaggtagaccttcataaactgcccagctataggtgcagatcaccataggtgtttcctccttggtgatcactatccacactgccctgagttca

SEQ ID NO: 757479 - DNA, 392 bp, Homo sapiens
ggagctacaattcaaaatgagacttgggtggggataaaatcaaaccatatatggtgtcatactgatgtttaaaaagttttggatttaggattattttgtatttcagattttcatattagtgatgcccaacttgtataaattaatcctcattacaaattgaaaaataatttcatgtattttgtatagtagatgttgcatctgggattaatgagttgaaccaaccattgttaacaggactaactggtaaragctgccctggaattggaatgaaagatcaacctcaagcctatatgactatctaagttcattttcttttcaccacaatgcattacctttaagattacaaatttcacataacttagatttaacacagaagagtatcagtaagaaag

SEQ ID NO: 757480 - DNA, 632 bp, Homo sapiens
ctctaaggatccactaattatgaactttctttgacatttcggtgtatcacagaaagcatttctccattatggataccttggcaaatccgctgtcactaatacacttttgtttctcttgactatttctcaatcagcaaaaattgaaaattaaacaaaaagaagttggcatctgttgtggtgatgttggttaggatttcaaatcctctacattttttttttaattttaaactggtaaataagtataattaagattaaaataaaacaccaatagtgggcgcctatggagaaatattcaatatttcattaaattgatccagccttatttgatcaacttccatggggcaggctgtgtatgagagtgtgagaacacagacatgaatatattgtagcccctgatcagacaaggaggtcattatctcagaaggaaatcacacattaraagaaataaattgcaacattgtgcagctcactagcagcagcttggaagtatgtatctgggtaagctcctagaatggcaagagtgttagaagaaacgaggacagcttcttggaggaggaaacctcaaggctgttttcaaggatgactatggagttaaacaagcagacaagacagaacatcctaaacagagcaga

SEQ ID NO: 757481 - DNA, 637 bp, Homo sapiens
cagaaggtgttctgagtgtcagtatgacatttagaaagtagggttgaacagaacccctaccccagtccctgagtctcaggagtcctcttattttggatctcctttctccaaatattctaaatcctactttagtgtttgagactgcctaaggccaggtatgccataaggcrattggagtcctggttcaatttctcttctttgtggcattctctgcccttcatccttatgcttggagttcactggatgccctgaagaacgctgggactcatccctttggggtcatactggggtcctctggccagaccccagatccccagaaagatggcatcacttctgctggccatcacattatttctttcttgggattttgagagattgaaccactagaatagtactgactgctgattttatgtaactctagtacaggtcagacacaggactaagaatcttcatgtgcactgattggacaataaacaaaatattttgcaaatacatctcttttcttcacataggtccatgacttttataatattaaatatatattttttatcatatagtttatatagacaagggcctcacagtaaatatttgcctagggtcccacatattctactggcagccctgctagttatctata

SEQ ID NO: 757482 - DNA, 515 bp, Homo sapiens
gcataagcaaaataagaacaccatgcaaacttcaaaaatgaccaaacattttcttcttcaagcaattaggagtgatgccacttctctatcgactatagcactagccctgctccatcccttccgcctcctacgtaacaaatattaagataactaattacagaattgtccctaaatgaatacacccaatctggagccatcctcacttccatgaatgctctccaaaatatcaaacccaagctcatctagcaatcccttcctagcatcctcttactgaaatstcccacattctctgtgtgtagagtctcccttgctgcagcgaataataacccaactttgtttgactacagatgtctcctggtggtcttcgactggtgacatttactgagaagagaaatactgaaaaagcataggatcatttgagagtaacaggatagagttttggtttttgcatgtcgagtgggaggtacaatttttgaaggtaattagatttattgatccaagacacagaaaatgat

SEQ ID NO: 757483 - DNA, 597 bp, Homo sapiens
aaatactcattgagcatttgtgtggtccagagaacataaaggcactggttaaggtggggaggcatcttttctaggcgcttagaatttatttaaagtaagtttgaaaagcttgctcattttcttttaagatgtctctaaaatatgtaaaattayggttattgcctaagtttccgtaatcatgaaattgaacaaaccagctatagggtcttaaagagaaaactattacctatggagcttgcttaaccacagaatatccaaatagctatagttaatttcacaggctgctttgcagttgttatatgccataaaattttgctgccttatccagaactagtgtttccaaggacaactgcaaaaagaaactttgtatatatgagatcaactagggatttctggggaaattttttaaaatacagtataaaaactagctgatttagagccctcgtattttgccaaaaccaaagcatgttatcccatttctctgccagaccttattggatacttcaattgctatgggactgaaattttagatcactaagatacagagactaaacaaatatttttactctctatggtcctattaaaaaaaaagtattc

SEQ ID NO: 757484 - DNA, 547 bp, Homo sapiens
tttaattagatcccatttgtctattttagcttttgttgccattgattttggtgattttgtcataaaatctttgcccatgcctatgtcctgaatgctattgcctaggttttcttctagggtttttatggttttgggttttacctttaagtctttaatccatcttgagttaatttttgtataaagtgtaaggaatgggtccagtttcagttttctgcatatggctagccagttttcccagcaccatttattaaatagggaatcctttccccattgsttgtttttatcaggtttgttgaagatcagatggttgtacatctgtggtcttatttctgaggtctctattctgttccattggtctatatgtctgtttttgtaccagcactatgctgttttggttactgatgccttgtagtatagtttgaagtctggtaacatgatgcctccagatttgttctttttgcttagaattgtctttgctatgtgggctttttgggttccatatgaattttaaagtagtttttttctaattctgtgaagaatgttcatg

SEQ ID NO: 757485 - DNA, 601 bp, Homo sapiens
ttactttttattttatctaaaatatgataaattttaaattatttagcatattaagaaatcttcataatatccctgtactgagtttattttaaatagtttagttgaactagaatacaagtaaaattttacctggttgaaatattatttttttgattgacccctttaagcctaagcaactgtgcactttaaattttccagataacagatattttgctctcttctgaaggtaacaaaggtaatgaaartttttacatctgaaacctgtcacggcacagcccaatttaaccataaattgtatgtatttatgtaatcagagtaagactgtcatctagctggcacttacctagaaagtaccatatgtactttcacaaagtgcctagaacttactataatcatttttattgacctggtaaattgacaatagtagagtttttattgttcaccactgtttctactctgcacttttcctgccccatctccttttcttaaacaacaacaaattctgcagttactaggatactatcaccaaagcctatttgtccatcagatataaaactacaattatttgtgcataagtttctcttttgattttttcttattg

SEQ ID NO: 757486 - DNA, 596 bp, Homo sapiens
gtatttccacattttctttaaactgatcatctcctgttgggcaacttagtaggggaaaagatctctatgtcttcaagtaggtgcttttactgaaaaagaaagaagaaccaaatagagaagcaaaattattttaatttccgaaagctgaagccttgagactatcaatagaatttttaaaatacttgctaggattttaatatgttcccatttgagaagtgctaggagttttctggaattggagggaaaataaagaattggagaggggaaaaatataaatatgaaaatggcatgtctctttgtcttgtctcctcgtccctgatataacactaggatatttaagtgtgggaaatctagcctaaaaggaatccacactsttgatatctgaagacagttatttcccattgtagtgagaataaaaagagaggtgactacagtcccagcaatgaggaatatgcaaaactcagttgacctaggaaggtacatcataaaagaaaaaaaaaaagactatagggctggatatctttctttgcttttatgatactgtgtcaacctcccaaatttagttgcaacccaatagaaaagtagtgtcaccatga

SEQ ID NO: 757487 - DNA, 570 bp, Homo sapiens
tttatagatcttaaaggagtacagtttttttcttttttttttttgagcttgagagaaaccaaagctaagatgtttccagatttggcatatgtccttaggataaaagcaattttttctcactcaattcctgcccgcatttatattttggcctagatgattattctcttgtttgcacttctatatgtttggatgcttttacattttatctcttcttttrgttttttgtttttgtttttgttttttgtttgtttgtttgttttttagtggaagaagcagtcaagaaacttggtccaccctattagtggaaatgagagtgcagtttaaatattatttgttgttttatatgctatcatctttagggatttaaaaagtttcgctaggcttattccagataaaatttattatcaaagctgatatcaaaaatatctccaagcatactatcatagtaatatgaatgctagaaagtactacatttttactcacaaacacttggatgcatagtttaataaatattgacctcaccatatgtgactgaagttgtacaatcagtcaagggaacataaaccactg

SEQ ID NO: 757488 - DNA, 570 bp, Homo sapiens
tttatagatcttaaaggagtacagtttttttcttttttttttttgagcttgagagaaaccaaagctaagatgtttccagatttggcatatgtccttaggataaaagcaattttttctcactcaattcctgcccgcatttatattttggcctagatgattattctcttgtttgcacttctatatgtttggatgcttttacattttatctcttcttttggttttttgtttttgtttttgttttttgtttgtttgtttgttttttagtggaagaagcagtcaagaaacttggtccaccctattagtggaaatgagagtgcagtttaaatattatttgttgttttatatgctatcatctttagggatttaaaaagtttcgctaggyttattccagataaaatttattatcaaagctgatatcaaaaatatctccaagcatactatcatagtaatatgaatgctagaaagtactacatttttactcacaaacacttggatgcatagtttaataaatattgacctcaccatatgtgactgaagttgtacaatcagtcaagggaacataaaccactg

SEQ ID NO: 757489 - DNA, 750 bp, Homo sapiens
tggcttaatgcagtatttttgcactggttgacctcctgccagcaggtggtgctttccagagagcatcagctgtggtagtatggagaggaacaggctgtaggtggggccctagaactcccaagagtatatgccctttgtcttcagttaccagggtgggtagtgaaggaccactgggtgggggcaggactaggcgtatctgagctcagactctccttgggtgggtcttgctgcagctgctgtggggaatgaggatgaggttcccagatcaatggaattatgatcctaggaggattgtggctgtctctgctgtttcattcaggttgtcagggaagtgtgggaaagccggcagtcacaggcctcaccctgctcccacacagtccaaagggccggactcactcccaccgtgcctccctccaacagcaccaagtctgtttccaggcagtgggcatgcayggctgagaacttaccccaggctacccacctcccagctgtgaaagcaaatatagctttccttcttcccctagtctgcacaccggattcacaccctcccccaagttctggccaggaggcttcttgatcagttcaaattgttacaaagtttagctgaggatttccttctccctgtggcctttttcccagtgcctctggccacccctccagaaggatacctgtgaggccaggcaggaatggcctgcttggggatccagcgagctcacagagcctttcccgctgcttcctctacctttattt

SEQ ID NO: 757490 - DNA, 624 bp, Homo sapiens
actagacttatgactggaatgcacaccatgattatagtattagagcattctgagtttgtccatgtgcttaattttacagtggattttacacctgcgaatgttttctttttttacactagtgttttattgtttcagattaaataactccctttagcatttcttgtaagactgatctggtggtaatgaattctcacagctttttgttttccctctctttccttcatatttgaaggatagctttgctggataccatattattggatggcagttttttcttttagcactttcaaaatgtcatatcactccttcctggcctctrtggtttttattgagaggtcagttgccaaagaaattaaagctttttaatatgttatttgtgtctttccccttgctgcttttgaaattctctctaccccttgcccttgtacaattccaagttgaacaccaatatttcataatttagtattttgagtacatttttatatctagtaggtaatatgttccttttcattcttttttctcctctgactgtgtattgtcaaacagcctgtctttgagatctctaatactttcctctgcttgattcattctgctattgagatcctctcataaatttttcagttc

SEQ ID NO: 757491 - DNA, 522 bp, Homo sapiens
cctaaaggaacgtaagggagtataagaagctgagcaatgcggtctccagctgccgtatatcaagggactgcagagctaatgacaatatgaatttcacctgaatagtcagaatcaattacaccagtatgtacttgaacaccttttaaatttaggcttgagagatcaaatagcaaaccgacactgccagtcggcaaggggccaaaaacacctgtgggaacagcaataggtggctctccaggtaacagagaaatatctctggtacaacagagatctactgatgctgagcctgtggtggcaggggacaagcattgtactgagattcgtgttggggcagagccattagatcctgtggcacaaattgctgaagtgggaattgggatgtasgttgaatggattgggctggcaaggcgctcatcttgctggacgccaggggctcggagttgaggaatgccccattgtttggaggggcctagggctggcccctcttcccgtttacctggaagtgaccgtaagggattgcca

SEQ ID NO: 757492 - DNA, 593 bp, Homo sapiens
cttgagaattactgctacatttgacaaatcccctctgtccttaatagaattctatgaaaggcagttagatattaatcatccctgccatgaaagaatgcaagtgatgattatattaatagaaaacaggtgttaaaaattttaaaaagcaactctccctctgcactcttcctccctacccccactccagctttatttttttaaatagcccttattgctatctgctatgttacatacctatttgtttgtttattgcctatctcctccccaccagaatgtttacatgtttatttcctgctccctaccccaaaattaggatataatctccaaaggctgaaactcttgtctgttctgttcactgctrttatccaggtacttagaacagtgtttggcatacagtaagtactcaataaatatttattaaaatgaaatttaaaaatcaaaatgctttaaaaattagacctttaacaagtaacagagcaaaaaaaaaaaatctaatttcacaccttaggcatctgttccagaaccttatttcatattcctaatcactacttccccaaattcccaatctcatttcccttgaatatcattctcag

SEQ ID NO: 757493 - DNA, 626 bp, Homo sapiens
actgatgcgtgcttttcccaggatccatttactctcagcaagtgtttgaggacctcttaggtgccaggcacagtggtaggtgctgggattgctgtgcatttatgttctctaaatgatagctgagttctggtgccatgaaagcagattcaaactcactttacaaatggggaaaggggtagtatctccctttaagactgctactacgatttttactattctacctaaattttaggttaagttcattgagttcatcaaaaattcagtttaagattgtgtctgctttatacattgctctgcgaagttccatctttgtaatatgatctcattccacatcaaaggttcctccgttttttcgggcattcttcagtgccttttattagagttttctgctttctccatcaagggcccttgtaactagggtcagtaattcccaggcactttgtagtttttgtgtctgggtagctggagtcttcgtctctgtttcttktttgtatttgcttaattgttagtggaaaggtggttgctgttggtttcatatttttgatatttgcatgtggtagtctagttgtgatggtctgtctgttgcttctgttttccagctatatcatttgcaaacaaatgacaat

SEQ ID NO: 757494 - DNA, 626 bp, Homo sapiens
aaatgtgtagtgaataattataaagcaaatacccacataaccaccattcaggctgggcaccctaaaagccccctgtaagtcttttatagttttagggattcctgtttcttcctataaatgaaattatactgaataaatcctccttatctgcccctttgatgcaacagtattttgtaaggcatatccatattgtgtatagctgtatttcattcatctctatcgctttggaatgttayatagactgcatttgcatttacctaatccaccactgatgggcatttggttgtttctagtctgagctgttaggacgttgtgctgtggacattcctttacctcggttgtgatggacgtgtatgtgagtgtcgtgaggtggtatgccaggagtgctgtcctggctgtcaacctcgtgtatcctcaacaccactgataatgcactgccccgcccatgggtggtgttcgggctccagccacaaagcagctccttgaggcactatttggtgttgtccgtagtggttttaatttgcatttctctggtggttattaatgagagtgacgagcccttcatacgtggttagccatttggatctattttgtgaagaacctgattaagactttttcctattcta

SEQ ID NO: 757495 - DNA, 552 bp, Homo sapiens
agcctctctttttctcccccagagcatttctcaaggcaacttggaagtgtttcctaggccgcagctctcaaccttggcccaaataagctctctccctgtattttctttttgagacaaggtgttgctctgtcgcccaggctggcatgcagtagtgagatgacggctcactgcagtctcaacctgttgggctcaagtgatcctcccacctcagcctcctgagtagctgggattgcsgacatgagccgtggggcctggcctctccctatattaatttgtctcagtttcttcctttaggttgacaataccgtaacttcacactgtccacctgggtgtgttccttgtggcctggcgtggtgctgcgggcatgtccccaggccctcacctgtgttcaccgtcacccatgatgctgcccatctagaaggcatttccaccatgtaacatgacggtcggggcttggaccccaggccacactgcttgggtcgaaacctggctccactcaatatttgtgtgacctcggtcaagtgacttcacctttgtgtgcctcagtttcct

SEQ ID NO: 757496 - DNA, 552 bp, Homo sapiens
agcctctctttttctcccccagagcatttctcaaggcaacttggaagtgtttcctaggccgcagctctcaaccttggcccaaataagctctctccctgtattttctttttgagacaaggtgttgctctgtcgcccaggctggcatgcagtagtgagatgacggctcactgcagtctcaacctgttgggctcaagtgatcctcccacctcagcctcctgagtagctgggattgcggacatgagccgtggggcctggcctctccctatattaatttgtctcagtttcttcctttaggttgacaataccgtaacttcacactgtccacctgggtgtgttccttrtggcctggcgtggtgctgcgggcatgtccccaggccctcacctgtgttcaccgtcacccatgatgctgcccatctagaaggcatttccaccatgtaacatgacggtcggggcttggaccccaggccacactgcttgggtcgaaacctggctccactcaatatttgtgtgacctcggtcaagtgacttcacctttgtgtgcctcagtttcct

SEQ ID NO: 757497 - DNA, 599 bp, Homo sapiens
acttgaattatacttcaaatacgatgctgtaacttgaattctatagaatacccttgagcatcttgtcccttctgccgcgatactttttctcactaagagcagtcatctggcttctctgtaaagctgtctttatcttcatgttcagtgtgcttccaagttcataaacaccctcctttccacacctgagcatcaatattgatagacaacgggtggccaaagcctcggctctgagatgctcttgctgccgaggcccttcgttcctgacactgtgtaaatctgtctccctttaccctttcaaaaaggctgagagctctgacttttgtcactgccaaattcctgtgcgagaggacgaccttggtcagagctactttctactttcttttcccaatttccttaacccttcaagccagcctcggctcatcacctcttttgaaggccacccccacmcaccttcccagcctgcctgcctctgttggacgtgctagccacctgtccttttgcatcattgagcggattttattgtgcactcatcatgaacaaggtgaaaataggcacaaaataagcaagacctcccggtgcccagggagcaggccacacag

SEQ ID NO: 757498 - DNA, 591 bp, Homo sapiens
atgctgtcactcaaacagcatttccctttctttttcatatgaaattagttctaaaagaaaggaaattagattggaaatagattaagtatgacgttttgatgtcctctttctttgtatgaggtttctgtaagcccagccttttatcattaaaaatcagctgaattctgccacattagcagccaaccctccttcccaccccagcagcgggtgccagtgtgctctggtgagtctgcgcygatggccggacgtcccggagctgccggcagttccagctgccggggctgccagggtccgggagggtttcctggtgtcatggtctttgggtttgatgtacgctgctgtaaatgactagagcgttatgacagtttcttcacgttctgtgtgcctgattataacagtgcctcttaaaaagaaaatctttttcagaaaatcttttgtctgaatctttgccactcttaagaattctcaagctttccttcaactctccagaaaagattttaccgaacaatgtatttcttttagtgagagatatgcatagttacctaagttggtttttagatttctctgacacttaataaaaagttatacatg

SEQ ID NO: 757499 - DNA, 553 bp, Homo sapiens
aacccaactggaatctcttgcccagggctttaaatcttgaggagggtggcaaaagaatagggataaaatatctggagttctggcacagaccccaaaataatatggcccaggaaccctggctcctgaatctccaaccttctcatcaattctatgagttcctgatgtgctttcaatgcatcctttgcctggtagaggtagtcagtctgtttcygttgcatacaaccccacaacccaaactgatatggtcacacaggagcacacgcagtcacacacctgtctgtgctgagataaagcatgcctcccggaacctccagctgcctgctgccagctttgtctgtagaggctgcattagattaaacaacctcccaagcccacccaggcacaaagcaaagtcaaacacttcagggaatgaaacagaccaatatttgatgttgcagagcaacaagccagggttagggtgtgggaatccagacacacaggttcaaccccctcaaccttcaggacaaagtggaaaaagagcttttaggccaggcgcattggctcacacctgtaa

SEQ ID NO: 757500 - DNA, 553 bp, Homo sapiens
aacccaactggaatctcttgcccagggctttaaatcttgaggagggtggcaaaagaatagggataaaatatctggagttctggcacagaccccaaaataatatggcccaggaaccctggctcctgaatctccaaccttctcatcaattctatgagttcctgatgtgctttcaatgcatcctttgcctggtagaggtagtcagtctgtttctgttgcatacaaccccacaacccaaactgatatggtcacacaggagcacacgcagtcacacacctgtctgtgctgagataaagcatgsctcccggaacctccagctgcctgctgccagctttgtctgtagaggctgcattagattaaacaacctcccaagcccacccaggcacaaagcaaagtcaaacacttcagggaatgaaacagaccaatatttgatgttgcagagcaacaagccagggttagggtgtgggaatccagacacacaggttcaaccccctcaaccttcaggacaaagtggaaaaagagcttttaggccaggcgcattggctcacacctgtaa

SEQ ID NO: 757501 - DNA, 612 bp, Homo sapiens
ccagctcagtcactgctgccagtggcgagagaggtgggtctcccccagcctgttccaagtcctcattgtctccgtgcagccagcagccaaggctgggcccacagaagctgcagagcccagggggtaatttcagaaataagaggctttgggttcccaaaaatccaggctcactctattctgagacaaaaacacctctgtttctggctctcccttcttagaagggccgttccctttatagccgagggcgaaaccagggccacccaagggcttgcagcaagtyggagcagcagccaccaggcagcctgcctcctgcacccccacccaggcctcgcccccagacgcccctgagagggtgagacaggccagtgagcagacagctacctggggggcagaggctgagcagggaagcattgagacctggggcagggggagaacgcagaggtgacaactctccggggaactgtggggacgtctgctgaggggtgggagatgagcctgtggctggattccaggaccccagaggacagggctgagaaagagggaatgagctccccttctgctctagccccccaactggttgggatccagagatcgtgcccctgggatcctccc

SEQ ID NO: 757502 - DNA, 535 bp, Homo sapiens
tgacattaggccccctcaccttttcccccaggctggaccagatgatggggtcaggagtgcctcgccccctgcccctctcagctgggccaggtcggcatggctacccgtgcaggggcagcaggaaccagtggcaccaggtccttctgggccaacgatgagctacrgagccctgatcacgatgagatctttgcatgggaggcggggacacaagatttacccggctatgcagagtgcaagcgcctgatcagctccgtgcgactcatccatcccagctgggcagtagtagtgggtggggcaggtgggggcagacaagacagccaaggccaagagccagtggggagcctgggatccaggctgtgctgccacccacccatgtgacctgggccacatcagttcccctctgggtctgtttccctgtttgagaaacgggagcaggctaggcaagtgccactcggcatctaccaaacatccagccctttttccggtgctatccttatagcaacaccttctaaacaccacttatagcaactgtcct

SEQ ID NO: 757503 - DNA, 580 bp, Homo sapiens
accagggctctgtccacaaagtgctctggccttctagggggcagagaggacaactcaaggcaaagttgtcttccaggacctgggtcagtatgagccccggccccatgggatctgtcttagccaatgagtgtgaggaaaaggcgggggactggggtcaccacccagtgggaccttcacagaactcaraggtcttcaaccaaagggctgggctggaacgagctgtccccgcagagtccccagtgggttactgctctcctttgatgggggcagcctgtcgccgtcatgcggaaggaaaccagggaggggcctcggtatgctgggaccggggcagaaatcgctggagagccctggggctggggacaggtcctgttgagctggcctggtaccccccaagattccccagctcggctttgttttgagaaaggggaggtgccccatgagggagcccaggcctgaggcactcacgggaaaggcggaagggtgatgaggtaagtctgatttcagggaccttcttattggaaaagcttttagacatttttgtaggggaaggaagaatatttcaggccttctgggtgctgcc

SEQ ID NO: 757504 - DNA, 580 bp, Homo sapiens
accagggctctgtccacaaagtgctctggccttctagggggcagagaggacaactcaaggcaaagttgtcttccaggacctgggtcagtatgagccccggccccatgggatctgtcttagccaatgagtgtgaggaaaaggcgggggactggggtcaccacccagtgggaccttcacagaactcagagstcttcaaccaaagggctgggctggaacgagctgtccccgcagagtccccagtgggttactgctctcctttgatgggggcagcctgtcgccgtcatgcggaaggaaaccagggaggggcctcggtatgctgggaccggggcagaaatcgctggagagccctggggctggggacaggtcctgttgagctggcctggtaccccccaagattccccagctcggctttgttttgagaaaggggaggtgccccatgagggagcccaggcctgaggcactcacgggaaaggcggaagggtgatgaggtaagtctgatttcagggaccttcttattggaaaagcttttagacatttttgtaggggaaggaagaatatttcaggccttctgggtgctgcc

SEQ ID NO: 757505 - DNA, 544 bp, Homo sapiens
actgggtcaaaggcagctgcacacctcactggggatccctccaagcccctccaccaggaaggagtcaggttggagggtcaggcccttcttggccctggcacacccccacggaggtctcactgtgtggggcagctagccggcctggccatcaaggtcacaatcaggaaggtgtgtgcatcctgccataccctctgactcgtcgtggtctgcagccacaggcacccacagggagcaagctaatgaggcctcagaggagacgtgcactctagsactggaccccaccaccctggcaaacacgccattacccctcctcctcccaaatcctgaaatccagcctctgccctggaaactgttgccttgttatgagatccataggggtgggaacacagggcttagatttatcttttcctgccaggttgctggattcaggagccaagaagagcgataaagagggaggtagagaacttggtggaggctgtgcaggagtgggggccccatgctgggcacgtcttggagcctccaagtcttatctccagctgggtcc

SEQ ID NO: 757506 - DNA, 621 bp, Homo sapiens
cagaagttgagaaggtagggtaggaggaacccagaagaggcttgatgtaaaggagtgaagacaaatgtggttagtgtgttttcaaggtcttcgacttcactaagagtcttacttgataatttatagtctttttgattagggaaaaatagttttgtctttcagcacttttgttccctcatctggaaaacaagaaaaaatagtaattatcaatattattgtacacaagctgtatgtaaatttatatgatacagcaatgaattctcatggtaaaacataattatatgacaacaaaggaaacatatcagcaaaatcaaaaaagcattgagcagattatagtagtcatatgatygtggcaaaagagtcctttgaaaggataaacatacataaaaacataatagtaaaatttggctggggggcgtattgtgtcttgtcagatggtcacagttctgtattgatacattacatttttacctgttccaagtttatctcattatgatggatatatagaacatctacttaagagaatctttaagtggtctgattaaaaattccactaataatatgttccctcaattatatagccatcatatagttatttatcaccattactttcagtgacaa

SEQ ID NO: 757507 - DNA, 621 bp, Homo sapiens
cagaagttgagaaggtagggtaggaggaacccagaagaggcttgatgtaaaggagtgaagacaaatgtggttagtgtgttttcaaggtcttcgacttcactaagagtcttacttgataatttatagtctttttgattagggaaaaatagttttgtctttcagcacttttgttccctcatctggaaaacaagaaaaaatagtaattatcaatattattgtacacaagctgtatgtaaatttatatgatacagcaatgaattctcatggtaaaacataattatatgacaacaaaggaaacatatcagcaaaatcaaaaaagcattgagcagattatagtagtcatatgatcgtggcaaaagagtcctttgaaagrataaacatacataaaaacataatagtaaaatttggctggggggcgtattgtgtcttgtcagatggtcacagttctgtattgatacattacatttttacctgttccaagtttatctcattatgatggatatatagaacatctacttaagagaatctttaagtggtctgattaaaaattccactaataatatgttccctcaattatatagccatcatatagttatttatcaccattactttcagtgacaa

SEQ ID NO: 757508 - DNA, 601 bp, Homo sapiens
ctcatgtatttggtcttatgacaataataacacacacacacacaaacaaataagtaaacaaaacagctaccacctcacaccctttaggatggcaattatgaaaaagaaaaaacaaacaaagaaaaagaaggaaaagttggaaaataacaggattcaggggagatggaatgaattggactccttgaatattactggtgagaatgtaaaatggtgaagctgctctacaaaaacctatggtagttcctccaataattagacgtgaaaatacacatgacccagcaattacacttccaatagatactcaaataattgagagcagagattcaaacatattttttgtgtaccaatgttcttcmcagtattattcacagtattattcacagtagctcaaagtagagctctccatggagagataattcaacatgcatgaaccatgaaaacattaagttaagtgaaataagacagacacaaaaggcaaatattgtaatatactatgtataagaggtacctagaaacatcaaattacagagacaaaaaaattagtgcttaccagggacttggggagaaataaatgcagagctattgcctctgagcaacaaaa

SEQ ID NO: 757509 - DNA, 601 bp, Homo sapiens
tatgtatcgagaatgccataagcaggaaatactgactattgaatcaaatatttatccttttcttaatcaatcatatatgtttccattttctttatagggactctgttttcctattatgtttgatagcagtaaaaaccactcacgtaagcaaagtgttatgtaatataatcacgtaatgatatatttgtccaacactaatacaatctttgatgccgtctttgtttagtcaacataatatgaaagttgacatttacataaaatggtccagatataatttttatagttgttaatccactaagaagtgagcattaaactatataacttgctttagtattgtgcatatgrtagcaaatgtcctgccacagccctccatgggaaaaaagtcacatttatacctactgtatccaaaagtttaaaagaagagcagcatacaaatgtatttgtagaaaaaaaatagcccatagctatcacttaatatgaccattagcaaactcacttacattatctaaaatgtatttatcttcacagttaacatgtttgctttcacactgaaagtataatttgagaatttgggggggaaattgcattatatttgtgtaaa

SEQ ID NO: 757510 - DNA, 533 bp, Homo sapiens
tataccttcaaatatattgaattattttatttgcatctgattctctggggttggggtgacagaccttagtatgaccatttcataaatggggaaattgaagtctaaagaacttgtgtcttaactaatgtcatacttgtaaatggtatrcaaagggtagcacacaactttctgactcagggataccattatactctcatgcacttatttatcaaatattcaccaagagtttttgagcacttcctgtgtagtaggcattgcactggactgtgggggtagaaagacaaggcataatttctgtcctcagggagtttataatcttgtggggagcagttagacaagagaattggtaacagttatgtgtgtaaattattataatgcccactgtaagcagttttaagtgttgataatttggagtaaagcttattttcacttttaaaaattattgaagatcttaagattagttaagataaaaataattattgcttcgtgcaaagagtatgacccgttttacttgtgtgctactctaagactgg

SEQ ID NO: 757511 - DNA, 557 bp, Homo sapiens
tctttttttttttttttttttttttgagacagagtctcactccatcacccaggatggtggagtgcagtggcacaatctcagctcactgcaaccaccacctcctggattcaagcgattctcgtgcctcagcctcctgagtagctgggattacaggcatgtgccaccacctccagctaatttttgtatttttagtggagtggggattcaccacattggccaggctggtcttgaacccctaacctcaagtgatcctcccgcctcagcctcccaaagtacttggattaygggtgtgagccatcatacccacctggttggtggattcttatctcttctgccattctgtgtcttttaatggagcatttaggctatttacattccatgttatattgagatgtgcagtactgttctattcatcatgctagttgttgcctgaataccttggttttttttttcattgtttaattgttttataggtcctgtgagatttgtgctttaaggatgttctattttggtttattttgaggatttgtttcaagatttagagctccttttagcag

SEQ ID NO: 757512 - DNA, 623 bp, Homo sapiens
aggaaacaattccctaagagttggatccatctctaaattccactggtaacttttacctttagcaactgagcaaagcacaattgcagctccataccttgggtgactatgtagccactaaggaatcaaaggtcctcattccccaccattttataaactggacaaaattacttttcctttagcaaaaaccgcatcctcatttttttcataaccttcttcaccaaaaaaaaatcttactttctttgtagagtctgtatgtagaatggtgtctcttagatctagtagtttaaattacatatattaattgcaattttattttacaaataattttaaaactatctttaattaccaaagatkagtaaaggcgtgtgaactaaaaggcatttgagttaggttcaatttttctgataaaatatgtgatttaagcatttactttttctttaaggtaattaattagagctctttcacatattttggtaatgatgtatcacatgcatataacatatataaacatgtcagaacacttagatgcccctcaatcaaggagcccatttttacactgaatcttgattctccaaaaggaaaatgccaagagacttgacagtgcaatgcttccatggcatcct

SEQ ID NO: 757513 - DNA, 576 bp, Homo sapiens
atttgggagctgtttgttactgtggtgtagcctgattcatccctgactgactcgcagactttaatcccctcctagttatatgccctggaataccaaaccttttttgtgtcatgtatctttggccatcatgcaaagcctaagaatctcttctcataagaacttaagcttttaaaaaatrcataaaatacatacaatttgtgagaagaaacaactctatcagaatatggctatcaaatactaaaacaataaatttgtgctatagtaaaaattattcatttttattaacgtattaaataacagcagcaagtagggggtctaataactacaataatttcaaaatagtaatgagcacaaatgatatttctagatatttacagccataatgagatataaaattttgttatttttatcagtgacaaaaaatacaaagcatacagagctacttatgacaaggttacaggcacaggtattgtgtttctctcttgtctgcatttgtaatgaaaagaaatgctgcatttcagttagaaggtaataaagagacagatttagttttttttttttcccattcacgttcat

SEQ ID NO: 757514 - DNA, 495 bp, Homo sapiens
gctatggagcacttgaaaagtggctagtacaactgagatgttctgtaagtgttaaaatgacagattttgaaaacttggtataaaaaattaatgtaaaatatcctgttaataattaaaaaaaaaaaaaaagaaaaggaaagasaagaaaaaagagagagatgagggctcactatgttgcccaggctagccctgaactcctgggctcaggcaattctcccaccttggcctcctgagtaggtggtgccaccatgcccaattaataattattttacattaattatacagtgaaatctaaataccatggatgtgtgtggtttaataaaatatgttattaaaattcatcccagcagatgttttcaccttttttaatgtggctattagaaaatataaaatttcacctgcatcttacattatatctccattgaacagtgctgtttggagcaagcgggagagctgaacattcatttacagaaataattgcttttttagatgcaa

SEQ ID NO: 757515 - DNA, 628 bp, Homo sapiens
agcttccgactctcacgtgtggggggcttcccagttaggaaaaacaaagggagtcagtctctcccctcctaccctggcaggaggaccacaatcaggtgagttaggtctggctaatcaaacactcccgtccaggggtctgattctagagctatgctggcaaatatgcaggccactagcccatgcagctatggagcacttgaaaagtggctagtacaactgagatgttctgtaagtgttaaaatgacagattttgaaaacttggtataaaaaattaatgtaaaatatcctgttaataattaaaaaaaaaaaaaaagaaaaggaaagagaagaaaaaagagagagatgagggctcactatgttgcccaggctagccctgaactcctgggctyaggcaattctcccaccttggcctcctgagtaggtggtgccaccatgcccaattaataattattttacattaattatacagtgaaatctaaataccatggatgtgtgtggtttaataaaatatgttattaaaattcatcccagcagatgttttcaccttttttaatgtggctattagaaaatataaaatttcacctgcatcttacattatatctccattgaacagtgctgtttggagcaa

SEQ ID NO: 757516 - DNA, 546 bp, Homo sapiens
gaaaggatttctccactgtgtttatttgtgtttatgtgggaataccattcaggaaaatttttcttagccaagactagcagattgcatcacatggcactgcagggagtaaggggctggaggtggtggtggccactgttaccttaaattcaactctgtctaaaagtcatcatctttcttgtaaaatcatgtcttcctgctgtctcccatttctgttaatcagtattctcctggccacctggtctcaagtctcagattaaaatttgattcccttcttgctctttctctatatcacattactcaacaaattttgttgacttcactgttgggaatttgtggccacatttcacctgattcttartaccttatgttttcccacatcctaataggctctcttcttatccattctacattttggatgtgtctgatcttccttaaacttttctttcagtaacacttaggttctcaggaacatataactttctaaaactctaaaacattaagttcttggcattcaagtttctcaacaccctgtccttgactggtttt

SEQ ID NO: 757517 - DNA, 606 bp, Homo sapiens
tttactttgcattgctctgattattctacattgcaccttggctggttagcagcaccttctgtgataccaaggggactgtgcaggtggaggcatgctgcccccttcacagccacagcccatttgcctttcatgcctttagacagaaaaggaacacagggaatccatggaggttcaactcgttgtcgtgacgtcatgttttggggtctcgaaggacaaaatgcaactgagtcagtgggtggagcggcagcattgcccaaaaatctcttcactgagcaacccctggagatcactttagaggtgtgggctggaagtgccttccagccttacctaggattcagctctttaacrcctttttaaaaaaaatcaatttcatgtttcaaagggaaaaatggcatgaaagttttagaactactgttgggacacagctattacttgccttatttgggagcgttcacaagctgtttggtagttagccactaatgagcatggtgtattgagctgagcaagctgtgggtattggaatttaacctttttttaaaatacgcacaacattaaaaatcctgttttttcccctagattatttgcaggtgtcttccctcgaatggc

SEQ ID NO: 757518 - DNA, 517 bp, Homo sapiens
aacacatgctagcaaaaatggggagaaattggaattctcatgcattggtgatgggcatgtaaaatcatgaagccactctggaaaacagtttggcagtccctcaaaaaagctgagcacagagttagcgtatgacccagcaattccattcctaggtttgtacccaagagaatcacacaaaaccctgtatatgaattttcacagcagcattattcataatagccaaaaagtggggrcaatctaatgtccatcatctgataaacggataaataaaatgtaaacccatttattcagccatgaaaaacaggaatgaagtactgatacatgcttaaaaattatgctaagtgagaaaagccagttacaagagaccgtatactgtatggttccatttatattaaatgcccagaataggcaaatgatggagacacaatgagattagtgctatcaagggcctgggggcagagaatagggagtgattactaatggtatggggatccttctagtggtgataaaaatgttc

SEQ ID NO: 757519 - DNA, 624 bp, Homo sapiens
gggcctgggggcagagaatagggagtgattactaatggtatggggatccttctagtggtgataaaaatgttctaaaattagataatagtgatggttacacagttgtgactattataacaaccatcaatttatatattttaaaggggtaaatttttatgatatataaattatatttctttttaaaagcagctttattgagaatacttcatctacactacaactcactcatctaaagtatacaattcaatggtttttagtatactcaccaatatgggcaaccatcactacagtcaattttacaacattttcatcacttcaaaaagaaatgctgtacattttagctattacccctctctttccatccctccccatccttaaactactactaacctaatctctacctccasagatttccccattctggacatttctatgaatggaatcatataatctaatggtcttttgtggctgacttcttccacttagcatgacattgtcaaagttcattcatgttgcaggactactgattgctttcacagcctaatgaatattccattgtatggctataccaccttttgtttatccagtcatccactgatacctgggttgtgcccatattttggc

SEQ ID NO: 757520 - DNA, 588 bp, Homo sapiens
gatgctaaggaaagttttgcaataaatttttgtgtatgcacataatggaacatcatttagccattaaaatattttagaaaaatacttaatgatgcgaaaatgctcatgatacaatgtcaacactttaaaaacaggttatcaagcaatatacacactagaattctaattttgtgaaatatgcatatataggtatatggttatgtatgtgtattgaaaaggctgaagcattagcagggttttaacagaaagttggatgcttatgcatgatttttatttttgcgttagtcygtttggactgctataacaaaatattatagactaggtggcttttaaatatttagcatcatttctcacagttctggagactggaaggcccaaaatcaaagcaccagcaaatttggtatctcatgagggcccagccctcatagatggcacattgtatctgtgtcctcatatgttggaaggggccacttagctctctgggacttctttctaagggcagagcccttatgacctaatcaacttccaaaaggccccacctgttactactgtcgccttgggtttcaacttatgaatttgggagagaca

SEQ ID NO: 757521 - DNA, 698 bp, Homo sapiens
actatcacaagaacagcacagaaagatctgcccccataattcagtcacctcccaccaggttcctctcatgacatgtgagagttacaattcaagagatttgggtagggacacagccaaaccatatcattccacccctggcacctcccaaatctcatgtcctcagatttcaaaaccaatcatgccttcccaacagtcccctaaagtcttaaatcatttcagcattaactcaaaagtccacagtccaatgactyatctgagacaaggcaagtctcttccacctataagcctgtaaaatcaaagcaagttagttgcttcctagatacaatgggggtaaaggcacattgggtgtataggtattgggtaaatacagccattccaaatggaagaaattggccaaaacaaaggggctaaagtccccatgcaagtccaaaatccagcagggcagtcaaatctaaaaggtccaaaatgatctcctttgactctatatctcgcatctgggtcacgctgatgcaagaggtgggttcccatggtcttgggcagctctgctcctgtggctctgcagggtacagcctccctcccagctgctttcatgggctggcattgagtgtctgcagcttttccaggtacatagcgcaagctgtcagtgggatccaccattctggggtctggaggatggtggccttcttctcacacctcca

SEQ ID NO: 757522 - DNA, 698 bp, Homo sapiens
actatcacaagaacagcacagaaagatctgcccccataattcagtcacctcccaccaggttcctctcatgacatgtgagagttacaattcaagagatttgggtagggacacagccaaaccatatcattccacccctggcacctcccaaatctcatgtcctcagatttcaaaaccaatcatgccttcccaacagtcccctaaagtcttaaatcatttcagcattaactcaaaagtccacagtccaatgacttatctgagacaaggcaagtctcttccacctataagcctgtaaaatcaaagcaagttagttgcttcctagatacaatgggggtawaggcacattgggtgtataggtattgggtaaatacagccattccaaatggaagaaattggccaaaacaaaggggctaaagtccccatgcaagtccaaaatccagcagggcagtcaaatctaaaaggtccaaaatgatctcctttgactctatatctcgcatctgggtcacgctgatgcaagaggtgggttcccatggtcttgggcagctctgctcctgtggctctgcagggtacagcctccctcccagctgctttcatgggctggcattgagtgtctgcagcttttccaggtacatagcgcaagctgtcagtgggatccaccattctggggtctggaggatggtggccttcttctcacacctcca

SEQ ID NO: 757523 - DNA, 576 bp, Homo sapiens
cacactgatctgttgacttcactagctgggagaccagagacagaatagggtaggaaaagagagctttggggttatatacatttgcattcattggtcttcttatgacaagcctatattgctttcttaatttgaaaccacccaatgaaatggatgatttataataaatacatatttttcccaaagttaaaaaaaaaaagaagaaacaatgtcatccccagccccagcctcagagagggctcctggagcaatcttgaccaacaggtcagatgatcaaagccaaagggtggcctagtggtgggactatttctccccctcctccacaagcttctcttgttcagttttgcttttaaagaattccctgctgrttcctaagactcagactaagactgttaaggaattttatttttttctgcaggtttcagcagtagtgacttttcagacctgagtaatggagaagagcttcaggaaacctgcagctcatccctaagaagagggtcaggtaaagaagattaggatgccaagacttggcctgcagaatgtcaggaatgtgaattaaaagctgctgtttccagacgc

SEQ ID NO: 757524 - DNA, 647 bp, Homo sapiens
acagaaagagtttcactgactaaatgtatgtaattatattttgttgttgtagaagaaataaatagcaaatttgtggtattcttttttttaaacctgctctcattcctattaacactaagatcttagatttttatagtgataaatgggttgacatcattgtcrtttgtaattgtaaagcctcaaaagacaactgttcctactatgtaattatagacagaaataaaaacttcagatcaaacactctcaaacgttagtatagtttttggtagatgtccttcatcatgtaattggattatattgtgttatttcaatgtattttggcaaataatatcttattttgtcatcacaaaatttttaagacataggcaggctaactatacccattttggggtgaggaaatagatgtacagaagtattagggccaaaaaactaaagaaacaatagaaactagcaacccaggtgtctcacagtgggtgactgttgtatgtaacagacaggaggataagagctgtgtcatttaagtcaaagtccaaagaagatgcgcaaggaactcagaatattcacaggagactataccagtgcctgatgcaagaaagcttatttaacaaccactgtgtgtgtgtgtgtgtgtacacatgcatatattt

SEQ ID NO: 757525 - DNA, 647 bp, Homo sapiens
acagaaagagtttcactgactaaatgtatgtaattatattttgttgttgtagaagaaataaatagcaaatttgtggtattcttttttttaaacctgctctcattcctattaacactaagatcttagatttttatagtgataaatgggttgacatcattgtcgtttgtaattgtaaagcctcaaaagacaactgttcctactatgtaattatagacagaaataaaaacttcagatcaaacactctcaaacgttagtatagtttttggtagatgtccttcatcatgtaattggattatattgtgttatttcaatgtmttttggcaaataatatcttattttgtcatcacaaaatttttaagacataggcaggctaactatacccattttggggtgaggaaatagatgtacagaagtattagggccaaaaaactaaagaaacaatagaaactagcaacccaggtgtctcacagtgggtgactgttgtatgtaacagacaggaggataagagctgtgtcatttaagtcaaagtccaaagaagatgcgcaaggaactcagaatattcacaggagactataccagtgcctgatgcaagaaagcttatttaacaaccactgtgtgtgtgtgtgtgtgtacacatgcatatattt

SEQ ID NO: 757526 - DNA, 647 bp, Homo sapiens
acagaaagagtttcactgactaaatgtatgtaattatattttgttgttgtagaagaaataaatagcaaatttgtggtattcttttttttaaacctgctctcattcctattaacactaagatcttagatttttatagtgataaatgggttgacatcattgtcgtttgtaattgtaaagcctcaaaagacaactgttcctactatgtaattatagacagaaataaaaacttcagatcaaacactctcaaacgttagtatagtttttggtagatgtccttcatcatgtaattggattatattgtgttatttcaatgtattttggcaaataatatcttattttgtcatcacaaaatttttaagacataggcaggctaactatacccattttggggtgaggaaatagatgtacagaagtattagggccaaaaaactaaagaaacaatagaaactagcaacccaggtgtctcacrgtgggtgactgttgtatgtaacagacaggaggataagagctgtgtcatttaagtcaaagtccaaagaagatgcgcaaggaactcagaatattcacaggagactataccagtgcctgatgcaagaaagcttatttaacaaccactgtgtgtgtgtgtgtgtgtacacatgcatatattt

SEQ ID NO: 757527 - DNA, 552 bp, Homo sapiens
tggcagtgcaataggtttgtttacactgcatcatcacagggtctcacaaagctgcaatcaaggtacccaccagggccgcattctcatcttcagagtttgttcgggttcttggcatcgttcaattccttgcagatgtaggcttgaggtcctcaactcctagaggccagtcctcctcagaggccatttacaacatggctgtttgctccttcagggccaacagaaaagcattaccattttaagcctttaatctgattaagtcaggcccactcagatactcctcttttgatcagctcagatttagctgatttggaaccataattacatgtcaaaatctcttcatccttgtcatctaacataatttaatcattggacataacaccagagagcagagatcayggaggccatcttagaattctgcctaccaggcccctcagtgttgagcagagaactaaaactctgcccctccccaaacccccaccatctcacctcctctgccaggcaaacagctctgccctcagcccacctcctgtaggggagcacgggtcccgtctt

SEQ ID NO: 757528 - DNA, 603 bp, Homo sapiens
ttggaagccttcgaaatgcctggttgaggcgtttagatttatttcttaatcaataggaagccattaaagattcttaaacagatatttcaagattttcagtttgggttagaacatcttggttggaggaagatgagcctgatgagatgacaccagttctgattcttacatttaatggaaatgccagagagacttcattacttttggacaggaaaataaagtttaatgaccccactttggttatgggtagactgtggaatagtagttcactgttgggagacaaagtaagctgaggcaaaaatgaatgattgcccatatgagattttcagtgataccagtctagggaaggatagagtaaatagaaagatggtagaaactgcttgctctgtggagactwttagggatggcgaaaacatagtgtgcacggtcaatatcttattccatacccatagcagacattgttaattgattttggtatattttcctatagtctggagccctttttaatgcagtgctccaggcaggctactattagttgatcagagttggtgctggaattcaaacctgtttgtcatgcctgtagtaagaaatgaatgagaaatgggt

SEQ ID NO: 757529 - DNA, 603 bp, Homo sapiens
ttggaagccttcgaaatgcctggttgaggcgtttagatttatttcttaatcaataggaagccattaaagattcttaaacagatatttcaagattttcagtttgggttagaacatcttggttggaggaagatgagcctgatgagatgacaccagttctgattcttacatttaatggaaatgccagagagacttcattacttttggacaggaaaataaagtttaatgaccccactttggttatgggtagactgtggaatagtagttcactgttgggagacaaagtaagctgaggcaaaaatgaatgattgcccatatgagattttcagtgataccagtctagggaaggatagagtaaatagaaagatggtagaaactgcttgctctgtggagactattagggatggcraaaacatagtgtgcacggtcaatatcttattccatacccatagcagacattgttaattgattttggtatattttcctatagtctggagccctttttaatgcagtgctccaggcaggctactattagttgatcagagttggtgctggaattcaaacctgtttgtcatgcctgtagtaagaaatgaatgagaaatgggt

SEQ ID NO: 757530 - DNA, 549 bp, Homo sapiens
gcaacaggcagacatgagggccagagtcctgatgttaatgtaagttagctatagagtctgaacacagtctaagttctttgggcttacaaaacacttcaccatctgacccctgctttacccttctatcctaacctctcaccacttctcacccctcaaactgtaagctctaaccaaatttccatgcccgtrgctccattaacattccatgttgttttttgcccctggacttgcctaagttcttccctcttcttgacatgctttttgaggaaagaaaccctctgtctgccctacttttttcatcttttagaactcagtttagatttctctttttcaactgagtggaacctacagtaggctgtactgatgagatgcttcagctatgtatccatatagcatctgtgctttgctaccattgtaacacaacttggaaaggtatttgtctgtctactagactgtctttcccacttgattgcgggctctatgagaggaatgacagtgtctttcctgttcactgttgtatttccagtgcctagtacagcgcctggaggt

SEQ ID NO: 757531 - DNA, 590 bp, Homo sapiens
taaatagtacttctcttagaagcaaaatttattcaaagagctgtgctaacattcttaaatatctgctagctctaataaagaaatcaatgtactttatgttcttagctcccacaatttagcctaaatatttgccctggcatgcttatactggtccaagcgggcattaggttatagcctgttcctcttccttatttggaggtgtttttacctttctcagcattccacaagttacttcctccttcctttgttctcgtctgccygtgcctcttttaaaaagttctaagttgctagccaattgggacaaatacagaatgtgaggtcccgtactagccaatggaaaccggacatagcagtagggtggacgcgtcaggttataaatgactctgtctcctttgtttggtgtactcttgtggtaaaactgctggcgagtgtaccctttctgcagaaagtaaaaatggccttgctgaggaaattaaatttatgttcaagtgctatttctttatggcaccggggaacaagcatttctaacagtggtcatgggaagagtaaggagccaaatcatattgtgtggagaagaaagtgattcaaag

SEQ ID NO: 757532 - DNA, 519 bp, Homo sapiens
ttttatcagatgggctctttacaggattctgtgtctccctcattggtcttgagcacttgctccctggctgtacttggcaagggcttgagctggaaaagatgaccagactcccaccgcccagagggcgtcccctgcaggagagcttcatgcgcctggtggaggcctgtggggactcggagcaaagcatggacaactggctgagtcggctggacggctgccgctgactgtaacatgtaaagcaggcactgagcaccacctgcctggcagtccaggrcatggagaggtaaggccccattgacatagagaatagggtgagatgggcagggctctcaacccctggatgcaaaactgtgattcagtaagcaaatatagcctagaactgggtccattctattcctggcctggtacatggggctgaaggcacagacagcaccctgcttgtgacttcactggcccaactcatcctggaccccttgagcaagaccatggctggattccaggaactggtggagtggaagt

SEQ ID NO: 757533 - DNA, 415 bp, Homo sapiens
ctttcatttaaaacccttcacttgttcctcctcactgtctccagagaggttaaaactgggaaccattggacctatttggtctacagatgtactaatgtgtttggtttgtatacatgcttaaaataaaaaccaaaaagcaaaaactctgggttaactttttttttgagacaaaatctcattctgtcatctaggctggagtgcagtggtgcaatcacagctcaccgcagccttgacctcccaggctcaagtggtcctcccacctcagcctyccagatagctgggactacaggtgcaggccaggataccagctaatttttttcatattttttgtacagacaaggtttcttgggataacattttaaacctaggagattttacataataatctggatttccagcttctctttaaaaactc

SEQ ID NO: 757534 - DNA, 640 bp, Homo sapiens
cggccttttcccatcctgccctttcctctgcagctgttttgcttccttgtggccatcagagttcccttcccctggacagtctggagaaagacagaggctggggtttgggattgaagaccagaccccatctgagcccttcctccagccctgtaccagctcctactggcatggctgagctcagaccctcctgatttctgcctattatcccaggagcagttgctggcatggtgctcaccgtgataggaatttcactctgcatcacaagctcagtgagtaagacccaggggcaacagtctaccctttgagtgggccgaacccacttccagctctgctgcctccaggaagcccctgggccatgaagtgctggcagtgagyggatggacctagcacttcccctctctggccttagcttcctcctctcttatggggataacagctacctcatggatcacaataagagaacaagagtgaaagagttttgtaaccttcaagtgctgttcagctgcggggatttagcacaggagactctacgctcaccctcagcaacctttctgccccagcagctctcttcctgctaacatctcaggctcccagcccagccaccattactgtggcctgatctggactatcatggtggcag

SEQ ID NO: 757535 - DNA, 596 bp, Homo sapiens
acatttgtctaactcacacctaatttaacagcaattactttttagcaaatcgctttcatcaaatctttccaaagcattcaacttagttttcatagacacaacatcttgctttcttctaacactaatatttcaccagtttacataatgtttaatgaaactaagcaattacagtaacagatgcagccagtttaactagaaayggggacaaatacacctggttgttggcaagtgtccagctcattggaaagaagcagaagtccatgggtatcctggtgatcagcatactgactggtgggggaaactctgttctcaccgaaatcagaaggaatggagagtaccggtttaatacggtgtgtctgttgagaagcggaggctggttaccggacgcaggtggctatggaaggtttatttacttatttatttatttattttttgagacagaatctcactcttgtcccccaggccggagtgcagtggtgcaatctcggctcactgcaacctccgcctcccaggttcaagcaattctcctgcctttgcctccagagtagctgagattacaggcatgtaccactacagccggataattttttgtattt

SEQ ID NO: 757536 - DNA, 596 bp, Homo sapiens
acatttgtctaactcacacctaatttaacagcaattactttttagcaaatcgctttcatcaaatctttccaaagcattcaacttagttttcatagacacaacatcttgctttcttctaacactaatatttcaccagtttacataatgtttaatgaaactaagcaattacagtaacagatgcagccagtttaactagaaacggggacaaatacacctggttgttggcaagtgtccagctcattggaaagaagcagaagtccatgggtatcctggtgatcagcatactgactggtgggggaaactctgttctcaccgaaatcagaaggaatggagagtaccggtttaatacggtgtgtctgttgagaagcggaggctggttaccggacgcargtggctatggaaggtttatttacttatttatttatttattttttgagacagaatctcactcttgtcccccaggccggagtgcagtggtgcaatctcggctcactgcaacctccgcctcccaggttcaagcaattctcctgcctttgcctccagagtagctgagattacaggcatgtaccactacagccggataattttttgtattt

SEQ ID NO: 757537 - DNA, 596 bp, Homo sapiens
acatttgtctaactcacacctaatttaacagcaattactttttagcaaatcgctttcatcaaatctttccaaagcattcaacttagttttcatagacacaacatcttgctttcttctaacactaatatttcaccagtttacataatgtttaatgaaactaagcaattacagtaacagatgcagccagtttaactagaaacggggacaaatacacctggttgttggcaagtgtccagctcattggaaagaagcagaagtccatgggtatcctggtgatcagcatactgactggtgggggaaactctgttctcaccgaaatcagaaggaatggagagtaccggtttaatacggtgtgtctgttgagaagcggaggctggttaccggacgcaggtggctatggaaggtttatttacttatttatttatttattttttgagacagartctcactcttgtcccccaggccggagtgcagtggtgcaatctcggctcactgcaacctccgcctcccaggttcaagcaattctcctgcctttgcctccagagtagctgagattacaggcatgtaccactacagccggataattttttgtattt

SEQ ID NO: 757538 - DNA, 633 bp, Homo sapiens
ccctaattttcagcactgtccacataggacctttgttctctagtttttacaacctcaacgtctactaatatatattaccaactctattctctggtcataggaaacttttgtctttactattgctatgatctgtctaggccctatttcccagcactggtggtttttactggaataactcttcttcttttctgctcctcttatatcaggagaaactcaagttatctgtaaagaatctccaagacagtgtgagcttttgagttgtgactaaatgcttccttacattctccttctctcccacaaaatttattgagcatctattatgttctacacataaagctgggtactgattatattagctagtaaacgttgggacccttattcccaaggagactgcagttatctttccttctcttccttcttccatattgccattgcacttggaccataccagatcaaaytgaagctacttatgcccacatctatattcatgtttgattcaactccatagcttccatacctggtacaacattcagtaaagatttgttaagtttttctaaaatcagtcatgtcaagatagacaaggcatgtttcatcttgaattaataataagtaaagtaattcataagcaagata

SEQ ID NO: 757539 - DNA, 633 bp, Homo sapiens
ctattaaaagtgcattacaggccaggtgcagtggcttacctctgtaatgccagcactttgggaggctgagttgggtggatcgcttgaggccaggagttcaagaccagtctggctaacatggtgaaagtgtctctactaaaatacaaaaaactagctgggtgtggtggtgcacgcctataatcccagctactcaggaggctgaggtactcttgatctcagaaggtggaggttgccgtgagccaagattacagcacygcactctagcctgagcgacacagcgggactcggtctcaaaacaaacaaacaaaaaaccaaaaaagtgcattgcaaatgaattcttctttctctacaaatacaagagagatggccattcatgggggctgttgtgtctcatatgtatttttcaaggaagaacaatattactcaatctggcagttgcttctataaagcgagaaagacctacaatacatatctcttaaattcaccaagcattctctgtattcggttcatgtaactgcaatctctattcatgtttttaaggctagagatgccctcaatacacacatccacataaaaatgggctgtcacctgtcactgcatctgctcacactctctgaatttatcactaacttc

SEQ ID NO: 757540 - DNA, 611 bp, Homo sapiens
aaagacctagaaatggaaataacattcgacccagcaatgtcattactgatacccaaaagaatataaattattttattataaagacacatgtacatatatgttcattgcagcactattcacaatagcaaacacatggaattaacctaaatgctcaccaatagtagattggataaagagaatgtggtacctatataccatgaaatactatgcagccataaaaaagaataagatcatgccatttgcaggaacatgggtagagctggaggccattatccttagcaaactaatgcaggaacagaaagccaaatactgcatgttctaacttacaagtgggagctaaatgatgagaaaacatggacacatcatgggggaacaacacacactgrggcatatcagaagctggagggtaggagcaggaacagaaagaggaagaacaactaatgggtactaggcttaatatctgggtgacaaaataatctgtataacaaactcccataacacaagtgtacctatataacaaacctgcacatgtatccctgaacttaacataaaagttaaaaaaacaaacaaacaaaacagaaatgattaaacaggagccatgcatttttggg

SEQ ID NO: 757541 - DNA, 582 bp, Homo sapiens
tgactgaaagtcgagcctcttcccagtccattgccccatcatttatgccatgtggaaattgctctgccaaagataaagtgttgactacagtctaagtgatgggcagaaaaaccatcactcaactcataatggtgagttgtactgagaatatgctgtcttaggtttaaagtagcatatttaagagcagaatcttcagatgacacaaactcaaacacgcttctgttacgaatgtayaaatcagttggaggaaagtaaggccacctctttcaaatactttgctcaatttcaaatttattgttttttaagattaaaaggttgtaaaatacttcctcttccccaacgctttatctctgcaaggttaagaattgtattgagggtttacaaataggagcttggtagattattttctaattctcagatgatttttttctgatttgtgagctatgggtcagtgtccagattgactatgtcctactgtgacctagaatcaaacattggagtccaacagcatcactcactccctgcttattagcaacctaattacctaaaaaaagaaaaaaaaaaaaaaaaaaaaactggaga

SEQ ID NO: 757542 - DNA, 588 bp, Homo sapiens
gtggctcctttatttgggacagctgtgaacgcggctccaggagttgccttcatgaaatgaagcatatgatgacaactggaagaagaggacgagtacatattgctaaaggtttaatggggatagtaatggccaagtggaaaaaaacctgtgggtggggatgaattggtgctgactggtcatgccacgaggtctgtatttcaggaaaccactaaytggggcagctcctctggagaggactgggcctgagtcagatctgccctgtggattgcaagtcctctgtgaagtttgtgctctcaggtgcatcagaagcagaccctctccacagtgctggctcctcctgatggtagaaagcttaggcttgtgtatcatgatggttttttgtcttcctcgatggacatttattgagtttggatagtatgctgtggacattaagagtatatagattctggagttaggcttcctgggttcgaatcctggctgtatttcttattacctgtgtaagcttgggcaaccatttaagctgtttgtgccttgatcttttttacttctaacacggatgtggtaataataataataataattcccaca

SEQ ID NO: 757543 - DNA, 588 bp, Homo sapiens
gtggctcctttatttgggacagctgtgaacgcggctccaggagttgccttcatgaaatgaagcatatgatgacaactggaagaagaggacgagtacatattgctaaaggtttaatggggatagtaatggccaagtggaaaaaaacctgtgggtggggatgaattggtgctgactggtcatgccacgaggtctgtatttcaggaaaccactaattggggcrgctcctctggagaggactgggcctgagtcagatctgccctgtggattgcaagtcctctgtgaagtttgtgctctcaggtgcatcagaagcagaccctctccacagtgctggctcctcctgatggtagaaagcttaggcttgtgtatcatgatggttttttgtcttcctcgatggacatttattgagtttggatagtatgctgtggacattaagagtatatagattctggagttaggcttcctgggttcgaatcctggctgtatttcttattacctgtgtaagcttgggcaaccatttaagctgtttgtgccttgatcttttttacttctaacacggatgtggtaataataataataataattcccaca

SEQ ID NO: 757544 - DNA, 613 bp, Homo sapiens
cctacctatagctatgaatagtctaagttctgtttcttccctgacttaagactccagaaagctaactaaccatattttgccttgttgtgagttggtgagtccattgtttgcctagtttgaaatctgtacatctaattgttctttttaaaagacatttatctcgtgttttcagctcccctttggcccttggtctttagaggtatctgatgtttccacttcctgagccttttgggatttttcagtgtggcaagactctacttcctcctttacaagacaggctttagtcttttctgactcacctaaatctattgccaggtgtccagtttaaaaaattttgttggcatcttattcttttatrtttttccttccaatagttcgtgggtttatgatttgtctgtttatataatgtcatttcaatgggactacaggaaggaagagagatgaatttatgtgttcacatgtttacatatgtttattcatttaaaaaataattattagataagtaccctgagtgagacactcctatagacacttggtaatcaccaaaaaattacttatcaatgtgtgcaaaaaattgtaattgttattttaaaattacattactaattgtgat

SEQ ID NO: 757545 - DNA, 315 bp, Homo sapiens
cgggttcatgccattctcctgcctcagcctcctgagtagctgggactacaggcacccgccaccaggcctggctaattttttgtatttttctggtagagatggggtttcatcgtgttagccaggatggtctcgatctcctgacatcgtgatccacctgyctcggcctcccaaagtgctgggattataggcatgagcgacggcacttggccagcttaatactttcaagattgatctgtgccatgcatggagaggaatttcatttatttttaaggagatgaataatatttcataatatatatacaccacattttgttt

SEQ ID NO: 757546 - DNA, 620 bp, Homo sapiens
gattgatgaagtttctaattctgcacttggaggaaggtacgcctctccaagaatgagaaattaacttttctttaataatttgacctattcttgacaccactgttaacactctgagctcttaacataaaatgccatttaccaagagtaacagtatttacagcaggattgagtttgctctttttatttattttcaagttatccagttagcatgttattgccataaagcctaattataaattaacccaatttaattttgtggagttgtgatttgatccagatcatttgagtctagatrttttgcaatacatcttatcctttaaaaaaagttacattagccctactgaagctccaaaaaattcaatattccatttaaaatatctgaattcttttaggatcccttcaatgctgaaaatccatcattcagatggactgtataaatgaacatttagtactttgagtggcatccttacatcctgagttgaactggcttctttcagcccctattatcaatggggagaacactgccacctcatgtgttagctctgtctgtaggcattcatcatgagcagagggtgatggtgatggggtggtttgaagccaagcaatcaaaggaagaagat

SEQ ID NO: 757547 - DNA, 458 bp, Homo sapiens
catttagaagtgtgaaacataaaaggcttgctaactctcccatcaaaccaaaattgagttttgaataagacctctgggaaaagattttaaaattcactaactcttctatctctgattctagataaacaggttggaataagccttaggaccataatttaatatcacattcaamtttaaagaggcatatacaatgatgatagttattttcaagttaatcacttaaaatatttttcaaatttcagtaacaagaacaaattacagttaaaataaatactaaaataaatacttagctgtattcgatgttaaaacctttacttctgtaattttccttcagatataattattcttctccaatgacaagtgtgaaataatcttaacttaaaaaatttagtggctgtttctacagatatcaactaacttgttcatattaattaacttattagtttttaatcaggtat

SEQ ID NO: 757548 - DNA, 613 bp, Homo sapiens
tctgaatagagatttttaaaaaatgtagacatatgccattctttcttataaaagatagtttgggctgaaaatggagtatggcagacttctagaattattccataacatttaatttctgcgacaatctaaggcttaggatcgaggcataagttactatgagcctgaaaatgctggtggtctgtttggcagtacctgatgagatgaatattatagatctgcttgcttggtttcagtggtttcattttctctttaaggttacaaaaaagtagaaatttaggaccataagtttgagcacttagatttgagtytgatggatatgtaaaaataaatgaaaattataaaataatagataagaataaatattaatttgaagagtcatgagtaaaaaataggcagaaattaccagcagccttattactatggcattccacaaaattatttacacagttgcttccaaaatgcgaagtttggtatgattgactgttaactattatatgaaaattaaccatgtttaggtaaaagacacaaatataaatttgcttcagtcttcactagactatttgataacttcagagaatatcctttgttttgtatttgctcagaacatttcctt

SEQ ID NO: 757549 - DNA, 613 bp, Homo sapiens
tctgaatagagatttttaaaaaatgtagacatatgccattctttcttataaaagatagtttgggctgaaaatggagtatggcagacttctagaattattccataacatttaatttctgcgacaatctaaggcttaggatcgaggcataagttactatgagcctgaaaatgctggtggtctgtttggcagtacctgatgagatgaatattatagatctgcttgcttggtttcagtggtttcattttctctttaaggttacaaaaaagtagaaatttaggaccataagtttgagcacttagatttgagtctgatggatatgtaaaaataaatgaaaattataaaataatagataagaatwaatattaatttgaagagtcatgagtaaaaaataggcagaaattaccagcagccttattactatggcattccacaaaattatttacacagttgcttccaaaatgcgaagtttggtatgattgactgttaactattatatgaaaattaaccatgtttaggtaaaagacacaaatataaatttgcttcagtcttcactagactatttgataacttcagagaatatcctttgttttgtatttgctcagaacatttcctt

SEQ ID NO: 757550 - DNA, 613 bp, Homo sapiens
tctgaatagagatttttaaaaaatgtagacatatgccattctttcttataaaagatagtttgggctgaaaatggagtatggcagacttctagaattattccataacatttaatttctgcgacaatctaaggcttaggatcgaggcataagttactatgagcctgaaaatgctggtggtctgtttggcagtacctgatgagatgaatattatagatctgcttgcttggtttcagtggtttcattttctctttaaggttacaaaaaagtagaaatttaggaccataagtttgagcacttagatttgagtctgatggatatgtaaaaataaatgaaaattataaaataatagataagaataaatattwatttgaagagtcatgagtaaaaaataggcagaaattaccagcagccttattactatggcattccacaaaattatttacacagttgcttccaaaatgcgaagtttggtatgattgactgttaactattatatgaaaattaaccatgtttaggtaaaagacacaaatataaatttgcttcagtcttcactagactatttgataacttcagagaatatcctttgttttgtatttgctcagaacatttcctt

SEQ ID NO: 757551 - DNA, 512 bp, Homo sapiens
gatggacttggccaattaagctttgctagaacactcctctctgatacattttgagtttctttatggagtgttttcaagtttttaatatttataattttaattaggatagtttcagacccacagtcctgcataaaattagtaaaattagctatgtagaagataatagagtcccatttagtaaatggttaaattctaacaycattttatctttattccataaatacctctattaaaatggcatcatactgtggcataaagatagtagttctgcaatagctaagaatttttttttgaaaaagtcaacattttcagactaggtatttaaggaatatgttattgactagtttaatgctagttgaataagtgaaatgacaacatgagagagaaatagtagcactgtagaagttcacattttttttttcaatccagacatatttattcaaggtatttgtttgctttatattcagacaaccttcatattcattatgctaggtgtctttctataatttgaa

SEQ ID NO: 757552 - DNA, 553 bp, Homo sapiens
taatttgaacaactgtaaagataatttggcaaatttgagcatggactggatactagacgatattgttaatattagttgtaataatgatcatgtaaatatgaaagtcattcgccattagaaatatattttgaagaatttatagtttctgattttttaaatactttagaaaaatggggaagatagatgaaataaaattgcaagatgttaataattattgaagstagatgatggacacacagtttattgtgttatttattttctacttttgtttgaaaaataccatgataaaaaactgtttttaatttattgattctgggcacttctatcttataactactagtgactgctccccttgtacaaacattgcagaaactgtattcttcagcatgtgattcatatcacataaatttccattgttctttttttaagtgaaatttattctttcatcagacctggtacatttacagacagagtttcaatatgttctgcttcatatgctttcttaatccattaaataatattatataagtgagtttcagatttagattttctt

SEQ ID NO: 757553 - DNA, 597 bp, Homo sapiens
gacaaatctacagatcagtaaactgcataaatcctaaataggctaaattcaaagaaatctaagccaagatacaccataattaaactttggaaaattagacaataaaaaatagtttcatttttgaaagcagccagagaaaaataaaaccttacctatggggaaaaactatttgaataatagtggatttctcatagaaaccatagaggtcagaagtggtacaatagttctcaagtgctgatattaaaaataaaacaaactgtcaactgattattttatccagcaaaaatattctttaggaataaaggggaaattaacattttcagatgaaggaaaactaagcaaacatattgccagcatacctaccctaaaataatggctaaaaaaattgtaaacagaaaaaagtggtgatagaaggaactttgggatatcagaaagaacamagtaggcaaaaacataaatacgataaactttccttctccacttgagttttctaaattatatttactattgaagcagaaagtataatactatctgatgtagttttaaatacatgtaaataagatatttaaaacaattatatcataaataggagaggat

SEQ ID NO: 757554 - DNA, 646 bp, Homo sapiens
agttccgggtgggcgtgggctccgtgggccctgcactcggagcccccggccaggggcagtgaggggcttagcacccgggccagcagctgtggtgggtacgccaggtcccccagcagtgctggccaccagccaccagccgccggcgcagtgctcgaattcttgtggggcctccgctgcctctccgtggggcagggctcggggactgcagcccgccatgcctgagcctccccctcctgcattgggctcctgtgtgacccaagtctccccgatgagtgctgccccctgctctgcggcacccgatcccatctaccgcccaagggctgaggagcgcaggcgcacagcgcagcactggcaggcagctccgcctgcagccccagtgtagtgcgggatccactaggtgaagccagctgggctcctgagtctagtggggacttggagaacytttatgtctagctaagggattgtaaatacaccaatcaactctctctaaaacagaccaatccgctctctgtaaaatggaccaatcagcaggatgtgggtggggccagataagggaatacaagcaggctgcgccagccagcagtgacaacctgcagggtccgcttccacgctgtggaagctttgttctttcactctgcaataaatc

SEQ ID NO: 757555 - DNA, 574 bp, Homo sapiens
cccagtgtagtgcgggatccactaggtgaagccagctgggctcctgagtctagtggggacttggagaacctttatgtctagctaagggattgtaaatacaccaatcaactctctctaaaacagaccaatccgctctctgtaaaatggaccaatcagcaggatgtgggtggggccagataagggaatacaagcaggctgcgccagccagcagtgacaacctgcagggtccgcttccacgctgtggaagctttgttctttcactctgcaataaatcttgctactgctcactgtttgggtctgcactgcctttatgagctgtaacactcaccgggaaggtctgcagcttcactcctgagccagcgagaccacgaacccaccagaaggaagaaactctgaacacatccgaacatcagaaggaacaaactccggacaygccgcctttaagaactgtaacattcaccgcgagggtccgcggcttcattcttgaagtcagtgagaccaagaacccaccatttccggacacagtaggaagggaggtgctgagtgaagggggaagagtccgttataaaatcat

SEQ ID NO: 757556 - DNA, 574 bp, Homo sapiens
cccagtgtagtgcgggatccactaggtgaagccagctgggctcctgagtctagtggggacttggagaacctttatgtctagctaagggattgtaaatacaccaatcaactctctctaaaacagaccaatccgctctctgtaaaatggaccaatcagcaggatgtgggtggggccagataagggaatacaagcaggctgcgccagccagcagtgacaacctgcagggtccgcttccacgctgtggaagctttgttctttcactctgcaataaatcttgctactgctcactgtttgggtctgcactgcctttatgagctgtaacactcaccgggaaggtctgcagcttcactcctgagccagcgagaccacgaacccaccagaaggaagaaactctgaacacatccgaacatcagaaggaacaaactccggacatgcygcctttaagaactgtaacattcaccgcgagggtccgcggcttcattcttgaagtcagtgagaccaagaacccaccatttccggacacagtaggaagggaggtgctgagtgaagggggaagagtccgttataaaatcat

SEQ ID NO: 757557 - DNA, 617 bp, Homo sapiens
ctttcaaagtttgtgaattctcaatgatcaaaacacattaacatacaaataatcttagcattcttaacacttcccaaagtaaggtgattattttttcatacctgagtaaatcctaaaaaaaaaagaataccacaaatatggggccagatatttgtaaaatgtaatgtttcatcacaaaatgcagactttcctagctggaggtactcttaggactgaagaatgatataactcattttstaaaaatttactttgccacctcagtgcatagccagtacctccagtaggggagcaactttctactcagatgatcaaagtgtttggattagggcctctccaagaatttgaaataaagggtaaagctgggagtcaggatcccagaatttaagcaagaactcagggtaaaaggaaggtgtggatgtcaagaacacacaaaggaaccagggagagaggagtttgactctggcctttcctgagtgacatcatcccagctgcttgagctctctgagacacctgtacaatagggatgccaacacttaccccacagggctgccctcaggatgaaggagccaccgcacatgatgtgcttaagtgcagtgactgtgaatgatggctttcac

SEQ ID NO: 757558 - DNA, 617 bp, Homo sapiens
ctttcaaagtttgtgaattctcaatgatcaaaacacattaacatacaaataatcttagcattcttaacacttcccaaagtaaggtgattattttttcatacctgagtaaatcctaaaaaaaaaagaataccacaaatatggggccagatatttgtaaaatgtaatgtttcatcacaaaatgcagactttcctagctggaggtactcttaggactgaagaatgatataactcattttgtaaaaatttactttgccacctcagtgcatagccagtacctccagtaggggagcaactttctactcagatgatcaaagtgtttggattagggcctctccaaraatttgaaataaagggtaaagctgggagtcaggatcccagaatttaagcaagaactcagggtaaaaggaaggtgtggatgtcaagaacacacaaaggaaccagggagagaggagtttgactctggcctttcctgagtgacatcatcccagctgcttgagctctctgagacacctgtacaatagggatgccaacacttaccccacagggctgccctcaggatgaaggagccaccgcacatgatgtgcttaagtgcagtgactgtgaatgatggctttcac

SEQ ID NO: 757559 - DNA, 590 bp, Homo sapiens
ggatcctagaggattttctacctagataaccgtgtcatcttgaataaagacaacttcacatcttcttttaaaatctagatgcctttcattattttcgtcggtttatcaagcctccagtacattgttacttgttctttatcttagagaaaaaacattcagtcttttactattaagtgtgatgttagctgttacttgyaggctttttgtaaatgcctttattaggttcaggatgttcctttctctcccttgtttgccgtgactttttttttttaaggaaatggatattgtatttctcaaaacttcttctgcatctatgcagaaaataatgatttttttaaagtctattattgtgataaattacatttgattttcatgtgcaaactaactctgcattccttgaatagacactacttcatcatagtgtattattcattttatacattattggatgctacttgcaaatattttgttagaaataattatatctatgttcatgagagacatgcgtccgtaggatggagcccaaaaatgccctcccagttccagcctctactgcaggttaaaccactgccatttacaaggagagatgg

SEQ ID NO: 757560 - DNA, 570 bp, Homo sapiens
tcaggcagagcttaaacctttcaaccaactgccagtcacgaatgtttaaatccacctatgaccagtaagccccgccttcgagatatcccactttttcaagtcaaacaaatgtatacctgacatgtatcaatttatgtctttggctgtaatgtttgtctctctaaaatgtataaatccaagctgtaaccaaccaccttgggcacaagttctcaggacctcctgaggctgtgttacaggtcattatccttaaccttggcaaaataaacttttaacttgattgagacccgtttcagatactttttgatttaaaatacaaaacrtatcttctcaaaataatagtcctctgcctactctcaaatacttcatatttaattttttcatgggacctaatggctgaacatactatggttaattataaagcttgaagagcacataagcctaagagtgggaacaaggtgacatacattttctaaggtataaatggttcctgacaaattttttctttcttctttttattttttcttttgaaaggagattttacaatgtaatgtgacaaagaatgataaatag

SEQ ID NO: 757561 - DNA, 563 bp, Homo sapiens
tgtctgtaatatgccaaaaactaagtctgtttctttcaagagctggcaccacactgataatttgtaagtacaaagtacgcaactgcaattcctgtttcaccctgaacttgaactaaagacgtctttgattggcatgaatgtggtgccaagcaaggagactccactaatactgaggggaaaaaaaacagacgagtcttcttcattcttgaataaacataccattcaattcacgtaaaggcaagttaatttcagaaaggttcacttctgttttcttgagataacaagatgcaaagcatttacttaaactcggatagtcgataaaattcttcagacattatcatcattggctgtgtatcttttaaacttaacatattcaaatagaatgcttttttggttatttgtaaaactcatctttgctktaccttttgagaacaagtatggaatcattgcttttcccatttaacatttgttaagtttgactgaatcattggtaaaacagtttccttgtgtaagataatgaaaatcctggactactacctttagcttcttattaaagaatgttt

SEQ ID NO: 757562 - DNA, 625 bp, Homo sapiens
gaagtccagccaacttagccatttagtccctcaagaatatgcaaagaacagctaaaactcaacaataacaaaacaacgaatactcattattagcaagcagagtttcattgatttagaaatgcattcatatgcaatttgtatatagtgctttatttaaacatttatggaaaataattacagaactaattcacatattatgtcttaaatacagacatgtgcctttagaataaagataatttcaagatattatctatctttytacctgaaatcaatgaagccgtttatacagagtttagagaactaagtttgctttctaagaatgtggaaagaaacaaactagaagaaaataaaagcagtaaatttcgttagcccttgatttagctgaaatgaactataaaaattttgaataaaggcagaaattacttttttgactattgtatataatatctatttgtagagttccctgtaccttactggctttttttttttttaatggaaaacattgtattgcttaaaagtaatccaggattctgaggctgtcttagccactactattaataatagaactctgactgagggcacacttggtgagaaaaaaatggattgagccttctgatagcagtgg

SEQ ID NO: 757563 - DNA, 610 bp, Homo sapiens
tagatgtttgtctgtttctaggtattgaagagttaggtatttattttagtcttcactgtctcagcttgtttgtacccatccttcttgggaagcctttcagatttttgaaaggacttgggagttgtgatctaagctgtatctgctttagggggcacccaaagcccggtaataatatggtttttgcagactcatacaggtactactgtgatggtcttagacaagatgtgagagaattttctggattaccaggcagagactcttgttctcttgccttactttctcccaaacaaatggaatatctctctgttcagagtcaccagaacctgggggtgaagtaacacaagcaccccatggccaccacaactatgactgcactgggtcagacckgaagccagcacagcactgggtctggccccaggcttgctgtaacaactccctggctatttcctatgttcactggggctcaacaataagtcagtggcaaagtcagtcttcctttcagcatggtgaatcctctgatttcctgggtgggtccaagggtgctttctgggagccagggagtagggtcaaaaaccttagaagtctatctggtgttctattttactgctgg

SEQ ID NO: 757564 - DNA, 610 bp, Homo sapiens
tagatgtttgtctgtttctaggtattgaagagttaggtatttattttagtcttcactgtctcagcttgtttgtacccatccttcttgggaagcctttcagatttttgaaaggacttgggagttgtgatctaagctgtatctgctttagggggcacccaaagcccggtaataatatggtttttgcagactcatacaggtactactgtgatggtcttagacaagatgtgagagaattttctggattaccaggcagagactcttgttctcttgccttactttctcccaaacaaatggaatatctctctgttcagagtcaccagaacctgggggtgaagtaacacaagcaccccatggccaccacaactatgactgcactgggtcagacctgaagccagcacagcactgggtytggccccaggcttgctgtaacaactccctggctatttcctatgttcactggggctcaacaataagtcagtggcaaagtcagtcttcctttcagcatggtgaatcctctgatttcctgggtgggtccaagggtgctttctgggagccagggagtagggtcaaaaaccttagaagtctatctggtgttctattttactgctgg

SEQ ID NO: 757565 - DNA, 588 bp, Homo sapiens
ggaaaattcccaaacctcttgacttgcacatactattatatgaccaagataatacaaatatgttaaacattttgataatcattcaacataaaatacaaaatcttaaagagaattcatctcttaatgataagaatgaggctyttttaaattttaatgtgtgtttaaagatgattattacttattgctggaatgacggaagggccagcatcaatcgtcttccagttttacatgttatgtatgtatgcaccatacagaggtagataagaagaaaaagagtttaattacagcaatgtcactcgttttttgaatatcttctggatgctataccacaaacgttacatgtgctttatcatcaaaagctacttttattgatctatcaatgagcaacttgattaagttttttttcagttttgtcaaaagcacagagttagaaactgacttgacaagggatttgttagcttctcattagaatcattcactttggcaacaataaaatcaatattttgaattatcctttgcttggcaataggaaagtttccacacccagtgcaatcagtgcccaataatcaggttcaggatgattgagaa

SEQ ID NO: 757566 - DNA, 615 bp, Homo sapiens
tttcatattttcgtgctggccatttgtgtgtcttctttggagaaacgcctaatcaagtcatttgcctgttgcttaattttttttattgctattgagttatagaacaggttatatacctatcagctatttgtatgtattctgtggagaaatgtctaatcaagtcctttgcctattgtttaattggattattattttgttattattgagtcataggacttgtgtattttggatattaaccccttatcaaaaagawggttttcaaatattctctcccattctgtaggttgtatttttactctgctgattttttcctttgctgtgcatggtctttagtttaatgtagtcccacctgcctatttttgctgttgatgcctgtgcttttgttgtcatatccaataaattattgccaagaccaatgttatgaagatttaaccttatgttttcttctaatagttttacagcttcaggtgttatgtttagctctttatccatttggagttgatttttgtatagataagggtccagtttcattcttctgtatgtagatattcagttttcctagcaccatttattgaaaagactatcctttccccattatgtagtttggcacccttg

SEQ ID NO: 757567 - DNA, 655 bp, Homo sapiens
tttggagtgtttaatcacaaaccacccaccctgtctctctccctcactctatcagctagctgagaactagattttgctccctgttcattgaatacctagtgtttgtttacaaagtgcttagaatacaagcagacaattttcttccttaggaaagacaaagaaaaataataataatagcaataatattttacatttatacattcttgaagtttacacacatatgatctaatttgctaattacatgttggggatttctatttttactagtaagtaaactgatgcctggaaagctttygtagcctgctcagtatcatcagacaggtttgtagctgagcttaaaataaactgaaggattcctcagttttactcaagtcatctttccatcacccctttctaccactgtgaacaatttagtaatgatgacttgtcatgaatctacctaacagactttgatacaactttgattgtgccatattatgttttgaataaagcagtattaatagatttaccttgaaaaaactatatatagaatgtcaagataaatagatgtcactcttaatttctcccaatttatagtagctaaatcccatatagaaataagaacgtcgtattaggattccataaagactgaagtttcgtaggaaaaactctaaac

SEQ ID NO: 757568 - DNA, 692 bp, Homo sapiens
attctcctgcctcagcctcccaagtagctgggattacagactcccgccaccacgcccggctaattttttgtatttttagtagagacagagtttcaccatgttgggcaggctggtcttgaacttctgacctcaggtgatccacccacctygacctcccaaagtgctggaattacaggcgtgagccactgcatccagccaatgctttaaacatttaatgctctttatataatttaaatctgttcatttataaaaccccaaatttttgaacttataaaattccatctgctcttcctaccttaacaaaactcaaatgcgataatatatacaaaagtataacttgtcctatataatgttattgcttatatgttgttaccatcactaatatttttttatctttaagagtataactaccatttatagttatagtcccatttagactataactatataccatttggatctatagaagaaaattctgtttatctaacacttcagtaaaaattgaacttgaattacattattggaatatccaagaaaacaaagaaagcagatgaggagaaaaaataaaacaaaaggaagcactagaagaaaactagacacaacaagtagacatgaagaaagaatgctctatttgactgtagtattaatatgaagaaaacaaaatgaaagtttaaaataatcagagagggagg

SEQ ID NO: 757569 - DNA, 692 bp, Homo sapiens
attctcctgcctcagcctcccaagtagctgggattacagactcccgccaccacgcccggctaattttttgtatttttagtagagacagagtttcaccatgttgggcaggctggtcttgaacttctgacctcaggtgatccacccacctcgacctcccaaagtgctggaattacaggcgtgagccactgcatccagccaatgctttaaacatttaatgctctttatataatttaaatctgttcatttataaaaccccaaatttttgaacttataaaattccatctgctcttcctaccttaacaaaactcaaatgcgataatatatacaaaagtataacttgtcctatataatgttattgcttatatgttrttaccatcactaatatttttttatctttaagagtataactaccatttatagttatagtcccatttagactataactatataccatttggatctatagaagaaaattctgtttatctaacacttcagtaaaaattgaacttgaattacattattggaatatccaagaaaacaaagaaagcagatgaggagaaaaaataaaacaaaaggaagcactagaagaaaactagacacaacaagtagacatgaagaaagaatgctctatttgactgtagtattaatatgaagaaaacaaaatgaaagtttaaaataatcagagagggagg

SEQ ID NO: 757570 - DNA, 692 bp, Homo sapiens
attctcctgcctcagcctcccaagtagctgggattacagactcccgccaccacgcccggctaattttttgtatttttagtagagacagagtttcaccatgttgggcaggctggtcttgaacttctgacctcaggtgatccacccacctcgacctcccaaagtgctggaattacaggcgtgagccactgcatccagccaatgctttaaacatttaatgctctttatataatttaaatctgttcatttataaaaccccaaatttttgaacttataaaattccatctgctcttcctaccttaacaaaactcaaatgcgataatatatacaaaagtataacttgtcctatataatgttattgcttatatgttgttaccatcactaatatttttttatctttaagagtataactaccatttatagttatagtcccatttagactataactatataccatttggatctatagaagaaaattctgtttatctaacacttcagtaaaaattgaacttgaattacattattggaatmtccaagaaaacaaagaaagcagatgaggagaaaaaataaaacaaaaggaagcactagaagaaaactagacacaacaagtagacatgaagaaagaatgctctatttgactgtagtattaatatgaagaaaacaaaatgaaagtttaaaataatcagagagggagg

SEQ ID NO: 757571 - DNA, 603 bp, Homo sapiens
ttttgatatgaaattaatatttattattaaacttgcattttagcttttatgatgtttgtcagttttgaatatttgtgaagaaaaatatcgtgattgagaatagatatagaataattctagtgtttatattttacatatgttgaaatttacattttggataaaatattaacatttactaatctctgagtacatttacattttatttttggtcagctggacagttataaatataaaatatatatataaaaatattgactataaaatatggcaatgctgatgaaatgaaggtaaatcatgaagtaaatacatagtaatgtattaagtgtatattgtctctaatcatccaatcatcattcttttataagtacaacacccagacatgcacaataataatamatttggtcttttttgatatttttggactgactttgactttcagtcacctaaaagctatacacgtttttggcttgaaggtatatttatcaatatagaagttatatattaatttattatatatgtgtttattagtttatgatgttcaactctttaaatgtatgataaatcggtttccttttttatttctcactcagtcaccataaaagt

SEQ ID NO: 757572 - DNA, 634 bp, Homo sapiens
gggagagacaaggttaaattaaatgtagtcctaaccctccataagcttacaatgaggagagagagatatacataaaatgataacaagcagatataaagtgataatcctcatataccataagcttgtcactttaccaaaaatgatccaggccatgcctagcacagttcwctgttttaaacttaccctaacccctgtcattccattctgtatgtgtagagtcactgaaattgcaatctctctctcatcttatgtttactattgaaatcaggacccacttaaatacacttctctgtcttgtcctcattctatgaagagcacttctgtattttggtctgcctaacttgggtctcagaatcttacactgagagccaaagagcttgaaaaatgaaattacatatggtaggcagaatcataaaatgacctcctaaccttaattgctagtacagaatatcatgacatactataccctgattatgataaatgcctttatcataatcataagtgcctttatcatctcctagacaacttttgtttgaactagccaaattgatcttctaagccccataacccagagcagctccctcatgacaatcccattttcctccgtggtgccctgtctggccaacttgacact

SEQ ID NO: 757573 - DNA, 640 bp, Homo sapiens
aaaaaatcacaggatcatcttaaaagatgtgcaaaaaacattcaccaaaattcaacactccttattaataagaaccctcaacaactttcatgtagaagaaacttacctcaacacaataaaaatcatatagagaaggcttacagcctataattatgatcaatgatgaaaaactgaaatattttcctctaagttctggaaaaagccaaggatatccacttttascactactattaaacacaatactggaagtcctagctagatcatttaggcaagaaaaagaaataaaagtcatctaaattgaaaaggggaaaaataacagagatatatttatggttgacataatcttttaggtaaaaaaccctataaaggcaccatcaaaaaactgttaagatttaagaaacaaattcagtaaaggtgcagaatcaatatagaaaaatcaaatgtgttttttaaataagttaacaataaactgagagaaaaagaaatttaaaaaccaatcccatttacaatagtataaaaatagttaggaataagtttaagcaaggatctaaaatatctaaaatagttataagcgaaaaagtataaaatattgacaaaaaaattgaagacacaaataaatgagaagatagtccatgttcat

SEQ ID NO: 757574 - DNA, 612 bp, Homo sapiens
ttagacatttagaaaaaaattgattcattgagttatccagatcttgcaaatgttcaccatttttttaaatagaacatcacaaaattacatttgctagtatcaccactgatctcaacagaaaagtcttttagtattgggaagctgtcaaacttagagtagtgaatacaagtttcccaaaattctaatttttacttggtagcttgaattttatcactggcagcaaatattgtcattgtttcccttgaaataacaggctcacttcckttattttcaagagaacctctactatacaaccaagtccaaataaccataattttgtttgtcaattattctttcaagtaaaaatgactccccttgaaaaagtggctagttcagctcataactcaatcacacaagtgcttttgttactgagtcaaccatcatatttcaatatgcagcagaattgcttcatgtgaatatccatttcatcatacagaataataaaaatgtgtcttctatttaaagatttaataaaattgataatttctacaactttatcaatgatattcttaaataaaattgggttttaaaaaagtggtgctgaaaaatgcaatgacactcatagaaattagt

SEQ ID NO: 757575 - DNA, 554 bp, Homo sapiens
ccctagagcacacagcagagggatcctgggcccagcccgtgaaaccatttttttctcctagctctccctgcctgtgatgggaggagctgctgcaaaggtctctgacatgccctggaggcattttccccattgtcttggcgattaacatttggctcctagttacttatgcacacttctgcagccaacttgaatttctcctcagaaaatgggattttcttttctatcatattgtcaggttgcgaattttccaaacttttatgctctctttcccttatgacattgaatgcctttaatagcacccaagtcgcctcttttgctktgctgcttagaaatttcttccaccagataccctaaatcatctctctcaaagttccacacatttctaggacaggggcaaaatgccatcagtctgtctgcttaaaacataacaagagccaccttttctccattttccaacaagttcttcatgtctgtctgagaccaccttagcctggatttcattgtccatatcattatcagcattttggtcaaagccattcaacacgactttaggg

SEQ ID NO: 757576 - DNA, 632 bp, Homo sapiens
gcagaagatgtacattacatattagtgctcaaatatatgttcatttccagaatgaatttttgcacagtaatcatatatccatttaatatgtataaagtgttcttggggatgggggcattcactcactgtaccatgttttatacaggcttcaacatgcaaatttgtttatatcatggctttcaatgatcctccattctcattcccgtagataaagaggtcacattgtataactgaccctgaaatgtacaaacttcacactataacattcttcatgacactatttgttaggagaaaagttgcagctaaacattacaatcatgtgacttattttgagaaaatggaaaatgtaataggtataaatttcctgacacatacagcaagacaaatccagcccagcctttgatgatcaacttaaacgctggygatgtcattatcttgtgtgaatttggtgtctgtccctacttctacttctctgttgtctgattttcctcttttactttgaattcatcattctatgaatccacttttgcctaagtgggaaactgaatatatcagaataaagcatctactttttttcataaagaagatcatataatatgtgaaagaactttgaaggatcaggcattatatca

SEQ ID NO: 757577 - DNA, 504 bp, Homo sapiens
taatactattttctcttcggctaaatctctcaatcacaggatttataaggaaggatcaactgatttcttacaatttaaggtttctgacacttggtctgatcatggatgatccctgtcttaaagggaagtacagctgatgcttgaacaagacaggtttgaactgtgtaggtccacgtataagcggatatttttcaacagaagttacaccgagtgcgcctgcctttcctgccctgcttccatttcctccacctcttctgcctctgctactcctgagacaataagaccaaccccttttcttcttcttcctccttttcagyctactcaacctgaaggtgaagacctttaggatcatctactttcacttaatgtacaataaatagtttctcttaagatttttttgtttgtttgttttgagacagggtctcactctgtcacccaggctggagtgctctggtgtgatcttggctcactgaagcctccacctcctgggtccaagggattctt

SEQ ID NO: 757578 - DNA, 625 bp, Homo sapiens
tactgacgctgtaccaggcattgccaaatatcccgagggatgagggggcaaaactgtccctggttgaggatcactgctttaggcatttacatacacatcaaaatatacagacaggtcatttaaaaaaaactgctgccaccatacttacgggtatacatacagtcatgcactgcttaacaacagggatatgttctgacaaatgcatcacgtgatttcatcgtgtgaacatcacagaatgcacttatgcaaacctcgatggtatagctaggtgtatatcccacacacytaggctgtatgggatagcctattgcttctaggctacgaacctgcacagcatgttactgtactgaacgctgtaggcaatgcgaacacaatggcaagtgtctatgtgtctaaacacagaaaaggtacagtaaaaagacagtggtataatcttatgggatcaccattgtatacgcagtctgtctgactgaagcgttgttatgtgatgcacgattgtatattaggtgcccattcttctatcagtggatatttacatagtctccttttataatcttgcaaacaatgctataaataaacgtgtttgtatgagggcccaatgcatacatatatctgtatgtctata

SEQ ID NO: 757579 - DNA, 612 bp, Homo sapiens
gtcttttaagtcagtataaataagtgttattacttactgacaaggttggtcagatgtatcattttgctaggatgaccatacatctagtgtgcctaagacaatcccccagcataattaccaaaaagtgtctcctttcacttttagtagtatctggttgtggacaacatattccatggtcaccccaattgttgcyaatttattgaatctgaaagattctacacagtgccagggtaaagattttggattatgaatctaaataattataatgcaagctgtgctgaatgccaaagcgctactctaattctaaactggaagaaataatttctgctaggtttgacaggcaagggaggctgattgaagaacgtggcatgtgagccgagcctagaaggatggatgggattatagattagtcaggttacatgaagatgggaagaggtgtatatgcaagaaggctcaaagtgcatttggagaatagccagcatctcggtttaccagtgttgagagaagtatgagtacaggaatatacatctgggaaggtgtgcagagaccagattatttaataccaagtcaaagggttggaatttgttgagcagttggaggactccagcagtt

SEQ ID NO: 757580 - DNA, 612 bp, Homo sapiens
gtcttttaagtcagtataaataagtgttattacttactgacaaggttggtcagatgtatcattttgctaggatgaccatacatctagtgtgcctaagacaatcccccagcataattaccaaaaagtgtctcctttcacttttagtagtatctggttgtggacaacatattccatggtcaccccaattgttgctaatttattgaatctgaaagattctacacagtgccagggtaaagattttggattatgaatctaaataattataatgcaagctgtgctgaatgccaaagcgctactctaattctaaactggaagaaataatttctgctaggtttgacaggcaagggaggctgattgaagaacgtggcatgtgagccgagcctagaaggatggatgggattatagattagtcaggttacatgaagatgggaagaggtgtatatgcaagaaggctcaargtgcatttggagaatagccagcatctcggtttaccagtgttgagagaagtatgagtacaggaatatacatctgggaaggtgtgcagagaccagattatttaataccaagtcaaagggttggaatttgttgagcagttggaggactccagcagtt

SEQ ID NO: 757581 - DNA, 566 bp, Homo sapiens
caaacatttgtttctccctgtccttgttctgttttccctgtgagactcccatttacttataatttacttatgttatagcctctgatattgtcccatcttagatgctctgttcaatgaatgacgttccattgtatagatktatcacactttgtttatccattcagataccaaaggatattttggttgcttccaagttttggcaataatgagtaaaattcttctaaacatttgtgtgtaaattttgtgttagcataaattttcaactcatctgggtaaacatcaaggagcacaactgctaaattttatgataaaaatgtttaattttgtaagaaactgccaaactatcttcgaaaatggctgtaccattttgcattcccagcaacaatgaataagagttcctgttgctctacatccttgtgagagtttgatggtgttgtcagtattttggattttaactatcctaataagtgtgtagagcagttttaggttcattgcaaaactgagcataaggtaccaaaatttcctctgccctacacatgcatagtttcccccattatcaacatccc

SEQ ID NO: 757582 - DNA, 566 bp, Homo sapiens
caaacatttgtttctccctgtccttgttctgttttccctgtgagactcccatttacttataatttacttatgttatagcctctgatattgtcccatcttagatgctctgttcaatgaatgacgttccattgtatagatgtatcacactttgtttatccattcagataccaaaggatattttggttgcttccaagttttggcaataatgagtaaaattcttctaaacatttgtgtgtaaattttgtgttagcataaattttcaactcatctgggtaaacatcaaggagcacaactgctaaatyttatgataaaaatgtttaattttgtaagaaactgccaaactatcttcgaaaatggctgtaccattttgcattcccagcaacaatgaataagagttcctgttgctctacatccttgtgagagtttgatggtgttgtcagtattttggattttaactatcctaataagtgtgtagagcagttttaggttcattgcaaaactgagcataaggtaccaaaatttcctctgccctacacatgcatagtttcccccattatcaacatccc

SEQ ID NO: 757583 - DNA, 594 bp, Homo sapiens
gacaagtcttgttagagcataacaagggtgacttttgctccagttcccgataacttcctcacttttatatgagaccttgtcagcatggccttcaccgtctacatttttatcagcattttaatcataaccacttaaccaatatataataaattttaaacttttcctcatcttcctgtcttcctctgaaccctctaaattctccctctgctcattacccmcagttccaaagccacttccacattttcaggtatttttataacaacaatcaactccttggtgccaattttttgtcttagttcactcagtgtagctttaaaggaataccggagactgggtaatttataaggaaaacagtttatttggctcacagttctgcaggctgtacaatgtgcaaagtgccagcatctgcttctggtcagggcctcagtttgcttccactcatagcagaaggtgaaatggagttggcatgtgcagagatcacatagcaagagaggaagcaacttgggggaggtggcaggctccttttaacaaccagctctctcatgggaactgacagagcaagcactcactcattaccacaaggacagcaccaag

SEQ ID NO: 757584 - DNA, 608 bp, Homo sapiens
tccaatatagtcctaaagagtcaagatcaacccttggagtcattgactattaatgacagtcatcatccctacttcttctccctgagaggccatcaaactctcaaaatagccaagcttggcttctgaccagctgacagaactaaggccccagagacttctctattattatgtgagggttcactggaagttgccaagttaaccaagctaatttctaaatttctagtcaggatgacaaaggcaactgaaacatctggcccaatcataagtatggcccatattagccatacttgggcttcccagaggatcactttaaaatttttaggtatattacaactacatgaaacaccctcaagattagccccagaacttgtgcatcccacctctggcttgagctccccaggaactcccacacatctaacatcctgcagttgcacaatactgctgttggarcttttggctaagtggtctttcctgaatgtcctttccattatgtctccatagttatacaccaggttacaaaggagaagttccagaactccgcttcatactcaaaccttggttctccaccctgtaagtataatcctgaatcctgacttctagctccaggg

SEQ ID NO: 757585 - DNA, 619 bp, Homo sapiens
tatgccacattcactctgcctgtgctttataaatggaacaatgaagcctggttgatagcacatttatttacagcatggtttagtgaatattttaagcctgttgttgagacctgctcaggaaaaaaaaaaactcttaaaatattactgctaattgacaaatcacctgatcacccaagacctctgatgcaaatatacaaggasattaatgtatttttcatgcctgctaacacagtattcattctggagcccatgactcaaggagtaattttgacttttaagtcgtgctatgtaaggaatacattttttgaggctatagttggcatagtgattcctctgatgaatgtgagtaaagtaaattgaaaacatcctggaaaggaatcaccattctggatgccattaagacattcctgattcaggggaagaggtcaaaatagcaacattaacaggagtctggaagaagttgattctaaaccttatagatgttcaagacatcagtggaggaagtcactgcagatgtagtagaaatagcaagagaactagaattagaagtagagcctgaagatgtgactgaattgctacaatcgttgatgaaacttgaatggatgaagagttgcttctt

SEQ ID NO: 757586 - DNA, 592 bp, Homo sapiens
aaaggcaaagagactcttttggcctgggaaagaattgacataaatgtcagctgctgaaccaccaccaaggagaataaattcagggttctaggctcataagaaattcaagtcaccaactaacataatacagagcaaccaggctggagacagtggctcacgcctgtaattccagcactttgggaggctgaggcgagtgtatcacgaggttgggagttcaagaccagcctggccaatgtggtgaatccctgtctctactaaagctacaaaaaatttgccgggcctggtggtatgcacctttaatcccagctacttgggaggctgaggcaggggaatcacttgaacctgggaggcagaggttgcagtgagccaagatcacaccactgcactctagcctaggcgacagggcgagattctgtctcaaaagaaacaaaatatatakagagagagcaaccaataaggggatattctggtcttgaccatctcatttatttattttgtagcaacagaaatagtgaaattcaactaaatttaatgtgccaacaaattcattgttatccaattcacttggaaggtaagacaggtgatattttcc

SEQ ID NO: 757587 - DNA, 634 bp, Homo sapiens
tactatagcagatcagttatgttgtggttttgcacctcattcctggcaggtcaaaacagaatctatctcttccatcctttcaataatatgtgagctatttatgccacttaataattcccttcagcttgaggaagctagagtatattgctttttgtaactartatccctaactgatattgcaaacttcacataaaaacatcctgttgaagatgaagaactagaagtagaagattctttttccccagggacatatgatatttaaaaaaagctacaggtagctggtctttactgtgtacattatcaatctcttacccaaaatactatagtggtattcactgctataactatttacagtatatacagctgttttcttacggtcttagcaaaaccatcttctcctctgttgtgacttgcatgtgcccccccaaatttcatgtgttggaaactaaattcccaaattcatatgttgaagatatttggaggtggggcctttggaggaagtaatcaagattagataaggtcattaaagttgttctcccatgttgagactggcagctttagaagaaaagaaagagagatgtgagctgacttgcatactcttgccctctcactatgcgatgccctctcaccatgc

SEQ ID NO: 757588 - DNA, 618 bp, Homo sapiens
aacactcccaacgctcatggaaacacagtctggcagcttctgaggctgcacggttctgcccgaagccccttctgggacagagaaggcctggggaagacaggcgggctgtacctagaaatcacagtgggggggcaagtttcaaaaagactcacccctacaccgtaaggtaggcctgaccctcctgcagagccctttggatctttaggaatttcacagtttattcctggggctccccttgatgtttcttcaggctggctgrcccctgccctctcgtaggattgtgggactatcccgtggatcccccagagaaggcaagctacagtccaacgctgacgcaggtccatagaggtctccttctacttcaagccacagggacttgtcaccaggcagcggtggcattcactgtgccgtcagccgctggtcaccgctggcacctagtgttctgagactggcgcatgcattcgcgacacacacctggctgtcaggacagtcagcctgcctaagcagaggaaaatggtacaggcagagcaggcctggtctcaggaaaaaggctgccagaaacgattcattgcgggaccctataagtctcaaccatagtgcctccttgggccgtctcca

SEQ ID NO: 757589 - DNA, 581 bp, Homo sapiens
tggaaagagtcttcaaacttcaatccaaatcttccagctttgaaagaagagaggaaggagaaagagacttagactgaagtacaattctgagaatgtctcaccaggccaataaagtgtcccaaagcaaagaatcccattaaagcagtctcatgtttgataggagtggcctggttctagtactcccaccagtcactggctgggagaagtccaggggaygaatggtcttactatgaatgccacagtgaacccgattgtgcagcagctagaggctgtccatcacctgtgccccacagatactctcagcaggagatctgagtgacacacctccatgattgtcatgaggttggaggagaaggcgtaaaataatcatctggaatagagggcgagtgaatgactaagaaaatgtagtctgtttctcagtcagcactaacggcctcttgatagacaggtttctgacccagtggctgtgtttttgcccaggtgtatgaaattgctcagattcaggggcagagtagatggaaaatgggttttaatcaggattgaggttctgtcaagttataataaagcaagagaggggcttg

SEQ ID NO: 757590 - DNA, 638 bp, Homo sapiens
agtctatgtgatatattatatcaactgaataaaggatgaaatcaatatgaccatttcaattgatgccgaaaaagcatttgataaaattcaatgtcccttcacgataaaaaaaaaaaatcctcaaaaaaactggggttagaaggaacatacctatacacaataaaagccatttataacagactcatagctaatatcatactgaattgggaaaaactgaaagccttgcctctaagatctggaagataacagggatgcccacttttaccactgttattcaacagagtactggaagtcctagctagagcaatcagacaagagaaaggaaaggaaacgaaaggaaaggagaggagaggataaaagaaaaggcatacaaattggaaaggaagaataccaagtatccttgttttcatatggtatgatcttatatttggagaaacgtaaggactccaccaaaaaactattagaatygataaacaaatttagtaaagttgcagaatacacagtcaacacacaaaaatcagtacaactttcatatgtcaagagctaacaatctcaaacagaaatcaagaaggtactcttatttacagtagctacaaataaaatgaaataaaatacctcgaaattaacttaaagaagta

SEQ ID NO: 757591 - DNA, 630 bp, Homo sapiens
actacaatgagatatcattttaccccagttaaaatggcttttatcaacagacacatagaccaatggaacggaataaagagcccagaaataaggccacacacatctataaccatctgatatttgacaaagctgacacaaacaaacaatggggaaaagactccctattcaataaatggtgctgggataactggctagccatatgccraagattaaagctgggctccttccttacaccatatacaaaagtcaattcaagatggattcaatacctaaatgtaaaacccaaaactataaaaaccctggaaggcaacctaggcaataccatcctaggtattgacataggaacaggtaagattttatgacaaagacaccaaaagcaatcacaacaagagcaaaaaatgacaaatgtgatctaattaaacttaagagcttctgcacagcaaaagaagctatcaacatagtaaacagacaacctacagaatgggagaaaatacttgcaaactatgcatcagacaaatgtctaatataatatccagcatgtttaaggaatttaaacaaatttacaagagaaaaacaactccattaaaaactgggcaaaggacatggacgcttctcaaaggaagacataca

SEQ ID NO: 757592 - DNA, 587 bp, Homo sapiens
tctattgtgcagattaagtccaatgtttctttgttgattttatgtcctgatgatctgcctaaagctgaatatggcgtgttaatggtttccagctattactgtattggggtctgtctctgtccttggctctaataatatttgctttatatctccgagtactcccgtgttgggtgtatacatatttaaaattattatatcctcttgcagaattgacccctttatcattaaataataattttatttgcctctttttacagtttttgtattgaaatctattttgtctgatataagtatagctacttatactcttcttcggtttccattatatctttttccatccctttatttttagtctatgggtgcctttacaggcgaagtgtgtttcttataggcaacagatcattgggtcttgttttttatccatgcagctamtctgtgtcttttgattggagagtttagttcatttacattcagtattattaattataagtaagtacatacttctgccattttcttattttttctggctgttatatggtcttctcttctttcttcctttttgtcttccttctagtgatggtgatttc

SEQ ID NO: 757593 - DNA, 642 bp, Homo sapiens
tctgccattttcttattttttctggctgttatatggtcttctcttctttcttcctttttgtcttccttctagtgatggtgatttctctggtggtatgttttaatttcctgctttttatgttttttcatatctatcgtatattttttaacttgtagttactgtgacacttgcaaataatatcttataacccattattttaaactgataacaacactgattttataagaaagcaaacagaaaactaataaagactcaacacaaacttcttccccactctttttaactttttgttgtttgtatttatatcttattgtactctctatgtatgtaaaagttgtcttcattgttatttttggttatttcatcatttaatctttccactaaagaaatgaataattgacacaycacaatgagattactacaatattctgtgcttttctgtgtacttactattaccaatgagttttgcacctttagatgatttctaattgctcattaacatacttttctttcacactgaggaattcattttagcatttcttgtagaacaggcctggtgttgataaaattcctctgttttttgtttttctgggaaagtctttattaagccttcatgtttgaaggatatttctactgcattta

SEQ ID NO: 757594 - DNA, 642 bp, Homo sapiens
tctgccattttcttattttttctggctgttatatggtcttctcttctttcttcctttttgtcttccttctagtgatggtgatttctctggtggtatgttttaatttcctgctttttatgttttttcatatctatcgtatattttttaacttgtagttactgtgacacttgcaaataatatcttataacccattattttaaactgataacaacactgattttataagaaagcaaacagaaaactaataaagactcaacacaaacttcttccccactctttttaactttttgttgtttgtatttatatcttattgtactctctatgtatgtaaaagttgtcttcattgttatttttggttatttcatcatttaatctttccactaaagaaatgaataattgacacatcacaatgagattactayaatattctgtgcttttctgtgtacttactattaccaatgagttttgcacctttagatgatttctaattgctcattaacatacttttctttcacactgaggaattcattttagcatttcttgtagaacaggcctggtgttgataaaattcctctgttttttgtttttctgggaaagtctttattaagccttcatgtttgaaggatatttctactgcattta

SEQ ID NO: 757595 - DNA, 530 bp, Homo sapiens
cttggattgcttggtctgtttttgaaaagttcaccgtcaggagaaggactattctcaagtaggaggaatgaagaaggaggcaggaagctaaaatgaatctggtactatcaggttgtccagagcaagatgtatctagcatatgtatgcaggggagacactaaaaatcaaatatacagaaacttgaagaaatatgatgaatataaagttgtcactgataggtggtatttgaatccatgattatgaatgagatcyttaaggcaggcataaaaagcaaagtatttagaatgaattggtcaacaggtagaataaaatgcattaggagtatcctaggactctagtaaaaaaaattttttttcaaagaaaaggtaatgatttatttgtcaaatgttgtctgagaagaaaaaaggaggtaaggactgagaccagatcattttatttaaaatgttgttaataaattacataactaaaaacagcttcagagataagcagcagagtagatatcaaaatttttcaggatttcaaaagtgaac

SEQ ID NO: 757596 - DNA, 641 bp, Homo sapiens
tgactttaggggcaaaaaatggatggatccaatccagaaaaagagttctccttgtacaggccttcttgttgtagaaccgaagattggcagctggtgattatcttttcccttcaaggttagagggttaacagctttataaataagggcagtcatcaaaataaaacctgactacatttgcatgaaacaacagaaatagcctatctcttcctgccttaagtcctggtgcttgattccctgcattttttttttttttttagaatagggcactttcatttgcactaaaaacctattcagacctatatcctttctcctcaatgattttctttatgatgtctgggaacttgtctgctgcctattggtcagcagaagctgcttctctttttatcttgacattttagaagccaaacctctttctaaaattatcaaactgtcttttattggcactaaatattccatcgttakatccttcaccttccttctgctttaggttattttgggagaaaaaaaaaaaaacccagggttttcactcctgctggcatagctgcagcaacaacttttacaaatttctttttatttttttaactatggtccttacattagattcatttattttgaaatgacaagaaagcacagctacagat

SEQ ID NO: 757597 - DNA, 656 bp, Homo sapiens
aatggtgttatgaaaactatatttatatgcaaaaagatgaatttggatccttttcttacactatacacaaaatcaactcagtacagatgaaagacaaatgcctaagaccagaaactgtaaaacttttagaacaaaacakagggaaaccttcttgaaagtgcttgttacaatgatttcttggatatgacacaaaaagcacaggaaacaaatgcaaaaataggaagagagactacatcaacctaaaaagcttctgcacagcaaaggaaacaacagagtttaaaggcagcctaaggaataggaataaatatttgcaagccacagacctgataaagggttaatatttaaaccatacaaagaaatcacaaaactcaatagaaaagcaacccaattaaaaaatgcacaaagggattccatagacatttcttcaaaaaagacatacagaaggtcaacagacacatgaaaagattttaaacatcacaattcatcagggaaaagcaaatcaaaaccataatgaagtatcactgcacatgggttaggatggctattataaaataagactataatgatataaatgttgccaagggtgtggagaaactggaatgcttgtataatgttgttgcaaatgtaaaatggtgcagcaactatggaaaatagta

SEQ ID NO: 757598 - DNA, 619 bp, Homo sapiens
gtgctgccatcgccagtggcaggtggggctccaagctgcaaaaagcagcattacctggaggtggggagtgggaccgaccctcagaagtgcagtttcctgtgagggatgcagtccccaggacccctgctggtatgggggcaggtccggatcaccttctgagcccaagatgattcactgcagagaactgaagatgctctgagacagtgtgatgaagccagaaactgcctgtgccttcctatgactgcagctgtcatcatttgctgcagraggctgaaaaacgcaaagacaaaagccaccacccgtgcgggaggtagaaggcagggcccctgctccccagccagcacccctggcttgagttgcagcctggggctcgggcctcagggagcctggtcagcactcagggtgtgcctccgaggctctggctaggagctgtcctgggaccttcgagatggataattaaaaggggcggcggggggtgttggtggtggcgctaaaaagccacagctgaagggtgtggctgggggcttcacgctgctctgtcccaggtgggccagatttgggctttcctgaaggaaggacacaggaacagatttggtagcttctttgagcgacctgggag

SEQ ID NO: 757599 - DNA, 586 bp, Homo sapiens
cagagctccgctcactggcaagtccctcttcggaccccaggagaggggcttgggggataccaaggaggggtaactgcttaatgaggacgggaggtttcttctggggagatgaatgccttttgaaactagacggtgtgggtgggtgcacagcactgtgagtgcacaaatgccaccacattattcacgttgaaatagttaatttcatgcgatgtgaatgtcacctcattttaaaagtgtttaaaagaggggcctgggagagtgcagtgtttgtgagaatcacgtggggcacccacaatctctgaacctyggtttccttgccgtaaactggcgaagagaccgtgtgagccgtgtttcctggggccaagagattccaagaaggaaaacctgggattcctggggactgagatgagggccgggggccggaaggggaggggtacatggggagggctgaggggcagcccagaaaaggctttcaacactgggcagcagcgtctacacaggcagagatccctgcatctcacttcccacaggactgaccagtggctggaggtgggactggtcaggctcagcccagccaagtcaggga

SEQ ID NO: 757600 - DNA, 573 bp, Homo sapiens
ctgtaagctgggatctgatgtccccgggctcttgggagaatggcagccttgcagcccctgctgtgtgccctcatctgggaccttctcctctgtgcactctctcggtcacccacaccccaccagccggctggtccacagggtgtttctgaggcttggcctcttctggctctgtgatctttttttggagacagagcctggctctgtcgcccaggctggagtgcartagtgtggttatcgctcgctgcagcctccaactcctgggctcaagcaatgctcccacctcagcctcccgagcagctgggactacaggcacgcaccaccatgcccagctaatttttttgtattttttgtagagacgggtttcaccatgttgcccaggctggtcttgaactcctggactcaagcgatcctcctgcctcggcctcctaaagtgctaggattacaggcgtaatccactgcgcccagccctggctctgtgattttaccctctccgcacctctgttccttgtggttttaaaggtggagatgctgaggactggcgggagctgcagggctgctgtgggggctcctatg

SEQ ID NO: 757601 - DNA, 454 bp, Homo sapiens
tgcacacagcctgggcaacaagagtgagattccatctcaaaaataagaaaaacccaaagatgcctcaaaaaactggtagaactgatcaatttagtaaagttgcaggatacgaaatcaacatacaaaaatcagtaacatttctgtatgccaatagtgagcaatattaacaaatcaagaaagcaatcctatctataatagctgcaaaaaatgaaatgcctaggagtaaatttaaccagaggtaaaagatttctataacaagaactataaatcactgaygaaagaaattgaagaggacacacaaaaaatttcaagatattccacgttcatggaattaattttgttggaatttgaaagaattaatgttgttaaaatgttcatattaccaaaagtgatctacagatgcaatataatctctatcaaaataccaataacattcttcacagaaatagaaaaa

SEQ ID NO: 757602 - DNA, 601 bp, Homo sapiens
tgcagctgttaccccaggaaacctctttcttatggggtcaggagacccaggctgggtcccagcctcaccagcacccaggacctagcacacagtgtctgtagagtcaatgaacagatgtcccgctgggagtcaggcatgttgctttgtgctctgagcttccctttctcatctataaaatgggggtaaaaacctgacttcccaggtgaagtcaagaggagaaacaatgtaagcacctgaaacccggccccaaagggttaagagaatttgctcactagcaaaattttctgagctgctcttgcaggacagcaagggagaaaagtttgttaccgtgccttccatctgcaacaaaattcgcccatgagctgagactcgcgggaaccaacatggctgactggagtctgtgcagaatagacttgcgtgccccatgagtggcttcttgacgtcagagggccagaaactccayctccagattagatgttgccattttctgaacatgcaacccatgaagaagcatgctagggcagcagcccaagccccagggaccccccagactcccttccttctagccagtcactgcccaaccacgaaactccaaactcag

SEQ ID NO: 757603 - DNA, 614 bp, Homo sapiens
  misc_feature 316: n = A,T,C or G
tcacactagttcaccagcaatggatccaaactgagaagaaatccctgatttacctgaaaaagaatttaggaggttagttattaagctaatcaggggggcaccagagaaaggcaaagcacaatgcaaggaaatccaacaaataatacaagacataaagggagaaatagtcaaagaaacagatagcttaaaaaaaatcaaaaattcragagacattggacacacttacagaaatgcaaaatgctctggaaagtctcagcaatagaactgaataagtagaagaaagaagaagaaacaagtagtagaagaaagaactcanagacaaggtcttctaattaacccaatccaacaaatacaaatggaaaaagaataagaaaatatgaccaaacctccaagaagtctgggattatgttaaacgaccaagcctaagattaatcagtgttcctgaggaagaagaagaattctaaaagcttggaaaacatatttgggcaaataatcgaggaaaacttcttcagccttgctagagacctagacatccaaatacaagaagcacaaagaacacctgggaaattcattgaaaaaaatcatcacctaggtgcactgtcatcaggttaccc

SEQ ID NO: 757604 - DNA, 658 bp, Homo sapiens
aaacacatatagtcaaacagcaaaaactcaaagaggaaattgttttaaaaagcagccatgaagagtcataatgtatagtgcaacaagcataataatgatggtttctcatcagaaacaatgaagggagaagacaatgatgtgatatatgtacagtrccaaaaaaaggaaaaaaaaagaaaactgtcaacctagaatcttctatctgttgaaaagatcattaaaaacaaagttgaaataaagacatgctcagatgggcaaaagctaggagaaggtctctagcagaccagcccgaaaggaagttcttcaggcttaaggaaaatgataccagatggaagctcagacttcagaaagaaataaagagcactggaaaggacaaatatgtgaataaatataaaacacaattttctataatatgtatgcacatacatgcatacatatgtataaatttctttaaaagaccattggttatttaaagcaaaatggacccaatatatcatgaagtttatagcatatgtagaagtaaacaatatgacaacataagcccaaagaatagcagaaataaattatataatagtaagattattctattgtttgcaaatttggtaggaaattatttgaaaatagattgcaataaacttaaatggatatgtaaactcta

SEQ ID NO: 757605 - DNA, 658 bp, Homo sapiens
aaacacatatagtcaaacagcaaaaactcaaagaggaaattgttttaaaaagcagccatgaagagtcataatgtatagtgcaacaagcataataatgatggtttctcatcagaaacaatgaagggagaagacaatgatgtgatatatgtacagtgccaaaaaaaggaaaaaaaaagaaaactgtcaacctagaatcttctatctgttgaaaagatcattaaaaacaaagttgaaataaagacatgctcagatgggcaaaagctaggagaaggtctctagcaraccagcccgaaaggaagttcttcaggcttaaggaaaatgataccagatggaagctcagacttcagaaagaaataaagagcactggaaaggacaaatatgtgaataaatataaaacacaattttctataatatgtatgcacatacatgcatacatatgtataaatttctttaaaagaccattggttatttaaagcaaaatggacccaatatatcatgaagtttatagcatatgtagaagtaaacaatatgacaacataagcccaaagaatagcagaaataaattatataatagtaagattattctattgtttgcaaatttggtaggaaattatttgaaaatagattgcaataaacttaaatggatatgtaaactcta

SEQ ID NO: 757606 - DNA, 658 bp, Homo sapiens
aaacacatatagtcaaacagcaaaaactcaaagaggaaattgttttaaaaagcagccatgaagagtcataatgtatagtgcaacaagcataataatgatggtttctcatcagaaacaatgaagggagaagacaatgatgtgatatatgtacagtgccaaaaaaaggaaaaaaaaagaaaactgtcaacctagaatcttctatctgttgaaaagatcattaaaaacaaagttgaaataaagacatgctcagatgggcaaaagctaggagaaggtctctagcagaccagccygaaaggaagttcttcaggcttaaggaaaatgataccagatggaagctcagacttcagaaagaaataaagagcactggaaaggacaaatatgtgaataaatataaaacacaattttctataatatgtatgcacatacatgcatacatatgtataaatttctttaaaagaccattggttatttaaagcaaaatggacccaatatatcatgaagtttatagcatatgtagaagtaaacaatatgacaacataagcccaaagaatagcagaaataaattatataatagtaagattattctattgtttgcaaatttggtaggaaattatttgaaaatagattgcaataaacttaaatggatatgtaaactcta

SEQ ID NO: 757607 - DNA, 631 bp, Homo sapiens
tacttcaactgtccttcactcagatatggccaggtaagtacttccatgatgataagcctacttctattcgcttcagagttcaaacccaccttggccaacatggtgaaacccaatctctactaaaaatacaaaaaaattagccggacawggttggcagatgcctgtaatccagctacttaggaggctgaggtaggagaatcacttgaacccaggaggcagaggatgcagttggctgagattgcaccactgcactccagcctgggtgacagcgacattccgtttcagaaaaaaagacatgaagtcctccctgatactactaccatcactaatattcaaaccacactggggcatcaatgaaatattgacagaatagagaataaataagcaatattacactcttaaattcaggattttagacagtttcagaaataagtggcaggtataactttccatatatggactcacttggttcataaactcaggattttagatggtgtcaggaataagtggcaggtataagttcccatttatgaactcatttggttcaaattcctttattgggtgattctttcctaacctaccactgcagatgtaccaagttcaaagccaagaagaattaaatgtgacttta

SEQ ID NO: 757608 - DNA, 631 bp, Homo sapiens
tacttcaactgtccttcactcagatatggccaggtaagtacttccatgatgataagcctacttctattcgcttcagagttcaaacccaccttggccaacatggtgaaacccaatctctactaaaaatacaaaaaaattagccggacatggttggcagatgcctgtaatccagctacttaggaggctgaggtaggagaatcacttgaacccaggaggcagaggatgcagttggctgagattgcaccactgcactccagcctgggtgacagcgacattccgtttcagaaaaaaagacatgaagtcctccctgatactactaccatcactaatattcaaaccacactggggcatcaatgaaatattgacagaatagagaataaataagcaatattacactcttaaattcaggattttagacagtttcagaaataagtggcaggtrtaactttccatatatggactcacttggttcataaactcaggattttagatggtgtcaggaataagtggcaggtataagttcccatttatgaactcatttggttcaaattcctttattgggtgattctttcctaacctaccactgcagatgtaccaagttcaaagccaagaagaattaaatgtgacttta

SEQ ID NO: 757609 - DNA, 573 bp, Homo sapiens
tctgccaagtgtcatgacctctctgggcttccatgccctcagctgtgaagtgagaatataatgcactacaatgctagcttgaagacttgctgtgataatgcaaatgaaagcatgaaaacagcgccttgcacacagtaagaactcagcaagtgaccgtattagaggtttttatattcgacccttttaaaggctagtgtcaaaggtacttggtcagctcatgtggggaagcttataatatatttaagtattcatagtctcctacatgttccccctggctaagacgcctgaggctgcyagaaataatcacactatttgtgatcctatgtttatgcaacagaaatgaaatggaattttatggtctgttgtgttcaacaccgatgcccacattgggataattccatgcagtgctgcattacaagaatctatgtaatatccaatccaaagatgcagctctcaggtcacaaagctttaccaaaccattggcttcagaaaggagctagttggtcccacacctgcagaccccatctgacacacacttagtggtagatatataattgacctggagagtaaatc

SEQ ID NO: 757610 - DNA, 605 bp, Homo sapiens
gaataaatcttaggaagctgagcactgcatctctcaacatgtccccaatccaaagaggtgaatgtactgaaaactatgaatcaaagccattggcctgatgtgacaagaagatttcagaaaagatgttacttaagttagttttgcttcttgatttacaatcaaacatttgctaactttatctttaatcaggttaagagagttgtgtagaagggctattagggttgtccatatttctgacaatttttaaatgtttcctaaaataagcagagcatttattcacaaaaaaagcaccttsatcgagttagcatgttttgctattgtgggcaatatcctaaatacaactttcttcttagcccataaaagactgtaaacatgaaaaagggaaaaaaaattaaaggcaacagaaaactagatgagaggcattacaaatcatggaggcaataaaggcaggtttttcctttggctaattgtgaaagatttttcagtttggccctcatttgtacacttgagtgttaagacactcatctctccttttcaatccttctctctcgtagaaaatgcaggtataaagttaccttcagactggactctgtactcatataaat

SEQ ID NO: 757611 - DNA, 586 bp, Homo sapiens
aaactttaacgaagaaaaaaattaaatctgtaattaaaagcaactgttcccaatcatgtcaggtgatcttgtacaaaagagaattcagtttctatggagtgttcattcatatcaatgctgccatctcaactgcccttctcacccacccataccctaaggtggggtaaactggaagatgccttcagcccaccaagttttttgttttcactgaatcactttaagtcgcattgattgatcttccagaagtcagcagctgcctttgctgtgcaaaacaaaatatcgagaataaatagtttcttttttctttcttttcttttttaaatcattcagtttaaggtcactaractttagatgagtgaccctgcaggtttataaggcattctgctcagcagtcttgtaaatagtcctatatgaaagagccatgctactgttggacttggtcccactctggtcaaccttgataacgtcatacgtggcttatggactggatagcactggattccgccgcagccctggccatactgtgccacacgttggaagaactgtgggatgtagaatggagggactccttgtcagacagtgacag

SEQ ID NO: 757612 - DNA, 658 bp, Homo sapiens
ttctataataatctctggcaaaccaaggacatcattaaaagggaagcatgaaatctgcgacgggttgtagaaagagactgtagtatcccaatattaaataaacaacaacagaattgatttatttgggaaataccataagtagaaccaagcttataaaatgctgagcgaactttttccataagaccttggttaggccattttatcataatctgatatataattgaacattgaaatacataagagagccaataaagccaagttaactttttatttgattaaatgacagcattagtatcatggtatggatattaacataacggaaattataggaaaagttgctatatgccttacctaggcaatgaaaaccrtaagaaccatgcagtcccaagaaaagaactgaaagcatgggagaacatgaagtattacagaattacagcttaagccaaatatgggtaactcagaaagaaaaaactaaatgtataggagggtattgcctaagactacattaaattaacatctggatatgccatatttttatgtaggatcatatacaaagaattttgattaaatattaattttatcaaagacaaagactaagttgaaatgacagttcatcatatgttaatataatttcatataacataacttggcatgtgcc

SEQ ID NO: 757613 - DNA, 634 bp, Homo sapiens
ccctctccccttcctttgtcctttcattaacagtttataatattaataactaacatttgcatagaattgtgtaattaataaaatatttttatcccttttttttttatatggagtcttgctttgtcacccaggctggagtgcagtggcatgatcttggctcactgcaacctccacctcccaggttcaagcaattcttctgcctcaggcccccgagtagctgggactacaggtgtgcaccaccacacccaggtaatttttgtattttttttagtagagacggagtttcaccatgttggccaggctggtctccaactcctgacctcgtgatccacccacctcggcctcccaaagtgctgggattacaggcatgagccaccgcgcctggccaagtatttttattcttaatcctacacacaatactgagagggggatgtttctcatctttcatagctgaagaaccaggagattgggatttgtccaaagacgcrgccagtaaagagaaactttcggcagcaccacattgctctctatataaataaagcactgcaataaatgcttgggtttgggaatagaagtgataatgagatgagtaaaatagattttgacctcaaagaatttttttttttttttgagg

SEQ ID NO: 757614 - DNA, 479 bp, Homo sapiens
agctggtcatttgcagaactttgcccctctatctagaatggaaacttttcacttctgcactcagaggtaggcatcttcccttgatcacagcacactttctctcagagcctggatgagacttcacaacaaaactcacaagtagctgttacagagatgaaagctggtaaaggagatgaaacctccttgctgacctatgtgcaaatggaagtgagcttttttcacatgataggaaacatacaaagtaccttctccttcatgtcacattctttcaataaactgaagagaatgctgkgaggggaacttcaggattgagaaatagaccctccccccgacaaaaaaagataaaaagaccaaaagaaaaagaagaaaagattgcacatttgcaccctgtgcatattatctgtattggcaaatcaacgcagaacagcaagatggtcaaaacagaagttctaagtgctcagtgaaatcaggattgaatc

SEQ ID NO: 757615 - DNA, 627 bp, Homo sapiens
tgaagttgagtttggcttttgtggcatagagccaatctgagcacatttggaggtaatctaacccctgaacttatcacagaagtctttgacccgacctcctttgttggataccaggattttaccccactctgctcataamccactcctcattgtagtggcctagaaagaagaaacttgggtttggactccaaatcagctatgtgatcttgcaccttagacaaaaccaccatccctcttttgagatctcactgtgttacctgcatagtgagcaggttgggctcagccctccctcacagtgcatgattagaaggctcctgtcactctcacacacaagatttctttttgttctctttatgtaatttactctttgcttaactaatttaaaagaatttgtttgtttttgtaaagtttgtcttattaaaaagccacacattcttttagataatgtaaaaatgcagacaaacaacaagaataaagcaaatgaaattcatgcataatcttgccaaccagtaaaatgttacatgatatagcttccagatatttgtaacttgcttcttcagttaataacatatagagattatctgctcatgtacttaaacaggcagacagcatagtttactttgctga

SEQ ID NO: 757616 - DNA, 642 bp, Homo sapiens
cacataacatcacattggaccaaggaacactctagactaaagaaagtgtggtagtggacacagggccatgggagccattggttatatcacatactgctccaccaaactggcctgatagaataatggaatagtgcaattacagccagcttggagatgatagaccgtgaagataagaccctatccttcataaagtaggatacttcatgatgcagttatataacctaaaccaatgaccattatatggttctctgtctttaatatttagaatacctgggtccaagacccaaggaaagaaaacaggagtggtcttactgccattacttttattgacttggggaatttgtgcttcccatacctgcaagtttagggactataatacctaaagggaagtgctttcagaaggagacattatactaagccttgagctgcagttgctgcctgatcactttggtctctgcatgtcargacaccaagagcaaagaaagaaattactatgctagcagggataattaaccttgatcatcacgagtagagagagttgctgtcatacactggggtcaggaaggaatatgttcagtactcatgtgatccacctgggtgtctcttgatactcccttgccaattttgatggtaaatgaagaa

SEQ ID NO: 757617 - DNA, 532 bp, Homo sapiens
cccagctcccgagctctccagaagacaggctgaggtttttattgtgactgcatcatagttcaatttctttcacttccacaggtgttaattccaaaaacaatccccaataaacttcctgcatataagtctccatttctaagtctctttttcgggaatacctgcctacaccgcaaaattagttatgatgatgattattattatttttattaggcacttagcatattaatttaattctacttcccccaaacaaaaccgtaaggttactattaaagtaaacccattacagccaaggaaattgagacttaraaacattaaataccttacctattgtcacacaggctataactggtggagacaggatttgagcgaggtcagccaatttctcaagcctgtgaggttttatgagtgatcaagtatcgctgtcagaagcaatagcatgaacaaagatatgtatctttgagcttgggggaatgagaaaagttagggagagataagtcttagaaagacagaagagttcaaattggaataaacc

SEQ ID NO: 757618 - DNA, 616 bp, Homo sapiens
aactcctcaaacactccagcgttgagcagaaatttttttttagattttcattccatataataactgttgcatattcagctcttcaagaagcaaggggaacatttgtcatggtgcagctctgagtgagtgaaaagtaaaggaaatacaaaaatgaaaggaattgttcacacattcttaaaatacctgctaggaccctttcttccattcactgggaaaagaaggcaaagccagcagcatttcaggtagccctagagcaacttcatccagcaagatatctccagcaaaagctagctgatgcagtgtttttttcatagatgagttctacartacagcccaaggtagtggttattaaatataattctgcatcccattcgtatggaataagtagcatgtgttgttaaaagtaaaacagtgtgttcttaaaaatcattaaacctctctatatgttgcaactgatattttaaaatataaattagaccagattcaagactatatcgatgataatatcagtctcaccatggttctgcctataagggttacttggatttagagaagatattttattttcctcttttcaaactgttttgcatactgtttagatacattttaattatat

SEQ ID NO: 757619 - DNA, 616 bp, Homo sapiens
aactcctcaaacactccagcgttgagcagaaatttttttttagattttcattccatataataactgttgcatattcagctcttcaagaagcaaggggaacatttgtcatggtgcagctctgagtgagtgaaaagtaaaggaaatacaaaaatgaaaggaattgttcacacattcttaaaatacctgctaggaccctttcttccattcactgggaaaagaaggcaaagccagcagcatttcaggtagccctagagcaacttcatccagcaagatatctccagcaaaagctagctgatgcagtgtttttttcatagatgagttctacagtacagcccaaggtagtggttattaaatataattctgcatcccattsgtatggaataagtagcatgtgttgttaaaagtaaaacagtgtgttcttaaaaatcattaaacctctctatatgttgcaactgatattttaaaatataaattagaccagattcaagactatatcgatgataatatcagtctcaccatggttctgcctataagggttacttggatttagagaagatattttattttcctcttttcaaactgttttgcatactgtttagatacattttaattatat

SEQ ID NO: 757620 - DNA, 602 bp, Homo sapiens
gttagctggttattatgttggcttgattgcataattgctttataatgtctgtgggctctgtagttaagtctatttttgtggtgacaggtatcattctttcatttccatgtttaggactcccttaagcatctctggtaaggcaggtctaatggtaacaaattctgttagcatttgcttgaccgaaaataatattttttctttacttatgaagcttagtttggcagaatataaaattcttagttgcaatttcttttctttaaggatggtgaaaataggtccccaatctcttctagcttgtaagctttctgctgaaagatctattgttagactgatggggctccttttgtaagtgacctgccccttctctctagctgcctttaaggtttttttctttcttgtttaccttggagaayctgatgattatgtgtcttgtggatgaccatcttgtatagtatcttgaagggattctttgaattttttgaacttgcatatccacctctctagcaagactgggaaatttttcatggactttatcctcaaagacattttccaagttgcttactctttctcctctttcaggaatgccaatgagtcacaggctt

SEQ ID NO: 757621 - DNA, 616 bp, Homo sapiens
tttgttttgctggatacaaaattctaggctgatgattattttgtttaaagaagctaaagatagaatcccaatcccttctagcttgtagggcttctgctaagaaatacgctgttaatctgataggtcttccattataggttacctgatgcttttacctcacggttcttgagagtctttcctttgtcatcactttatgtaacctgatgactgtgtgcctaggtgatgacgtttttgtgatacatttccaaggtgttctttgagctttttgtatttggatktctggatctctatcaaggccaggaaagatttccacaattatttcctcaaataaattttcaaaacatttagattttccttattcctcaggaacacttactatttttaggtttggtcatttaacatagtcccaaacttcttgagggctgttcatttttttaagttcttttttatttgtctttatcagattgggttaattcaaaagtcttattttcaagctctaaagttccttcttttacttgtttagttccattgttgaaactttccagtgtgttttgcatttctctgtctttaattttcagaagttgagattgttttttaatttatgttatctatttct

SEQ ID NO: 757622 - DNA, 656 bp, Homo sapiens
gccgggcatggtgtcgggcaaagtacttggctgcattttgttcataccctaggggatctgtggaagtctgaaataaagggtgatgacttggccgggcacggtggctcacgcctgtaatcccagcactttgggaggccaaggtgggtggatcacaaggtcaggagatcgagaccaacctggctaacacggtgaaaccccatctctactaaaaatacaaaaaaattagccaggcatcgtggtgggcacctgtagtcccagctacttgggaggcagaaacaggagaatagtgtgaacctgggaggtggagcttgtagtgagccgagatcgcaccactgcactccagcctgggccacagagtgagactctgtctccaaaatraaaaaaaagagcaatgacttagaacatctgatggaagaaatttctaagcagtaaagcattaaggatataggttggctgcttctaacatgcaatgctcagatatgagagcaaagaaatgacctaaagttgaaagttatatttaaaggggaagcagagcatacaagtttggaaaatttgcaacctaactatttgtcaaagaaagaaaaagagtttaagtaaaaaactgtctcaagttgcaaaaaggacattataaaatgattttttaagttaattcacca

SEQ ID NO: 757623 - DNA, 609 bp, Homo sapiens
acagtactcttatatcaaatacaaattcctgccagattcttggctggatactgggtatccaagataagacagtttagtttctcaaggagatgatgatttagttggtaacaggcatgaaaacaaattaaaacaaaaagaggttataaatactaaagaagcacagagtacacggagacaaagaggtagtcatggcctgcacctagcagacacacaataaatagccatccagtgaaatcctttgagcarctactatgtggtaagcgccattcaggaatacagcaatgaagaaaacagatagaacccctgccccagtcgggcatggtggatcacacctataatcccagcactttgggaggccaaggtgggtggatcacgaggtcaggagttcaagaccagcctggccaagacggtgaaaccccgtctctactaaaaatacaaaaactagccgggtgtggtgccacgtgcctgtaatcccagctactcaggaggctgaggcagagaattgcttaaacccaggaggtggaggtggcagtgagccgacatcatgccactgcactccaacctgggctacagaatgagaccccatctcaaaagaaaaaaaaaaaaaaa

SEQ ID NO: 757624 - DNA, 549 bp, Homo sapiens
ccctaataattgtttgactagatattatagttagggtctaggcttttaagaatacttaaagtatcttggatttggaagataataagccatttaacagaatgcttctgaaacagcggaatttaataaaaaagcaaaatttaaggattcgggtttatggatagtctgtgtgaccacttgatggggttcttgtatatggtagtggtcaggttagacttgctcagcagtgccttgtggtgattctaagatgtgtgctaaaattttcttcaattgtgaggccaatctttattgtatttttttgatattgaacctttctttgcaayatatgagttttacttctttttttaatatattgttaagctacagatgatctaaaatttgacattgagggggtgaatatttagggcaacttgaatttatgcttctggaaaaaaattacatgaaaaaataatgataaaataaataaggctgggtgcgggggctcacgctcgtaatcccagcactttgtgaggccgaggtgggcagatcacctgaggtcaggagttcaagacc

SEQ ID NO: 757625 - DNA, 605 bp, Homo sapiens
ggaatttccttggttcacatcagtgattctcaattcgttccactttaggagcacctggagttcttttcagataataccaaattacaatgtacactactcaggggatggatacactaaaagcccagacttcaccactatacatccatgtaaccaaaacaacttgtgctttaaaagctattggaatgaaagaaaaaatttaaggtaggtgacctgagatcttcaagggcaaagccaacctagaatggagttatacaccagctgtcagagtcaccattaggacatgatacacagtagacacttctccctctggcctgtcttcttaatagaatatgagttgtcaagtgactaagtatgtgagattgggatgacattgargaagacaccttattgagactttaaaaatcatggaagtttccctgtctgagtcggtcttgggccaggacattacctgtctctcatggtggagtgggagctatgtcgtcaataaaatctttgagaattctccaagccaaaaaaaataagataataccaattattaggccccactccaaattagttatatcaaaatcactggtgttggggcctgagagtagctagggcctcaa

SEQ ID NO: 757626 - DNA, 623 bp, Homo sapiens
ttaggccccactccaaattagttatatcaaaatcactggtgttggggcctgagagtagctagggcctcaaagttccccaggtgattccaacgtgtatcaagggctgggaaaccactgaatagattaaaaatatgagacagttttcccattagatatggaaaattttgagaagcgatacaaaatttttaggaacttttgggattgaggctattaataatttatgaagcaaggtgatagtcatagttcccagttgtttgaatggatttattcaaactgagtattcagcgaacttattcatagaatacaagtaggtaaaatggttaggacatgatctagtgtactgggactctgaaaatattaaaatctgagattrattgatttttggttttcaaatcatattcgggttctctcctttggagagtgatatgctggccaatggcaacatccatcttgaaaattttgttgaaaataaacctaaagtaagacaatgtctcctcttttatggtcaaacaagggtatttgtgcaacatgaaagtgaaaaataaacctactaaatccttgatttttaaaagcttgatctacttattaatggatgctccttgaaggaggtccacataaatcat

SEQ ID NO: 757627 - DNA, 623 bp, Homo sapiens
caagtgtctacagtaggagcaacagcttccttattagatgcttttttttttaattagatggattttatttgcaagttttttttgttttccttccagacctttgagccatatggaggatgtcattaatggcaactcagtaatgaggatgtttgctctctctcactcagaaccagaaaaccttcctgtgtggcttgaggagacagatttccagctgatccctcaatatcaagtgaaaacttgcatggtgaatgttcggtgtacatgttaagctttactgagattkactaggtaaattgaagtaggcagtttggtgcaacaaccacttatggtacagagtgttcttcactaaatgcatcataattttattgtgaaagactcttagaggaggtaatgttctttctcaaagaagaaagcatttgctactgctgggaagaactagatatgcaaaactacagggaatgcattttaaaatactcctgctggaggagccccatattcaaatgttagttacagtagctcttatataatttattgcatgatttcccagcatttgtaaaaccaaatattttttatatattcataacatatggtaggggccagtttatttcagcacttgtacatgc

SEQ ID NO: 757628 - DNA, 600 bp, Homo sapiens
gaattttgaaaaagagagaattattcatgacataccttgtatgtcctttaatactaaatttcattcatatgcacattatttcaaataactgaactggaacaaaactagatggtagtcttatttttatattgagtcacttctaataacactttatttaaaaattgaaaattascattcctgatattttaataaggcatgcctctatagcttgttgttaagaataagtaagatctttcatcagatttccatttgctcatcatataaatccaacataaaaatggggggagaagttaaagaatagcttatgagatttcagagtgttataaaagctaccaagttagaaagcttagaaagtataacagtcctaggagtttggctacatgttaatttaccttggttcaaaaggggaaatgctattcttttcttcaatagaatcagtttcttattgttcagaattgtgattattaatattagagtgtacctcttagttgacatttcggcccactgtatccaggacagcacctccaatccaatgaggtgacaattttatgttgcatcctatagacaggattggatatcttctgagatctagagagttga

SEQ ID NO: 757629 - DNA, 545 bp, Homo sapiens
cttggggttgtttctcctctggaaatgcttccattctaaaaagttctggcatagggaattggcctaaggaaaaactctgccctccttccccttaatggactgtcctgcctttgagtgtgagtaaaaggggctgagatcattcatcagccaattttacrgctgcaatctacttagacctgcccccatctaggtcaccaaggatctttgtcagcatttggtacaaagcctatgtgaatgaagatggtcatttctttggtgttgtcccaagaaatgtaacagaaaatgactataaaagaatggattctgatatgggatgctgagtcctgataatctctctaaatgtctttcatctaggacctgcaatcagccattattaagaaaaagagaaaaggattgcaggggacagttccaattaacctgtggcatcccaaatctgtgttttactgaacacctagaactattctccatgggtttggcgtcaaagaggcattaggaaagatggtaactattcctcttacatacaatattaaggcctttgagatttg

SEQ ID NO: 757630 - DNA, 511 bp, Homo sapiens
aattctttgtccattcaagtttgatcatgagattgcagcaattcagtcacatctttaggttgtatttgtaattctagttttcttgctccgcagttacttcctcccctgaagtctttgaagtgttgaacccttcaaagtgatttacgagggttagaatcaacttcttccaaattcctattgatgttgatattttaacatcctaccatgaatcacaaatgtttttaatggcatctagaatmgtggagcttttccagaagattttcaatttactttgcccagatccatgaggagaatcactgtgtatggcaggtgtagccttacaaaatgtattccttaaataataagacttgaaagccaagattacaccttgatctatgggctgcagaatgaatgtcgtgttagcaggtataaaaacagcattaatctccttatacttctccctcagagctcttgggtgaccagacacgttgtcaatgaacagtaatattttgaaagagatcttttttttttt

SEQ ID NO: 757631 - DNA, 560 bp, Homo sapiens
taaacaattttaaatgatgctatagatctacacactaaatgttgaataaaataaaaggcagcaacaattaaagatgagttcaggccatttcatcaactgatgtattgttcatcaagattatattgaacaaagacaataaatgcagtcatggtgacatacactgttccaatctttttagcatttaaatcaggagaaaatacgtcttgatcaagcaacactatctaattggtggggatcctagcatgtcattgcctggatttttgatgcaaaaagagacagactccaaggattaagaattagactagggaatgcaacttggtcatttwtttgatttgtggtgattttattatggatacagagcatattcttcttacattgaacactttattgaagctaaggggtgccgcacattgcttgaaaaggttagcctatcccaatgagcaaataggcatgtactatgtcaagaggaggacttgaactttctgacagcctttccagcatgagaaggaagagcttcaagatgtctcacctagaaatccagacgcataccctattattta

SEQ ID NO: 757632 - DNA, 620 bp, Homo sapiens
gccaaatttaatttaacaaagttaatatgaccctggtattgttctaagaactttgatatgttaaatcattgaatcctaaaaacaacattgtaatataggtagttttattatccccattgtacaagtgacagaattgaaggacaaataagtgaaaataaaaataaatttaaaaaggtgcccagggttagtcatctaatacgtgaaaactctggaatgagaacacaggcaatctagcttcakaatctgtactttcaatcattacttattgaatctgtactctactgccctactactggtaataaacattccctttgtttatatttaatttatacattaatcacaatatttaaataagtaataacttttctgctattttgaaagtgcatttagtggcttgcataactaggctctcttttcataattagccttacgggttatctgaaagacatggaatataattttattctactgagacattatttccttctcctattgaaactaaatatatgcatatggcagggttgcttttacttcctacaaagacactgatgaacatttctggcctcaaggaataacacaatcaccaaccacacatatatttaaacagaaacataaaattt

SEQ ID NO: 757633 - DNA, 634 bp, Homo sapiens
ccaacttgaggtagtgattatatgcattagaagcagattccatatggaaaagggctcagttttattcatgttgaatgtaaagtcattgtgaaataaacaatatcaacaagaaattggatgtatatatgcgaatctgaaaaagcatttcctccaggtagcctcagtgccagcaatgcgtcttaaatgtattttttctgaattaaacatatctctcactgtgagaatttatttattcaccggactctaggacatacttccaaatccttcattccttattctcttctctcatgtttctttctccttgtatctttccttaacaatgtatttttatttttctacattttcctcatcttcktatcatgacaaagctcaaacagcagatgaggtgatgtatatggcatgtatttttgggagataggaaaaagacttacaactggaatgacatgatagagaatgcactaattaagtttaatctgacaataaaagcataaaaatagatgagaagaggtgatcagaactccagagattaattagaattaacaatgacttaagtaaattgaagaagcatagtcaataataaaagtagtatatggcagtgcacatacaggggaaaaagtaaataaacagtatttga

SEQ ID NO: 757634 - DNA, 589 bp, Homo sapiens
gtcacctttaatggctctttccagccattaaatgttgtaattctctgaggctcaattttagactttgttcttttccttcatacttacttccatatgtaagccaagtgcttctaaatgtgcttctctagcctagaactttgttttaagcatcaggtccatttattgaraaacttattcaaaggaacctcaagttcaacaagtcccaaactaaatttgagatttagcctcccatatagtcatcttaagtatttcctaacttaggaaacagcacaatcacttaccactctcactgttatttgtgtttacttctacatttacttctacatttaccttctacatttacttaatattatgcccatgctgtgactttatatttgtttatttatttgctagtaacatctttctgtctcctagggagaagtccataaattcagtgagggtggaggccatgtatattttactcactgttctcaggaagtccgttacaaaagcaatgctgaatggatatctaataagagtgcatgaatagatgagatgaaaactgtaaacatttcatcacatgggataggatataacttctaacatcctg

SEQ ID NO: 757635 - DNA, 678 bp, Homo sapiens
cttaatgactctattgaggttatcattaaaataaaggagatttgcagacatcagctataaatcactataaaatggccggtgggtaacctttgacacaactcatttgaaataaacctgggatggattcatagcctttggccgagccagtaagtgggctaaaggtcttttccatcctctccttcacttcttkcaatattagttcctctccaagtgactggaaaggaattggatgtatataaattgacatgtgtattaagttgaaggcaaataggtctatataaataatagtgttaaggatgtttatggtgtttattcgaaatatgtattcttttgatataaattttaggattatgaatacattttgaatttatcgtagctactttgttaaaatactttatgatttagtgtcataaaaattttgtgagggtctcgaccagtattactcaaattgaacattacaaggtgcctatctatgggatagaaaaaattcttcagaattaaaaagaaattacatgattgcagtctaatttttcaaagaaattattttttaatgattatttttcctattggcatttaaataatagagaagcagctttgaaaagttgcctaagcttacacctttatgacttgggttcaagtctgaggcttctttaaggtatgactgttagcaaatttttg

SEQ ID NO: 757636 - DNA, 581 bp, Homo sapiens
aataaattgtccatgtccattttatagttaagatttttaaattttcatctagtcaaatgaaaaataattaatagaaaatgggaaactagtgtaatttttgtattcttcataaataataggcatttggtatagcagctcagtagtaaattattaaaagaacaaaattrcgaaataatatcatataatgggtcaaattatttatacagttaccagtataaagctcaagaatgtgagttcttattaacacaccattagcctggtcacacaatggaagagaaggagagggcaattttgaatgacatttatgtcaactttggaactgtcaacctctgtgatgtccttggggccttgcactttttggctttcagacatctgtgctgccttgaatgtaggtgaatactaagagtttcagtgggtctcttgctctaataaatgctttgaatagttatctttcagcatgggcatgtaatagttattagtgcttaaagctaagacatatgacacttcatcccatgagcacccacatccacatcatcttcatcaataccgccattcccccctcactatacactcacactgtg

SEQ ID NO: 757637 - DNA, 502 bp, Homo sapiens
ctgccaatacaatactgaagtaaattatttctaaataatggaaggatgtgtttatcaaaataattactagccaattagcagctccatacactgagtttaccttctctcttcctctccttccttctttttttcattcttcttcatcctcaagtactcttttttacctccaagagccaatgatgatttagatatttacttatttattatactgatgctgactctttttaaaggygaggggttcatttatatagcttacttatctatgttcattttaatattaaaaatgaatatcactatttacacaaaacgaagttacactttgaatttttggacatttgtgacaagataaaatcagctatgtgaataatctgtttctaattaataagatcaaatgatggcaacaatccatctagcatttatttctcatattcattttcgttataatttgcattttacttaatgggcatcatgaatatttttaatagtaataattcttctgtaa

SEQ ID NO: 757638 - DNA, 590 bp, Homo sapiens
ccttgaaaattgtcaagccagcactgaagatccaattaagcaggaaagttttaattattctcattccatctccatggaataagaaggaagatgagcaggtcagaccagggctagataacccaagagacaacctaagaacattaagaacatgattacacatgaaaaagaaggaccatctagaaataaataagtaaatgacaagttggacataaagtagtttcatagcaraaatcagaatgctgttttattttgaactgcatagccaactagatggacaccatatactttttggtccttagggcttctaaagatttaaaaataggaatttccaaatatttacctttctgttcctatttcttgactatctctctccgtttctctgtctctttctttttctctttccttttttcttcattttttcctctatttttaactaccttcctctgttaattcctctttacctctttcttccccttaactattttcttcaatactttcctcctctcttttttcttcaagttctagctatgtttttattctcccacaattgtgaaacaatggagggactgtcttctttagaaacatttgct

SEQ ID NO: 757639 - DNA, 618 bp, Homo sapiens
caaaatatattttaaaattctatagctaaaaatatcttcaaatgtatgtttgcttgtatactgactgaagcaaatcacctcatatagttcaacatagtagaaatcctatcaattttactgaaacttactaaccagtcagctgtaatcttttcttatcagtttaaaacaatttcatcattgaaaacattatgttaaattaagtttagcttaaagctgcctccttacatattctaagttgggcctaaagccttctctatataatgtgaactaaaaccaaacaacagactctaaccttcccttgtagcaatcagcgtttcagacaatcacaggtggccaaytattcaaaccatgttcagataaggcaaacaccatgctataaccaatccagctgtttctgcacctcactttcattttctgtatgtcagattttttttttctgtccataaatagcatccaaagatggcagcctgtaacttctctgaacctattctgtttctgggggctgctcaattcacatatcgttctgtgctcagtaaaattctgttaaattgaatttcttctaagtttttcttttaacagatggtgtcacaagtgagatcaatgtaaagcttcttgtga

SEQ ID NO: 757640 - DNA, 613 bp, Homo sapiens
ccccagcacacaggctggttggagttttgccagggaccccctcccagctggctgtctcaattgcattatcactgggatataggagagcacagggacaaagtgcaggaatcctctaacagtaggctaaattaatgggaaccaaatcccaattacgctctatattttaaraagttgactgtgccgtcaaaaaatttcttggagtccttggctaattaattcaaaggacatgagtcgatttgcttttttaaagctatcttaagctactttatgtactttaaattttgattgtaaagattatagtcagctgagttttggtgaaagtttgtaaaggagcaactgtcaatacctccaggcaaagaccaccaggaatgtacctatagttgaacaagttggattttacaccctatggggatttacgaggtgtctgggtagcagactattaaaaagctcttatagaagttggtttgcactaggttactttgtgtagattttaaaaaaacaaggctttgttctggattggatgctgtcaggaagcagaggtagttttattcttgcgcatgtttaaccttaaataacagaaggaaatatttgactggaggaacaaaaggaatga

SEQ ID NO: 757641 - DNA, 572 bp, Homo sapiens
aatttattttcattttaaaagggaaaatgtatcttgaatataaatatttatgactttaaaaaataactttcttagtacatcttatattcttactattttaaaaataatttcttaatacagatatacttattttcaagatgccatagtgatttatttaggcatccctttgatttgggcaaaatagtaaatgatgtggttttctttaagtaaaaaaaaaaatgctattttacagtaaaaaaaaattggaattagatggtcaagaggtatcagaatattttagagatgaaagtatatccttaaaatttccctgtggcttttaaagttatctaattaatttaaagarttttacttacaaagaaaatctaataaatatatacaattaattatatctgatttttggaatgtttccatacacaacttagaaaaaagtaaatatgtaattaacacctagcttcagtaaaatacatattgagagacagcatcacagaaaaaaataatccaaggatagaataaatgcttataaaaataattcatatatatacaaatatatgcacatacatatacacatatac

SEQ ID NO: 757642 - DNA, 485 bp, Homo sapiens
aaaatagacaattttacctcagttgttttttctaaaagaatgctgtattattggccggtgtggtggttcatgcctgtaatcccagcactttggggcaggtggatcacctgaggtcaggagttcgagaccagcctggccaacatggcgaaaccccatctctactaaaaawacaaaaattagccaggcatggtggcgggtgcctgcaatcccagctactcaggaagttgaggcaggagaatctcttgacccccggaggtggaggttgcagtgagccgagattacaccatctcactccagcctgggcaacagagcaagactctgtctcaaaaaaaaaaaaaaaaaagaatattgtttttcaaactattgtatgtattataatcaagttcatgcttgccatatcatcagacctattggttcaccatgtatcaatgcaaaaagactaaggaggggacgttaataaaaaacttatcacttataaaacttta

SEQ ID NO: 757643 - DNA, 597 bp, Homo sapiens
caatttgagaatgcttactaattatattttatgtctcttctatatgcaaatataatttccaccaaaaaaagttgaacatccatggttagtgtcaaaagacaaaattataacaaacatagttcaaatttgctttaattcgcaawtctagaatcaggcaacacttcattctataaaatggaatgagtgttccaacgagctgagcaggagagtttggctttatgggcagaaaatagctgaagaaagcagaaacagagcaaaaagggattgatcgtttcagctactttccttgtaaagcttaaagcagtggggacttccttatcatgccagctaaaatgggcctcttttggggattttgctattaaatctctctctctcctggtttttcagaagatcagataaacagcttagttttggcttgatggtgtggaacttcagcatcagtaactccagtttactttggtttgttgggcctaatgcaggagctcagcccaaaccaatggcccctgtaaattttatttaatgttagcgcaagtctcccatgtcagtaccttgtgaagctcttgcctccacaggcaaactgttcaaaatgaatgcata

SEQ ID NO: 757644 - DNA, 634 bp, Homo sapiens
gttaacttggaccattttaatgggcaaatggatggagctgtcatgttgtgggagggaagttggagagggtatttgaggtagggaaacatgactactaatttatgctttaaagttaaaattaacatttatgtgtttatgtataaagattttttaaaaattgcatgtgatggcattaattagtatagctcctgtggaaagtgatgcagtaaaccctgtcaagcagtgttcatactctttgagctaatcattctatatctgggagttcatattaaggtattaaattaaaagaagaaaaatgttaatgtgtgaagtcatcattgtgctattaactatgtaatatggaatattatatgctaggaaatataataaagtgtatccaacataaactcatgctgaaacttcctctttttggactttacatccagaaaaattgttgtcatattgatgggatgtwacacacaggtaaataatacaattatgaagggtacaatgataaaggctgttacttagaactatagactatataataaatgaaaaagaacttataattgcatgtagaattaaaatatatatgtatttatttgagtactagaaggagataagataaaatgaaaacagtgtggggggattatag

SEQ ID NO: 757645 - DNA, 640 bp, Homo sapiens
aaaaatgcaaccgaaatggatttatttgatcttgctttaaaaaataaaatataggtcagctctactgacctggaactgtttttagcttgtatcattttctttaaacaaacaaaataaacaaacaaaaactgatgctaactgtagtgtgtcataatgatgtaaaacccaaaccaaaaatctgtgcatgcaggaatgattaaatgtgaataaacaaaatgtattaacctttcaacaggaattatctttaagtgactatggatcttttatttattttatastttctattttcctgtattttccaaattttctatagtaagtatgagttgcttttccaaggaaacagatcttcagtaaaattaattggtaggttaaattagtgaaaaagaaaaaaaaaaagttttgctcttatcagcttacatttttaccatgagattaaaaaaaaaaaagcaactacataatatcaggtgattgtgtaccgtgtttgtaaaaaatattttaatcagggcttagagagtttaggaaccccctgccatgacaagcatgctacttgtcgaagaaagaaagaaaaagtcttgactgagttaagctttggagtttaattactatttgaatgaagaattaagactttaaaacccagttg

SEQ ID NO: 757646 - DNA, 562 bp, Homo sapiens
  misc_feature 345: n = A,T,C or G
atattttctcccattctttgggttgtctatttattcttttgacagttccttttgctgtgaagaagtgaagatttagattttattaattcatttggtctttaagtcactgaaatggaccaaatgtgtcaaaatggcctgaaaatccactagttgacaaaattaatttttcttaccatccttccccactacacctagcccttgcakatagaggttcaacagaatattattattagttatttcagatagacttaggatttttcagttaaactttgaatgcttttcaaagattcactttcatatccattttgggcatagttttactttaatagccaatttatcatatangcctttatataatagatgttttctaaaaagagctatgcataaaaatatctttgggttaaaagaaactgaataatgtattttataaagtcaagaactatttgaaaatttattactaaattttgggcattacattattgggcaattatgtcttgtgtagttcaccaacctctctgccctaactggtaagttaagtaggtattatatatattataattgt

SEQ ID NO: 757647 - DNA, 513 bp, Homo sapiens
aaacccctagacggagccgtcctcgggcccctgctcctgtcccccaacccttttctctcccggagccatcccaaccaattctcccttctgtgctgtccctgctgggactccccacccctggcccttcccactctgatggaagctttaaccttttggggtcagatgcacaccttcctcctcccccaaccctctcctcagggagccctccccagcccaggcaccccatccagccctccctgcctgggaccaccagtggcagcctcagcagtgtgccaggtatgtgagtattgtggagcccttcctcatcctggctggaaagaggcagccaaggcatttaggggaatgttcagagagctctttgagggtkttctgggttgggggcagggaggttggcttctttggatgatgggagaaagggcctcccttgagctgaatttctctcctcttttacaggtgcccctgccccaccagctgcctccaaagccccagtagtccccagccctgtgcttcaaa

SEQ ID NO: 757648 - DNA, 617 bp, Homo sapiens
gttcatgtaactttagtaatctttggcaaataaaaatagctttaaagattattgataaaataaaaacattttgtctaaatcatgcaggtcagatattaggtttgctaaaggctttaaggtcataaactgctttgacttttgaaaattgttcaatatattttgaagacattaaattctaaataaggcatggggatacatggaattagccatgccccctagctatgcaaggaaggtyataaagaaaggagattttatataagaaaggatgttgtatggtaaattcttgtcctaaagtaaaatgactggttgtttaaaagagggatgtttagggcaagtcataaagtctaaacatgttgtacatggtctgtgtaagttgtgaaagaatttatgaacagaaatttatgccaaaaatgttgtacaatttaaaggtggtttggcctcctaaatgcttcatgaaacgccgctatgactcttaactgtacagcttgcctgctttacagctaggtgaggcccgggacacatggagttaaatgctggaaagagtcagaccttatctgcatttctgtctgggtcctaggctccacacctagtacataattaaaatcccttacttacca

SEQ ID NO: 757649 - DNA, 617 bp, Homo sapiens
gttcatgtaactttagtaatctttggcaaataaaaatagctttaaagattattgataaaataaaaacattttgtctaaatcatgcaggtcagatattaggtttgctaaaggctttaaggtcataaactgctttgacttttgaaaattgttcaatatattttgaagacattaaattctaaataaggcatggggatacatggaattagccatgccccctagctatgcaaggaaggttataaagaaaggagattttatataagaaaggatgttgtatggtaaattcttgtcctaaagtaaaatgactggttgtttaaaagagggatgtttagkgcaagtcataaagtctaaacatgttgtacatggtctgtgtaagttgtgaaagaatttatgaacagaaatttatgccaaaaatgttgtacaatttaaaggtggtttggcctcctaaatgcttcatgaaacgccgctatgactcttaactgtacagcttgcctgctttacagctaggtgaggcccgggacacatggagttaaatgctggaaagagtcagaccttatctgcatttctgtctgggtcctaggctccacacctagtacataattaaaatcccttacttacca

SEQ ID NO: 757650 - DNA, 560 bp, Homo sapiens
ggtacgtgacaatgcagatctgcgttgtgagcttcctaaattggaaaaacgacttagggctacggctgagagagttaaggccctggagggtgcactgaaggaggccaaggagggcgccatgaaggacaagcgccggtaccagcaggaggtggaccgcatcaaggaggccgttcgctacaagagctcgggcaaacggggccattctgcccagattggtgagtaggtgttagcaggcaaggtgggagtatctcctgaagcaaatttagcaaattgctaattgccaagcaactagattattgcttcttacctacccctagcctcatcccacttccccccaaaaagtaaaaaagtgattatgttacaagcaactcagttcaaccccagctaaatgacctcagggaccagggcaaatgcmgggtcatagcctcctcatggttgttttctttctttattgcagccaaacccgtccggcctggccactacccagcatcctcacccaccaacccctatggcacccggagccctgagtgcatcagttacaccaacagcctcttccagaa

SEQ ID NO: 757651 - DNA, 582 bp, Homo sapiens
ttttattttttttttttattttttggcatgtggatgcccagttgttcgagtaccatttgttgacaaggttatcttttctccattgtactggcttctctcctcttctttgtcaaagatcagttgactgcatttatgtgggtctatttctgggttccattgatccatttgyctattactttgccaatacctcactgtcttgattattgtagctttatactaagtcttgaaattaggtactatcagtcttccaactttggtctcctatatcattgtgttggctacttcagatcttttgcctctccatagtaactttagaatcagtttgtagatatccacaaaacaacttgctaggatttttattgagattgcattgaatgtatcagtcaaatagggcagaattgacattttgacaatatcaagtcttcctttccatgaacacggaatatctctccttttatttagttctttgatttcttccatcagagtttataattttcctcgtatagatcttgtacatattttgttacatttaaacctaagtagtttatttttggggagtattgtgtttttaatttcaaattc

SEQ ID NO: 757652 - DNA, 559 bp, Homo sapiens
ctatttttttgcacagatacaagaaatagaactaaaaactcaagccatttgtctgtaggttacaaaatatactattcctatatagaacttgcccaatagaatatacagtttaagaacaactttcaagcagtttattaatcacttcttaaagtgagtcaaagacactyctatctgaaggcagcttacaatctttgtgttttattttctagttctcttggagatgttgaaatagctgaagtgaatgtcaagggtttgttcgtgaagctcattaactcttcccttgacaaagaaatggcaattggagatcatattctccagcaaaatgtgaatggacaaaccatttctttgtaccgattccttccaaacatcgtaatgcaggcaaattccacagtaacagtgagtataagagtataaatactgtacattagaattgtacaggacaaacttgttgacactgacagtctgtggctcagcactgtctcgttatcactctatctggatctgtacgtaagatgtgattttgttgttggtggttaattaccgcactttgtccatcttc

SEQ ID NO: 757653 - DNA, 605 bp, Homo sapiens
gagaagaaggtatcaaatcaatgacctcaaatttcaccttaaaaaattaggggagaaaaaaaaagcaaataaagcccaaagtaggggaggagccaagatggccaaataggaacagctccagtctacagctcccagcctgagcgacgcagaagacgggtgatttctgcatttccatctgaggtaccaggttcatctcactagggagtgccagacagtgggcgcaggtcagtgggtgcacgcaccgtgcgcgagccgaagcagggcgaggcattgcctcactcgggaagcacaaggggtcagggagttccctttcctaatcaaagaaaggggtgacagacggcacctggaaaatcgggtcactcccacccgaatactgcgcttttctgacgggcttaaaaaacrgcgaaccacgagattatatcccacacctggctcggagggtcctaccccatggagtctccctgattgctagcacagcagtgtgagatcaaactgcaaggcagcagcgaggctgggggaggggcgcccaccattgcccaggcttgcttaggtaaacaaagcagcctggaagctcgaactgggtggagcctaccacagctcaagga

SEQ ID NO: 757654 - DNA, 605 bp, Homo sapiens
gagaagaaggtatcaaatcaatgacctcaaatttcaccttaaaaaattaggggagaaaaaaaaagcaaataaagcccaaagtaggggaggagccaagatggccaaataggaacagctccagtctacagctcccagcctgagcgacgcagaagacgggtgatttctgcatttccatctgaggtaccaggttcatctcactagggagtgccagacagtgggcgcaggtcagtgggtgcacgcaccgtgcgcgagccgaagcagggcgaggcattgcctcactcgggaagcacaaggggtcagggagttccctttcctaatcaaagaaaggggtgacagacggcacctggaaaatcgggtcactcccacccgaatactgcgcttttctgacgggcttaaaaaacggcgmaccacgagattatatcccacacctggctcggagggtcctaccccatggagtctccctgattgctagcacagcagtgtgagatcaaactgcaaggcagcagcgaggctgggggaggggcgcccaccattgcccaggcttgcttaggtaaacaaagcagcctggaagctcgaactgggtggagcctaccacagctcaagga

SEQ ID NO: 757655 - DNA, 438 bp, Homo sapiens
aatggaaatggatagactcatcatcgaatggattcgaatggaatcatcgaatgaaattgattgaaatcttcatcaaatggaatcaaatggaatcattgaatggcatcgaatggaatcatcgtcagatggaaatgaatggaatcatcacagaatggaatcgaatggattcattgaagggaatcagatgsaatcatcgaatggagttgaatggaatcattgaatggactcgaatggaatcattattgaatggaattgaacggaatcatcgaatggtcccgaatggagacattatcaaatggaatcgaatggaatcaccgaatagaatcgaatggaacaatcatcgaatggactcaaatggaattatcctcaaatggaatcgaatggaattatcgaatgcaatcgaatggaattatcgaatgcaatcgaatagaatcatca

SEQ ID NO: 757656 - DNA, 447 bp, Homo sapiens
caaatggtactgaatggaattgtcatcaaatggaattcaaaggaatcatcatcaaatggaaccgaatggaatcctcattgaatggaaatgaaaggagtcatcatctaatggaatcgcatggaatcatcatcaaatggaatcgaatggaatcttcatcaaatggaatcgaatggaatcattgaacggaattgaatggaatcgtcatcgaatgaattgaatgcaatcatcgaatggtctcgaatggaatcatcttcaaatggaaaggaatggaatcatcgcatagaatcgaatggaattatcatcgaatggacycgaatggaaccaacatcaaacggaatcaaacggaattatcgaatggaatcgaagagaatcatcgaatggccacgaatggaatcatctaatggaatggaatggaataatccatggacccgaatgcaatcatcatcg

SEQ ID NO: 757657 - DNA, 487 bp, Homo sapiens
atcaaatggaatcgaatggaatcatcatcaaatggaatctaatggaatcattgaacggaattgaatggaatcgtcatcgaatgaattgagtgcaatcatcgaatggtctcgaaaggaataatcttcaaatggaaaggaatggaatcatctcatagaatcgaatggaattatcaacgaatggactcgaatggaatcaacatcaaacggaatcaaacggaattatcgaatggaatcgaagagaatcatcgaatggccacgaatggaatcatctaatggaatggaatggaataatccatggacccgaatgcaatcatcatcgaatagaatcgaatgcaatcatcgaatggacwcgaatggaataatcattgaacggaatcgaatggaatcttcgtcgaatggaaacgcatggaatcatcaacgaatggaaatgaaaggagtcatcatctaatggaatcgcacggaatcatcatcaaatggaatcgaatgg

SEQ ID NO: 757658 - DNA, 586 bp, Homo sapiens
ggaatagaattgaattgaatggcatgaactggaattaaacggaattgaattgaatgtaatggaatttactcgaatgtaatggatgggaataaaatggcctcgaatgagatggactcgaatggaatggagttgaaagaagttgaatccataggaatggactccggtggaatgcaatcaaatggagtggactggaatggaagggattcaaaaggagttgcctggaatagaacggtctcgaatggaatggaatcgaatggagtgaaatggaaaggaatggaatggaatgaaatggaatagaatggaatggaatggaaaacacgaacgtaatggattggaayggaatggaatccactggaataaaatcgaatggaatagaatcgaaaggaaaggaatcaaatcaaatgcacatgaattgaatggacaagaatgaaactttctcgagtggaatggtattgaatggaatggaattgaatggaatggaatagagtggaatggaatgggatggaatggaatacaatggaatggaatggaatcaaaaggaatgaagcggaatggaaacgaatggaaaggaatggaatggaataga

SEQ ID NO: 757659 - DNA, 586 bp, Homo sapiens
ggaatagaattgaattgaatggcatgaactggaattaaacggaattgaattgaatgtaatggaatttactcgaatgtaatggatgggaataaaatggcctcgaatgagatggactcgaatggaatggagttgaaagaagttgaatccataggaatggactccggtggaatgcaatcaaatggagtggactggaatggaagggattcaaaaggagttgcctggaatagaacggtctcgaatggaatggaatcgaatggagtgaaatggaaaggaatggaatggaatgaaatggaatagaatggaatggaatggaaaacacgaacgtaatggattggaacggaatggaatccactggaataaaatcgaatggaatagaatcgaaaggaaaggaatcaaatcaaatgcacatgaatkgaatggacaagaatgaaactttctcgagtggaatggtattgaatggaatggaattgaatggaatggaatagagtggaatggaatgggatggaatggaatacaatggaatggaatggaatcaaaaggaatgaagcggaatggaaacgaatggaaaggaatggaatggaataga

SEQ ID NO: 757660 - DNA, 573 bp, Homo sapiens
gaattctcgcatatctctgcactgatcacccgggtgatgtaaatcctgtctaggttcagcctacaggagctttttgacatatctctgcactgatcacccaggtgatgtaacccttttcaaagctctgcctacaggggcattgtgacagttctctccactgctcacccaggtgatgtaacaattgtctgggctttgcctacagggagctttgtgatatacatttccactgatcaaacaggtgatgtaacccttgtcaaggttgtgcttacaggggctttgtgacatatctctgcactratcaccccactgaggaaacacttgactacactctgcctacaggaggctttatgacttatccctgcactgatcactaggtgatgtaacacttttctaggctcggtctacacgagaattttcacatatctctacactgatcacctaagtgttgtaacccttgtctaggttcagcctactggggatttctcacacacctatgcagtgatcaccgaagcgatgtaaatcatttccaggctttttgtacaggggacatttcgatatatctctgcactgatc

SEQ ID NO: 757661 - DNA, 604 bp, Homo sapiens
taataaatccattatgtgttaacatatttttattaaaaccaactatatttttcaaaagagaaaagaaatcactgagaagagtggcattaatctacatgtgtgtcagtctctgtctggctttaatggaagacagctggactcacccagctgcctctgccttccacctgttacggtgygttttggggaatatatgaggaaaatccagacgtgtgtgtgtgtgtgtacatacatatatgtagggggagaaaagaatatttttagaacttttttggattattatggatattcttattttaatctttacaaaaacctgaaaagtgatagtttttaaaatgattaatggccacgtagaatccgaagccacattggtgaacgtttccttctctcctacactaatattcatttgtctatcttgccctttgaatgggccttttacccaggcctaactttgtaacttcatgtgttcaccatttggaaaatatcggtttactgagacgtgcagaaattccaaatgcagacgtctccgagagactgaatatacgaagggacgctgggtagaccacagaaaagccacaactctgacccacacctgcatcagcctgcc

SEQ ID NO: 757662 - DNA, 604 bp, Homo sapiens
taataaatccattatgtgttaacatatttttattaaaaccaactatatttttcaaaagagaaaagaaatcactgagaagagtggcattaatctacatgtgtgtcagtctctgtctggctttaatggaagacagctggactcacccagctgcctctgccttccacctgttacggtgtgttttggggaatatatgaggaaaatccagacgtgtgtgtgtgtgtgtacatacatatatgtagggggagaaaagaatatttttagaacttttttggattattatggatattcttattttaatctttacaaaaacctgaaaagtgatagtttttaaaatgattaatggccacgtagaatccgaagccacaytggtgaacgtttccttctctcctacactaatattcatttgtctatcttgccctttgaatgggccttttacccaggcctaactttgtaacttcatgtgttcaccatttggaaaatatcggtttactgagacgtgcagaaattccaaatgcagacgtctccgagagactgaatatacgaagggacgctgggtagaccacagaaaagccacaactctgacccacacctgcatcagcctgcc

SEQ ID NO: 757663 - DNA, 618 bp, Homo sapiens
atatggctggagcctcctataaccgctattccccaatcttctctaatctcgatctcctattctctattcagcctttgtactctgctatgttacacatttttatagtatttgccatcttacaaaatccctttcttgttgagatatccaaaacgattatcctaatgtctgcactatattccaagctacaacaacccagaatttggtgagtcttcttctacwgatccgcaagctgggcccattttccgggatcccacacaacgctgctgtcagcgtctttgcttgtgtgggaactgaagccaagagctcacactgatgaggcagaggacaaaagtgcccgactctggggaccttcagcacagcctgagctcggaacggtcagctcctcccttgaactgactcattgcctggtgtctgggtctgtccttgctgtgtgcttcaacccggggcacaagaatgagagggtgaccccagacctgagcacgagcacgctgtgcgtcgagcacctaagtccacacagtgcttggcctctgtcttctcacctcccttttctttctttttttatttcttaaatcaactaaaatttatttaattaagcataaagttacttacacatttgcc

SEQ ID NO: 757664 - DNA, 618 bp, Homo sapiens
atatggctggagcctcctataaccgctattccccaatcttctctaatctcgatctcctattctctattcagcctttgtactctgctatgttacacatttttatagtatttgccatcttacaaaatccctttcttgttgagatatccaaaacgattatcctaatgtctgcactatattccaagctacaacaacccagaatttggtgagtcttcttctactgatccgcaagctgggcccattttccgggatcccacacaacgctgctgtcagcrtctttgcttgtgtgggaactgaagccaagagctcacactgatgaggcagaggacaaaagtgcccgactctggggaccttcagcacagcctgagctcggaacggtcagctcctcccttgaactgactcattgcctggtgtctgggtctgtccttgctgtgtgcttcaacccggggcacaagaatgagagggtgaccccagacctgagcacgagcacgctgtgcgtcgagcacctaagtccacacagtgcttggcctctgtcttctcacctcccttttctttctttttttatttcttaaatcaactaaaatttatttaattaagcataaagttacttacacatttgcc

SEQ ID NO: 757665 - DNA, 489 bp, Homo sapiens
catcagtcaaggttgatggtgaatctttggagggccttactcaaaaacaaaagtttcatcctgagcattgaggccctaggaattttgcaagcagacttaggaaaattgaactcattcatgttgtaaggcccacagagatgcgaaaacctgctcatgccagtccacaaataacttcctctaatagttcccattaccacacagcaagccattcactgaaaatatgcaggacaatrcagaaattcattaattaattcattcacccatcaaatattccttgagtcccttctgtgtgcagatgccaggtgctagaaataaagtggtgcttaaaacacggtagctgccttaaagcagtgcaagatctagattcagagacagaaaaggtagtttcagtggagtgtcacaaggccttccatgaggacaacataagagttaaggaaggacagagggcttgctggaggacgtggtgcttcagctgagaggggaagcccg

SEQ ID NO: 757666 - DNA, 489 bp, Homo sapiens
catcagtcaaggttgatggtgaatctttggagggccttactcaaaaacaaaagtttcatcctgagcattgaggccctaggaattttgcaagcagacttaggaaaattgaactcattcatgttgtaaggcccacagagatgcgaaaacctgctcatgccagtccacaaataacttcctctaatagttcccattaccacacagcaagccattcactgaaaatatgcaggacaatgcagaaattcattaattaattcattcacccatcaaatattccttgagtcccttctgtgtgcagatrccaggtgctagaaataaagtggtgcttaaaacacggtagctgccttaaagcagtgcaagatctagattcagagacagaaaaggtagtttcagtggagtgtcacaaggccttccatgaggacaacataagagttaaggaaggacagagggcttgctggaggacgtggtgcttcagctgagaggggaagcccg

SEQ ID NO: 757667 - DNA, 614 bp, Homo sapiens
gtactggagattcgttaaatgattatgaccaaaatgctgatagaaatatgggcagtgaaggccaggttgatgaggtctcagatgaaaatgaagaacttattgggagctggagcacaggtcaccctcgttacaccttagcaaagaatttggctgcattgtgccaatgtcctagggctttgtggaaggctgagcttcagagtgatgacttagggtatctggaggaaaaaaaaatttctatgcagccaagtattcaagaagtggcaaggctgcttctaccaatctaagatcagatatrggacaaaggaatgacttaaatttgggacttccaatttaaagggaagtagagtgtaaaaacttggaaagtctgcagcctggctcatggtggagaagggaagaacatttcaggagaggaacccaaaggataagaatccaagaggcatgaggaacaaccacttgctggagagattagcatgacagaaagggaagcaggtgctactagtcaagacaatgagaaaaaggctactcctcccattgcaagcccagaggcctaagaggacagactggtttcagggacaaggccaggggcattgctactcagtgctgccttggggtgc

SEQ ID NO: 757668 - DNA, 445 bp, Homo sapiens
caaagccctccaaatgtccacttgcagattctggaaaaagagtgtttcaaagcttctctctcgaaaggaaagttcaactctgtgagttgaatgcaagcatcacaaagaagtttctgagaatgcttctgtttagctttyctgtgaagattctcccgtttccaacgaaatcttcaaaataggtccgaatatccacttgcagattccacacaaagagtgattggaaactgctctttgaaaaggaaccttcaactctgtgagttgaatgcaatcatcacaaagaagtttctgacaatgcttctctccagtttttatgtgaccataattcgttttccaccacaggcctgaaagcgctccaaatgtccacttgtagacactacgaaaagcatgtttcagaactactctatgaaaagcaatgtgaaactctgggagttgaacacaaacatca

SEQ ID NO: 757669 - DNA, 625 bp, Homo sapiens
tctagcttttacgggaagataattccttttccaccacaggcctcaaagccctccaaatgtccacttgcagattctggaaaaagagtgtttcaaagcttctctctcgaaaggaaagttcaactctgtgagttgaatgcaagcatcacaaagaagtttctgagaatgcttctgtttagctttcctgtgaagattctcccgtttccaacgaaatcttcaaaataggtccaaatatccacttgcagattccacacaaagagtgattggaaactgctstttgaaaaggaaccttcaactctgtgagttgaatgcaatcatcccaaagaagtttctgacaatgcttctctccagtttttatgtgaccataattcgttttccaccacaggcctgaaagcgctccaaatgtccacttgtagacactacgaaaagcatgtttcagaactactctatgaaaagcaatgtgaaactctgggagttgaacacaaacatcacagagaagtttctgagaatgcttctgtttagtttttatgtgaagatattcccgtttccaaagacatcttcggagaggtccacatatccacttgcagattccacaaaaagagagtttcaacactgctctatccatagg

SEQ ID NO: 757670 - DNA, 600 bp, Homo sapiens
ttagctttcctgtgaagattctcccgtttccaacgaaatcttcaaaataggtccaaatatccacttgcagattccacacaaagagtgattggaaactgctctttgaaaaggaaccttcaactctgtgagttgaatgcaatcatcwcaaagaagtttctgacaatgcttctctccagtttttatgtgaccataattcgttttccaccacaggcctgaaagcgctccaaatgtccacttgtagacactacgaaaagcatgtttcagaactactctatgaaaagcaatgtgaaactctgggagttgaacacaaacatcacagagaagtttctgagaatgcttctgtttagtttttatgtgaagatattcccgtttccaaagacatcttcggagaggtccacatatccacttgcagattccacaaaaagagagtttcaacactgctctatccataggagggttcaactctgtgagttgaatgcaatcatcacagagaagtttctgagaaggcttctgtctagattttatgcgaagatatacccgtttcgaatgaaggccacagagtggtccaaatatccacttgcagatcctacaaaaagagtg

SEQ ID NO: 757671 - DNA, 531 bp, Homo sapiens
tcatgtgaagatatacccgtttcgaacgaaggacacagagtggtccaaatatccacttgtagatcctgcaaaaagagtgtttcaaacgtgaactttgaaaggaaagttcaactcggggatttgaatgcaaacatcacaaagaagattctgagactgcttctgtttagtcagctgaaattatcccgtttccaacgaattcctcacagaggtccaaatatgcacttgcagattctgcagaaagtgtgtttctaaactgctacatcgcaaggaatgctcagctctgtgagttcaactcaatcatcccaaagaattttctgagaaagcttctgtcttctttytataggaagttatttcctttactacggtaggcctcaaagaagtgcaattatccccttgcagtttctacaaaaagagtgtttcaaagctgaactatcaaagaaaggttcagcactgtgagttgaatgcaaacatcacgaagagggttctgagaatgcttctgttttagttctgtgcgggttatcccgtttccaa

SEQ ID NO: 757672 - DNA, 574 bp, Homo sapiens
gccctccaaatgtccacttgcagattctggaaaaagagtgtttcaaagcttctctctcgaaaggaaagttcaactctgtgagttgaatgcaagcatcacaaagaagtttctgagaatgcttctgtttagctttcctgtgaagattctcccgtttccaacgaaatcttcaaaataggtccaaatatccacttgcagattccacagaaagagtgattggaaactgctstttgaaaaggaaccttcaactctgtgagttgaatgcaatcatcccaaagaagtttctgacaatgcttctctccagtttttatgtgaccataattcgttttccaccacaggcctgaaagcgctccaaatgtccacttgtagacactacgaaaagcatgtttcagaactactctatgaaaagcaatgtgaaactctgggagttgaacacaaacatcacagagaagtttctgagaatgcttctgtttagtttttatgtgaagatattcccgtttccaaagacatcttcggagaggtccacatatccacttgcagattccacaaaaagagagtttcaacactgctctatcca

SEQ ID NO: 757673 - DNA, 482 bp, Homo sapiens
aaagagtgtttcaaagcttctctctcgaaaggaaagttcaactctgtgagttgaatgcaagcatcacaaagaagtttctgagaatgcttctgtttagctttcctgtgaagattctcccgtttccaacgaaatcttcaaaataggtccaaatatccacttgcagattccacagaaagagtgattggaaactgctctttgaaaaggaaccttcaactctgtgasttgaatgcaatcatcccaaagaagtttctgacaatgcttctctccagtttttatgtgaccataattcgttttccaccacaggcctgaaagcgctccaaatgtccacttgtagacactacgaaaagcatgtttcagaactactctatgaaaagcaatgtgaaactctgggagttgaacacaaacatcacagagaagtttctgagaatgcttctgtttagtttttatgtgaagatattcccgtttccaaagacatcttcgga

SEQ ID NO: 757674 - DNA, 489 bp, Homo sapiens
agaatctacaagtggatatttggacctctctgaggatttcgttggaaacgggataactgcacctaactaaacggaagcattctcagaaacttcttggtgatgtttgcgttcaaatcccagagttgaaccttcctttgatagttcaggtttgaaacactctttttgtaggatctgcaagtggmtatttggaccactctgtggccttcgttcgaaacgggtatatcttcgcataaaatctagacagaagcattctcagaaacttctctgtgatgattgcattcaactcacagagttgaaccctcctatggatagagcagtgttgaaactctctttttgtggaatctgcaagtggatatgtggacctctccgaagatgtctttggaaacgggaatatcttcacataaaaactaaacagaagcattctcagaaacttctctgtgatgtttgtgttcaactcccagagtttcacattgcttttcatagagtagt

SEQ ID NO: 757675 - DNA, 530 bp, Homo sapiens
attctcagaaacttctctgtgatgattgcattcaactcacagagttgaaccctcctatggatagagcagtgttgaaactctctttttgtggaatctgcaagtggatatgtggacctctccgaagatgtctttggaaacgggaatatcttcacataaaaactaaacagaagcattctcagaaacttctctgtgatgtttgtgttcaactcccagagtttcacattgcttttcatagagtagttctgaaacatgcttttcgtagtgtctacaagtggacatttggagcgctttcaggcctgtggtggaaaacgaattatggtcacataaawactggagagaagcattgtcagaaacttctttgtgatgattgcattcaactcacagagttgaaggttccttttcaaagagcagtttccaatcactctttgtgtggaatctgcaagtggatatttggacctattttgaagatttcgttggaaacgggagaatcttcacaggaaagctaaacagaagcattctcagaaacttct

SEQ ID NO: 757676 - DNA, 559 bp, Homo sapiens
ctttttgtaggatctgcaagtggatatttggaccactctgtggccttcgttcgaaacgggtatatcttcgcataaaatctagacagaagcattctcagaaacttctctgtgatgattgcattcaactcacagagttgaaccctcctatggatagagcagtgttgaaactctctttttgtggaatctgcaagtggatatgtggacctctccgaagatgtctttggaaacgggaatatcttcacataaaaactaaacagaagcattctcagaaacttctctgtgatgtttgtgttcaactcccagagtttcacattgcttttcatagagtagttctgaaacatgcttttcgtagtgtctacaagtggacatttggagcgctttcaggcctgtggtggaaaacgaattatggtcacataaaaactggagagaagcattgtcagaaacttctttgtgatgattgcattcaactcacagagttgaaggttccttttcaaasagcagtttccaatcactctttgtgtggaatctgcaagtggatatttggacctattttgaagat

SEQ ID NO: 757677 - DNA, 620 bp, Homo sapiens
gattaattcacatttcttataaagttgtacaatacaaattgcataagaaaataaatgactcttttctattacttggtggaaaaagttgatttatagtccctgagagaaagaactaaggaagagagttaaaattccayttactatatgagatttttaaagatctagcactcatgcatgttgtgaaaatactaagtatctcaaataatgtgtgagattctccttagaggtaaggttttatattgtcaagacattttttcttttattttttctattgagttactgtctttatgctttacttgtacctcatactataaattaaaagattagtgttcggtgtcattgcattaatgaagattattatttacaacaatagctagaaagtgattggaggtttaagtccagtaacttgagcaattaaaacccttgtagattcctatgaggtttaaaaaatacatgttgttaagggaaacctatgtactcaagaaagatagttattgctagtgtaccttcttcaggaaaccaaaaatgtctctcatcaaaaacggcttctggaaaagactggagttttattaacatcttagtatagatttaaagaaatgaatctcttctcctaacaacta

SEQ ID NO: 757678 - DNA, 535 bp, Homo sapiens
tagatataaaagaaaaaactacataccaatatcactcatgaacatagatacaaatttttttaattataagcacgtagtatctacagacatatatatcataaatatatctatggaatatatggaataatgcactataaccaaacaaaaaatgcaagattgaatattttaaattcagtcaatgtaatcaccccattaacaaaaaaaagagagaaaaaccatattatttgaatagatgctaaaaaarcatttgataaaattcaacacatatttatatttgtgaggctaaggaatgtccttggatgctaatccaccatgttgatttctgattaacctctgttctgggaatgcttttcagctttctactttatgtactattaccgtaaatcctatgcttctgtcaaagcaaccttgaccataagaccacaagtccttccctcaggcagattcacataactttcttgccttttcttggggagttgacttcagttgccctgcacgtttcttgtctatgatatataagccctggatcttggtg

SEQ ID NO: 757679 - DNA, 622 bp, Homo sapiens
gccaacatcatacttgattccgagaattcaaatgcttttctaaaaggatcgggaacaacacaaaggcgttttctcaaacaatttctattcaacgctgtactggagatcttgctgaatacaatataaaagaaaataaataaaaggcataaataatggatagatcacagcactgtgtaccttaataaatgtaaaggaattcacaaagacaataacagacctaataagtgaatttgacatgggtacagaacacaaggtcaatgtaatacatacatacacacatgaacaatcaacaaatggttgggaaataaaattgtttaaacaccatttacartgaaatctaaaaagaaacaaaaattataggaataaatctaatgaaatgtgcagaaggcatttttagtgaaagacatttatactgaaagctacaaaacagtactgatagaagaacaaaacaaatacagaattgacctggccatgagttagaaggtgcaatattaagataccaattctcctcaaattgatttacagaatcaataagacccaataaaaattccaaaagactttttaaaaatagaaatgaacaagttcattgtaacaagcatatgaaaagaacaagaagacctag

SEQ ID NO: 757680 - DNA, 640 bp, Homo sapiens
caacatatgttcattaaaaatatattgattcagttatatgtttggcagcacccacacgtgcacacatacacacacgccaactccccggaacatcatttttgtttttacaaaacagtctttaagcaaaaaaaagacaagctgtttcaatgccagaaaggagatggcttggtatacccagaaccatgtctactgcaccatgtgggtgaattagataattttctgttatatttctggtttacatatttgtgaattgaacctaaactcgtaatttggctccaccaaacaagaaggaagcagaaagctttacgaatcttcccaggctttaagggccaaagataaagtayattcccaagataactcattatcttaccatcagtgcgctgcactaatggagtgggtggaccttgaacacttctctgggcctctttgttagttataaagcaagtgtagttgcccacatctgatggttccactttggcaatgtacaagtttcccgtctcttgagatacaaatcgcctattgtcctcttggacgtataaggggttatcattgaaggtccatgcataagataaatctgaaaaacaagaaacaaaacaaaacaaaacaaaacaaaacaaaaccatactgtccttacagcatt

SEQ ID NO: 757681 - DNA, 609 bp, Homo sapiens
atataatagacaaagatataatcaagggatgaaccagaacacaaaggtatctgtaaactggaaatcaataataaagtacctttctctatactgataaagcaaatgttagcttacatagcaattttacaaacattcacttatagaattcttaatcttaagaagtagaaatcttaagattaatattaagaggtagaaacaatgttcagtgatactataggcaaaaatatcttaagttaattgtgcaggatctcacagatagtgattgtcagattcaagatcagaaccttgaaatgtcttctgaaactgccatagcatttcaacatggtggtctaagctcattgtactatatctcaccacaaccaaattagccatttaattagcctgaaatggtccttgtaggggaataatggatacttagtcaataacataatcattatgtttcttagtcacatattaattcacwttctgaagtgctttcaaaagaaaagaggattactgactcagttacctcagagttgaataataactgagaaattcaagaaaagaatctctcagtctgttatattgctgtgtttaagttataattcagaaccaagtaatattgtatat

SEQ ID NO: 757682 - DNA, 568 bp, Homo sapiens
atagcatttcaacatggtggtctaagctcattgtactatatctcaccacaaccaaattagccatttaattagcctgaaatggtccttgtaggggaataatggatacttagtcaataacataatcattatgtttcttagtcacatattaattcacattctgaagtgctttcaaaagaaaagaggattactgastcagttacctcagagttgaataataactgagaaattcaagaaaagaatctctcagtctgttatattgctgtgtttaagttataattcagaaccaagtaatattgtatatccatctatatcgtaattttataatctctaaaagaaatctctaaagtattattcatcatagaaaatagaacatgttcagaggagttaagtggcttttcataaccagtcaatatggcagaaaaaaatctaaaactcaaacctgtatggtagacccaaaatcctaagcatcttctcccatgaatttcctacctagttttaaatttaaaactttgctctccagaattttaatcatccaaagaatgttcacgttgaataaataaatgtgttc

SEQ ID NO: 757683 - DNA, 640 bp, Homo sapiens
agccactgagtctgctgggctgatgcttctgaatacaaactatggcacctggaaggcactgcagagaaaggggggacctcagggctcccattccatcactcttgagtctaggtcataccctccacaatccccaagaggcccgtactgtctcttctgatgggactcctgggttctgtgttgcccaccctgcaaatctgcatgccagcaagtatgggtgacccggctggctgctgggtcaccttcatttgggtgctagccttgctgccttcctttggtgctgttgagattgtccttgccgtgttcactcccagcgcaggcatgcmctggccccaggctgtggctccgattcactcttactgccatgctttgttctcattttttgcttccacagtaagtctgcacaaaatactgtcctcacagctgagcttacctggtgatctattcttttttctcggtcactacttgtccagcttttttttttagacttttggagacagtgattgacaacagaacctagcagccagtgctgcgctagtcccctagccccctccagagcctgtgtcaggcatatgactgactgcatcctctcccctctctctcctctctgccccagatcagtggaccatcccctgcccggatc

SEQ ID NO: 757684 - DNA, 575 bp, Homo sapiens
agtgcagttgctcatgcctgtaattccaggactctgggaggccaggccgaggctggtggatcacgaggtcaggagttcgagatcagcctggccaacacggtgaaaccccatgtctactaaaaagagaaaaaattagccaggcatggtggcacgtgcctgtaataccagctactcaggaagctgaggcaggaaaattgcttaaacccatgagaacccatgaggcagaggttgtagtaagccgagatcactgcagcagactttgtctggggagaggggaagaagagcctagggtttcttttctttctttctttctttyttaaacagacagcgtctcactatgttgcccaggctgtagtgcagtggaataatcatagttcactgcagcttcaaattcctgggctctagtgatccccccacctcagcctcctgagtagctggggctgcaggtgcatgccaccactcctggcaaaagagcctaatattaacagtgttcaattcaagttgttcatataagtggacttgggcacctgggacaattctttttctctgcctcagatttctccaacttggagcac

SEQ ID NO: 757685 - DNA, 578 bp, Homo sapiens
taattagtgttcctcaatagtaacagaggggccaaagaagagaggggatgaagtacattctgatgcctgatgacgtaaagtttttagagtatgtggaattagctctattgtcctcttcctcctaataggtggtggaagcttttgttaccaataccaaaatgccaaggtttggggtttggtctaggttctgcttttcactgcagagaaagccaatcactgggacaacaagtattgtcagggaagaaggctttaatcaggttctgcagccaaggagatgggagatcagtctcaaattcatctgtctcaccaactaaaattaggggtttatatagcasggaagaaatgtaaccttatgtgggaaaacaggaattagggaggagtaaggaagagaagttggtccacaggaagcaggtgctcggttaggcaataatgatgcgtgaggggtctggtgtctcattgtccagaggtggtgatctggtaagtttcagttccttgaaactatctgggagacctgatggttggtttcctgagaaaggaactcaacaaacgtaactttctcaagttttaagactgggagg

SEQ ID NO: 757686 - DNA, 594 bp, Homo sapiens
ttatttaaatgggctattttctccacagactgttttaatttcatgaccctggtctctgggtcattgttattagaatctgattatctcatggaaaattaatatggccacatattttcttatgtgcgtccatacttttggcttacttcttgaatattttattactggctccattgcttttggttggaaaagaaggttcartcattgctgcatagattatcattccagtaggtgccctgggcagcaatttctgaaccatcccttttgaaattttgttcccagctggagaaatgtcacagttgtctcagcttttgactctgacttttagtgagagatgcaaggaataggaaaacactttcaagaagaagcaatgagcagttgtatgcacatctggtgacttattgctgaagattctaaagcatttaaaaatattgattaagcctcaaactgttgggaaattgttcccataactttcattctgcccctagatttgctgaggttttgagctgtatttagcttggtgaatcttgtgtaatggccagaaagagacctcaggagccccatcccccaggttcttattagccttgacaagagtgt

SEQ ID NO: 757687 - DNA, 633 bp, Homo sapiens
aacccagcatctgactggcattcacatttgcaagatccaaggatatagtctatgtgaacaacagcccagtcaatacatacagggaaaagtctacttcagcatctgattagatctttagtaaccttgatctttctagcaagtataaactcttaataatgtgagtttggggaagctgtatcaaggctaaacattccaattaaaattcattatgtgttctaactcagaatcaatcttgtgtaaaagtgtcagatagttggacttgtcagtttcaggtatttacttcattcaaaaaggtaaaaatgccatttacctaggctagaattttatataatctccaatttggattatacagattccctataattacaataacacatccgacaaaaatatacagacattttgtgcataaaaatgaataactttaaataaagaagtaaytaattggagattaacctggggaaaactgctgagagtccataacaattatattcttctcagttatcaacatattattctagagttaggcacacttatttctttaaactcatgaacactgtaaaaagaaaaaaaaattaagtactgaaaaaaagaaaaccacagatatacatacactaatataaacaccaccacaaa

SEQ ID NO: 757688 - DNA, 607 bp, Homo sapiens
tgcctgctttagcctttgtattttgtaaaactgtttctaatggccttgtatggaacttcttcacctaggaattctaatcatatactacttacatgatatgagtcttgaacttcaaatctggatttttctatttaaaccagaaagtaaataamtgtaataaaaatagaaacataccaacacaactccccaaaactatgtgcagcaactctggctacactctcagagagaccccaacatttttggttacttggacatcctgtaactgatcattttattttgccacacgcttcccctagcacactctttcaagtacagtatatagcttgcttaaatttcacattgaaagttttggaaagccatatgaaattattccagatagctgcaggttgctaataaaaccatagttagggatcaccaacttagtaaaaattgaaactagagaaacagtcttcataatctttagccgaggcagtcccttctttccatattatcatcactttctgttcaaagcacatacttttcatgcttctgtgtatagttaaacatgtttctatactccgaaaagttgtcatatcccagagccattcacatcataattacagtagag

SEQ ID NO: 757689 - DNA, 607 bp, Homo sapiens
tgcctgctttagcctttgtattttgtaaaactgtttctaatggccttgtatggaacttcttcacctaggaattctaatcatatactacttacatgatatgagtcttgaacttcaaatctggatttttctatttaaaccagaaagtaaataaatktaataaaaatagaaacataccaacacaactccccaaaactatgtgcagcaactctggctacactctcagagagaccccaacatttttggttacttggacatcctgtaactgatcattttattttgccacacgcttcccctagcacactctttcaagtacagtatatagcttgcttaaatttcacattgaaagttttggaaagccatatgaaattattccagatagctgcaggttgctaataaaaccatagttagggatcaccaacttagtaaaaattgaaactagagaaacagtcttcataatctttagccgaggcagtcccttctttccatattatcatcactttctgttcaaagcacatacttttcatgcttctgtgtatagttaaacatgtttctatactccgaaaagttgtcatatcccagagccattcacatcataattacagtagag

SEQ ID NO: 757690 - DNA, 607 bp, Homo sapiens
tgcctgctttagcctttgtattttgtaaaactgtttctaatggccttgtatggaacttcttcacctaggaattctaatcatatactacttacatgatatgagtcttgaacttcaaatctggatttttctatttaaaccagaaagtaaataaatgtaataaaaatagaaacataccaacacaactccccaaaactatgtgcagcaactctggctacactctcagagagaccccaacatttttggttacttggacatcctgtaactgatcattttattttgccacackcttcccctagcacactctttcaagtacagtatatagcttgcttaaatttcacattgaaagttttggaaagccatatgaaattattccagatagctgcaggttgctaataaaaccatagttagggatcaccaacttagtaaaaattgaaactagagaaacagtcttcataatctttagccgaggcagtcccttctttccatattatcatcactttctgttcaaagcacatacttttcatgcttctgtgtatagttaaacatgtttctatactccgaaaagttgtcatatcccagagccattcacatcataattacagtagag

SEQ ID NO: 757691 - DNA, 665 bp, Homo sapiens
caagtacagtatatagcttgcttaaatttcacattgaaagttttggaaagccatatgaaattattccagatagctgcaggttgctaataaaaccatagttagggatcaccaacttagtaaaaattgaaactagagaaacagtcttcataatctttagccgaggcagtcccttctttccatattatcatcactttctgttcaaagcacatacttttcatgcttctgtgtatagttaaacatgtttctatactccgaaaagttgtcatatcccagagccattcacatcataattacagtagagttgaacatttatattaaaattgttsgcagatggcaattaaggtactagaaaaattaatcttttttggaatgtttcttacagatggagataaagtattttgaggagggaggagagtgtatttcttcatttacacaaagatactcatatggagctgggggcagttcttccccaaaaggaaacattgaactcaaagttccatgtaagcaaggactgtggctgtcatgtctaccattgtatatcccagcacctagcactggacctagtataaattttgtgctaaattaatatttattgactgcatggatgaactctctattttatttatggttcttccaatttattgctatctgttttccattacttg

SEQ ID NO: 757692 - DNA, 542 bp, Homo sapiens
aatgaagtattttaataaaattattgatgaacataatggaaatatggggcattatataaatattacatactattggttgatttgtgtgatgatgacatttgaagtttatttcagatgcttccttttattaatcatgtctttacagccggggtcttctctttggcagagcacttacaaaatatagtgcatgacacaccactaatgtttctctgaattatctgcctccttcttgtacagatacatctcatctctcttacattccttctaccctctactgttcattacaatctagatcagggatcagtaaactttttattttgagggccagattgtamatattttaggctttgcaggccattagagtttctgttgcaactattcaactttgctattgtaatgtgaaggtggccataactaacaaacaaacatggctgtattccagtaaaattgacccacacaaacaggtgaatggggcatagtttgctgactactgatccagattgctagcacactatcctttcattttctaaaatatcaccatg

SEQ ID NO: 757693 - DNA, 631 bp, Homo sapiens
gtgaaagccagacacagaaagaaaaatactgcatgatctcatcattcgtggaatctaaaaaacctgatctcacagaagtagaaagtagaacagtggttaccagtggctaaggagagtaggaggagggtgggaggaggagagatggtcaacaggcacacaattacagttagatagaaggaataaattctggtgtcctattgcacagtagggtgaaaataattaagaatattatattgtatatttcaaaatagtgtggtggcttacgcctgtaatcccagcactttgggagtccaaggcagrtggataacctaggtcaggagttcgagaccagccttaccaacatggtgaaaccccatctctactaaaaatacaaaaattagctgggcatggtggtgtgtgcctgtaatcccagctaccagggaggctgacacaggataatcgcttgaacccaggaggcagaggttgcagtgagccgagatcgcgccattgcactccagcctgggtgacagagcaagactccatctcaaaaataaaattaaattaaaactaaaaaaagaaaatagctagaaaaaaggattttgaatgttctcaccacaaagaaataataaatatttgaggtaatgagtaagct

SEQ ID NO: 757694 - DNA, 631 bp, Homo sapiens
gtgaaagccagacacagaaagaaaaatactgcatgatctcatcattcgtggaatctaaaaaacctgatctcacagaagtagaaagtagaacagtggttaccagtggctaaggagagtaggaggagggtgggaggaggagagatggtcaacaggcacacaattacagttagatagaaggaataaattctggtgtcctattgcacagtagggtgaaaataattaagaatattatattgtatatttcaaaatagtgtggtggcttacgcctgtaatcccagcactttgggagtccaaggcaggtggataacytaggtcaggagttcgagaccagccttaccaacatggtgaaaccccatctctactaaaaatacaaaaattagctgggcatggtggtgtgtgcctgtaatcccagctaccagggaggctgacacaggataatcgcttgaacccaggaggcagaggttgcagtgagccgagatcgcgccattgcactccagcctgggtgacagagcaagactccatctcaaaaataaaattaaattaaaactaaaaaaagaaaatagctagaaaaaaggattttgaatgttctcaccacaaagaaataataaatatttgaggtaatgagtaagct

SEQ ID NO: 757695 - DNA, 595 bp, Homo sapiens
aacattaccttcaaggtatagatattatttaactacctagcctaatgtttatgacccttgctgagcacccagattctgtttatgttcagcgtactgaattaatttcagtctacaaacttgcattgttctttcttgtcaatggatcaagctctccaccttcatttgtcttcttggcaaactctttttattccttaagactcagttcagtcaactttgctatgaagccttgcctgatgccctctccactatgttctgcacacagcagtcttcaccatattgcattgtaaacatttgcaccccacctaggtggaagatccacagctactcacctgttatccttgatcctcattagtcccaaggttgacrtatgaatctcttctccctacaccatgcccagtttctaaaattccaatgagagattaaggtgggttgacatgtatgcatttaaagtacaactaccaacaggtttaaagtgatctctttctctttttgtggggcgagaatgaagatagggggcatggaggttgtatatgacaaacttttattatctgtattttacactttggattatttcttaaaatttacagaaaaatca

SEQ ID NO: 757696 - DNA, 529 bp, Homo sapiens
tttgcagcttctttggcttgctaaccttgaaatgaattttcaaaaatggagggtatttacattcattcaaattctacacataatttttaaatagaatttaaaaattactcataaaatatatattttacatttgcataattaaatgtatacaaatgcaaccatcctatattatcatagattacctagattttaatgtaaccataaacacactgctttacacctaacacaataactagtggatggcaaataagaaaagaagcaacaaatgctaggcactccagaaaacataaaggggtactggcagcacaaccaaacacaaagggtacttatttaaatccattkggtccacaaggcaagcgaaggaagaagagaagtatctgactaatacctaatatttaaattctagacaaaacatttcagtgcaaatcaggaagtgctttatttactctgatccaagtcaaaggtagctggataattagttttctttaaacaatattcagctttgctgacatctcattttccaaaagca

SEQ ID NO: 757697 - DNA, 623 bp, Homo sapiens
atatcatttgttctccatctgtgagggtaaaatcaccagcttacagataatggcctcatttccatttcttccctagcttagtgtggcaaagtactgttagtaagtagggcagtctgagcggatttgggcagctgggatggaatttggacttctgtgacaaaggaccagtagaagcctagcaggatctagcatttgaaaggagtatcatgtaaggaaaagctagtagtgtggtggtggtttttctttctttttcttttcttttcttttctttttttttttttttgggtagttgagaaaggattagtttgggattcagtctcgaggtgaggttgtgagaaacagctttggaatttgagagtctctggagatcaaacttaatgcttcaatgaaaaagccagtgcttttatcgttcataaataattttaaatcttccataaccatytgcacatctaaggaattcagatgtttcaaatatacttatttctttgaaaactggaatggtaaggttgcaaccttgtaaactgcttattagagtaggaaaactaaatgacatacttaaaatcagtttttttaaaaagttatatctctgcagcctctaaaccaaagattttcttttgacatat

SEQ ID NO: 757698 - DNA, 456 bp, Homo sapiens
caggatcatggtgaagtccctggcatacaggaagggctcagatctgcagtgaatgagtgacagtgagcgtgcagtaacgtctttctcacagggacaggcatggtgtgggccagccctagaaatgaggacccatctggtggtttttccgtgggggaggagcgtagtacctgccctggaagccctccagccccctggcaasgtgccttcacacctatgcgtccctttcagtttcctagtctgaaaccaaagctcagagggtttaggtgatgtgcccggcatcctggggccagtcagcggcagagcccgaactggcacccaggccagagctgtcccagcacactgcaccccggcccctcctgggtggagagctgcctctggagtgttgctaggcctgggtggggagtaggctataggcaggctgctggagacactgagggctttggcccaccttcctag

SEQ ID NO: 757699 - DNA, 456 bp, Homo sapiens
caggatcatggtgaagtccctggcatacaggaagggctcagatctgcagtgaatgagtgacagtgagcgtgcagtaacgtctttctcacagggacaggcatggtgtgggccagccctagaaatgaggacccatctggtggtttttccgtgggggaggagcgtagtacctgccctggaagccctccagccccctggcaaggtgccttcacacctatgcgtccctttcagtttcctagtctgaaaccraagctcagagggtttaggtgatgtgcccggcatcctggggccagtcagcggcagagcccgaactggcacccaggccagagctgtcccagcacactgcaccccggcccctcctgggtggagagctgcctctggagtgttgctaggcctgggtggggagtaggctataggcaggctgctggagacactgagggctttggcccaccttcctag

SEQ ID NO: 757700 - DNA, 579 bp, Homo sapiens
caaacccccgtgacacatgtttacctgtgtaacaaaccttcacatgtacccccaaacctaaaataaaaattacaaaagaaacatagaaacgccttggtgactttctagatgagaaggagatggaaaaatcagtgatgatgggtccaatgggtgtatatgaggctgccattgacagtaacagaacatttttgaaagggagytacttcatggggaaaacaacaagttcaggtgtgtttacacactcacggctgtatcttacccactagctctctgtgtcccaagcccttctcgattctaggattttcctggtaggctctgagaatatgcatcagagacacctgtagcacagttaagtggaaacagatcactataaaaggctttatgagcgtccctccttttattgagttgtagttctttttatactagggaaatgaaccttttttgtctatgttacaagttgcaaatacatgtatttcctctagtttgtcacttgtcttttgactctgcttataatggtatttaccatgtcaactttaatttttatgaactcacaattatcataacaggagattttaaaaa

SEQ ID NO: 757701 - DNA, 662 bp, Homo sapiens
atatcatgctattccctccaggatcctgtcccctgtttttctccccctgccatgaggagtagcatcctcatttagcctttccctcagaaagtccccacgcttatcactacacatgaatagatcccaggaaggtcactttctcatggttctgcaaaaagccaaactccagttgaggtccagtttgaacccaactagttcactcctctgccctagaaaggccatttctgctcaatcttactgccccacctctacttccaacttgcaaagatctcttgaaaccctgcctcctgttgtgggagctagttttcttttcttttttttccttttcattacacagtttcattttgacataacagtagattcacacgcaattttaataaattgtacagagaggtctcatgaatctgttacccacttccccctatggtaacattctgtgaaagcctagcctaatgtcacaatcagaatgttgacttcatacagaatcccytgtggtgcccttttataactacactcacttccctcctgcccccaccccttccttgacccttggcaatactagtctgttctccattcttacagttttgtcatttcaggaatgttctataaatggaattatgcagtgtgtaaccttttgtgattggctgttttcactcagcaca

SEQ ID NO: 757702 - DNA, 695 bp, Homo sapiens
aaactatcagccattgctggtttgcagatggaggaagggggcatgagccatggaaagcagatagcctccagaagctgggaaaggcaaggctgcagactctccagaaggaacccaggccttttggcaccttcatgttaagtcagtgaaactgacctcacacttctgacattcagaactgtacgataatcagtgtgttgttccagctgggcacggtggcttatgcctataattacagcactttgggaggctgcarcgggaggatctcttgaggccaggagtttgagaccagcctgggcaacctgatgaaacccctgtctctacaaaaataaaaaaattagctgagtgtggttgcacgcatctgccccggctattcagaagctgaggtgggagaatctcttgaacccgagagattgaggctgcagtgggccatgatcatgccactgcactcagcctgggcaacagagcatgaccctgtctcaaaaaaaaaggaaagaaagtaagtgttatttgaaggtactaagtttgtggcaatgtgttacaacagcagtaggaaacagatacggggctgtcattaaccctgctttacagatgaagtacgggggccaggcagtcacctgggctcacccagctagtgggctaccgagctggaagaaccaggttgtccgaccccttcttcactgcccaccacacctcac

SEQ ID NO: 757703 - DNA, 596 bp, Homo sapiens
ggggtcctctgctgggggtccaccccacaggagatggagggaggccaagagaggtgcagctgctgaggccatgatgacaagggttggggcaaaagtggcaactggtctccatcagctggggtcttcccgtctgtacccatcatcccctggggcaggggtggggacaaggctgtgcaggtgatgggaaatggctgggttctgggagggaggtatgagccctcaaccatacctgccctcaaccaacaagatctgtgtgcccataacccacctrccccagagtggaagtagggaaggtgcctccagcccctgggtgtcatctgaggcccctggcaccggctcactcccaccttctggcccaaccctgctgccttaacctccaaccaggccgtgagtggaatttttgggactcagtacacagtggattctcaaaggtcaagaccaagaatttatgattagaaatttgggggaaagtggggatggcgtgggagttctaagaaaggggctttccccagctgctccaccatcccccactcccttcctgactcagctggcagggagggagccccttctgtgcaaagcactgcccccggttccag

SEQ ID NO: 757704 - DNA, 497 bp, Homo sapiens
atgaaaaggcaaatattatctttttttattatactttaagttctgggatacatatgcagtacgtgcaagtttgttacataggtatacatgtgccatggtggtttgctgcacccatcaacctgtcatctacattaggtatttctgctaatgatatccctcccctatcccctaccttccgacaggccccggtgtgtgatgttcccctccctggggcacccccatttctatgagggattctcttggagctcctctcatcacaatgacggctctytacgtgaccacttcccccaccatcctcttctttctcttccctccccagtctttcctatagatggtgtgtgttggtggtttggggtggagcctggtgttagaggggctggttgtgtttctttttgatgaagaccttggggacatgtctgctgctggtgggtctctttagatgtgtgatagtgagcacgtctttgcccttagttttgtttccagtgtcttggggcaac

SEQ ID NO: 757705 - DNA, 608 bp, Homo sapiens
  misc_feature 525, 540, 545: n = A,T,C or G
aaacaaagcaaaggctaccatcatttaattgtcacaaatcattttttatttttctttttatcttttactttaattctttactaattattttttcctcctttttcaaggtcttcaaatattgagttaggtaggactatttgatttcttttacctgaaataactgaattaggagaccagagagaggatagtacatcacttgggcrcatcgaggctctgggtacatgtgtagtatgtgtggtatcagtgtcataaagggctctctggaatatgtggcttgtggttacaatgttgcatgcttattaccttgtacctcccacctgagcccctcaggctagaatgtgagtcccaaatcacacattttagtgtgtgatgtagtgaagagggagaatgggtcctgtcaggccatcatttttctcagtggtaaaattgggagcaatatctattgtattagggtgtgtgtctgtgtgtttctctctctatgagagagatttttattaaggaattggtcaattttgcaattgggtngggggaaaaaggggnggggncttattaagtccacaaatcttcaggtatgttggaggctggaaacccacggaagatttgcagtt

SEQ ID NO: 757706 - DNA, 604 bp, Homo sapiens
ccccgttcttactcacaatgccatattacaaaaggcatgatacagggcaagctgtgactgttggcatttaatcagcaactggagggagagccaacctcaccacttttccagttcaaaattcaaatggatgtattaaggtattatctttgttaaagaaaacaggaatcatgccatggcagacaacaatataattttccttcaggtctcttaagttctatgaccttggccaagtcacttaatctctttgggctttgattatttctttataaaaagtggttaataacacacaacctgctgaaggttcactttttctgcagttatctaccagttctaagtcctaataactaataattctaataacaaagaagaagacaatacttgtcaatttccctgcacagagtagacaactactgaaaasgaattattctccagggtggctgctaagtgtagaacaaaacacaaggccttgagaaataagaacatcaacaaaaacaataatctttccttctaattgcacgaatttcacaggtcacaggtgtattcatgtccagggacataagattgcttcctcaggaaggctttccagaaccttcagattaggcta

SEQ ID NO: 757707 - DNA, 506 bp, Homo sapiens
gacattatctaatctggacctcccaacaacctcaagagaaagctctaatcattcattctgcaagtgaggaaactgagggtttaggtaatgaagtgacttacttactctgacacactggtgagtcacaaggtggcctctgtatcctggctacctagaatttctcctctgccagaacacactatgtgtccccaggttcctggccatttggaccatgatttgaacacactgtgtgctaggaacggtgctaaatgttttccacatgtaatcttatttaatcttttcagtaggccatcaaatgggtattaatattcccattatacagataagaaaactgaggttcagagagattamttagttcaaaaatcaaacagctaatgagtaaaagtgcctggattcaaaacccaggtctttgtggaaaaaaattaagttggaggtctgtctcactccttatactaaaataaattctggatggattcaaagtttggatctaaaaaactgaaggcata

SEQ ID NO: 757708 - DNA, 531 bp, Homo sapiens
tacttaaaaacataatgttaaaattgaattgtaaatacaatgtgaacccttttttaatttttaatgcatttttaattggcaaataaaattttacgtatggtgtatataacatgatgttctgaaatacgtatatgctgtagaatggctaaattgagctaattaacataagcattacctcatatatttatcattttttgtgataagaccacttaaaatctactcccttagcaatttttaagtatataatayatcccattatttttcaaaatacagttttccattactatctgaattttcattgtacaaactttcaatattaaaaattcatgaactaaatagactactgaaaaggtccataaaccttgtcaccccagcacaccatagatattctaagttacaagaatttcatgtctatatcattcccaccaaaagaaattagggcttattagtgaagtggctgattgacatttgggacaaggaagctgcaagataagcttatgcattttgctgtgcaaggaagcaagaaagtgc

SEQ ID NO: 757709 - DNA, 482 bp, Homo sapiens
aagcaagtttcaactgctttagttaatagattctgagttgtatcattgtccagtgtttctggaattttattaggatcctgaatgtaccttgattggaaaaaaagtaaaaaatgtgaagcaatgaactttgaaattttacttgccataaagtcagagacacaattaatttgaaaatgcagcatgaaccttttatagaggaaaaaaagtgactttaagagccaggcagtttgttctctctagtttctcatagcacagaaaaatcaacaaaaccaattgatcaagtgkgagtaaagtagttacctgcctaaccatcaggcccggcatgattataaggaaaaataaaagtggcagtgggaatagtggtggcatctctagctcttcacttgaaagcaggaaaaagtcatcccttttctctgataagcctggttgtggtccctttattgtctcaagcacaaaaatgtggacatagatttcttgcatgt

SEQ ID NO: 757710 - DNA, 623 bp, Homo sapiens
agcaccttgagctgcccgcccggcagcagcagctgggatgtctggctgtgcagaggccagactccatgctcactcacacacctctctctgctccacgcctgactccagtctcccttggaggcatgggatccagcccggtagcatgagctgagcacagcctgccaggccgagtgggcggaacaagcccagaaggcctgagcaaaactagggcaaaggcgccaccggccacaggtttccagccagaaaagcaacgccccaaagatcccatgtcactacctcaagggctgttgtgagatttaaatgagatatttttgtaaagcatctgtcacagtacctggcctatwggaagtgctctataaatattaattcccttcctcctaatgactttgtgaatgtcagttttatctctccaacaagatgttcttgaagacagatcatatattttatgtatttcattagatcatccacattcctagaacatagctcaatgcatcataggcacttaattaagtacttcttggtttgatcacaagtgaaaatcacggctgtacgtatgcctgacaatagaccagtgtttcctaaatgctggtaccagttgaactgcattaaactcatccaaagag

SEQ ID NO: 757711 - DNA, 727 bp, Homo sapiens
aacctacccataggagataatacaacataatctaaataaaactttcagagacaaggcatgtggcttctggacagccacaaactccctgtttctgctctagtgttttggccaccaaaagaaagccaagtggcctcaggtctcttaaaaaacaaaaaagcaacctatggaagatggcgtggtatttgaggaatatttggggtctcttgaaaaatgcatcctgtattttatttcaagaaaagactccctcataatgtcaggtaagtgaagagccctcagagacacatgcacacacaaagaaaaacaaaacaacatagaatgartcccaccaaaatgtgttatgatggcagaattatgggtgatatgatcttctgtaatatatatttttattaaaaatagaaaaaaagcagacttacccttgattatctatagcctctgacccaagtggcttggaatcagaaaacaacatcactcgacttgaagccatcttggcatcaatggtggagtgggtggagatgagactctggaccagctcatgggtgggccccacctcgtcctgtcaagaccaccaagaaagggcacgtgaggaaagcacaaagatcctggagagacactggtttcactcagttctcaaaattatcttagacacatttcctgagaacctttcttaatgcctcaaaaaccagagaagaaaatccttataacaaagcttgaaatggatccccatctc

SEQ ID NO: 757712 - DNA, 519 bp, Homo sapiens
atatgattttcaggtactatgctaagcacagccaattctcacaatagtcttataaggtattgaaagttattttccatgttttatgcatgagaggaaactgagggttagaaatgttactaatatgtaacattctcaaagtcacatagcaagtgctacactgatttggctatcttagccatttggctatcctgtctcttcagcacattcttcctacacatacaccctgagacattcagcaatattttatctacactaccaattttactccaaaaaaattctactcaatagcattagccgagtcactgctttgtcataaaaacaaaattcatattcttatctactgccttacacaggtctttccrcagacccttcaacacatgtagcagaggaatcccataaaagccaatacagtgctacatagtaacccagcgtcactgaagacgtcattgctgaataaaagttcatttgcttgaagctgggcgtggctactcaatgaaatagaaatatgggattaagcaa

SEQ ID NO: 757713 - DNA, 556 bp, Homo sapiens
gtatgacagggaatctgaaagctcccagcactttgggaggctgaggtgggtggatcacctgaggttgggagtttgagaccagcctgaccaacgtggagaaaccccatctctactaaaagtgcaaaattagctgggcatggtggtacatgcctgtaatcccagctacttgggagactgagrcaggagaattgcttgaacctgggaggcagaggttgcagtgagctgagattgcaccattgcactccagcctgggcaacaagaatgaaactctgtctcaaaaaaaaaaaaaagattcaatctaaaaagatcttcaccaaagcacattatagtcagactgacaaaagtcaaattacaaagagagaattctaaaaacagcaagagaaaagtatcaagtcacacatataagagtattcctatcagacaaatagtggatttcttagcagaaaccttattttataggcaaggagaaaatgggaagatatactcaaagtgctggaaaaaaaacccccaaaactgccagacgagtaagtatactatacacagcataaaggagaaa

SEQ ID NO: 757714 - DNA, 556 bp, Homo sapiens
gtatgacagggaatctgaaagctcccagcactttgggaggctgaggtgggtggatcacctgaggttgggagtttgagaccagcctgaccaacgtggagaaaccccatctctactaaaagtgcaaaattagctgggcatggtggtacatgcctgtaatcccagctacttgggagactgagacaggagaattgcttgaacctgggaggcagaggttgcrgtgagctgagattgcaccattgcactccagcctgggcaacaagaatgaaactctgtctcaaaaaaaaaaaaaagattcaatctaaaaagatcttcaccaaagcacattatagtcagactgacaaaagtcaaattacaaagagagaattctaaaaacagcaagagaaaagtatcaagtcacacatataagagtattcctatcagacaaatagtggatttcttagcagaaaccttattttataggcaaggagaaaatgggaagatatactcaaagtgctggaaaaaaaacccccaaaactgccagacgagtaagtatactatacacagcataaaggagaaa

SEQ ID NO: 757715 - DNA, 556 bp, Homo sapiens
gtatgacagggaatctgaaagctcccagcactttgggaggctgaggtgggtggatcacctgaggttgggagtttgagaccagcctgaccaacgtggagaaaccccatctctactaaaagtgcaaaattagctgggcatggtggtacatgcctgtaatcccagctacttgggagactgagacaggagaattgcttgaacctgggaggcagaggttgcagtgagctgagattgcaccattgcactccagcctgggcaacaagaatgaaactctgtctcaaaaaaaaaaaaaagattcaatctaaaaagrtcttcaccaaagcacattatagtcagactgacaaaagtcaaattacaaagagagaattctaaaaacagcaagagaaaagtatcaagtcacacatataagagtattcctatcagacaaatagtggatttcttagcagaaaccttattttataggcaaggagaaaatgggaagatatactcaaagtgctggaaaaaaaacccccaaaactgccagacgagtaagtatactatacacagcataaaggagaaa

SEQ ID NO: 757716 - DNA, 632 bp, Homo sapiens
tacaccatacacaaaaatcaactcaagattaattaaagactgaaatgttaattttaaaatgataaaaaaccctggaagataaccaaagaaataccattctagacacagaaactggcagagatttcatgatgaaaataccaaaagcaattacaacaaaagtaaaaaytgacaaattggacctaattaaactaaaaatctccttcaaagaaaaggaaactatcaacacagtaaacagacaacctacggaataatagaaaatatttgcaaactatgcttctgacaaacgtctaatatccagaatccataaggaacttaaacaagtttacaaggaaaaaatacctcattaaaaagtagacaagaaacatgaaaaagatgcttttcgaaagaagacaaacatttggctaacaagcatgcaataaaatgttcatcaataatcattagagaaatgccaagaaaaaccatgagataccatccacaccagtgagaacagctattaaaatgtcaaaaaatagatactgtcaaggtttcagagaaaagggaatacttatacattgctgttaacagtgtacattaattcaaccattgtaaaaagcggtgtggcaattcctcacagaactaaaaacagaattacc

SEQ ID NO: 757717 - DNA, 632 bp, Homo sapiens
tacaccatacacaaaaatcaactcaagattaattaaagactgaaatgttaattttaaaatgataaaaaaccctggaagataaccaaagaaataccattctagacacagaaactggcagagatttcatgatgaaaataccaaaagcaattacaacaaaagtaaaaattgacaaattggacctaattaaactaaaaatctccttcaaagaaaaggaaactatcaacacagtaaacagacaacctacggaataatagaaaatatttgcaaactatgcttctgacaaacgtctaatatccagaatccataaggaacttaaacaagtttacaaggaaaaaatacctcattaaaaagtagacaagaaacatgaaaaagatgcttttcgaaagaagacaaacatttggctaacaagcatgcaataaaatgytcatcaataatcattagagaaatgccaagaaaaaccatgagataccatccacaccagtgagaacagctattaaaatgtcaaaaaatagatactgtcaaggtttcagagaaaagggaatacttatacattgctgttaacagtgtacattaattcaaccattgtaaaaagcggtgtggcaattcctcacagaactaaaaacagaattacc

SEQ ID NO: 757718 - DNA, 582 bp, Homo sapiens
gcccggctaattttttttttttagccatgttgcccaggttagtcttgaactcttgggttcaagtgatccacccacctcaatctctcaaagtgctgggtttacaggtatgatccccacacctggtctagagcacaattctattttttttttttttttttttttttgagacagtcttgctctgttgcccagttgcccaggctggagtgcagtggcgcgatctcagctcactgcaagctccgcctcctgggttcatgccattctcctgcctcggccttatggagtagccgggattacacgcgcccgccagcacgcccggstaatttcttttgtattttttagtagagacagggtttcaccgtgttagccaggatggtctcgatctcctgacctcgtgatccgcctgcctcggcctcccaaagtgctgggattacatgtgtgagccaccacgcccgggcctagagcacaattcttttgatgaactgatagagttcaggttctgttggagcttcagtgtgaactctggacgcataggagctttctgaccttgtccagaaggaccctgcctcaaaaaccagccagccc

SEQ ID NO: 757719 - DNA, 558 bp, Homo sapiens
cttcaattaattttacctcgtattttcatcatttccttttgtctacaatttgtggtttgttaatctttttctagtttcttgagatggaagcttgaatcattgattttttttttttttttttttgagatggagtttcactcttgttgcccaggctggagtgcaatggcacaatctcggctcaccacaacctccacctcctgggttcaagcgattcccctgcctcagcctcccaagcagctgtgactacaagcatgcaccaccacacccagctgatttttttgtatttttaatagagacgggctttctccatgttggtcaggctggtctcaaactcccgacctcaggtgatccacccacctcggcctcccaaagtgctgggattacagacatgagccaccgcgcccggcygaatcattgatttttaagtgttttttttttcttatatgtgaacttaaggctataacttatcatctattcactgctttagctgcatcccacaagttttgataactcatcttttcatcagacttagataaaaagattttacattaccaatgt

SEQ ID NO: 757720 - DNA, 641 bp, Homo sapiens
gggatcctaaaattccagatagtacccccaacgagtctttggccaaaaattttgtctttctgattggtgagcccgggtgtctaaagaaggtaacagagtcctggagtttatactagaaatcattcttatagaagaaactagaaaagcaccagagacagggagcgatttttagaagcaggactagcctcggagaagagaggcgagaggaagtttgtctggcaggcattaggacacagagggcaaggatcaggataggtaggatagatgggcragtctcgcttgggcaacatgcctttgagagttccactcatggccacaggctcaaccaacttgttgtcaggaccccagagctgaatggctttcctctctgtcaaccctcagctcagccctgaagtacaggaaaagcagaagctggttccaggcaaaccaacactcccaacgccgaagagtcgggggtttttagagaaagccctttcccaggaagcctgacacccatgtctttagtccagcgggctaaactagtcgcttttaactgggccgacaggtgcccagcatttagcccccgaatttctaaggaaaagtaggacagaatagcaagtgaaaggggtccgatggtactcactgcttggcgataggtgaca

SEQ ID NO: 757721 - DNA, 641 bp, Homo sapiens
gggatcctaaaattccagatagtacccccaacgagtctttggccaaaaattttgtctttctgattggtgagcccgggtgtctaaagaaggtaacagagtcctggagtttatactagaaatcattcttatagaagaaactagaaaagcaccagagacagggagcgatttttagaagcaggactagcctcggagaagagaggcgagaggaagtttgtctggcaggcattaggacacagagggcaaggatcaggataggtaggatagatgggcgagtctcgcttgggcaacatgcctttgagagttccactcatggccacaggctcaaccaacttgttgtcaggaccccagagctgaatggctttcctctctgtcaaccctcagctcagccctgaagtacaggaaaagcagaagctggttccaggcaaaccaacactcccaaygccgaagagtcgggggtttttagagaaagccctttcccaggaagcctgacacccatgtctttagtccagcgggctaaactagtcgcttttaactgggccgacaggtgcccagcatttagcccccgaatttctaaggaaaagtaggacagaatagcaagtgaaaggggtccgatggtactcactgcttggcgataggtgaca

SEQ ID NO: 757722 - DNA, 641 bp, Homo sapiens
gggatcctaaaattccagatagtacccccaacgagtctttggccaaaaattttgtctttctgattggtgagcccgggtgtctaaagaaggtaacagagtcctggagtttatactagaaatcattcttatagaagaaactagaaaagcaccagagacagggagcgatttttagaagcaggactagcctcggagaagagaggcgagaggaagtttgtctggcaggcattaggacacagagggcaaggatcaggataggtaggatagatgggcgagtctcgcttgggcaacatgcctttgagagttccactcatggccacaggctcaaccaacttgttgtcaggaccccagagctgaatggctttcctctctgtcaaccctcagctcagccctgaagtacaggaaaagcagaagctggttccaggcaaaccaacactcccaacgccraagagtcgggggtttttagagaaagccctttcccaggaagcctgacacccatgtctttagtccagcgggctaaactagtcgcttttaactgggccgacaggtgcccagcatttagcccccgaatttctaaggaaaagtaggacagaatagcaagtgaaaggggtccgatggtactcactgcttggcgataggtgaca

SEQ ID NO: 757723 - DNA, 641 bp, Homo sapiens
ctatgttctgaatggtattgcctaggttgtcttccagggtttttatagttttaggttttacatttaagtctttaattcatattgagttaacttttgtatatggtgtaaggaaggggtccaatttcagtcttctgcatatggctagccagtatcccagcaccatttattgaatagggaatgctttccccattgcttgtttttgtaaggtttgttgaagatcagagagttgtaggtatgyggtcttatttctgggttctctattccattccattggtctacgtgtctgttcttgtaccagcaccatcctgttgtagtcactgtaacactgtagtatagtttgaagtcgagtagtgtgatgccttcagttttgttcttttgcttagggtttccttggctatttgggctcttttttggttccatatgaattttaaaatagctttatttagttctgtgaagaatgtcaatgttagtttaatgggaatagcattgaatctataaatcaacttgggcagtatggccattttaatgatattgattgttcctattcatgagcatgaaaggttattccatttgtttgtgtcatctcttatttctttgagcagtcatttatagttctccttgtagagatttttcacctcccc

SEQ ID NO: 757724 - DNA, 653 bp, Homo sapiens
gaatggattgaggcaagacaggactgagtcctggagttccaggagtaagtcactataatccaatcaagactgatttggtagctaagtcatgtgtccctgatgacacaagtaaggaattacccccaaaacacaactcttccatataaagacccagaaactcctgaatttcttaaaagttctaaaggctgaatggacaagccctttctaaccagttttcaacacgcagcatgagtctaatagcctggttacatcagycaaaagcgtcagacatagaacgccacccactccttccaaactacatacgaccaacaacctctgggcactcttccgagcttcttgttcatgctttatcgccaaggcctagaaaagtgaatgcaaacagttaagaaccggccctacattcttgctgtctctgcctccgagactcaggagccacttttcaagagccgagacaactcgttagagaggagccgtggcctgctctggccgaaaaccccttcctattaacagactgcaactagcccggaacgactttcaatttgcagagtccaaccatattccacaagacaatctaccacctcaaggttcacgcgtggattctacaccttaaatccttggatactgtctttgatttggagatgagcaaagaaagg

SEQ ID NO: 757725 - DNA, 653 bp, Homo sapiens
gaatggattgaggcaagacaggactgagtcctggagttccaggagtaagtcactataatccaatcaagactgatttggtagctaagtcatgtgtccctgatgacacaagtaaggaattacccccaaaacacaactcttccatataaagacccagaaactcctgaatttcttaaaagttctaaaggctgaatggacaagccctttctaaccagttttcaacacgcagcatgagtctaatagcctggttacatcagccaaaagcgtcagacatagaacgccacccactccttccaaactacatacgaccaacaacctctgggcactcttccgagcttcttgttcatgctttatcgccaaggcctagaaaagtgaatgcaaacagttaagaaccggccctacattcttgctgtctctgcctccgagactcaggagccacttttcaagagccgagacaactcrttagagaggagccgtggcctgctctggccgaaaaccccttcctattaacagactgcaactagcccggaacgactttcaatttgcagagtccaaccatattccacaagacaatctaccacctcaaggttcacgcgtggattctacaccttaaatccttggatactgtctttgatttggagatgagcaaagaaagg

SEQ ID NO: 757726 - DNA, 653 bp, Homo sapiens
gaatggattgaggcaagacaggactgagtcctggagttccaggagtaagtcactataatccaatcaagactgatttggtagctaagtcatgtgtccctgatgacacaagtaaggaattacccccaaaacacaactcttccatataaagacccagaaactcctgaatttcttaaaagttctaaaggctgaatggacaagccctttctaaccagttttcaacacgcagcatgagtctaatagcctggttacatcagccaaaagcgtcagacatagaacgccacccactccttccaaactacatacgaccaacaacctctgggcactcttccgagcttcttgttcatgctttatcgccaaggcctagaaaagtgaatgcaaacagttaagaaccggccctacattcttgctgtctctgcctccgagactcaggagccacttttcaagagccgagacaactcgtwagagaggagccgtggcctgctctggccgaaaaccccttcctattaacagactgcaactagcccggaacgactttcaatttgcagagtccaaccatattccacaagacaatctaccacctcaaggttcacgcgtggattctacaccttaaatccttggatactgtctttgatttggagatgagcaaagaaagg

SEQ ID NO: 757727 - DNA, 564 bp, Homo sapiens
tgaatatattacatatttcatattattattttttttaagccttgagctttcacaaagaaatgctcctgctggccaactactttaaatgtcttagagcagcacacccagccctggcattccccagtgatcttttccgtcccacccctgggttcccgcaggctgtcccctgggtctaagaaactcttcgaccttcctctccctacctagttaactccttttctgcttgcaggaacacgcggcagrtcgcctcctccccggtgcacccgtctgtatgcaggtgcgcttccccagatgagggctaggacgcacctccggggtctctattcacacctgcagcgggagcttatcatcatcactcaccgacctaaaaaaaaaaaagaaaaaaaggtggtggggtggagcggaggggaagaaggtcgaatcagatcacccctagaggtctctctgccctcgcaatcactctcaagtcctagagtaccaaacttaactgcagagggagcacgaaatggtgggtattttgaagcgctaatttttagggatcccctcccatccaaaacagggatg

SEQ ID NO: 757728 - DNA, 564 bp, Homo sapiens
tgaatatattacatatttcatattattattttttttaagccttgagctttcacaaagaaatgctcctgctggccaactactttaaatgtcttagagcagcacacccagccctggcattccccagtgatcttttccgtcccacccctgggttcccgcaggctgtcccctgggtctaagaaactcttcgaccttcctctccctacctagttaactccttttctgcttgcaggaacacgcggcaggtcgcctcctccccggtgcacccgtctgtatgcaggtgcgcttccccagatgagggctaggacgcrcctccggggtctctattcacacctgcagcgggagcttatcatcatcactcaccgacctaaaaaaaaaaaagaaaaaaaggtggtggggtggagcggaggggaagaaggtcgaatcagatcacccctagaggtctctctgccctcgcaatcactctcaagtcctagagtaccaaacttaactgcagagggagcacgaaatggtgggtattttgaagcgctaatttttagggatcccctcccatccaaaacagggatg

SEQ ID NO: 757729 - DNA, 564 bp, Homo sapiens
tgaatatattacatatttcatattattattttttttaagccttgagctttcacaaagaaatgctcctgctggccaactactttaaatgtcttagagcagcacacccagccctggcattccccagtgatcttttccgtcccacccctgggttcccgcaggctgtcccctgggtctaagaaactcttcgaccttcctctccctacctagttaactccttttctgcttgcaggaacacgcggcaggtcgcctcctccccggtgcacccgtctgtatgcaggtgcgcttccccagatgagggctaggacgcacctccggggtctctattcacacctgcagcgggagcttatcatcatcactcaccgacctaaaaaaaaaaaagaaaaaaaggtggkggggtggagcggaggggaagaaggtcgaatcagatcacccctagaggtctctctgccctcgcaatcactctcaagtcctagagtaccaaacttaactgcagagggagcacgaaatggtgggtattttgaagcgctaatttttagggatcccctcccatccaaaacagggatg

SEQ ID NO: 757730 - DNA, 564 bp, Homo sapiens
tgaatatattacatatttcatattattattttttttaagccttgagctttcacaaagaaatgctcctgctggccaactactttaaatgtcttagagcagcacacccagccctggcattccccagtgatcttttccgtcccacccctgggttcccgcaggctgtcccctgggtctaagaaactcttcgaccttcctctccctacctagttaactccttttctgcttgcaggaacacgcggcaggtcgcctcctccccggtgcacccgtctgtatgcaggtgcgcttccccagatgagggctaggacgcacctccggggtctctattcacacctgcagcgggagcttatcatcatcactcaccgacctaaaaaaaaaaaagaaaaaaaggtggtggggtggrgcggaggggaagaaggtcgaatcagatcacccctagaggtctctctgccctcgcaatcactctcaagtcctagagtaccaaacttaactgcagagggagcacgaaatggtgggtattttgaagcgctaatttttagggatcccctcccatccaaaacagggatg

SEQ ID NO: 757731 - DNA, 518 bp, Homo sapiens
ccctggcccttctcggaacgttgagcagacctaacatgacgctggtccgttcaaacgtcgcagttgtggcccacacagagcccagtctgttccaggggcgcgcccctgcacccctctgcctgcccgaggtcttccctcccctccgctccccagaaacgcacccactgagacatgtgcggggagggggcacgcttactcccacatcccgcccgagacccgcggagcagccaagacccggccaaaaaggggagggcgtggcaggcaagggccgggggcgggagcgcgggcggccgcggactcacgtactggctgttgcggcgccgcggraacccggccgccagcgggacaaaagcgcggaccgcacggccggaagaacccggcgccggccctggggcacttccgcgccctctctgggacgctggaggactgactcgatggtccgggccgacggcgccggcgggagggagggaggggagcgcctcctcggctatttattgaggaccagctgcagggcgcgc

SEQ ID NO: 757732 - DNA, 432 bp, Homo sapiens
atgtgatgtgtgtgagaaatcttttaattacacatcgctcctttctcagcacagaagggtccacactagagagaaaccctatgaatgtgacaggtgtgagaaggtcttcagaaacaactcaagccttaaagttcataaaagaatccatactggggagaggccctatgaatgtgatgtgtgtggaaaagcctacatctcacactcaagccttattaaccataagagtacccaccctggcargacaccccatacatgtgatgaatgtggaaaagcttttttctcaagcagaactcttataagccataaaagagtccatcttggggagaaacccttcaagtgtgttgagtgtgggaaatctttcagttacagctctctcctttctcagcacaagaggatccacacaggggagaaaccctatgtgtgtgataggtg

SEQ ID NO: 757733 - DNA, 607 bp, Homo sapiens
tggttgaggtttaaggattattctgctgtgaaactctttttctggagttttattcactttcaacaaggagggagagttttcctgcttccatgataatggggtgcaggcaactcctttgtggaatttcagcccacttccaacagggaaagcaagtttgagttttttcctacttctaggatagtagtgtagcaggaccagccgcagacaaaactcctcagacaccgagttaaagaaggaaggggtttattcagccaggagcattggcaagactcctgtctgaagagcygagctcccctagtgagcaattcttgtcccttttaagggctcacaactctaagggggtccacgtgagagggtcgtgatcgattgtgcaaccagcgggtacacgactgggggctgcatgcaccggtaatcagattggaacagaacaggacaagggttttcacagtgcttttccatacaatgtctggaatctacagataacataatcgagtaggccggggctcgatctttaactaccaggcccggggtgtggcgccgggctgtctgcttgtggatttcatttctgccttttcatttttacttcttctttctttggaggcagaaa

SEQ ID NO: 757734 - DNA, 607 bp, Homo sapiens
tggttgaggtttaaggattattctgctgtgaaactctttttctggagttttattcactttcaacaaggagggagagttttcctgcttccatgataatggggtgcaggcaactcctttgtggaatttcagcccacttccaacagggaaagcaagtttgagttttttcctacttctaggatagtagtgtagcaggaccagccgcagacaaaactcctcagacaccgagttaaagaaggaaggggtttattcagccaggagcattggcaagactcctgtctgaagagctgagctcccctagtgagcaattcttgtcccttttaagggctcacaactctaagggggtccacgtgagagggtcgtgatcgattgtgcaaccagcgggtacacgactgggggctgcatgcaccsgtaatcagattggaacagaacaggacaagggttttcacagtgcttttccatacaatgtctggaatctacagataacataatcgagtaggccggggctcgatctttaactaccaggcccggggtgtggcgccgggctgtctgcttgtggatttcatttctgccttttcatttttacttcttctttctttggaggcagaaa

SEQ ID NO: 757735 - DNA, 422 bp, Homo sapiens
ccccagtattgaaggtggggcctaatggaggtgtttgtgtcatgcgggtggacccttcatgaatgtcttgctgcccttcctgcagcaatgagttcacgggacagctggttgtttaaacagcctggcacctcctgcctctctcttttgctccctctctcatcatgtgacatgctggctcccacttcaccttccgctatgagcaaaagcttctggaggcctcaccggaaggtgagcagatgctggtgccctgcctgttsagcctgcagaaccatgagccaaataaacccttttttaaaaaaaaataaattacccagtctcaggtattcctttataatgatgcaaaatggacgaactaacatagtatgaaagccaaagtacaacatttctggctagaggacttaaaaagaagagcctcaggaagc

SEQ ID NO: 757736 - DNA, 547 bp, Homo sapiens
ggaaattacataatcataaaaaagtcaattcaccaagcatacatgaaaatactaaatatacaattagcaaacaacggagcttcaaaatacataaagcaaaaactgacaaaactaaaggcaaaaatagacaaattcacaattacagttggaggtctctttcagtaattaatagaactattagacagaaaataagcatgaatatagaaaaaccaaacaataccatcatccaactgaactaaattgacattatagaacactttcccagccaatatcatttcatttttttccyttcctttgtggaaaaactcctcaaaatagttatctaaatttactctcccccattctctctttgaaccactctaggcaagattttgcctccatcaccacactgaaactgtcctggtcaagttcactgatgacctccatgttgctaaatccagtggtccaatattggtcctcatcttttttgaactatcagcagcatgtgacacagttaatcacttcctcctcttcaaaacactttttccacttggcattcaagtgaaag

SEQ ID NO: 757737 - DNA, 432 bp, Homo sapiens
attcttttgggctgggtgtggtggctcacgcctgtaatcccagcactttgggaggccgaggctggcagaccacctgaggtcaggagatcgagaccaccctggccaacatggaggaaccccgtctctataaaaaatacaaaaattaaccaggcatggtgacctgtgcctgtaatcccagctactcaggagggtgaggcaggagaatagcttgaacctggaaggcagaggttgcagtaagcccagactgtgccacttgcactccagcctggccgacagagtgagactccrtctcaaaaaaaaaagaaaaaaaaaaaaagaaattcttttgagcgctctcctattgatacaccacacagtcacgtatggtttactatcatatttatgatgacttttttttataccttctttgacaggagctatggtcctgataat

SEQ ID NO: 757738 - DNA, 648 bp, Homo sapiens
tgcagaaatcacactatttttctattcagtgttcttgctgctgtttttaccttgtctggaaattctttactcctctacttattctttaatacaaaaattcttagtcctggggctggggcaggagaaagaggaaggatattgtttcaacaagcatatctaatattgtaataatcacatttggaaaattaagtttgtttcttggttttaaatttaaattactcaaagcaaagtttgttgtagtcttgcttactagaaatacactcatatcatgagtgtatatgattcttggtcaracttccttggaggactactcatcagattctttgaggaggaactttgatgtatttctaaaggggaaaagttgtcactgttaggaagaatgttcttagttcttacatttgagcaaatcatatacaaaactactaattgctacatgcataccagtcaactgcatatagtatttactagcgtaaaaggtatgtgcaggcattgattttatgtggtattacatgatgtgaaattggaaacagttgtataataggtataaaataaatgtatattgattgaatcttgaacgctgtcctcagtggacttaattccagcacttgaagattcattgtagactagcctatactagtgtgacttatt

SEQ ID NO: 757739 - DNA, 552 bp, Homo sapiens
aattctatttttagttttttgaggatcctccatactgtttcccgtaatggttatgctaatttatgttcctaccaacaggatacaaaggttccctttttctccaccttcttgcaagtgtttgttgtttttgttgatagtggccattctcacagataggaggtgatatctaattgtgattttaatttctatctccctaatgattagtgatggtgagcrttttttcaagtatctatcagttattcagatgtattcttttgacaaatacctattcaggtcaatagctcacgtttttattggattatctgttttgtttctatagagctgtttgatttcctcttatactttggatattagccctttaccaaatatatggactgcagatattttcttaattctgtaggttgtctttttactctgctaattgtttcctttgatgtgcagaagctttctagtttgatgtaatctcatttgtctatctttgcttttgtttcctatgcttttaatgtcaaatccattttaatgtcaaataacaaaaaagttatgaaagcacag

SEQ ID NO: 757740 - DNA, 639 bp, Homo sapiens; identical to SEQ ID NO: 757179

SEQ ID NO: 757741 - DNA, 610 bp, Homo sapiens
gtcagggaaaaaacaagtaataagcccaggtcatgcattggcaaatggacagtttgtatgatctcatacttacctttcccagtggctatttggttgtggggtcattagcagaaaagcgctttaggttttacattattaatatgaatgtctgaattggacakagaaaatagatttctcaaaattgcttaaaattgatgataaaaatctttctggaaagtaagaaatcatatattattcatttttgtgtggtgaaattctgtgagagcagggacaggagctctctcatttgtcacggtattgcaagcaccaagcatagtgcctggcaaatagaagacgttcagcaaatattagcattacttctacttttactataccttactaaaaagtgacacacccacaaacaaatgtcaactatcagaagtgacaattaaagttaatgttttccattatttctcttatttttctgtatgttttctttttccccgagtccagaaagcctgaatttaaggcgattaggttttctttgtgattttgtccacaggaaaaatcaaaaggatttaatttagtccactgtgaaatgttactgtaagaaaacaaagtatcaaagata

SEQ ID NO: 757742 - DNA, 627 bp, Homo sapiens
tcttattccatgtctatataatacctgccaaagcagaaagcaattgctttatatcaatgcactattcctaggtatacgaactgtttcatcaatgggactgcctagagttatctcgtcagggtgaggaatatcacccaaccatcatgtaaaacccctgaataaatatgatggaagtctcaaaaggagaatgggttataatccagaatcatgagactactcctgttcagggacaaatcattattttcagcaaaaatgttgtctcactttttattttatttatttagagatggaattttgctcttgctgccaaggagtgcagtggcatgatttctgctcactgcaacctccacctcccaggttcaagtgattctcctgcctcgccctcccaagtagctgggattacaggcatgcaccaccacgcccggttaattttgtatttttagtagagayggagtttctccatgttggccagactggtcttgaactcttgacctcaagtgatctgcccacctcagcctcccaaagtcctgggattacaggcgtgagccaccacacctggctattttcttatactccaaactctcttacataaagtactgtaaggccagccaataagactgtcaggaa

SEQ ID NO: 757743 - DNA, 543 bp, Homo sapiens
gtcatgtcagcacacaatgacatcaatgagactcattactggtgatgttaaccttgataatttggttactgtggtttctcaataacgttctgcacgaaatgtcttctgtaaatgataaatatctcagagagatactttgatactgtgaaatatcctgtttctcctccaatattcatgaccgattttagcatccatcagatgaatcatgcctgcaacarttatggtggtgtctgcctagtaattttgtatttctattattccttctatgttttaaaattagaattatttgtaaggaataaataccctgtttctcccatttatttatttattcaatcacttatttgtatcagtgtggactcatggaaatttattttattctgagctaaaatccaatactattttaatttggttgcgccagttgttccagctttgtccattgagagctctccttcacattagttcctgtgtcttctcaacatgcttccatcctttcaagcacctccttattttctagtgcaataacctattccaggctcattttgc

SEQ ID NO: 757744 - DNA, 554 bp, Homo sapiens
ctactacttttcaagttttggcgcactatcaaagaatattcacaattatctaaaaaggctatcaaaatattctttccttttccaattacatgcctgtgaaagcctgaatcttcatcatatatttcaaccaaaacagcmtatggcaatggactaaatgcagaaatagacgtgagaatccaatggtctctataaaggcaaatattaaaaggattaaacattggctaggctgtttttgtaaacaaagtttttttggtttgtttcttttaagagatggggtctggttatgttgcccagtctggagtgcagcagctatccacaggctttgatcacagcctggaactgctggcctcaagtgatcttcccaccttagcttcctgagtagctgggactacaggctcatccaccatgcccagcttgtaaataaagctttattggaacacagctactgtcatttgtttacacagtgcttgtgattgctttcacactacaaaggcaaagattaatagttgcaacagagaccatatagccagcaaacctaaaatatttgctaatct

SEQ ID NO: 757745 - DNA, 611 bp, Homo sapiens
agcattaaagcattaaattgaagaaggaaaaaaaaacttttgaagttttgcacatatctgtcatcttatttactatcagtcattgctaggtctatgcttctgagtataagaaaatgtttctcttcattaagaggaggttgtcctttaatgagtactaatgattccactttgaaactaataggaaatcctgaatatataaacttattgacattaaaaatcagcaatactaatactaacatcaaagtaatgatattgtttaatatattaattaagcaaaatgtaaacaaattggcattccagttattacctcatcaaggtaattttttaaagtaagaaagcaacttaatttcatgtgtatttaayaactttaggtgaggtaacttttacatataagtgatttttgcaatgatttgaatatatctagatctatctacatttatatatttatagagagatacagatatatacatcagtttttcaattaaagaggatatttaaatggttaaatgtagaaaacaattgctcacaataaagatttatgcatttactgattactacattttaattaaactgagcataatttatttagcactaggcattgcaacatagct

SEQ ID NO: 757746 - DNA, 631 bp, Homo sapiens
gtcaagcaaagaatctttgttaatacaaattctcttaccttatttgtggggatttagtatacaatgaataccattaataactttaagaatttgtttgaaagattttgctttaattttctttaaatatttcttattaatcatcataaaattatcagaaaagttaacataaaaaacaaaattaaatctaatttataataggaacaatgcaggttcaacttttatattacttatttaaaaagtcaacagctctaaattaattgatgaataaaaatacatatatacctgaaccgcaattatggatataatgtacaaattttaaaatttactaaaaagtaaatacacatacaacacagagaaaaaaaattccatataacatcaawtagaaaaccacaaagctagatatatagaaattcacataaaatgttaaaaatttttcaaactaaatgtatttgcctttccaagcaatataaataaaatagacacaaatttaaaaagaaaaaaactttgaggttagctaaataatataacttagatgcttctaagagaaggtctttcagaatagttcaaactagaaagaatgaacctaggcactaaagagatattactttatacaatttatgcactaaaaagt

SEQ ID NO: 757747 - DNA, 603 bp, Homo sapiens
ccagctccattcaacttgcagcaaatatttcattcctttttatggctgagtagtattccatggtgtatatacactacattttctttattgatcactcattggtcagtgggcacttaggttgattccatatctttgcaattgctaattgtgctgctataaacgtgtgtgcatgtgttcttttcatacaatgacttcttttcctttggatagatacccagtattgagatttctagatcaaatgaaagttctacttttagttctttaaggaatctccatactgttttccatagtggttgtactcatttacattcccacaagaaktataacagttcttccttttcgccaaatccaacaaatatctattgtttttgacttttcaactgtggtcatttttgcaagattaaggtgatatttcattgtggttttaatttgtatttccatgataataagtgatgttgagcacactaatgtgtttgtgtatctttatcttctttggataaatgtttgtatatcttctttggagaaatgcctgttcacatcctttacccactttttgataggattatttgctttttttcttttgatttgtttgagttccttata

SEQ ID NO: 757748 - DNA, 578 bp, Homo sapiens
gctgggagaagaccttctgaaatgaatactcaccccctcacctccccaaattagcctcctgcctctgctccggaagcttcctaatggtctgtgtgcaactgtgcaattacagcagcctgtgttaacaaagctgcgtgatcacyagctttgggcaaaggcttgtgattggagcggtgtgaggtgttgtctcacccctttcacaggcagtttctcgtttttcacatgcgcccacttataaatgtctgtcacagggtttcaggccattcaccacttacacatttgctaattgttccccattcttctgtgtttcttagcctcagacttttcgtatccatctgttctaactaaaatctctctcatcaaattgaaagcccctccaaatgatttcttaccattttctcctaattgccactctagagacctggctatccatttgaaatacctttttgaagtcttgatatctgtaggaaatatttttttctgacatgatagaagtaaccagttttggtgctatttgggttgcttaagtaactacaggctggaaataggagattctctttccttttttccttctattt

SEQ ID NO: 757749 - DNA, 593 bp, Homo sapiens
ccctcaggacctggacatcgctgtgtggctggccacggtgcacctggagcagtatgcagacacgttccgacggcatggcctggctacagcaggtgcagcccggggcctgggccacgaggagttgaagcagttgggcatcagcgccacagggcaccggaaacgcattctacgcctgctacagacaggcaccgaagagggctccctggatcccaaatcagatagtgccatggaaccatcccccagcccagccccgcaagcccagccccctaagcccgtgccgaagcccaggaccgtgtttggtggactcagtggccctgccaccactcagagacctgggctgagcccagccctcgggggaccaggagtgtccaggagcccagagcccagcccaaggccycctcctctccccacttcctcctctgagcagtcttcagccctaaatactgtggagatgatgcctaattccatctacttcggcctggactcaagaggcagggcacaggcagctcaggacaagtgagtggagttggctccctagggactgatgctgggaggagtggggaggagagcatgagggggacggaggcggggag

SEQ ID NO: 757750 - DNA, 617 bp, Homo sapiens
tggtcttacgacgccattcctcctctgaccttgcccgtcagaagtttggcactatgcctttgctgcctatccgtggggatgacagtggagccaccctcctctctgccaatcagaccctggtaaggcaccccaccctgccccaacccgattcctgtcgtgtagcccttgtcacattgcagtaggcagtggtgtgcctgctagcctggtgccaccctatgctcactggtccccctcccttctgccttcttcacccccattccccacccctgtctcctgttgytagtcctcactgtgtctttatgtctttccttccccttgtccccaccccacctgtgtccagcggcgactacacaaccggaggaccctgtccatgttctttgtgagtattgtgcctgctccagcggtgtgcctgtcaaccctgtattcctctgtgctgcctgagccccgggtgtgctgttttcctcatgtaggccatcagggggtgtgtgtgtgtgtgtgtgtgtgtgtgtgtgtgtaggccatcagggtgtgtgtgtgtgtgtgtgtgtgtgtgtgtgtaggccatcagggtgtgtgtgtgtgtagagagagagagagggagagcgaggaaaagggag

SEQ ID NO: 757751 - DNA, 489 bp, Homo sapiens
atgcatgataggaaaattactaaggaagataaaaattaggaaaagagatagtataataaatattttaagctagattatttaagataaggtgctatagctatggtgttcagattaactttataatagttccacctttactagttcaatagttcccccgagaatgtccctcaagttttaatgtttattttcttaaattctttttttttttggagacagagtttcactctttttgcccaggctggagtgcaatggcacaatctcagctcactgcaacctctgcctcccaggttcaagcgatcctcctgcctcagcctcccaagtagctggrattacaggcatgcaccaccatgcctggctaattttttgttggtttttttgagacagtctcgctctgtcacccaggctggagtgcagtggcacgatcttggctcattgcatgcaacctctgcgtgctgggttcaagcgagtctcctgcctcagcctcctggg

SEQ ID NO: 757752 - DNA, 636 bp, Homo sapiens
ccaggcaggtgaaagccatgcctcttacaccagttagccaagttatgcaaaggaagagttcttgaaagtgttaactccagtgaacatgcaaacaagaaagtgaaacagccttactgctgagatggagaaagtctgagtggtctatatagattaaacaagccacaacattcccttaagccaaagcctaattaattcttcaattctttcttcgaagactgagaggtgaggatgctacagaagaaaagctggaagcaagcagaggttggttcatgaaactatccccattaacgtcagagtgcaagggacaacaacagcaggaagttgtccagatgatctagctaagatcactgaaggcgactacactaaacaactgagtttgtgaagatgaaatggtcttctattagaagagatgtcatctaggacttcatagctggggagaagaagttcartgccagcgagtgtagttggtgcctttaagttgaagtcagagtttatttaccagtccaaaaatctttcttaaggcccttaagaattatgttaaatctactctgcctatgctctagaagtggaataacaaagcctagatgacagcatatctgtttatagcatggtttattgaatatttaagcctatggt

SEQ ID NO: 757753 - DNA, 571 bp, Homo sapiens
aatacagaaaacccataataaaatccacagacgtgattctatcatcatttactaaacatttatgttccaggaactctacgtaccaaatgtgaataaggcccagtcacaaatgctcagtctagagtgggagagagacttgtttataaacaggcttaccgtcaatgtactgagtgttttaaaaatacrccactggaccaggtgctgtggatgctcaaagattagcatcactaacatctgagaagtgacaagtctctgagatcatgtccttttcaaattacgaaagtatcttttctttctcacatttctctctagaagataggtcatgccatgcttctttctgtgtctctgacaatattttaccaaactacaaatctctaaccaggttatttaatcctgacagctactcatattcaaactgtggttgtcaaaagaaggtttttcagtcaatagaaaagagaactctttctgatacacattgaacttatgggaaattctactttagttggaatattatgaagtgatcttgagactggaattttggaataacaagcaataaactgtttaaccaagc

SEQ ID NO: 757754 - DNA, 571 bp, Homo sapiens
aatacagaaaacccataataaaatccacagacgtgattctatcatcatttactaaacatttatgttccaggaactctacgtaccaaatgtgaataaggcccagtcacaaatgctcagtctagagtgggagagagacttgtttataaacaggcttaccgtcaatgtactgagtgttttaaaaatacgccactggaccaggtgctgtggatgctcaaagattagcatcactaacatctgagaagtgacaagtctctgagatcatgtccttttcaaattacgaaagtatcttttctttctcacatttctctctagaagataggtcatgccatgcttctttctgtgtctctgacaatattttaccaaactacaaatctctawccaggttatttaatcctgacagctactcatattcaaactgtggttgtcaaaagaaggtttttcagtcaatagaaaagagaactctttctgatacacattgaacttatgggaaattctactttagttggaatattatgaagtgatcttgagactggaattttggaataacaagcaataaactgtttaaccaagc

SEQ ID NO: 757755 - DNA, 643 bp, Homo sapiens
tttactactgctatcccatcttaactttttacctaaaagtatgggtaaagaaaaagtaattttacttttataaaattgtttttaattattaaatattacacactgaacaaacagtaattcacttttctatcagactcagatgctccaaagatttttatgggttgggaccatttggtttcttctgctgtatagtggggaaaaaraatgtaaattattctccagtccaactcatcgttgtttccctaaattgaaaagcaaactgagatagtaaaataaattatttttaagtccacattttcccatttcatcaattttatacaacctgatagagtaactctggaaagaacagcaatagtcatggagtttccatcaataacaagccttaacctcctatttccagtctaatacttttcagatacctaataaatggtatcttataagtaacagaacaaaaaccatttttgctataacaagaatatacagacaagaccctatcagctaaagactaatagtgtatgtagtggctccttaggccactacagcttgttcatttcttccagattaaaggatacaataactgttctatcagcagaggctgtcaagatgagttgatttttctcttcacaagattccaaggaaggaa

SEQ ID NO: 757756 - DNA, 621 bp, Homo sapiens
gatacttcaaaaaagaataatttgagtaacaaatgatcaggaagggaggctctgaagaaactggtgaagccttaagtatttatttaaaaaaaaaaggcttttgtaatattaagtcaaacatgagaaaaatgttacattatgctattacgcaatgttgaaagaaaacttgtgtgtctcacaaaaatcaacacaattcatttattcattttggaagtcagggcatagctagtgataacctaaattttgttaaataagattaaaattttgtattttttgaattttcatactttggcayttgtttcttaggaaaaaactttttttttttttttttttgagacagtcttgctgtgtcacccaggctggagtgcagtggcatgttctcggctcactgcaacctcagtctcccgagtaactgggattacaggcatgtgccactatgcccagctgatttctagtatttttagtagagacggggtcttgctatgttggccaagctgttctcaaactcctggccccaagttatccgttcgccttggcctcccaaagtcctgggattacaggcacgagccaccacacccagctggaaaaaaaatctcaatttaaaaaaactttccctcttca

SEQ ID NO: 757757 - DNA, 607 bp, Homo sapiens
agcaaacatttaagtgttcaagggctctgtgaaatagattgattaatgatggcaatgtaaccccatattttccttttatcataattaatgtaaatatactaccacaaaaaatagaaacttaaaaatttaaaacccagaatccctaccacacaaaaataaatttctatattttttcatattcctgtccaattcttatccatatacttcaggttttttctttaacttaaaaccaagtccaagatcacaccactctccagcctggacaacagagcaagactccatctcaaaaaaaacacaaaaaacaaaaaaaacccaagttgttaaaaatactccttgagactacacaattaaatgactaagcaaaacttayattcatgaaaaacaagttcaacaaggtgaaacatggtttaacaaagacctatggcagacctcctagaatgtttcatcctctcatcccctaattatgagaactaaatttattatgatagtccataagtcactcggtaattcaatacttactaagcactaactatatagatgcttaaacctaagaataaagatcaagagattgttcttgccattcaagaactcacagtccaacattacc

SEQ ID NO: 757758 - DNA, 572 bp, Homo sapiens
cacctaagttaacatttacttccttaatgtcatcaaatacccagtcaatgatcaaatttagctgatcgtaattttttaaacagttagaaggatccaaataaggcttctatagtacacttggttgatttatctctaatatctcttttattctaatgatttttttctccatctgtttttccttgyaatttatttgttgaaaaaaaaattcacctgtcttgtcgagttctcacagtctgggttttttttcctgtgctgttatccaacatgcacctctgtcctctgtattttttgttaattgatagttaaatctagagactaaataagatccatatctgactttttggtaagaccaccccaaaggcagattgtatactccatcaggaaatataatttctggctatcttgtgtgtgtatgtgtatatgttatgatttaggccatctaaattcattatttcatttgaaggggttcagagcacataaccccaaactatgccactctgacataatgattattttcagcttaaggcaactgagaaaatgcaggcacagaatgagctctgtcctccccacat

SEQ ID NO: 757759 - DNA, 586 bp, Homo sapiens
gcatctctaaggactcttttacatcacacctaagttaacatttacttccttaatgtcatcaaatacccagtcaatgatcaaatttagctgatcgtaattttttaaacagttagaaggatccaaataaggcttctatagtacacttggttgatttatctctaatatctcttttattctaatgatttttttctccatctgtttttccttgcaatttatttgttgaaaaaaaaattcacctgtcttgtcgagttctcacagtctgggwtttttttcctgtgctgttatccaacatgcacctctgtcctctgtattttttgttaattgatagttaaatctagagactaaataagatccatatctgactttttggtaagaccaccccaaaggcagattgtatactccatcaggaaatataatttctggctatcttgtgtgtgtatgtgtatatgttatgatttaggccatctaaattcattatttcatttgaaggggttcagagcacataaccccaaactatgccactctgacataatgattattttcagcttaaggcaactgagaaaatgcaggcacagaatgagctctg

SEQ ID NO: 757760 - DNA, 572 bp, Homo sapiens
cacctaagttaacatttacttccttaatgtcatcaaatacccagtcaatgatcaaatttagctgatcgtaattttttaaacagttagaaggatccaaataaggcttctatagtacacttggttgatttatctctaatatctcttttattctaatgatttttttctccatctgtttttccttgcaatttatttgttgaaaaaaaaattcacctgtcttgtcgagttctcacagtctgggttttttttcctgtgctgttatccaacatgcacctctgtcctctgtattttttgttaattgatagttaaatctagagactaaataagatccatatctgactttttggtaagaccaccccaaaggcagattgtatactccatcmggaaatataatttctggctatcttgtgtgtgtatgtgtatatgttatgatttaggccatctaaattcattatttcatttgaaggggttcagagcacataaccccaaactatgccactctgacataatgattattttcagcttaaggcaactgagaaaatgcaggcacagaatgagctctgtcctccccacat

SEQ ID NO: 757761 - DNA, 671 bp, Homo sapiens
taattttttaaacagttagaaggatccaaataaggcttctatagtacacttggttgatttatctctaatatctcttttattctaatgatttttttctccatctgtttttccttgcaatttatttgttgaaaaaaaaattcacctgtcttgtcgagttctcacagtctgggttttttttcctgtgctgttatccaacatgcacctctgtcctctgtattttttgttaattgatagttaaatctagagactaaataagatccatatctgactttttggtaagaccaccccaaaggcagattgtatactccatcaggaartataatttctggctatcttgtgtgtgtatgtgtatatgttatgatttaggccatctaaattcattatttcatttgaaggggttcagagcacataaccccaaactatgccactctgacataatgattattttcagcttaaggcaactgagaaaatgcaggcacagaatgagctctgtcctccccacatctacctgaaaaaaaaaaaaaaaaagcacacatcacccttgggaaagtgcccccggaacctccacccccactcccataccaggagggggataacaacctttatcacagatgagatggcaccaagagtttacacaaaccaacctcactaatgagcccttctctaccagc

SEQ ID NO: 757762 - DNA, 607 bp, Homo sapiens
acgctggctgagtttggatttgtttgctgatcctgtcatgatatgtcattaaacattcctggctggaagtcagacatgagagtgctggagggtgttctcacacccctgtgctgtggggaggccttcccttctttctggctgccctggtaccctctagagcctcctatctgctgctcggaggcagtgcctgcagcggctggactcctgcagcagctggaggtggaggaaagattcttaggccgtgagtcctcttcttccgacagcgaatttgagccctggtggagcaatgtccggcacgctcaggaaagtgtgaaatctagaactctctgtagtggcctgaggcaatagtcagacatggctggtaragctgtgctgcctcagaagtcatcctggataagctgctctggatccccatcgtggaagcataaaatgtcaagcagaaggatgttatgagaattggaacctaagccctgtgctgacctcggggagcactccctggggctacctttgctgggaggtgcctggcccagacctgtccaacctgggcctgcagccaggaacattctcccagagtagcaatcttattaaattccctgtaatatacatg

SEQ ID NO: 757763 - DNA, 509 bp, Homo sapiens
caagattggttcaacatgaaaatcaataaatgtgattcaccacataaacacaataaaaaacaaagaccatatgatcatcttaataaatgcggaaaaagccttcaataaaatccaacattcttttatgataaaaaccctcaacagactaagcatcagggaracatatctcaaaataataagagacatctatgacaaacccacagccaatgtcgtactgaacagaaaaaagctggaattattcccctagaaaattgctacaagacagagatacccactcctacttctcttattcaaaacagtactggaagtcctagccagtgtgatcaggcaagagacagaagtaaaaggcatccaaataggaaaagaagaagttgaactctctctttttgctgatgatatgattctatacatagaaaaccccatagactccaacaaaaggctcctggaacttatgaaggaattcagtaaaggttcaagatgcaaattaatgtacaaaatcagtagctttt

SEQ ID NO: 757764 - DNA, 509 bp, Homo sapiens
caagattggttcaacatgaaaatcaataaatgtgattcaccacataaacacaataaaaaacaaagaccatatgatcatcttaataaatgcggaaaaagccttcaataaaatccaacattcttttatgataaaaaccctcaacagactaagcatcagggaaacatatctcaaaataataagagacatctatgacaaacccacagccaatgtygtactgaacagaaaaaagctggaattattcccctagaaaattgctacaagacagagatacccactcctacttctcttattcaaaacagtactggaagtcctagccagtgtgatcaggcaagagacagaagtaaaaggcatccaaataggaaaagaagaagttgaactctctctttttgctgatgatatgattctatacatagaaaaccccatagactccaacaaaaggctcctggaacttatgaaggaattcagtaaaggttcaagatgcaaattaatgtacaaaatcagtagctttt

SEQ ID NO: 757765 - DNA, 612 bp, Homo sapiens
cagggaaagcctatgggtggggatctaagatctgtgcctgcaggtgaccttgcacctggacaatgaatgggagaatcaaagggagcatgcctgcaagagaccctgggaagggacagggaggctcgatgagggacaggagcaaagcttaggagacccccaagtgaagatgatgcacaggataccatttggaattctgaccattgaaaattcactttgtgaaactatttttaagacagaatagccttttctaattaatttgtaagagcatgttatggtctgaatgtttatgtcttttccaaattcatatgttgaagttgtggccttcaaggtaatggtattaggaggtggggtctttgggaatagcattagtgcccttataaaagagagccctgaaaactgycttgcccttccagcaggtgagaacactgctagaagatgggcatctatgaaccagaaagtggccctcaccagatacggaatatagtatcttgatcttggacttcccagtctccagaaccatgaggaataaatgtgctgtttataagccaccagtttagggtattttattttagcagcccaaataaactaagacagagctcattaatattaaaa

SEQ ID NO: 757766 - DNA, 610 bp, Homo sapiens
ccaatttgacaccttgtggttaaacacaggcttcactctgtgatgttcccattgcttctctgattgaatctgacacttgtttccgcttctcaagcagcccatacatctgttttcagtgttgtgatgccccaggtgtggccaccagaatgccagatgtgggcaacagttgctaccatgaaaattcagagtgaacatcaaatgcattttgttttttttacttagaacaaaagcacaagacacttacatatgaggtgaaattgagtgttctagtttccacacttacatgtgaacttcctaataatktactagcttgagcaaaagtatttcaacattgctttgaaaaggaaatgttagttattctatactggcatgtagtcacgaaaaaaatacttttaagaaatgtgagaaacataactgcttatttccttctgtcacacactatatatattacatatatgttatatatactgtttgtatatatatgtgtgtatatgtatatgtacatatatagtctctataatacatagtatatactacatagtcaacatctcaaatacaatagacatttaatatttgtgtaaaattaaatgtacagaaagcatcttgctgt

SEQ ID NO: 757767 - DNA, 648 bp, Homo sapiens
attctacgcaacaacaacgaatcatttctagatcggattatgacgtgaaatgattgtatacgacaagcagcaatgaccagctcattggctggaccaagaagaagctccaaagcacttcccaaagccaaacttgcacyagaaaaaggtcatggtcactgtttgcggtctgcggctggtctgatccgctacagctttctgaatccagaggaaactgttacatctgagaagtatgctcagcaaatcgatgagatgcaccaaaaactgcaacacctgcagctggcattggtcaacagaaagggcccaactcttccatgacaacctcacttcgtgcgacttcacggcatacaaccaatgcttcaaaagttgaacaaattgagctacgaaattttgcctcacctgtcatattcacctgatatcttgccaactgactgccacttcttcaagcatctcaacaacttttttcagggaaaatgcttccacaatcagcaggatgcagaaaatgctttccaagagttcgtcgaatcctgaagcacggatttttatgctacaggaataaacaaacatatttctcgttgacaaaaatatgttgattgtaatggttcttattttgatgaataaagatgtgtttgagctgagttataatgattt

SEQ ID NO: 757768 - DNA, 648 bp, Homo sapiens
attctacgcaacaacaacgaatcatttctagatcggattatgacgtgaaatgattgtatacgacaagcagcaatgaccagctcattggctggaccaagaagaagctccaaagcacttcccaaagccaaacttgcactagaaaaaggtcatggtcactgtttgcggtctgcggctggtctgatccgctacagctttctgaatccagaggaaactgttacatctgagaagtatgctcagcaaatcgatgagatgcaccaaaaactgcaacacctgcagctggcattggtcaacagaaagggcccaactcttccatgacaacctcacttcgtgcgacttcacggcrtacaaccaatgcttcaaaagttgaacaaattgagctacgaaattttgcctcacctgtcatattcacctgatatcttgccaactgactgccacttcttcaagcatctcaacaacttttttcagggaaaatgcttccacaatcagcaggatgcagaaaatgctttccaagagttcgtcgaatcctgaagcacggatttttatgctacaggaataaacaaacatatttctcgttgacaaaaatatgttgattgtaatggttcttattttgatgaataaagatgtgtttgagctgagttataatgattt

SEQ ID NO: 757769 - DNA, 570 bp, Homo sapiens
tttttagtagagatggggtttatccatgttggtcaggctggtcttgaactcccgacctcaagtgatctgcccacctcggcctcccaaagtgctgggattacaggcatgagccaccatggctggcctccacttctaattctcgttctcttgctttttccacatctgcagtcacttccttcactgaagtcttgaacccctcaaagtcatttgtgggagttggatcaacttcttccaaactcctgttaatgttgatattttgwcctcctcccatgaatcacatattttttaagagatagggtctcactaggtttcccaggctggagtacggcggctattcacaggcacaatcatggcacactgcagccttgaactcctggcttaaactaatcctcctgctttagcctcctgagtagctaggtgcatgccaccggatctgacttatgaatgttcctaatggcatctagaatggtgaatcccttccagaaggttttctatttacttgtccaaatctgtcagaggaatcaccatctacggcagctattgccttaagaaatgtatttcttaaataag

SEQ ID NO: 757770 - DNA, 570 bp, Homo sapiens
tttttagtagagatggggtttatccatgttggtcaggctggtcttgaactcccgacctcaagtgatctgcccacctcggcctcccaaagtgctgggattacaggcatgagccaccatggctggcctccacttctaattctcgttctcttgctttttccacatctgcagtcacttccttcactgaagtcttgaacccctcaaagtcatttgtgggagttggatcaacttcttccaaactcctgttaatgttgatattttgacctcctcccatgaatcacatattttttwagagatagggtctcactaggtttcccaggctggagtacggcggctattcacaggcacaatcatggcacactgcagccttgaactcctggcttaaactaatcctcctgctttagcctcctgagtagctaggtgcatgccaccggatctgacttatgaatgttcctaatggcatctagaatggtgaatcccttccagaaggttttctatttacttgtccaaatctgtcagaggaatcaccatctacggcagctattgccttaagaaatgtatttcttaaataag

SEQ ID NO: 757771 - DNA, 570 bp, Homo sapiens
tttttagtagagatggggtttatccatgttggtcaggctggtcttgaactcccgacctcaagtgatctgcccacctcggcctcccaaagtgctgggattacaggcatgagccaccatggctggcctccacttctaattctcgttctcttgctttttccacatctgcagtcacttccttcactgaagtcttgaacccctcaaagtcatttgtgggagttggatcaacttcttccaaactcctgttaatgttgatattttgacctcctcccatgaatcacatattttttaagagatagggtctcactaggtttcccaggctggagtacrgcggctattcacaggcacaatcatggcacactgcagccttgaactcctggcttaaactaatcctcctgctttagcctcctgagtagctaggtgcatgccaccggatctgacttatgaatgttcctaatggcatctagaatggtgaatcccttccagaaggttttctatttacttgtccaaatctgtcagaggaatcaccatctacggcagctattgccttaagaaatgtatttcttaaataag

SEQ ID NO: 757772 - DNA, 532 bp, Homo sapiens
atctttcctctgtgttcctaggtcgtctctcctgggagtgcccttgaaatcactgggattctaaaacaaagaaaataacactactactaataataacaataatagcagaggctaccagtttgcgcacctacaaaagtccaggaattatgtttccatgtatcttatttaaccctcacagccaccctgtgaggtgggtcatgttatcatccccattccatagatgagaaaattgagaaacagagaagggactggcttagctaaagtcataaaggaatggcggaggtgaatctcagcacaggcagccagtgggctcataaraagtgctgagcagggcctggtgcagtggctcacacctgtaatcccggcactttgggaggctgaggtggccagatcacttgaggtcaggagtttgagacctgcctgaccaacatgatgaaaccccatctctaccaaaaatacaaaaattagtcaggcatgatggcaggtgcctgtaatcccagctactcaggagactgaggcaggagaattgctt

SEQ ID NO: 757773 - DNA, 450 bp, Homo sapiens
gttgtgatcggcaaaaactagactgttggaaactccactgcaaggacaatctctttttcacaaataaattgcaaggaaggaaaaaggagacagaggaggaatctgtagattgacacaaacttaaaatacattctaaaagagagaaaactaaattaggggatctagggatgcacactcaggtaataaaatgaggaargaggaagataatgaaacaagcaagaaaacaacgtgagagtcagagagttgtgacttttagtgggaggctaaaagtctcctacagagtccttcggggttgactggcaaaattctacttcttgacccgagtagttgtgtcaatgttttcaccttaaaataattcacaaagctatattttatatataattttctgtgtccatattctcttttacaggaaaggggcaaatatcacaattggtgtaagtgcttccaagg

SEQ ID NO: 757774 - DNA, 644 bp, Homo sapiens
agtttttttaaatacatacatacatggttggcagtaagaaacttccaggtttaacagtgaagaggaaaattcagtggcatttgacatgatcagtctcaatgcctagagcaggcaggcatctggtccctggttttctcattagtcgggttttctggaaagctgaaatgatgggagaagcatagaattcagttcatcccagtgctatggaaagagacccagaatgagagtgaggggacgattgttcaagtcctaygtcttccaccaactaaccgtgtggctgttgttctgagtgtcaggaaaactaacccgttaacagcatgcaagagacaagcaagctagtaacaagacaatctgtgacgacctcgaagctactcagatttcattgtacctccacaccccttataaaagaatctccgcatacgaatattgaacctaagaaagcccatccccaccccacaagtttgaaccagaagacttctgaaaaacgcaaacgacactccctgtgtgagttcaaacatgtccacacattcttggagacatcccccatgaggaagtagagtctagttctcctccccctgaatatgggcaggctctagtgacttgcttgcaatgaatagtatgtgtggagtgatgctgtgtggctt

SEQ ID NO: 757775 - DNA, 465 bp, Homo sapiens
ttacacatgaaatttgtttataacttgttagaaaacattgcaaaatatttgtagtcccaaagtaaaggcacttaagggattagagaaatgcttggtcatgtgatctgggtgctccttaactaacaaatgtgaaatatggaacagatataatcaagaggcatgtattcatcaagaattgagcaatttaaggctgctcaggtgaaggcaaatgaatatattcacaaaatctattttatcaatgagcttagcaattcatatgaaatatgttgtgatcatgcattgtgttaaataacatcagtctgttttcaagcrgaaaataaatttcacttccatttatcttgttaggctcattttaccccaaattaactatttctgaccataactattaacaaataaagaatattattattctcctttcagatgtatttaaacatacttaaatggttagaattcttaagttttaaa

SEQ ID NO: 757776 - DNA, 575 bp, Homo sapiens
gtctacaggggactctaggactctatattctcaagaaatccatcttgcccccaacccagaggactcccatgatcaggcaagtctggagaaaactacttcaattgaaaaacagctggtgatattttaattacaatgttttaaagatgtactcggaaccacttaattttactttcttaaataaaattaatcaccctaaaataaaattccatggtgtatttattacacatgcagagaactattatgtagctggcaattttttattttcaaaataagattgcatatatgtgttttcagatagacataattcttcgatctacaatttttgtgttataaacaatcattyttagaaaattttttaaaaatttattgtattttatggaaaaacctccaagtatctaaatcattgagagtagccaccatttattgaacgctactatatatatgatactctttacacataattgtattattccccacaaaaaggtgagcattactgtgcttattattttacaaatgaggaaagcaaagatcaaaactgttaagtaatatatccaaaatcccacagttaatatcag

SEQ ID NO: 757777 - DNA, 636 bp, Homo sapiens
tatcccactgatttatccaaaacaattgcatgcataatctgggaaatttcaataattatttatatctggtattaaacgaaaaagccaaaaaagagaaaggtttattatctcatttacttaagaaaaaaataaggtttttattggtgtcctaagtgtatgtacatcattagcagaattattaaatgaaaaaaaatttaaactatttttaaaagattttagagatagaatcagagagcttggttgctgtgtaataatcactgggaattgatcatatgccagtaattgtccatatgcatttttgttccatcaatagatgcttaaaatttttgctctagttcagtagtacttacctatgtgaccccaaatgtcattactctcttttacatcttatggtgaattaagatactatatttcartaggtctgtatttcttcttctatttctgaaagattgtcacatccacaatttttctatgcaccttttgcaaataactattattcaagaaaatagttgagtttacatgagcagaatgagtaagagataacacttgcgtcagatatatgagatgcaaccaaagctatacgcagagtaaatgttattttcactatttttgaaataaatgaaatattttattaag

SEQ ID NO: 757778 - DNA, 547 bp, Homo sapiens
acttggttgggctaaaggatgcccagatagctagtaaaacattatttctggttgtgtctgttagagtatttttggaagagattaatactttaattggtagactgagtaaagaagatcatcctcactaatatggccagtcatcacctaatcaatccattgagggctgaayagaacaaaaaggctgaggaagggagaagtcagtctcttctgcttgagctgggacatccatctttgccctcagacatcagccctcctggttctctagcctttgaatttggacggggatttacattagtgccacaccctcccttgcttctcagacctttgggtttggactggaactactgccccaactttcctggctctctagcttgcatacagcagattgtgggacttttcagcctccataattacgagagccaagttccataataaatctctttccatatatcctatgagttctatttctctgcagattcctgactaatacaatcccaaaccttgaattgagacattagcattagcttgttgccatgccaaatcttta

SEQ ID NO: 757779 - DNA, 691 bp, Homo sapiens
gccactatactgccatggttccagataataggaactcttgctgtacttcttattatatctaccatctgaccattttgttcagaccagctgaacatagtgtgggcctggcatgcagactgagaggtggaattcaagctaaacatccccttaggggaccaattaataatgattccataggaatcattgtgcagcacctctgcctgctctgcaatgcaatcttcctaaactagtaggttcattttttctaactgggtccaatcctgtttacaaataggtttttgagggtggtatgcctcmattataggagcagatttattatggtaaatactgagatcagaaagcatgtgtaactgtgtcataaagtgattgcatccaggcattattgccagccaagactgataaatataaccaataagtataattgttctctgtgtcagcccttattgaaggaatactcacagcagtggtgataaccactatcatagctaccattaaattattcgttgtgactggttgtctcgcttttctcaggtttttttctgccatttatgacagcttcttgatttgtccccaggtgggtggctgtgttcaatgggtgttgctcatgacagttggggtcctcctcagcatcactctcaacatggctgcaaccggggggtcctcaggatcctcccagagtcttttccttggc

SEQ ID NO: 757780 - DNA, 691 bp, Homo sapiens
gccactatactgccatggttccagataataggaactcttgctgtacttcttattatatctaccatctgaccattttgttcagaccagctgaacatagtgtgggcctggcatgcagactgagaggtggaattcaagctaaacatccccttaggggaccaattaataatgattccataggaatcattgtgcagcacctctgcctgctctgcaatgcaatcttcctaaactagtaggttcattttttctaactgggtccaatcctgtttacaaataggtttttgagggtggtatgcctcaattataggagcagatttattatggtaaatactgagatcagaaagcatgtgtaactgtgtcataaagtgattgcatccaggcattattgccagccaagactgataaatataaccaataagtataattgttctctgtgtcagcccttattgaaggaatactcacagcagtggtgataaccactatcatagctaccattaaattattcgttgtgactggttgtctcgcttttctcaggtttttttctgccatttwtgacagcttcttgatttgtccccaggtgggtggctgtgttcaatgggtgttgctcatgacagttggggtcctcctcagcatcactctcaacatggctgcaaccggggggtcctcaggatcctcccagagtcttttccttggc

SEQ ID NO: 757781 - DNA, 584 bp, Homo sapiens
acacagagtacaactgcaatatattttacaagttcaggcagccgcttcttggtagcaaaagggtcgtttccagaagtcctgtcagctctcaagtttccccttttggaggggaaagagctccccatgtcctaattctgtcactcatagacaccrgcaaacagtgcaagacagattaatccaaaaagaatagcaattaacatccagtggtgtgaaaccagttcttagttgagactttactgagagcggtctctaacctacatcttaggaaggactataaccttcctaagttgggtcttgaatccaagtacagtcaagcatccttgccttgttttagaggctcctttaacccacgctgtcttaggagagactctgactttcctaagttgtgcctccaacctaatctcatcctttacccaggtatatggactcaaagtcagccaattggtatccacagataatttttctgggggagggacagaagtctcttcagtatagtccttttgtggttgccaggaaaatgttactagaaagaagtcttgatccataccccaagagagggttcttgtatcttgctcaagaaagaa

SEQ ID NO: 757782 - DNA, 584 bp, Homo sapiens
acacagagtacaactgcaatatattttacaagttcaggcagccgcttcttggtagcaaaagggtcgtttccagaagtcctgtcagctctcaagtttccccttttggaggggaaagagctccccatgtcctaattctgtcactcatagacaccagcaaacagtgcaagacagattaatccaaaaagaatagcaattaacatccagtggtgtgaaaccagttcttagttgagactttactgagagcggtctctaacctacatcttaggaaggactataaccttcctaagytgggtcttgaatccaagtacagtcaagcatccttgccttgttttagaggctcctttaacccacgctgtcttaggagagactctgactttcctaagttgtgcctccaacctaatctcatcctttacccaggtatatggactcaaagtcagccaattggtatccacagataatttttctgggggagggacagaagtctcttcagtatagtccttttgtggttgccaggaaaatgttactagaaagaagtcttgatccataccccaagagagggttcttgtatcttgctcaagaaagaa

SEQ ID NO: 757783 - DNA, 584 bp, Homo sapiens
acacagagtacaactgcaatatattttacaagttcaggcagccgcttcttggtagcaaaagggtcgtttccagaagtcctgtcagctctcaagtttccccttttggaggggaaagagctccccatgtcctaattctgtcactcatagacaccagcaaacagtgcaagacagattaatccaaaaagaatagcaattaacatccagtggtgtgaaaccagttcttagttgagactttactgagagcggtctctaacctacatcttaggaaggactataaccttcctaagttgggycttgaatccaagtacagtcaagcatccttgccttgttttagaggctcctttaacccacgctgtcttaggagagactctgactttcctaagttgtgcctccaacctaatctcatcctttacccaggtatatggactcaaagtcagccaattggtatccacagataatttttctgggggagggacagaagtctcttcagtatagtccttttgtggttgccaggaaaatgttactagaaagaagtcttgatccataccccaagagagggttcttgtatcttgctcaagaaagaa

SEQ ID NO: 757784 - DNA, 500 bp, Homo sapiens
tttatctttaattgtgtttacatgatgagtaacatttattaattgtatgttgaaccaaccttttatttcagagatacagccaagttgatcatagtgcattagctttttgatgttctcctggatttggtttgccagtattttgttgatattttcatcaatgttcattaaaaatattggcctcaagttttctattttttgttttatatttgccagattttggtatcagaataatrctatttttatagaataagttggaaagaagtccccttttctcaatcttttgaaataatattagtagaagtggtaccaactctaatttttacatctggtggaattcagctgtaaatttttctgattctttgttgtttttggtgggtaggctatttatttctaattcaattttggagctcgttattggtatattcagggattcaatttcttatttgttcagtctttggaggatgtatctttgctccaagtttacaatcctcaagcttggc

SEQ ID NO: 757785 - DNA, 538 bp, Homo sapiens
ctcgttgtaagagaaaggagacatcctgtgtttttttctccctcatacaagagataactttggttgttacccagatgagagtttctcaagttttctggtactagggtgaaagacaaagaggaggtctggtgactcaaacaaactaattgcttccacttcatatggtmattcaaaaaatagatgaagcagtcaaggtccctaccatccaggaaattttagtctagactagcaactggatacatggttgaattaagcattatatggttggtacagtgaatagaagtgtgcaaaaaaaccttggtccacttctttttaatattgttgtgacttctgaagttatcacctgaacgtatatttatggactgaagagttattattatttgtgtttcttttacttttctaagaatacatatttatcttctaataaaattatcctagaaaactttaaaagatccatttaaattgcttattagtatatgttataaaattgacagcagtggcaaaaatagattagtgttacataaactctgggatttaa

SEQ ID NO: 757786 - DNA, 466 bp, Homo sapiens
tcttacacatgaaatttgtttataacttgttagaaaacatgcaaaatatttgtagtcccaaagtaaaggcacttaagggattagagaaatgcttggtcatgtgatctgggtgctccttaactaacaaatgtgaaatatggaacagatataatcaagaggcatgtattcatcaagaattgagcaatttaaggctgctcaggtgaaggcaaatgaatatattcacaaaatctattttatcaatgagcttagcaattcatatgaaatatgttgtgatcatgcattgtgttaaataacatcagtctgttttcaagcrgaaaataaatttcacttccatttatcttgttaggctcattttaccccaaattaactatttctgaccataactattaacaaataaagaatattattattctcctttcagatgtatttaaacatacttaaatggttagaattcttaagttttaaa

SEQ ID NO: 757787 - DNA, 584 bp, Homo sapiens
tttggcaagtctacaggggactctaggactctatattctcaagaaatccatcttgcccccaacccagaggactcccatgatcaggcaagtctggagaaaactacttcaattgaaaaacagctggtgatattttaattacaatgttttaaagatgtactcggaaccacttaattttactttcttaaataaaattaatcaccctaaaataaaattcatggtgtatttattacacatgcagagaactattatgtagctggcaattttttattttcaaaataagattgcatatatgtgttttcagatagacataattcttgatctacaatttttgtgtttataaacaatcattyttagaaaattttttaaaaatttattgtattttatggaaaaacctccaagtatctaaatcattgagagtagccaccatttattgaacgcctactattatatatgatactctttacacataattgtattattccccacaaaaaggtgagcattactgtgcttattattttacaaatgaggaaagcaaagatcaaaactgttaagtaatatatccaaaatcccacagttaatatcag

SEQ ID NO: 757788 - DNA, 637 bp, Homo sapiens
atcccactgatttatccaaaacaattgcatgcattatctgggaaatttcaataatttatttatatctggtattaaacgaaaaagccaaaaaagagaaaggtttattatctcatttacttaagaaaaaaataaggtttttattggtgtcctaagtgtatgtacatcattagcagaattattaaatgaaaaaaaatttaaactatttttaaaagattttagagatagaatcagagagcttggttgctgtgtaataatcactgggaattgatcatatgccagtaattgtccatatgcatttttgttccatcaatagatgcttaaaatttttgctctagttcagtagtacttacctatgtgaccccaaatgtcattactctcttttacatcttatggtgaattaagatactatatttcartaggtctgtatttcttcttctatttctgaaagattgtcacatccacaatttttctatgcaccttttgcaaataactattattcaagaaaatagttgagtttacatgagcagaatgagtaagagataacacttgcgtcagatatatgagatgcaaccaaagctatacgcagagtaaatgttattttcactatttttgaaataaatgaaatattttattaagg

SEQ ID NO: 757789 - DNA, 531 bp, Homo sapiens
attccggggtagggggctggctgcatggacccctggagctaagctggtaggcaggggcgggccagcccatctcccttgcagaggggctcaatgccagggtatgctcacagaggcctgggtgccaaggaccctcgattgggtttggctgaaaaaatagcagatgcgagyggtcagcttctcctccaagtccattaagtcctcacaaggctgggccccacagacctgggtctctggtgtcctcagcatccctgtgtggcttcttgagtctgactctgaggacacccctgcaggctgctgatcacagagcaagaggtgtgtggatccctcagggcacggggagctgttggggcacctcacgtcactcctggggctgtggcttaggattcaggctggctccagacttcctccttcacctcctcatcccagggctgtgtggcctgggtagcagccctaattcagaaccaggtgggagaggccttggctgtcacctagcccccttgccacctcacacaagacactatctccacagtg

SEQ ID NO: 757790 - DNA, 644 bp, Homo sapiens
tcctgagacctgcccagtgcactgagggtgcacctggggcctgtcccacctgatgtccccaagtgccccgcaaggtctgatctctcagcctccatctacctcccccggggggtgggggcttgctttgagctgtccccacctttctggatagaactaatgtacttcttacatatattgattgatgtctcatgtctccttaaaatgtataaaagcaagctgtgggccaggcgcagtggctcacgcctgtaatcccagcactgtgggaggccgaggctggtggatcacgaggtcaggagatcgagaccatcctggctaacacatagaaactccatctctactaaaaagtacaaaaaattagccaggcgtggtggcgggcgcctgtagtcccagctacctgggaggctgaggcaggacaatggtgtgaacccgggaggtggagcttgcagtgagccgagatcgcaccactgcactccagcctgggcgacagagcgagaygccgtctcaaaaaaaaaaaaaattatctgggcatggtggtgggtgcctgtaatcccagcctttcaggaggctgaggcatgagaattgcttgagtctgggaggcagaggttgcagtgaactgagatcgcgccactgcactccagcccggg

SEQ ID NO: 757791 - DNA, 610 bp, Homo sapiens
tgaattaaataagttattgattttgattctcctttcatctttatctcatgttagaaatcggccatgccaacactcccctgggatttccctccattctgccatctaattttatcccatcatttctttcaaaatctggctcaaaccacatttctgcccagatgtcttccctggtaaatttcatacaatttgggtctctttttttttttcagcccatgtcctcatatggccaatttatgctaacttgcaacactttctgtgttgccaggtattaatttataatttgtatatcatttccatttcaaactacaatttttctcaaagtaacagtccttaagcccttaacttaaaaaaaaaaaaaaaaaaagcctcaayctcagaaaatgatagtatggagtgcatctagtccattgagcattttatttaacaattaaataaaatagaaaatttacccaggaagcaatgaagcagataggtaaatgtttagccctgtgtttctacaagtatcttttcttcaaaataaaatgcagacatataatataccatgcgaatttacaagtcactttgctactgttgatgacaaaggagtgcttccgtgctgtgcgtgttattg

SEQ ID NO: 757792 - DNA, 624 bp, Homo sapiens
ttgtccctcaaacaaaaaaactatgcaagaaatataaaaatatacatctgtagacagagcactggcaaaggagtacacaagcctaaagatttcaaaatctttgcatattctccagtagaattgaacagtgtgcacaaccgcaatcttagggaaatggcctgcttgctgtaagagaaattaagaattgtatgatagttctctaaaataaaactgaacagtggtaagtgttctagaaaagcaatacactttttgagaaacaaaatttccatttctttttgatctggcttatctatttaatgttgtgctgacttctatgtcttaaaagtcctcattaatgctatatcataatcataagtacaccatctgctcacttctttcagaaggaagtgtgttcattgtgtttggaacattgcttattggtgcacactyatgcgggtggatgtgaaggctgaggggaaggggaagttgaaggaagagcaagttccctgtaaacacctatgtcttgagtgttgaataaaaagggtggtaaagacagctagtatgacttcactcccatttgcttaattatgaaataagttgttgttaggtaaaacctgcagagaaaagtcaccaataaatttggaa

SEQ ID NO: 757793 - DNA, 630 bp, Homo sapiens
caatgaaagattataaaataaaaataatggccttatacgttttgcctattttcatagctattcattttcttgtttggagtttgtttctcccaaatatgttgatcttcctggaaaagtgtacaatatcatatgagacagagacctatattttccaaaatggtacataattttcctaacacttatcatttgttaaatattattgtttaccaaataatggtttttactaagctctcatatgcctatgagtttatctggacaccttgtgttccattgatatatttgtttatatctgtactactaacaggctatttattttagagtatattttgatagctgattttctttttcaaaactggttttcttcaggttctctttgagattaatttagacttgaattttcaagtagaaaaagaattaaaatagatattttggggggattgcattgaatgtgcgcgcgcacgcgcgcgcgcrcacacacacacacacacacacacacacacacagtctctgtctctctctctctgttaagaagtggcatttaaaaaataccgtgtcctcccatctagaaacatgattttttctactgattgcataaaatgttttccttttgttttcactcttccaataaca

SEQ ID NO: 757794 - DNA, 641 bp, Homo sapiens
cagaacatgggggcatggaatattatggcaggcagcattttcctctctaatgtactaggatacagtagccacaaacaagggtcctggttaatgaccacataactgagaagcacattaccatcatgtatgtgcttataaacctgagacagcaaatggctgagatgtttggtgtaaatttttcaatacaaacacaaactaaaaataaggaakttattgtacaaaaatccaaagcactcaaagaataattgtctccctggatgaacatttgcatatttatataactgtgcaatttaagagatagatggatggatggattaatagattactcttacctctgaagacgcttctaagtacattttcaagttttctacataatgaatatgaggaatagtgttaagagtgtatcatataccaaaagtaggcttattatttgaatatattttctaagttagccagaagcaatataattacagtacacttgaaatgaaatgctaaaatgggaggatttaaattgtcaaagctattatgttggacttgtgtgattaatctttgaagggaatggcaaacagctttttaatgagttttaaatgcaggactaagattgatggatggtccacatttgatatgaagactgaggagtc

SEQ ID NO: 757795 - DNA, 572 bp, Homo sapiens
cagtgaaataagccaggcagcgaaaggcaagtactatgtgatctcacttatatgtgggatctaaaacagctaaactcatagaaagagagtgtaggacagtggtcaccagagcctcagtggcaggaaagtgaatggggagatgttggtgaaagggtgcaaagtttggaatragttttccagatctatcgcccagcaaggtgactattgtcaataagaatgtactgtgtatttcaaaatagctaagagtaaatttcaaacatcttaccataaaaatgataagtgagatgttgaatatgtttattagtttgaccgaatcattccatgatatatgtaaatcaaaacatcatattgcaccccacaaatgtatataattatgatttttctcattaaaaaactaataaaaagcattaaatcagtagactgagagaagtaaattacccgctataataggggtggggcttatccaatcagtggaggccttagttggaaaagactgacctctctcagaaaaagagggaattctacctctctattgcctttggacttgagctgcaacatcacctcctccctgg

SEQ ID NO: 757796 - DNA, 532 bp, Homo sapiens
tgtacactattacaatactctatacctggaaacaataaaccttaagcagaatggatcaacatacctggtatactcacaccacagaatactacacagcaatatgagtgaatgaattacaaccacatgcagcaacagggatgctggacttgagagtggatggtatagacatagagttgatggttcaatggcaatttagaagcccaaaatattcagagtcctcaaaaaattcacagaactggatctgcttattagcttatttgcatttcctgtggttgaaacatgtgatcgctgattaattaccgagcaggtccacaacwttacaatcaatgagtccatttacaagttttaactgagcacctactgtgctccagaattattcctatatagcagcaaacaaattcccttccagacaaagtttatgttctagaacatgtcattgcttggaaatgaaatcagcatatgtgtatgtgttactgcaaagtagaaagtattctctaattttagcttcctagtctgagttaatagaatcgaa

SEQ ID NO: 757797 - DNA, 632 bp, Homo sapiens
gtgtacaccattagaagcagccaggttacacattgaatgctttgctgcttagaaatttctttcagcagataccctaaattatctccctcaagttccaagtttaacagatctctagagacaggggcagaatgccggcagtctctttgctaaagcagagcaagagtggcctttactttcattctcaacaagttcctcatatttatatgagacctccacagcctggacctcactgttcatatcagtatcagcattttggtcataaccattcaacaagtctctagaaagttccaaacctactctcatcttcctgtcttcttgtaagccctccaaacttacccaacctctgcccattactcagttccaaagatgcttccacatttttaggtatctttataacaatgcttcacttcactggtagcaattttattagactgttcttacactrctatgaagaactacctgagactggataatttataaagaagagagttttagttgactcacagctctgcaggttgtacagggggcttggctggggaggcctcaggaaacttacaattatggtggaagggcaatgaagaagcaagcacagcttcacatggtggcagaagagacagagaactatggagaga

SEQ ID NO: 757798 - DNA, 540 bp, Homo sapiens
gagtagatttttccccaggacctcaggtaaggatacaaagcccagctgacatcgatttcagctttgtcagcccctaagcagaggatgcagttgagaccaccaagactttgaccaacaaaagctgctgagacctgataaatwtgtattgttttaagctgttaagtgtttggtaatttgtcagggcagcagtagaaaattaacacaacatacttgctctttccttggattttctttatcactatattcacctgtcaaaatacttttttttttattaaggtccaactcagctgtcacatacggatcttcccgttctgatgaattgttgttccaacattatcagtcttgagtatttgtataacaaatatgtgcattcttgtctctttaaattatgatattagttatggctctgtaatcacctctttctttcatatacacttatattctctttcacaactagcagtgtttggcacatcacagacttcccaaaaaatatcaagtgtgaattgaaataactttgtatatttatccatttagtccttc

SEQ ID NO: 757799 - DNA, 490 bp, Homo sapiens
atactgctttactagtggctctcacatcaagttcttattcaggttctaccttttcactaagtccaactctgaccacttcaattgaaattttacccaacaagatatctgcctttcaaataccccttaatttgctctatttatttacacagcatatataccctctctgcatacatttrtatgtatatttattgtccagcatactaacacctagaatagtaattgtttttcatagtaagcctactcattcaatatttgttgaattgaagtatttcaacagagaggatgagacgctaagtagtcatagtggtgagactaaatataaattaatctaaggaataaggaacactttgttcaatggggaaatagtaaacacataactgaacttttaaaacatctgattactctttcactatatacagaaaaaaatcacattaaggtgatagtgacaagctttcacagagtataaaatgcaatacaatttgagcatgtt

SEQ ID NO: 757800 - DNA, 490 bp, Homo sapiens
atactgctttactagtggctctcacatcaagttcttattcaggttctaccttttcactaagtccaactctgaccacttcaattgaaattttacccaacaagatatctgcctttcaaataccccttaatttgctctatttatttacacagcatatataccctctctgcatacatttatatgtatatttattgtccagcatactaacacctagaatagtaattgtttttcatagtaagcctactcattcaatatttgttgaattgaagtatttcaacagagaggatgagacgctaagtagtcatagtggtgagactaaatataaattaatctaaggaataaggaacactttgytcaatggggaaatagtaaacacataactgaacttttaaaacatctgattactctttcactatatacagaaaaaaatcacattaaggtgatagtgacaagctttcacagagtataaaatgcaatacaatttgagcatgtt

SEQ ID NO: 757801 - DNA, 635 bp, Homo sapiens
tagcaattttagatgtactgagcatgtgacagaagtctcatattgattccccaaaatcggaagtgtggctgttgtgataggaagtgttaaatgggagcccctgaaatttctccatcacttctagccaagaaaatgaattagaatcaaaaacacccactgcctctatgaggacctgtagagataaacaccactatcacacatctgaagaatgcaggaggagtggcctcactacatctgcattcaactcacctgstctgttctctgcagaaaccaggacatctgccacgcctatggcagatgacagtgtagtgtcatatatttaatcatatctttgtcccagttgtagccactgttctcaatatggtatgtttaaatgataagattaaccttgccccctgggaattatcatgtgccagcgattttatgaaagctttcttctcaatcctcaatcaataaaaaagatgaaaagcatggcttctttacctgaggacagtgacaattataaatattttctgttttactttattactctttaaactcttctgtgctgtgtccataaaagagtcaacagggcaggacagcacattgaaacatagatttcagtgtatagcaagtgatgtaaatgtcatcgtaag

SEQ ID NO: 757802 - DNA, 610 bp, Homo sapiens
ttggaaggctatcaggggctcatagaattggcagagaagagtgatgaagtctggaaaatggccagaaaccaagggcttgccagagagttaagcaacaggggccttagcaaggtcacgagaatgggtggccagcacgccaccgctgccgctggcctggagagcctccagccgctcctcccggccccaaatcactcactcaagggtccaagtcctggagggaacatgtggctaccctagcctggattatgtgcataccgtttggttgcagctggagaagagagggggagaactgggtgtttgtgcttctgtgtaaggggcaagttcatcacccactgtgccgtgatggcacacaatggagggtgggtctccatagggaatggaagtgctgctggccactgaacagtcccaagcccacaaatgctcaccrcaaacgttactatttaaatccagaagagaaggcaggtgcttcttgataaaaccagggcagagttacatggtgtggaggaaaagggtgggcttgagtttctggcaagctccatatgtaagggttaaaatcacctgaggtgagggactctaagaggcgcagtgctcaaacctccacttgtactga

SEQ ID NO: 757803 - DNA, 594 bp, Homo sapiens
gcacccatgcattggcggaggaagtcattgcattataggacccttgcatcttttcctttgggctttctttctaccctcagtgagcatcaaaccaaagaaaagcttcttaaaaaaaaagaacacaagttataagagccaccaatatttcaaaaacaatttcacatctgcactgaaactcctctacttacaaacattcacagataagaacaaagccatgcactaaaggaaaagtaggccagctccgcctgcttccccacagatggtgagcagcagtcatgcgcatccattttagtcttggccatcacgttagtcattagtgttggcccatgagctgtttaaagaagygtcttcttaccatgaaaagaagaaagtcaaagtaaaaacatctttggatacatttctgaatcgctgaaaagcaccaagtagagccagaatcaatgccagcacatcaccggtccttttgagaaactcaactttatacagacatgtatactgcagagacttagaaagaaatagacttaaacacagccttttggatatgatgtatttgtacatgaatgatttctaaatttctaacagcaaaaacaacactga

SEQ ID NO: 757804 - DNA, 611 bp, Homo sapiens
atgtgatggtttcaggcatggctggatccaggggtttaaacaatgtcatcaagacactgtctttatctatggactctactttcctgtattggcttccttttcaggcagtttgtccctttgcagtgtccatctttgcccgctacagctccaggtctataaccaactagtttagcaactccagctkaaagagtgcttcatgctccaagagttccagaaaatgtcatacaagatcaacttactggatcaacttaggtcatgtgcctattcctgagccaatgagcctgtccagaggggtgcagttctccaactggccatgtctgggttgtgtgcttacccctagagtcagctctacttgagacccaaagggtgtgggtgtcttctacacatggggagcagaggaaaagaggccatgagggaggaggtgacggacaagtgtggaggttgtgagggagtgagagagcaggaagagcagaggctgtggcgaacattgaacaaggattatcaccagggtagatgttagaatgaatgtgtgagctgggcttaagggtatggatttgtcagggttctttgctgcaagaaacaaaagttttctccatcctgagcaataagga

SEQ ID NO: 757805 - DNA, 587 bp, Homo sapiens
atgtttggagttagcacaagacaggatgattcctcatgtttgttttggaaaacaagtcttaaactcacagccatgacagagtctgacatcatcagacatcaggcgtgttaagaattgcactcttaattgaaaatgtccagagtttgtgattaattgcaatccttttcagatcctttccctaagaatttaatttttctccccacccacccggaggtcaggcttttaatgtaacaagtacaatcaatcttccactgaagatggcctctctctagtgcaagctggagcaggactcatctggattagaagcctagacggtttggagtcacctggtgaggtttacgtgcacagctggggcccagcctacctaattaggaccagagagtggttgagaaggggaccggcgcgtattctaggcgccctcctccagtgtctgtttctaataatggcagmaagtagcagaggcggcggggtgagcttggagcgtggtgacatcatccctccagctgttttacacatctgtgacatggctcattaggactctcttaacacctcatccttccctgctccacacagctccagttgcatga

SEQ ID NO: 757806 - DNA, 597 bp, Homo sapiens
tttttaaagtggatgttttagtccatgagatacttagaaaaattaacatatgcaaaggaatataaatccaaattgtattataaatgtttttcttcttaaaaagtctaatgctagcttctgtaacagataaaccataaaatcacgggcagcttaacatggtagcattttgtcattcacacactccaattagaatgtttgatgggccactttctgtgtggtgaccggggggactggaccccttcgatcatgtggccctgctgtctttactatatgccatgtagtagagaaactgaggaagacatacctttctttgcatcaggtcagcccctttccrctgatgatctggtgaaagccagtggttaagaccttattcagacaaaaaggtggaaatgtgctttgctgagcagctgcttccaggtattagcgctgtgtcctggaagtgagcaaggagttggaaactttggtgcatcccatgtaattgagtcacagtagttacacttttttttgaagttaggctaggacatatattaacagaaatattctaccaattaaatttactacccattattacattataatttacttaaatatactagt

SEQ ID NO: 757807 - DNA, 607 bp, Homo sapiens
aaacccctgtgggtgcgctctatgaggaagcctgtgggtggtggttgcgggggaagaatctgggtctgtgaacaaaagaaaagaaaaagatgtaatgtgtgcctcacaaataagattcagtcactcaaaggcaaaatagagaaataaggaattaaatgagggtagaggaaacagcagcagttcaccaacttttggctgcactttaacatgttctaaattattgatgattcaaaaaagctttggttcgtgtgggttttatttttttatgtttacctaagaagaacatgactgaaaaattgtaaaatatttattaatttattcatttaaaaatcatgtcaataaactgttatatattaacataaataagagtttaaagaaaaataactgttttccaaataaaagayagtgagaaaagtggcattgtttatctatttgcaaatttctttaatgcctgaccgagaagaacacagctggattttcatatctgctctgcatttgagctgatatgaatgaaatcagttcatctgagtaatcgcacacctttcagactctgggaaatgccacagtaggttcaaaagagcatgagagtacagaaggcaaatgacat

SEQ ID NO: 757808 - DNA, 607 bp, Homo sapiens
aaacccctgtgggtgcgctctatgaggaagcctgtgggtggtggttgcgggggaagaatctgggtctgtgaacaaaagaaaagaaaaagatgtaatgtgtgcctcacaaataagattcagtcactcaaaggcaaaatagagaaataaggaattaaatgagggtagaggaaacagcagcagttcaccaacttttggctgcactttaacatgttctaaattattgatgattcaaaaaagctttggttcgtgtgggttttatttttttatgtttacctaagaagaacatgactgaaaaattgtaaaatatttattaatttattcatttaaaaatcatgtcaataaactgttatatattaacataaataagagtttaaagaaaaataactgttttccaaataaaagacagtgagaaaagtggcattgtttatctatttgcaaatttctttaatgcctgacygagaagaacacagctggattttcatatctgctctgcatttgagctgatatgaatgaaatcagttcatctgagtaatcgcacacctttcagactctgggaaatgccacagtaggttcaaaagagcatgagagtacagaaggcaaatgacat

SEQ ID NO: 757809 - DNA, 604 bp, Homo sapiens
gttgtaagtgtatggatgtatttctgtgttctctattctgtttcgttggtctacatgtctatttttatgctggtcccatgctgttttggttactatagctttgtaaggtagtttgatgtctccagctttgttctttttgctcagtgccttggctatttggggtcttttgtgctttcatgtgaattttagaattctttttctattcctgtaaaggatgtcattgatattttgacaggggttgcattgaatctgtaggttgctttggctggagtatggatgttttaataatattcttccatccataaacaagcaattatcttttcattttttgtgtcctgatgaacttatttcattaattttttttttttttttttagtatttattgatcattcttgggtgtttcttggagagggggatgtggcagggtcataggataataatggagagaaggtcagcrgataaacacgtggacaaaggtctctggttttcctaggcagaggtccctgcggccttccacagtgtttgtgtccctgggtacttgagattagggagtggtgatgactcttaatgagcatgctgccttcaagcatctgtttaacaaagc

SEQ ID NO: 757810 - DNA, 712 bp, Homo sapiens
ccatttgtttcactgtttctgaggaaagacattctacattgggcttgcctcctgcagtgttctaaggaaatttttcataaatcatgctttgccactgattccttacccaaacctttttggagttacctttgcttcaagggaagaacaagaatggcactttcaatatttgcagtcatttgaataaaatccactcaaatgttaaagtgacagtgcttatctttgtcaatttccacacattatttgcctcttgctctgattttattctggctacagagcctgcttcaacactctggaaatctcattgctcttgaattttaccatgttcttgctaccaagaagtaaaatgacctgataaattgatccatattataatttaatttgggtattattatttctgaaactagaatttttacattttgtaaactctcattttaagggagatcctttggcgaagagacttctacattcagagtctcatggtgagcttttagtcgctgggagttctctaagcaagacgtgtggattgaggtggagtgggagggagatttttttctagcagcctccaaatcatacctawataatgctagctagccacccttaatatatatcaattataaatgaacacaattagaatctaattttattattattacattaataaatgatactgctgacaataatggtataacaacaataatggtgacttacattt

SEQ ID NO: 757811 - DNA, 591 bp, Homo sapiens
tgatactgctgacaataatggtataacaacaataatggtgacttacatttacagaacacttaggacatgtcaaacactgttctgagtgctttagatatagtctttatttttttgtcacaatagctctatggagcagataatataattatcccattttacagacaagaaaactgaggcacagagtgattgagtaacttatctaaggtcacacagataaacaataasaggctgggatcggtggctcacacctataatcccagcactttgggattttaattacaaaaaattagctgggtgtgatggtgcacgcctgtaatcccagctactagagaggctgaggcaggaggattgcttgaacccgagggtggagtttgcaatgagccgagatcacgccactgcactccagcctgggcgacagagtgagaccccgtctcaaaaaaaaaaaaaaaaaaaagataaacaataacaatactttactgttatcatacactttctacaggcactgaaattggtgctttccaattatgatgtcctttgttctcataaaccctatcaccagaggaaatttgggcttagagagattaaatcctt

SEQ ID NO: 757812 - DNA, 605 bp, Homo sapiens
tgatcaagtggaatttatcccagggatgtaagggtcgttcaacattcacaaatcaataaatgtgataaatcacattaactgaaccaagaacaaaaaccacatgatcttttcaatagatgctgaaaaaacattcaataaaactcaatatccctttataataaaaaccattaacaaattgggtatagaaggaacatgcctcaaaataataaagaccatatgtgacaaacccacagctaacattgtattaaataagtaaaaaatggaaagcctttcctctaagatctagaacaaaacaaggatgtccactttcaccacatttattcaacataatacttactggaagttatggccagtaattaggcaagagaaagttaaaaagggcatcaaaattggaagggaagtagtaaaattwgtcttgttttcagacatgattttatacctagaaaaactaaaggcttcacccaaaaaactgttagaactgataaatgaattcaatagtgtttcaagatacaaattcaacacacaaaaatcagtagcatttatatatgcaaacagtgaatagtctgaaaaagaaatcaagaaagcaatcccatttgtaacagcta

SEQ ID NO: 757813 - DNA, 638 bp, Homo sapiens
agtagtaaaattagtcttgttttcagacatgattttatacctagaaaaactaaaggcttcacccaaaaaactgttagaactgataaatgaattcaatagtgtttcaagatacaaattcaacacacaaaaatcagtagcatttatatatgcaaacagtgaatagtctgaaaaagaaatcaagaaagcaatcccatttrtaacagctacacagaatataacatatctaggaattgatttaatcaaagaagtgaaatatctattcaaggaaaactataaaacactgatgagagaaattgaagagggcacaagaaaatgaaaagatatttcatgtgcatgaattggaagaattaatattcttaaaataacaatactacccaaagcaatttatagccaatgtaatccctatcaaaataccaatgacgtttttcagaaaaatagagaacacaaccctaaaatttatatggaatcacaaaagaactcagatagccaaagcaatcctgagcagaaagaacgaagttgggaatcacactacatgacttcaaaatatatcacaaggctgtagttaccaaatcagcatggtaatggcataaaaacagatacataggctagtggaacagaatagcgaacacagacacata

SEQ ID NO: 757814 - DNA, 638 bp, Homo sapiens
agtagtaaaattagtcttgttttcagacatgattttatacctagaaaaactaaaggcttcacccaaaaaactgttagaactgataaatgaattcaatagtgtttcaagatacaaattcaacacacaaaaatcagtagcatttatatatgcaaacagtgaatagtctgaaaaagaaatcaagaaagcaatcccatttgtaacagctacacagaatataacatatctaggaattgatttaatcaaagaagtgaaatatctattcaaggaaaactataaaacactgatgagagaaattgaagagggcacaagaaaatgaaaagatatttcatgtgcatgaattggaagaattaatattcttaaaataacaatactacccaaagcaatttatagcyaatgtaatccctatcaaaataccaatgacgtttttcagaaaaatagagaacacaaccctaaaatttatatggaatcacaaaagaactcagatagccaaagcaatcctgagcagaaagaacgaagttgggaatcacactacatgacttcaaaatatatcacaaggctgtagttaccaaatcagcatggtaatggcataaaaacagatacataggctagtggaacagaatagcgaacacagacacata

SEQ ID NO: 757815 - DNA, 643 bp, Homo sapiens
gaagctatctctcttaatgctgagccatgtcagcttgagggaggtactgacacagactaagtgaaattgctcttcttcctcatttcattgagtctgttctcaattttgtgctcatctggggtactgacactttttaattagattctgggcctctcatagaagtattttagtttggatgtaattgttaaattagtgtttctgtggagagaatgaaggctggcacttgccattttgccgacatccagactcttgtttcaaattcaagaatttcgacttgaaaatctagaattggagtcctaaagaatagtaaaaagaaattattcagtgaatagtgcattaaaaaggacaaaaatattttcaaacctgcatttataaaagaaggtagtaaaaaagcagttcacaaagagctccaagaagtttgaaataatttcaaattcaaaggctattggggaataaataggcacaaaatwatagagggtcttaagtggcaagctaaaattcttgtgctttattctataagtggtaaagagccattgaaagattttactcagataaatgacaagtttacaaattttagaccagcattcagttacagtatgaaggttgaattctaagatggtaagacatagacagaaggaccaat

SEQ ID NO: 757816 - DNA, 704 bp, Homo sapiens
tctctgaatatggaacagaaaacactttcagtgcagttttctctgagaggagagagaaagagggagacaggaagagaagaggtgtctgaaaccgctgaaggatctggaagcaggtttatgttaactcatatcttttctttaacgatggtcaaatgtttctgattgccctttgccattccgcacttgtgtgtctgttggggttatggatgggaagagtcggtagatgagaaacagtaaacaggaagttttccaaaagatactaggatcgttaagtcctgtgtgaaaaactgaagttaaatggcctagggaaggggagccgttccctgtcattcagaaaagtcatctggctacagtggagcataatatctagtcagaaatattattcttctaaaagytgcagttttatgtagacggaaataagggagaaggaacagaatcaggctatggacttgaatattgccacaaaaaatggattgggttgggggtggtcaggaagaggaggagaggggaaaatgggatgaaatacaaaacaaaacaaagctgaaacacccaggagagtcccaacctcttagcttgtaataagtcagcttttgttagcttggcttttgagtattaagcactcagttcatctccattgatttgtaatgaggctgggaggctcacaaagccttaatcaagccaggatccctttaaaatgaactctt

SEQ ID NO: 757817 - DNA, 472 bp, Homo sapiens
catggtggtgtgtgcctgtagttccagctacttgggaggctgagatgggaggatcacccgagctcagggacatcaaggttgcagtgagccataatcattccactgcagtccactccagcctgggcaacagagtgagatccygtctcaaaaaaaaaaaaaaaagaagaaagaaaagaaatttgaaatttgatcctcaatgttggaggatcaaacagagggcctaaggccctctgtgtcgggggcagagcaagtgagttctcattctgttagtgcctgtgagacctggttgctaaaaacagcctgacacctcccctctcactcgctcttgcttcctctctcaccacgtgatttctgcagacaccaactcccctttgctttccactatgaatggaagcagcctgaggacttcatcagatgcgtggtcttcctgccagcagaatcagtcatgagccaaataaaccttttttttata

SEQ ID NO: 757818 - DNA, 596 bp, Homo sapiens
aggtgccttaccattttcagatgaccttcatcaactaaatcctttgtcacgtattttctgtccgttcctcatgttatgttgttgctatgtctgagaatagtttaatgcagtactaggaagaggttcccaaacctggccaattgtcagaatttcccctacacactaacataattagaatctccccaggtttttccgatttttcaactaggtctaggaaccactgaacatgacagatacagaagacagaaaaattgtactgacctgagcccatacctaaagtaaatgatttcaaatctgacttgacatagctgagaacataattttcctccgactttattaaggtataattgacaaarattgtatatatttacagtgtacaatgtgatgttttcatatatgtatacattgtgaaatgattaaatcaagctgatgaacatatctacacctcacaggcttatttttttgtggtgagaacacttaagatctaccttagcaattttcaagtatataatacattactattaaatatagtcaccatgctgtacaatagatctctttaacttattcatcctgtttaagtcaaactttgtactctt

SEQ ID NO: 757819 - DNA, 619 bp, Homo sapiens
tcaaaagaagacatacatgcagccaacaagcatatgaaaaaatgctgtacgtcagtaataattagagaaatgcaaatcagaaccacagcgtgatatcttatattagtcagaatggctattattttaaaaatcaaaaaattacagatgctggaggggttatagagaagagggaacacctatacactgctggtrggagtgtaaattagttcacccattgtggaaatcagtgtggcaattcctcaaagaacttagaactacttttaaacccagccatcacattattgggtatatacaccaaggaatataaatcgttctaccataaaacatatgcacatgtatgttcattgcagcactattcacaatagcaaagacatggagtcaagcacccatgaatggcagactgggtaaagaaaatggagtgtatatacaccatgaaatattatgcagtcataaaaaacaagatcatgtccttttcagcaacatggatggaactgaagaccattattcttagcaaactagcacaggaacagaaaaccaaatactgcatgtgttctctcttatgagtgggagctaagtaacaacgcacgtggacacaacaaagggaacaacagacactggg

SEQ ID NO: 757820 - DNA, 501 bp, Homo sapiens
tttattttcttttgctgcttttaggatcctttctttatccctgacctttgcaagttttattattaaatgtcttgaagtagtcttctttgggttaaatcagcttggtgttctataaccttcttgtacttggatactgatacctttctctaggtttgagtagttctctgttgttatccctgtggaataaactttccacttttatctctttctgcctcctcattaaggccagtaactcttaaatttgcccttttcaggctattttctagatcctrtaggcatacttcattgttttttattttttttcttttgtctcctctgattgtgtattttcaagtagcctgacttcaagctcactgattctttcttctgcttgatcagttctgctgtcaagggactctgctgcattcttcagtatgcccattgcatttttcatctccagaatttttattctttttaattatttcactctctttgtgaactatatctgatagaatttcttct

SEQ ID NO: 757821 - DNA, 621 bp, Homo sapiens
tttcagatttaaaatgtaaacatacatctctagtcccaaccagtctctttattttggaatgttaatgtagaaatgtccccttgccggcagctagcccaatcttcttttcacagtcacccgttccagaggttatgtttatagctagaaccagtgtattttggcttttgcctttatttattctttatgagaactgggaactatggtgacccagcaaaagcctgggtgaccatggaagtagtctgtattagcgcctggacaccagagaaaagggaaaatgtgatcctcattcagccctggttgayagagatcatgcctttaaatggtcagtctcaaagacattcagttgtcacaagtgcagatttaccagttggcagttcagattgttactgtacagtgagtgtgagggtctttagaactggttttagtaatgtagcatatatacaggaatcttaggggatgtgtcatactgttttcaatagtcagggatagcatattggttaatcccaggcacttctgacacatatggttctgattgtgtaggcagaatgggcatgacaaggagggaaccttatcagctctttaaactaagtctgggttacattatacagaccatccaattct

SEQ ID NO: 757822 - DNA, 674 bp, Homo sapiens
catcctacaacttaatgtcatattaatatttcttttcttttcttttcttttttgagacggagttttcgctcttattgcccaggctgcagtgcaatggcatgctctcggctcaccgcaacctctgcctcccaggttcaagtgattctcctgcctcagcccccaaatagctggaattacaggcatgcgccaccatgcccggctaattttgtacttttagtagagatggggtttctccatgttggtcaggctggtctcgaactcatattaatatttcttttttgtttgagacggagttttgctcttgttgcccaggctggagtgcaatggcgygatctcggctcaccgcaacctccacctcccgggttcaagcgattctcctgtgtcagcctcccgagtagctgggactacaggtgcccaccactggctaattttttgtatttttagtagagacggggtttcatcgtgttagccaggatggtcttgatctcctgacctcgtgatccacccacctccgcctcccaaagtgctgggattacaggtgtgagcgaccgtgcctggcctgtcaactttaaaataaaaaaaagaagttactaaacggcaggactggttctatctgatagccctttaaaaatctgaagacagtgtgtttccccttaaagtaatcttttctggta

SEQ ID NO: 757823 - DNA, 674 bp, Homo sapiens
catcctacaacttaatgtcatattaatatttcttttcttttcttttcttttttgagacggagttttcgctcttattgcccaggctgcagtgcaatggcatgctctcggctcaccgcaacctctgcctcccaggttcaagtgattctcctgcctcagcccccaaatagctggaattacaggcatgcgccaccatgcccggctaattttgtacttttagtagagatggggtttctccatgttggtcaggctggtctcgaactcatattaatatttcttttttgtttgagacggagttttgctcttgttgcccaggctggagtgcaatggcgcgatctcggctcaccgcaacctccacctcccgggttcaagcgattctcctgtgtcagcctcccgagtagctgggactacaggtgcccaccactggctaattttttgtatttttagtagagacggggtttcatcgtgttagccaggatggtcttgatctcctgayctcgtgatccacccacctccgcctcccaaagtgctgggattacaggtgtgagcgaccgtgcctggcctgtcaactttaaaataaaaaaaagaagttactaaacggcaggactggttctatctgatagccctttaaaaatctgaagacagtgtgtttccccttaaagtaatcttttctggta

SEQ ID NO: 757824 - DNA, 612 bp, Homo sapiens
ataatttgtaaaatcattcttggtacttcatatactttaatcagtttcttaaccatatttgtctctaatactgttactgtgtttttttaaatgggatttttcaatatgatcttattagtttttttggcataaaattgtctaaaaatcatctttaaatctggagttgttgacacctttaactgacttccctaaaagccataatgtttaatttaggaaataacaatagttgatgaggtatatgrtaagttcagagaaaattctgcaaaatggaggatattcttgaaatgtgcaaatatttcaggttattttcactgtttttaccttaattcaaagtacctttctttagtatacttatttttttacaagacaaaattctccttgaacaaattctttatgtctcttttggaagttacaccaaatttaaatattataaaatcttagacattgtgaatgttattccattacaaaatatacatttatcccaattacaaatatacatttatcccaatcaaaaataggggaaccatcaaaaattcttcacagagatccaaacaatgcaatctctctacatcatcactctttccttttcacctcaaagtaactcattatcat

SEQ ID NO: 757825 - DNA, 612 bp, Homo sapiens
ataatttgtaaaatcattcttggtacttcatatactttaatcagtttcttaaccatatttgtctctaatactgttactgtgtttttttaaatgggatttttcaatatgatcttattagtttttttggcataaaattgtctaaaaatcatctttaaatctggagttgttgacacctttaactgacttccctaaaagccataatgtttaatttaggaaataacaatagttgatgaggtatatgataagttcagagaaaattctgcaaaatggaggatattcttgaaatgtgcaaatatttcaggttattttcactgtttttaccttaattcaaagtacctttctttagtatacttmtttttttacaagacaaaattctccttgaacaaattctttatgtctcttttggaagttacaccaaatttaaatattataaaatcttagacattgtgaatgttattccattacaaaatatacatttatcccaattacaaatatacatttatcccaatcaaaaataggggaaccatcaaaaattcttcacagagatccaaacaatgcaatctctctacatcatcactctttccttttcacctcaaagtaactcattatcat

SEQ ID NO: 757826 - DNA, 602 bp, Homo sapiens
ggccaaaagaatgaaagtgcactaaagaagagtgataatactagaagtgaaacttgcattaaacataaatggagcaaatgaaaaaaaagctgcctgtgggaacatgctgattgtggcaacaatgacactgccgccatttgagacattctagatatgcagactgaggaaatcagtgaaggtgaacttatagacataaatgaggaaaagtgattgtgatgaaaggctgatgatgtgtcagaggaagtgacastggcaaaaaaaacacattaaaggaactctcagagatatttcacaacattgaaaacgtaatggataaaatgttggaaactaatatttaaatttctccagaacgcagaactcataagcaactgtgttctccaagtaaatatcttcacaggttcctcaattaatgtgggcaaaattaaaagtacaacttgcttcttccctttggaaaaccctctctcagagtatattaccaacattcaacttcttatacaaggcatagatctgggaatcattattcattcttctctttttgtcattcacgtatccactcaatttccatggcctgttgattctatttctcagacgttgttcaaatc

SEQ ID NO: 757827 - DNA, 618 bp, Homo sapiens
gatgacagggcaatagtttactcacatattgattaatgttctgtttgcttataaaattgtaattgaaaacattactctcagtttaagagatttgaagtgcatcagtaaaatctaaattggcatatctagactgattagaataatatatatgtcctgcataaatcataatgttgtttaacaagggtagcatagtyttaggaatctacttgagttttatttatgcatgaataccatccacaccctttgtggatacatgatgaccagggtaccatatgatgtaatgagtccctattccaaaatgcatcatgtattatagtctgcatgttcactccccacaaatatgatgttgaaatgtgatccccagtgttggagttgggacctggtgggaggtgtttaggtcatgggggcgaatctctcatgaatggctggattccctctcttcagtaatgactgcattcttgctctattgctcacatgacaggtttttttttttttttttttttttttttttttttttttttttttttttttttgagatggagtctcgctctgtcgcccaggctggagtgcagttgcgagatctcagctcattgcagcttccacctcctgggttcatgc

SEQ ID NO: 757828 - DNA, 535 bp, Homo sapiens
tctggccagtcagtgttgtactgtggctaccacctcacttttgtatcattctgtcttattagcaagctacatttctaggttagcggttctaccaaatatgaatatgaaagtttatttttaataagacagtgttgcaaattatggtcaactaacatcttttcaccaaatacttcaagcataaaacatgagaatttttatagaaatatacagagacaccacaaattggtagctgtccatgacattaaacaaactggactcctaagagtggcttctcagccaggcacggtggctcacatctgtaatcccagcattctggggggctaaggcggatggatcacctgtggtcaagagttcgagaccagcctraccaacatggagaaaccccatctctactaaaaatacaacaaaaaaaaattagccaggcgtggtggcacacgcctgtaatcccagctacttgggaggctgaggcaggagaatcacttgaacccgagaggcggaggttgtggtgagccaagatcatgccattgcactccag

SEQ ID NO: 757829 - DNA, 575 bp, Homo sapiens
acaagtttccagaaagaatttcagagtatgggagtgttcataccaaagtcaggttaatcagtaaaggctcccaggagctgatggaccaagtctggcagagaaatgcaagagtgtatatgagtccactcaggcttccataacaaaacacatttctgccaagttctctgccactttattatctatttttaaaaaataaacccatagtacctaaaaaattacagatgcactttgccatgttatgacaaacatggcctttcctccagtttccagtaacatagttctgatttctgtctgagacctcaccagaatgatctttaacatccatattgatgttattcagtttacgtcgatctaggctttttctagcatgcacctccaaactcttctagcctctgcccattactacccagttccaaaactgcttccatatmttttggtatctgttacagcagcaccccacttcttggtaccaaaatctatattgatttgttatgccataacaaaataccatagactgagtgtcttaaataacagaaaagtattttgtcatagttctggaggctggacatctgaga

SEQ ID NO: 757830 - DNA, 632 bp, Homo sapiens
agctttttttgaatctttagaaaggtcaagcagtatatatactgtgttacgtaacatatccagtggggtctagtgtagcacctcgcaaataaattaatatctcagcagccaaaagtggaactattacaagagtaggataaataaagatgataaatggcctcagggtggttgagatcaggcaaagttttgctgtcagatgtcttacaaaagaaaaaaaaaactcagttgtcaaagctttttggatctggagttgcagatagaaactgtggacctatgaaagtaaaggccctggtgagactaaccaagtcctctgaggagktcttaaagagataaatagggctggtccacttcttttcagattggcttccactgaattagttgacccaggctttacagtctccagctgtaagcacgaagagcaaaccagcaccttggcttcttattgctccttatcattctttccccctctgtggcaaaacccacggggtcaggtgctgagcttccaacccattgtcctacgaggtgactcagggtaggtgacggatatggtgcaggctgcacacacacgtgagcacatgtgcacacacacatatctgggtcctggggtgctgaggggattgctcaccaggctg

SEQ ID NO: 757831 - DNA, 624 bp, Homo sapiens
ggaaaagttataagaaaaattatagggaaagacccaaaccttcttggaaggctgagaggttttacaaaagctctgggagagaattttggctgaaggcagccaaattctcttatccggaggctgagagcaaagggcacataacaagagaatgtaraggaacttatctagatacatttgcttactcctgtctccagaaaccaacctttgatcatttgcattcaggattgctctctacttggggggttgacaatgtttattacccacaaatggtgtttgctccaagtctttgtcattaaatctgtactaaataaatgcaagcggggccggcttgtcgggtggcactctcatcagcagtgctaagctgtgcagtccccaggcatgctatcaggcaaaatacctgtgtcagcatacttctttcatccattgctcagccagagtctgtgggacagactcagcatgacatgaagaaggcaagatggcacctgtacacacgcagagttgcattacagaagcttaaagaatttgaatcttttggaatgggcaataaatattcttaatattcactttagtagaaaacattagctttgtcaccaaaatctgttcacatacaagcatccttgaaaa

SEQ ID NO: 757832 - DNA, 565 bp, Homo sapiens
atggagagtattattttatgggatatttctccatgagttaaatcctgtcatctcagcaagggcatcaggagctagctgaatatactgctgggatggttccttgaaacgtgggagtaatgacgatctacagtaaatgagggagaaatgccagaattattttggcagtgttttaaaaagaatatcaaaaaagatcagagagatgatcagaaaggagtatttattaaaaacaaaaacaaaaacaaaaacagaaccttattaggttactctggtttcctatgtggcctagagggcactcctttcagggaaataaagaatacatttgttagggaagcaggaccctaggacagccagagtgacamcaatttgagatcgactccatcttaaaactagcaaggcacattccttgtcagtcatgacctctagttgtaagatgtttgcagctagggaacaagtttggtaatgcctacaaggacacactcccacaacaacagaaagtccagatgtcccattacccataacaatatacgctttcaagataattatagttatgctttgatgtacttac

SEQ ID NO: 757833 - DNA, 634 bp, Homo sapiens
actttttagtgcataaattgtataaagtaatatctctttagtgcctaggttcattctttctagtttgaactattctgaaagaccttctcttagaagcatctaagttatattatttagctaacctcaaagtttttttctttttaaatttgtgtctattttatttatattgcttggaaaggcaaatacatttagtttgaaaaatttttaacattttatgtgaatttctatatatctagctttgtggttttctawttgatgttatatggaattttttttctctgtgttgtatgtgtatttactttttagtaaattttaaaatttgtacattatatccataattgcggttcaggtatatatgtatttttattcatcaattaatttagagctgttgactttttaaataagtaatataaaagttgaacctgcattgttcctattataaattagatttaattttgttttttatgttaacttttctgataattttatgatgattaataagaaatatttaaagaaaattaaagcaaaatctttcaaacaaattcttaaagttattaatggtattcattgtatactaaatccccacaaataaggtaagagaatttgtattaacaaagattctttgcttgaccaa

SEQ ID NO: 757834 - DNA, 508 bp, Homo sapiens
taactattcaaattatactttttaaaaagtgttcttctgcatcttttaccattcttatttctttagagcttcttttcatttgcatataattttaaccatgctcagtgttgaaatttttcttcaactgtttaaatagatttggttcatatgtttgagtagaaactctaaaatctcatttcggagctcttktaacatggggaatcccaagatagtattttctctaggttctatttctccagggaagaaatgttgactatgttacccaatattgacacctgttaagtttactttcagaagtgggacacaaggataaatggttgtttgtttgtgtctggtgatagagaaagaaaaataatgggttccaggattttaataggcttcatttgtattatttgaaacaaggtcgttgaaaaaatacaatattttgataaaagtttgcatctaattctataatctagtttttgagaaaaaatagcatcagtgtcaaaaaacaatgactgttggttct

SEQ ID NO: 757835 - DNA, 452 bp, Homo sapiens
actggattacatgtgattaggtagctagaatatgtacatttcttaaaaaatattgcctgaaagatatgattactagaatatgagttcaaaacatatatcactattaattatggtaggtgatttttttcaaaatcattaagagttcatggtttatttttacctacatatcattttgaaaacattaatgaaagtaaatatctacaatttcaatgtaaattaagctattatctttcaataaagtttacccagttttagatcttcatacatattatagttatacagtaaaattttaccttcattcawtaaaaaaactgttgagtatgtctattatttacatgaatgaataatcagacatcttgcctttagagctggttccttctactgtacttggtgttcaaatacattaatatttggggtattatatatacatggactatccttaaatgacaatc

SEQ ID NO: 757836 - DNA, 593 bp, Homo sapiens
ctgggcactctatactgtttcattggtctgtatttctgttcttatgccaagactatgcagttttgattatgatagctttgtagtatagtttgaaagaaaatagtgtgatgccccagctttgtttttgtagttgttgttcaaaaatattttgggtatttggggtcctttgtggtttaatatgaatattagaactgctttttgcatttgtgtcaaaagtgccgtaggaatttttggtgagggttaccctgaatatgtagttccctttgggtaatatagacatttttacaayattatttcttctgagccgtaagtataaatttatttatttctttggcagtttctttaatgaaatgttttatggtttttagcatacagatctttctctcattggttaaatttatccctaagtattttattttattgattctattataaataagattgtattttaaatttcttaaaagtttcttagtacatagaagagctacttatttttgtatgcttattttgcctagtgcaacttcactaaacttgtcatttgcaaaaaaagataattttacttattcctagcctatttggaagttttaaatttg

SEQ ID NO: 757837 - DNA, 593 bp, Homo sapiens
ctgggcactctatactgtttcattggtctgtatttctgttcttatgccaagactatgcagttttgattatgatagctttgtagtatagtttgaaagaaaatagtgtgatgccccagctttgtttttgtagttgttgttcaaaaatattttgggtatttggggtcctttgtggtttaatatgaatattagaactgctttttgcatttgtgtcaaaagtgccgtaggaatttttggtgagggttaccctgaatatgtagttccctttgggtaatatagacatttttacaatattatttcttctgagccgtaagtataaatttatttatttctttgkcagtttctttaatgaaatgttttatggtttttagcatacagatctttctctcattggttaaatttatccctaagtattttattttattgattctattataaataagattgtattttaaatttcttaaaagtttcttagtacatagaagagctacttatttttgtatgcttattttgcctagtgcaacttcactaaacttgtcatttgcaaaaaaagataattttacttattcctagcctatttggaagttttaaatttg

SEQ ID NO: 757838 - DNA, 593 bp, Homo sapiens
ctgggcactctatactgtttcattggtctgtatttctgttcttatgccaagactatgcagttttgattatgatagctttgtagtatagtttgaaagaaaatagtgtgatgccccagctttgtttttgtagttgttgttcaaaaatattttgggtatttggggtcctttgtggtttaatatgaatattagaactgctttttgcatttgtgtcaaaagtgccgtaggaatttttggtgagggttaccctgaatatgtagttccctttgggtaatatagacatttttacaatattatttcttctgagccgtaagtataaatttatttatttctttggcagtttctttaatgaaatgttttatggtttttagcatacagatctttctctcattggttaaatttatccctaagtattttattttattgattctattataaataagattstattttaaatttcttaaaagtttcttagtacatagaagagctacttatttttgtatgcttattttgcctagtgcaacttcactaaacttgtcatttgcaaaaaaagataattttacttattcctagcctatttggaagttttaaatttg

SEQ ID NO: 757839 - DNA, 571 bp, Homo sapiens
aattcattatctattttatacatttcattacatattattttacacatttactttttaatcatttaatagaagaaatgagaaaaatatgtattgataatgtcatctatattcataattaccctttattggtgcttatgttagtttgtttggattcagattatcttctcattttacttgctttcatcctgaagatcttttagtaattcttgcmagactggtctgctagaaaaaaattttttttttgttatttgtggaaaagactttttaaaaatagatttcttggatctaagatttttggttgacagtgtggttgttggttttgttctgtatttttttctattgagtattttgaatgtgttattgccctgcctgttggtctgcattgtttctgctcataagttaactgttaatcttattttaatcttataagagaaattttttttttttttgcttttctttctgctgtcaatgttttctctgtctctttgactttcaggacttttactgtgatgtatttctatggatcttcttgcatttgttatatttgaatttttaagcactatggatccat

SEQ ID NO: 757840 - DNA, 645 bp, Homo sapiens
tagttggctaattttcaatatgtctaatttaaaactattttttaaaatgaatgtaatatacacacaatgtgatgtttaattttatgtgtccacttgattaggttaagggatacccagatggctggtgaaacatttctaggtgtgtctgtgaggatgtgttccaggagagattaacatttggatcaatgaactgagtaaaaaatgttcattgtcactaatgtgagtgggcatcacacaatctcttgagggcccagatagagcaaaaaagtagaggaagggtgaattcyctgagctaggatgtctctcttctctggccctgggacatcggctttttcaggtctcagggcttcagaccctaatacataaaccagagatccatctgctatcctgtccccaggttctcaggcatttggcctttgaccgggaattataccattggcttttccgttgttcagactcttggacccagactaaattacatcgttagctttcttgggccttcaacttgcggtgacatattatgtgacttctcagcctccatagtcacatgaaataatttctaaaataagtcccctctaatatatccataggtatcatattgtctctgtttttctgaagaatcctgactaatttatacaggaaaaa

SEQ ID NO: 757841 - DNA, 563 bp, Homo sapiens
agaactctggaaacaaagacagagtttctccttgcttccagatggttgcagtagttccccagcaatgtttcttaaccaaattgaaatggctaaaatgacagaaataaaattcagaatctgaagggcaatgaagattacttagattcaggagaaagttgaaacccaatccaaggaatctaaggaattcaataaaataattcaaaagctgaaaaacaaagtagccatattaaggaagaaccaaactgatcttctagagcagagaaactcacaacaagaattttataatacaataggaagtattaatagcagaatagaacaagctgaggaaagaatctcagagctcaaagaccagtttttaaagcaatgcagtcagagaaaaataaataaaaaagactaaaatggaatgaacaaaccatctgagraatatggaattatgtaaagcgacaaaacctatgaattattggcatcccagaaaaagagagagagagaaagcaccttggaaaacatattagaggttattgcacacaaaaatttccccaaccttgctagagaggtcaaaaagc

SEQ ID NO: 757842 - DNA, 516 bp, Homo sapiens
gaggtcaaaaagcaaattgaaaacattcagggaacgacctgtgacatactataaagaggataattctcaagacacatagttttcaggttatccaagatcaatgtgaaagaaaacatgttaaagacagctgtagagaaggggcaagtcacctgtgaaaggaatcctatcaggccaacagtcgaccttttaacaaaaactttccaaaatataagattggaggcctatttcaatatccttaaagaaaagaaattccaaccaggaattttatatctaggcaaactaagcttcataagcaaatgagaaataaaatccattcagacaaacaaatgctaaaataatttgttatcaccatatctgtcttttaagagggtcttaawggagtgttaaacatggaaacaaacaagcaaacaaagaaaaacattaccagccatcataaaaacaaacaagtatatagactattgacagtataaagcaactacacaatcaaatatatataaccatcagctaacaacacaa

SEQ ID NO: 757843 - DNA, 680 bp, Homo sapiens
tctgctgtgccaaggatcagagaaacctggctctcatggtttgtatgttggatgggctggtgggtggttttgtatataactcctggtagaaatgactaccccactgcatatcacccaagccaagttatgaagtacatatggccataaatgagccccacttataaccatcctgcccccaaaggtgaagaaaacacacttgccttcttacagctattttgtcaaccagtccagtctgttgccaacaccggataagtacaattacaggctaatgggggtagcaaccacatcagttargaatcggtggcagtggaggtgtggttacgtctcaaaatatacagaggctcttttgtagagcactgcattttcagcaactgcccagaagatgccatcttctatggacatgtgaatggtgtggtgtcattcatttgttgtcagtcaagagcaaacatattttgggtctctgttctgctattgatacgcccaccaggtggatgcaatccccagtgaaccagggttgccttattggtactgttgaacaagttactgcaattccgtcaggaggaaggtagaatattccaaggcataacactaaaacttgacaagaggaagtatccacataccaaacagactgggtgctgactgctgctataattgcagcctagtataggaagacattctag

SEQ ID NO: 757844 - DNA, 615 bp, Homo sapiens
tttttagttgattttgtgtaagtcaattatgtctgagactctcaaaatgtatatagaaaatagagttaattataaaggtatcaaatgccaattatatctgttttggtttatgatgatagcaattgttcattgtggatatttsagcccatcgagaacattttttataacttattgaaaagttgtaaaattagcaccaaatgaatacataagtgagtaaataaaataatagccaccattgaccttctttcaaaaggttccgagatagagaaacttgggagattttacttcattattttgtatacttttcctagaaaaatgagcacaaattcaaatggacccttaccatataatctgcgaacattagtgcacattggtgattatgcctttggccttctttaaaaaaaaagatacatcatttcaatggatattatgatgtaattcccagagattaggaaactggatgaatgttaattgaatcacaaaataagggggaaaatgtatctttaattggaatgtataggttaatagaaagaaataacactgatatggagtttgaaaagctttcacaagactactatgatcttagaaaaaacaattaatctatgtttctaactt

SEQ ID NO: 757845 - DNA, 615 bp, Homo sapiens
tttttagttgattttgtgtaagtcaattatgtctgagactctcaaaatgtatatagaaaatagagttaattataaaggtatcaaatgccaattatatctgttttggtttatgatgatagcaattgttcattgtggatatttcagcccatcgagaacattttttataacttattgaaaagttgtaaaattagcaccaaatgaatacataagtgagtaaataaaataatagccaccattgaccttctttcaaaaggttccgagatagagaaacttgggagattttacttcattattttgtatacttttcctagaaaaatgagcacaaattcaaatggacccttaccatataatctgcgaacattagtgcacattggtgattatgcctttggccttctttaaaaawaaagatacatcatttcaatggatattatgatgtaattcccagagattaggaaactggatgaatgttaattgaatcacaaaataagggggaaaatgtatctttaattggaatgtataggttaatagaaagaaataacactgatatggagtttgaaaagctttcacaagactactatgatcttagaaaaaacaattaatctatgtttctaactt

SEQ ID NO: 757846 - DNA, 492 bp, Homo sapiens
ccaaatgaccaatcttcttatcattatgtaatgttccaacttatctatgataattttccttgttctatcttctttgattagagttagcttcggaatgtctttatctctttaatctatatttgactttatatttaaagcgtgtttattgaagacagcatattgctgagtcttgaattttaaatacactctatttctgtcatttgtatatttagactattcacatttaaataaattattgtcttattggattcatatccaycatatttgtaagtattttctattaatgtccctgattgtttgtcttgttcagtctttatgttagtttccaattttttcctgccttgtctaggtataattgagctttgtctatgattccatttcctttccactctaagcaaattaattataatttaaaatatttggtgttttgctttagagtattatatgtgttacatatataattatatagataaaatttagatatattatttg

SEQ ID NO: 757847 - DNA, 629 bp, Homo sapiens
tataccaaaaccaattttaagtctagaaggtttatttttatattcttaagttatagcaaagttaacaatatagttatgagattaatgaatccaattaagttaaataaatggtgtaattaagttaaatatagttattaaattaataaagttaatgaatataattaaaatactttaaaaataccgaattataatatttaacatgaatctattttgtgttgcttttatgaaagtgtcaccaaactaaatatttattcattttccccttcatatatacagtgtaaattatagttattgatcttattgttctttctgatcaattcttttttcaagtagctatgtaaagaaatgaccatgagtcacgttattttacagtaaagaataatcctattargtttatctatagttttctaacaatttacctaacatgagaaatgtgaagaaaaacaacctcactgcatctatgtatacacatacacatgattgacatgatttcatgtattgcataaatgtttctcccaatatattgttgcttcatgatcaagcttttttgttcaagttacatcctatttagctgacttgttaacctaaaataagcatagaaaataactaaatgattgcaacaactccaa

SEQ ID NO: 757848 - DNA, 621 bp, Homo sapiens
tgggtaggaggaagaaactaagatgtgagaatgatgacacttaatcttgatgctgctaactgtagcaaagtaatagtaaactcagattttttttttttttttgaaatgaagtctcgctctgtcacccaggctagagtgcagtggcacgatctcagctcactgtaacctccgcctcccaggttcaagcgattctcctgcctcagccttccaagtagctgcgactacaagcgtgtgctaccasactcggctaatttttgtatttttagtagagatggggtttcaccatgttgaccaggctggtctcgaactcctgacctcgtgatctgcccgcctcggcctcccaaagtgctggtaatacaggggtgagccaccacgcctagtcttaaacttagatttttatctgacttggaagcaatatctgatcactgggtatcagtggggctttaaattgattactggagctctaaaattgactactgaatgtgctctctataccagatctatattatgacttcagttaatgacctaagaaattggaaaacttgagccacaatggtctgtttagcctctggaaggtcccactaggtatctgattgcatgaacgtatcattttcttttgta

SEQ ID NO: 757849 - DNA, 621 bp, Homo sapiens
tgggtaggaggaagaaactaagatgtgagaatgatgacacttaatcttgatgctgctaactgtagcaaagtaatagtaaactcagattttttttttttttttgaaatgaagtctcgctctgtcacccaggctagagtgcagtggcacgatctcagctcactgtaacctccgcctcccaggttcaagcgattctcctgcctcagccttccaagtagctgcgactacaagcgtgtgctaccacactcggctaatttttgtatttttagtagagatggggtttcaccatgttgaccaggctggtctcgaactcctgacctcgtgatctgcccgcctcggcctcccaaagtsctggtaatacaggggtgagccaccacgcctagtcttaaacttagatttttatctgacttggaagcaatatctgatcactgggtatcagtggggctttaaattgattactggagctctaaaattgactactgaatgtgctctctataccagatctatattatgacttcagttaatgacctaagaaattggaaaacttgagccacaatggtctgtttagcctctggaaggtcccactaggtatctgattgcatgaacgtatcattttcttttgta

SEQ ID NO: 757850 - DNA, 541 bp, Homo sapiens
gcattctgataggagtgtagtgctgtctcattgttttagtttgccattcactaatgaaatatgatgttgcacatttttgatatgcttatttgccatgtgtgtcttctttggtgaggtgtctgttcagatctttagccattttctaattgggctatttattttcttaagagttctttgtacattttggatacaagtcttttgccacatgtgtgtttggctaacattttatttttcagtrtgtggcttttctttatattaccctagcactatctttcactaggtagatggttttaactttaatgaagttcaatttaccaatttttctttcatggatcattcttttggtgttgtatctaaaaaatatttcaaacccgagtgacatactctgtcctatgttattgcctaaaagtttatacattacattttacttttaagtctattatctaaaaacacattttgagtggtgtgtgtgtgtgtgcgtgtgtgtgtgtgaaggctataaggtctatattaatttttcaatgcagatgcccagtgtcca

SEQ ID NO: 757851 - DNA, 579 bp, Homo sapiens
  misc_feature 562, 563, 564, 565, 566, 567, 568, 569, 570, 571, 572, 573,574, 575, 576, 577, 578, 579: n = A,T,C or G
agttttatacttgtacatatattgctaaatttatacctaagtattttacttttttggcattaatgtagataattttgtctttttaattacaatctcaagtggtaattgctatagaaatatactgaattttgtatattttaaaaatttttatttaaatggcttgcggatacaggcggttttggctacaagcataagttctttagtggcgatttctgagattttggtgtacccatcactctagcagtgtacactgtacccartatgtacacttttttctctcacccccccactcttccccaccaaatcctcaaagtccattatatcattctcacgccttcacatccttatagcttagcccctacttatgaatgaaaatgtatgatatttggttttccatcccattatttggcctttccataatagtctccagctgcatccaagttgctgtgaaagacattatttcattccttgtcatggctgagtagtagtcatggtatatatatatgccactttattcatttgttgattgataggcacttaggttggttccatagttttgcannnnnnnnnnnnnnnnnn

SEQ ID NO: 757852 - DNA, 579 bp, Homo sapiens
  misc_feature 562, 563, 564, 565, 566, 567, 568, 569, 570, 571, 572, 573,574, 575, 576, 577, 578, 579: n = A,T,C or G
agttttatacttgtacatatattgctaaatttatacctaagtattttacttttttggcattaatgtagataattttgtctttttaattacaatctcaagtggtaattgctatagaaatatactgaattttgtatattttaaaaatttttatttaaatggcttgcggatacaggcggttttggctacaagcataagttctttagtggcgatttctgagattttggtgtacccatcactctagcagtgtacactgtacccaatatgtacacttttttctctcacccccccactcttccccaccaaatcctcaaagtccattatatcattctcacgccttcacatccttatagcttagcccctacttatgaatgaaaatrtatgatatttggttttccatcccattatttggcctttccataatagtctccagctgcatccaagttgctgtgaaagacattatttcattccttgtcatggctgagtagtagtcatggtatatatatatgccactttattcatttgttgattgataggcacttaggttggttccatagttttgcannnnnnnnnnnnnnnnnn

SEQ ID NO: 757853 - DNA, 527 bp, Homo sapiens
ccagtttctcgaaggtggattggaaagagctctggagggcatgctgtgacatggtttagagtcacgcccaccattatctggctgtgcgacctgggcaagcctcttgatgttccagggcccagattcacctgggtgtaaggtgacaaagctggactaagaataaagtcttcctggtcactgagcctctatacgttgctttgacatgggcatggctttaagaagaatgcaggagaacacaaatttrtccccttccagcagtgctgaagcctctagcaccccttgggacatgggggctcacaggagggaagggtcccaggggagccagtgagggagctgatggagacaggcacagagacagacaggtcctctgtcaccgttcgcttgtggctctggacttaaatatttataccgtttggaagtagaccagctctccagcagcctgtgactttagcctcaagtaattggtatctgttttgaaccaaacaggttaactattcatttttccctggtgaaaatggtgattccct

SEQ ID NO: 757854 - DNA, 618 bp, Homo sapiens
cttccttcctagctcaaaatattcatcccaagaaaggcagaaagcttttctaaggttaatcgtatgacttgggtgatcttggacaaggaaactaatttctgtgagcctcggggctgctctcctgtgtaaaatggggataacacacctcaaagagcccaaattcttaaaaaaaactcatggaaggaccccccccatcgggcctgacaggtggtagcacctaaccaaagtcacttaccatctccctgcccctcygcgagggttgagaagtgcggaattcggtcactttccttaggaagttcatggtctgcttgggaatggggaagccatacatgcggagaaggtcttatgcttgctgtgtaaatctgcataattgtagcatgtcaggacatcagaacaggcctctgtctggcactcacgctgcagggacagaccagaaggcaggcagggatggatgaagggggcatcagagggggcagaaagggaagaccaagggaggggtcccagcagaactttctcttgagagttgcttagtctccagatcctcaagccttgactcacctaatggatggaaaatttgttttctaacttgcttgttcttttattaataatatatgcata

SEQ ID NO: 757855 - DNA, 561 bp, Homo sapiens
aagccgctgaaggtgaagggaagaggaagggagaaaaggccagggatacttggtaacgctcagaagaagggaaaccgagtccatctctgccacatcccggctgtggagtgctacacatgccttctggtgtttcaaaccctcatcgccgccatgaatgaggayggcatcatcagtggctccattttcagaagagcaaacagaggcccagaagggtctggtgactttctaacaccatgaccggcaggtggaggacgtggagtttgaacctaggtttgtccgactggccagctccctttctgctgcgtttcctgccctgcactgccaggctgtgcctgtgtgttaggtccccaagcgggagggtgagcccccgaggttaccagatgtcaatatcaggcagatcggcagtccaggacctcagggaaggtttagaggacggcacaaaccacaagtcagaagtgagcccaaagtcaggaaacctgggatgactgaatgctgggaagaacaggtggtctcccaaatctaagaggaaaggctaatttggtcaaagccccaaacatggga

SEQ ID NO: 757856 - DNA, 432 bp, Homo sapiens
atggcccttattatgtccttggttatccagtgtcaagggattccctccattttgtgcagctcacctttgaaaaatggaagcaaaaatcagtgaaaatcaacttactggaatccaatgagcataattaaattagccttctgttcttcagaatccagcttagggtggttgtgtgaaagggaaacaagggatttttaagaaaaaagagtttgaaagcccagagatttatgaatcatttccaacctgtaggatkatatttctaaggcacaaaatagttcactctcaggaattattaacagtgtcaagagagaacaaatcatttataagaaagaccataatttttccacaactttttttgtacttccccgaaaaaagctatttgtgaaaattaaaaattaaggtatctaaacattgctaaataaataatgaaagctt

SEQ ID NO: 757857 - DNA, 644 bp, Homo sapiens
gggccacggggatccagggcactcatggaggggtgccaggcagagggaggagttgtgaggccagaggggctggcacacagagggtgcaagtggaaggggagaggcgggtgggcggggcctaggagaaggaaggagtttgccttagtcccatgggccctggagcacctccaaagggtttaattagggatgtgacggagctgtatttccgcaagttcattcattttttgttttttgcttgggttttttttttagggggggacaaagccttgctctgtcacataggctgaagtgcagtggcacagtctcagctcactgcaacctctgcctcctgggttcaaatgattctcctgcctcagcctcctgagtagctgggattacaggtgcccaccaccatgcctggctaattttttgtatttttagtagagatggggttttgccatgttggccaggttggtctcgaactcctgacctcaagtaattcgcctgccttggtctcccaaastgctgggattataagcataagccacatcgcatggcctcattcattctttttttaatccagtaaatatctgttgagtacatgctgtgtaccgggcactgttctgggtctatagcagtgaacaaaaccaaatcctattcctcgt

SEQ ID NO: 757858 - DNA, 519 bp, Homo sapiens
aagaaatgttttgagctaaatgctgaagtttttatggaacaagtgaagttcactgggtgacaggatacaagcctcaaaggagcagaagatttgtttcttatattttaataagttgagaagttgcaggaaattctgcaggcaaagatacaaaagcaaaaacaatacatacctgttgtcctgattctgtcataattgggatatatgaggacagactccacccagggcaatcaaagttacagtatgtygcaagagaatagccaggtgacagcaagaacagaatatgggagaaattttgaaaagaatttgagaatatgatggaagtggtcaatcaccaggtaagcactttaaaaggctaagtggaacaaagagaaagacagaggggagaggaaaaaggaaagaagaaagaggaagaggaagacaggaacttggcaaatttgttcaattgaggagggaaaacagcaagcgaaagagtgtataggagaaaaatagacaagataacaagaaaagcttagcctttgt

SEQ ID NO: 757859 - DNA, 552 bp, Homo sapiens
caattagctaggaatacaggtaagtgccacgatgcccagctaatttttgtattttcagtagagacagagtttcaccatgttggtcagcctggtcttgaactctggacctcaaatgatctacctacttcggcttcccaaagtgttgggattacaggtgttaaccaatgcatccagccttgaggtgtatttattctatatctaatttgatgagygttttcatcaggaaataatatctaattttgtgaaatgcttttgtgcagttttgagatgattatctttttatttttcagtttgttaatattgtgtaccacatttattgatttgcatatgttaatccatccttgcatcccaggaataaattttgcttagtcatggtgaatgatctttttaatgtactattaaattcagttagctagtatttttttgagaatttttgtatctatgttcatcaggcatattggcttgtaattttcttttctggtagtcttctggtctggcttttgtattagggcaattctggcattttaaaataagtttagaggtatttcattc

SEQ ID NO: 757860 - DNA, 545 bp, Homo sapiens
aatttcaacagtcattccaattaatttttatttttctaaggatttcttacaatagtttccaaatcaacacttctccaaaactgttttctttgttttcacaccttatccttttgtatgagtattatgatcaggctctatgaggttaatttgaaagggttctcagaatattgagaaacaatgtagaattgtattcaaattaaataatatttatctaatttataaatctactgtaaaaagatgtacaataagattctgattaatwaatatattggcaccccaaaagtgcaaagtctgcttgaaaaaccccattagaaatcaggtaattgtgtattttcaaaattaataattaagtatatttcacattcaatgtgccgagtaagaaagcagtaaaaaatttttctatatttcatgcattgtatatttttcatttgcacactagacaagatgtctatttgaaacaatcatttataggtgcaattcaactggattcacaaatttattcaaaattgtagattttttaaaaattatgtcagattctaaatgca

SEQ ID NO: 757861 - DNA, 620 bp, Homo sapiens
aaagcctgcagagatcagtgcctgttagctccatcaggggcctcactgcaataacgtcatcccaaccccctcacagctggaatctgcttagagatgtcaacagctggaggctctcaaaagacacactcccaagtgatggctgccattctgcatcttatatcaagggggaatcacacattccccctggcaggttggttctgtgttacatgacctaccaagttactcccttcattttcttttttctgttgttgttctctgtttctaatcaatggattagaaatcaaccagacagacatctagaaaactcgcaaatatctggaaatcaaattcgatactttaaaataagccacggatgaaaggagtcataaaaaggaarttagaaatacatttattcagcttcaatagtttttggggaacaggtggtgtttggttacatggaaagctctttagtggtaatttctgggattgtggtgcacccatcacctgggcagtgtatactgtacccaatgtgtagtcttttatccttcactccctttctctcttcccccctgaatccccaaagtccattacatccttcatatgcatttgggtcctcatagtttagctcccacttacaactg

SEQ ID NO: 757862 - DNA, 601 bp, Homo sapiens
acttttccttctcttggcaataaaacagtgggcatttttagacatttttcagacactttccaaagtatagacatctgtcgtttatatttcaagtttctccaaatatagaatatagtgtcatccttccagactgggtagcaaagattactcactaaatgactactttcttaacaagattccatgaaggcatctgacaaggtctgtctcgacatttctatacatacaatggagaaatatagttagaagataatacccaaagkagatttatacctgggtgaatgattatacctataaaatcagtttcaacataacaggagccctctggtggcaactacagaattctgtcttgtgttaatccatgattttcaagatgttaacgaaagtaggttgatcacaatttttaaaatgaagcaataccaaagacagtgaatccactgatgacagggtcaaaatctacccaatgactacattataaaaacaggccaaatgtaacaagataaggcatttttaaagtgataaatgtacatttatatgtgtaggttcagacaatcaactctcatgaataaagatctatgctcaagcagtcccctgcaccactatt

SEQ ID NO: 757863 - DNA, 601 bp, Homo sapiens
acttttccttctcttggcaataaaacagtgggcatttttagacatttttcagacactttccaaagtatagacatctgtcgtttatatttcaagtttctccaaatatagaatatagtgtcatccttccagactgggtagcaaagattactcactaaatgactactttcttaacaagattccatgaaggcatctgacaaggtctgtctcgacatttctatacatacaatggagaaatatagttagaagataatacccaaagtagatttatacckgggtgaatgattatacctataaaatcagtttcaacataacaggagccctctggtggcaactacagaattctgtcttgtgttaatccatgattttcaagatgttaacgaaagtaggttgatcacaatttttaaaatgaagcaataccaaagacagtgaatccactgatgacagggtcaaaatctacccaatgactacattataaaaacaggccaaatgtaacaagataaggcatttttaaagtgataaatgtacatttatatgtgtaggttcagacaatcaactctcatgaataaagatctatgctcaagcagtcccctgcaccactatt

SEQ ID NO: 757864 - DNA, 601 bp, Homo sapiens
acttttccttctcttggcaataaaacagtgggcatttttagacatttttcagacactttccaaagtatagacatctgtcgtttatatttcaagtttctccaaatatagaatatagtgtcatccttccagactgggtagcaaagattactcactaaatgactactttcttaacaagattccatgaaggcatctgacaaggtctgtctcgacatttctatacatacaatggagaaatatagttagaagataatacccaaagtagatttatacctgggtgaatgattatacctataaaatcagtttcaacataacaggagccctctggtggcaactacagaattctgtcttgtgttaatccatgattttcaagatgttaacgaaagtaggttgatcacaatttttaaaatgaagcaataccaaagacagtgaatccactgatgacagggkcaaaatctacccaatgactacattataaaaacaggccaaatgtaacaagataaggcatttttaaagtgataaatgtacatttatatgtgtaggttcagacaatcaactctcatgaataaagatctatgctcaagcagtcccctgcaccactatt

SEQ ID NO: 757865 - DNA, 646 bp, Homo sapiens
cattaggtattgagcatagcggtttttcacattctaccctacgttgctttgcttttcacagatactactgcgctgtgttttattttattattttggaaagtggcactatttccccctgaactctcctgccagggctgactttcagttgatcactgagccttagcctctgctccttaagaagccctgatgtcgttgccatgtgtcttargcatcccctcttcttttccctgcctccctgggattggggggagagaggatctgtgcctgggaccatggcctgacctggcccagctcctgcagtggagttgaagacaaagtatgaggctttctgaggacaactgaagctcctcaatgctgtcttattgttctccttttgtggcatgaggattctgactttgggatgtttgatcacagtcctgcctgggcagctgcactgccaagctcgtgtagcaagtgtctgagtcaatcatgcagggcgttaagactcttcataactcttcagtcttctgtcagcagctcctttcctacaagtatcctggaggctgggccaggacaggggatgtgttccagtggccagtctgggtgtggaccagaggctgagcacacacctgccccacaagagaggggaagcttgagccatggctga

SEQ ID NO: 757866 - DNA, 626 bp, Homo sapiens
acatttgagctgagagtgtcactactggtacctttgctagtgagaagtagggaaggtgaggggaagacctgaagaaagaaactctaaatctcatcttgtatctgtagcagttcattcgttcattcattcattcattcattcattcgtttgacattcattgaatgcctgccacactgttgatgctggggtggaaaaataaataagactgaacgtgtgttcgaggcacatgcagtgttatgagaacagaggtggcgacctgcgttctcatcacagctgcccaatagagaagtgaatataggaaatcattattgtctacaccagcagtccccagccattttggcaccagggaccagttttgtgaaaaacaatttctccacggaccggggaggcacatggttttgggatgattcaagcacgttacatttgttgtgtactgtatttctattattatttcattgtaatatataactaaataattatayaattcaccataatatagaatcagtgggagccctgagtttgttttccagcaaccagacagtcccatctggggatgatgggagacagtaacagatcatcaggcattagattctcataaggagcgcacagtctagatccctcacatg

SEQ ID NO: 757867 - DNA, 624 bp, Homo sapiens
aaggaagacatatttatcttgtaagaaataaattttttcaacaccccttacccccacttttatttggttagagttgatagattcaggacaaagacagaattaattggtgaagcaatatcccagaggatggaagataaaagttaastccacatgaaaaagttggccttgaacaggaaaaggaacaccttatcctctgagaatgaagagaatgaggaaaggactgatgcagatgtagataaatttgtggacatgggtagggcaggaggctgaagtcgctcaagcctaactgcatgactgtcgcaagtcctagccaatgcctgccaggggcacacgcagtatgcagcttccccatttccaagaaccgaaagaatgtggactaagatgatgacagctccaggaaccagcccagacggagccactggagagcttccccataaggtagccatacatattaatcacagatcaaataagagaagaaatcctagatccttctatccaactcagatttctcacttaaagaaaatgaggccagaggttaagacaggctcaagggcagttgctagcatctcttaagctagaaaccaggtttcttgcccccagaatgaagtctccctttatttttta

SEQ ID NO: 757868 - DNA, 581 bp, Homo sapiens
gcacagctctcaagctctgctaagggacagactgcctcctcaagtgggtccctgaccccccatgcctcctgattgggagacagctcccagcatgggtcaacagacatctcatacaggagagctctggctgtcatctggtgggtgcccctctgggatgaagcttccagaggaaggaacaggcagcaatctttgctgttctgcagcctccgctggtgacacccaggcaaacagagtctggagtggatctccagcaaactccaggakacctgcagcagagggtcctgagtgttggaaggaaaactaacaaacagaaaggaatagcatcaacatcaacaaaaaggatgtccacacaccccaccctaaggtcaccagcatcaaagaacaaaggtagataaagccacaaagatgagaaaaaaccagcgcaaaaaggctgaaaattccaaaaactgaacgcctcttctcctccaaaggatcacaacttcttgccagcaagggaacaaaactgggcggagaatgagtttgatgaattgacagaagtaggcttcggaagatgggtaataacaaactccaccaagctaaag

SEQ ID NO: 757869 - DNA, 581 bp, Homo sapiens
gcacagctctcaagctctgctaagggacagactgcctcctcaagtgggtccctgaccccccatgcctcctgattgggagacagctcccagcatgggtcaacagacatctcatacaggagagctctggctgtcatctggtgggtgcccctctgggatgaagcttccagaggaaggaacaggcagcaatctttgctgttctgcagcctccgctggtgacacccaggcaaacagagtctggagtggatctccagcaaactccaggatacctgcagcagagggtcctgagtgttggaaggaaaactaacaaacagaaaggaatagcatcaacatcaacawaaaggatgtccacacaccccaccctaaggtcaccagcatcaaagaacaaaggtagataaagccacaaagatgagaaaaaaccagcgcaaaaaggctgaaaattccaaaaactgaacgcctcttctcctccaaaggatcacaacttcttgccagcaagggaacaaaactgggcggagaatgagtttgatgaattgacagaagtaggcttcggaagatgggtaataacaaactccaccaagctaaag

SEQ ID NO: 757870 - DNA, 565 bp, Homo sapiens
attttcattttttattttttattagacaattctcttttgattatctcgttttataaaatggcacatgggtttatcacttggagacaaagaagcaataccctatatgctgtgtgtgaactgagcaatacgttcagtgaccattaactgacagacttcacaagaactcatgagattggtcaatgatcacgaagtgcatctgtaattcatgtagctaatgtggactgaagaactaagagcaaaacatacacttcgtgcaaatacccacagttaatatagcatagaaacagaaatttaagctctgttgttagaaggctggagttatgaaccaaaccatagtaactaaaattcatgcatattacaaccaagcaaaatgcagactacctgtgtgtatatgtacatttagyatttttttgtttgtttgtttttaactttgtagcttcagcacaccatgccacaaactttgtgccttataataccttggctgaatatcttctcagaggatgatcattcacttttacctttgtttgccaacttattccactgcggctctttttgtcttgcaatg

SEQ ID NO: 757871 - DNA, 535 bp, Homo sapiens
caatggcgagtgcccctcccccagccttgctgccaccttgcagtttgatctcagactgctgtgctagcaatcagggagactccgtgggcgtaggaccctctgagccaggtgtgggatataatctcctggtgtgccgttttttaagcctgtcggaaaaacacagtattcgggtgggagtgacccgattttccaggtgctgtctgtcacccctttctttgactaggaaagggaactccctgaccccttgcgcttcccgagtgaggcaatgcctcgccctgcttcagctcacgcacggtgcgtgcacccactgacctgcgcgcactgtctggcactccctagtgagatgaacctggtacctcagawggaaatgcagaaattacccgtcttctgcgttgctcacgctgggagctgtagaccagagctgttcctattcggccatcttggctcctccaacttaaacttaactttaaaaattgatattcaattcagtcactggaagacataagtatgtgtgaaactactcggatatatgaat

SEQ ID NO: 757872 - DNA, 631 bp, Homo sapiens
gatcttaggcaagatggtgctctgtgtctgaggccaaccctgaaggcgctggcagctgaaggctgtctatggacagcactctttgcagctcaggtcaggcagtaagtctttagttgcagggtgagctgggcagcacattacagtgtctactatactaacattttttgttraagatttcccatgaagatattgattattgtcgttttcagtttttaatcagatgcattggctaataccagtttgtagctgaagctaagtctatcctcttaggccatggtgtgaattgtgtgtttccctttcttccttcatctctggcttagctcctttcattaccttcatggcccctctagaagtttatgttaggtttttaaggccagaccagactgacttgagcccagccgtagttggagaccagattcaaggctctctcttggtggcaggtgacattagtcagactttattcttatctatgaaagttcataagtaagtgagcttttgtgtttttctgcttaactctcattactacctgttatctccttgaagacaagggatatgtaaaggtacatatatgtgtatagattgtgtatgtgtttgagtatgtatgtatgctttaagccttgttccaagattg

SEQ ID NO: 757873 - DNA, 631 bp, Homo sapiens
gatcttaggcaagatggtgctctgtgtctgaggccaaccctgaaggcgctggcagctgaaggctgtctatggacagcactctttgcagctcaggtcaggcagtaagtctttagttgcagggtgagctgggcagcacattacagtgtctactatactaacattttttgttaaagatttcccatgaagatattgattattgtckttttcagtttttaatcagatgcattggctaataccagtttgtagctgaagctaagtctatcctcttaggccatggtgtgaattgtgtgtttccctttcttccttcatctctggcttagctcctttcattaccttcatggcccctctagaagtttatgttaggtttttaaggccagaccagactgacttgagcccagccgtagttggagaccagattcaaggctctctcttggtggcaggtgacattagtcagactttattcttatctatgaaagttcataagtaagtgagcttttgtgtttttctgcttaactctcattactacctgttatctccttgaagacaagggatatgtaaaggtacatatatgtgtatagattgtgtatgtgtttgagtatgtatgtatgctttaagccttgttccaagattg

SEQ ID NO: 757874 - DNA, 631 bp, Homo sapiens
gatcttaggcaagatggtgctctgtgtctgaggccaaccctgaaggcgctggcagctgaaggctgtctatggacagcactctttgcagctcaggtcaggcagtaagtctttagttgcagggtgagctgggcagcacattacagtgtctactatactaacattttttgttaaagatttcccatgaagatattgattattgtcgttttcagtttttaatcagatgcattggctaataccwgtttgtagctgaagctaagtctatcctcttaggccatggtgtgaattgtgtgtttccctttcttccttcatctctggcttagctcctttcattaccttcatggcccctctagaagtttatgttaggtttttaaggccagaccagactgacttgagcccagccgtagttggagaccagattcaaggctctctcttggtggcaggtgacattagtcagactttattcttatctatgaaagttcataagtaagtgagcttttgtgtttttctgcttaactctcattactacctgttatctccttgaagacaagggatatgtaaaggtacatatatgtgtatagattgtgtatgtgtttgagtatgtatgtatgctttaagccttgttccaagattg

SEQ ID NO: 757875 - DNA, 631 bp, Homo sapiens
gatcttaggcaagatggtgctctgtgtctgaggccaaccctgaaggcgctggcagctgaaggctgtctatggacagcactctttgcagctcaggtcaggcagtaagtctttagttgcagggtgagctgggcagcacattacagtgtctactatactaacattttttgttaaagatttcccatgaagatattgattattgtcgttttcagtttttaatcagatgcattggctaataccagtttgtagctgaagctaagtctatcctcttaggccatggtgtgaattgtgtgtttccctttcttccttcatctctggcttagctcctttcattaccttcatggcccctctagaagtttatgttaggtttttaaggccagaccagactgacttgagcccagccgtarttggagaccagattcaaggctctctcttggtggcaggtgacattagtcagactttattcttatctatgaaagttcataagtaagtgagcttttgtgtttttctgcttaactctcattactacctgttatctccttgaagacaagggatatgtaaaggtacatatatgtgtatagattgtgtatgtgtttgagtatgtatgtatgctttaagccttgttccaagattg

SEQ ID NO: 757876 - DNA, 630 bp, Homo sapiens
ccagtggtgtcctcattccgtatctccatcttcagagaatgcttgtgtgccttcaaatttatgacattttcctctcaccccttagtggtgaagaaactgaaatattgaccccatccccaaaaattaataagttaagtgtaagtggtacctgtggtccatttgaaagggaatatctgaatggaatgggaggacagccacctattctcagcaggcagaaagggtacttgtcaacaggtaatatgggaaagctaagaaagattaagactttatttttccctatagtctgcctttctgtgttcccaattctttacactgctgtgtaatgttatggaatatgattctcarttaggaaacttgaacgaagacaaaaaaaatggtaagagactatcttctaaatatatccttagttcttcaggcagcaatttaatttcagttaaaagaaagaacaaaggcatgtcaatgttttggactgaggctagccgaggactttcactggcactctttttagagctagaccattggggaagttgcaatgttacataatgctatgcttctcattgccatagagaagcagcagctgctttgagactttagaaaatcagcagcgacttgaactctgtgttgcttgtg

SEQ ID NO: 757877 - DNA, 626 bp, Homo sapiens
attgtgctttgtttttagaatcatagtgatgaagccatgtttcatctcctgttacaatttttcaaagacatgcttcaggatgttgatctcacttgtttaaaattttcatttaaagctctggtcttgtcttcagcttatctgagcacagtggtcttgacactgattgagtgaaaagtttgctcaactttaatttttcagtaagcattgttagtgaaccaattgaggtgtctatggcgttggctattgttcatgctgctaattgatagtcctctccaattagggtacaaaaagattatttttttcttcagaaattgagtggatggtctgctgctgtaggtttcattctcaacatcattttrtcccttcctaaaaatatccatttttaaactgctgatttattttggccatcgtccccacaaactttttgtaaagcatcagtgattttaccattctctcacccaagcttcaccataaatttcatgtctgtccttgtttcaattttagcagaatttgtattgctctgataggagcacttttaaaacaaatgccttttctcttactccctcaaactagatcatgttcagacatgttataacaagttagtacaagtttattttgctacaaag

SEQ ID NO: 757878 - DNA, 601 bp, Homo sapiens
cttctgaggatttcatattaacaactggtgcaaggaaagggaatttgcagcagagttcagaataggggcagtgaggaagtggagttgaatctgagaacatgaataaggaaaccactctgaagatgagcatgtggcataagggaaattgccaccggaatgtaccctctctacttccctaactcctctctttacttctttggcccgttctttctgccacaacctaccactaaagatcctgcttwgaatgaaccaaggtcccaggggattgttgcataggcataagggttgttcttggaagcctctgggtttgttgatacagaggatccctatggctccttgatgataattcagttgtgaaggtatagtattgagaaactggtctaaagtttttatggtatatatattttaaattttatttaataaatatataaaaagcactgttctatgtgttttaaaaatactaacacattgaatcttcttaagtactttgtggagtaggtaacgttattattccaatattacagatgaggaaactaagaagttaagtaacttgcccagagggtataaagaggaagggacaaggtgattgttccatacttta

SEQ ID NO: 757879 - DNA, 576 bp, Homo sapiens
actcctgcatgctggtgaggcaacaaaagcaaaacctgccctgtgcagccacatgccagcaaaacaatgtgaggagttgccaggggcccagaggaagccgcagtattggaagggaatgtgtggactggtgtgtgtccataggcactgcccactggagctctccatctgtcaggcgtgatccaccattgcaaaagctatggtgtgggccctcagggcaccaaaggctgccctgcaactatgtgtggccagrctgtggccccaggagagtctagcagaccaaggggtgctcaggttgtactggtcccatctgatggacaagaccaccctacagaattcagaactgacagttcccctatggctaaagtctcctatgggtgcaaatcgagcctagggggatggccaggcttgcccggggctcctttgcctctgctttagagttgaatgccccaacccactcagcagagaggtgtggtggtgattcccctccaaaactctttcttctcccttcctggcttctttgaagtgttgaaagagagtattcaacaagtatttttgtttcattacttgcttaaataa

SEQ ID NO: 757880 - DNA, 608 bp, Homo sapiens
aatacgattgtatagacaggtccaactatagaaggttgccataaactttgaagtttacaataaatttaaatgcgttcacagcttctagttaggcagaagaggctaataattctacaggtggtagcttgcttttctaaggaaaagaagaaaccagcagtacaattatgctgatttctgccatttaatggtgtgttttttgattgtttgacactaggtggagccaagaagccttgcagggaaactccaaagaagcaggaactactgttaccaaccctctgatcrtactcaaaataatatgaagttgttttttttttttttttttttaaagattgcaaactggtgcattattcgcatcaattatttaattacattcattctccagtgaattatttgctctactggttaccttattatttttgaagtggaaaagttttatactttatttctttcagtttcccaacacttagaaacaattttaaatatttaagtgaaatctctatttggtagttgagactcaaaaccccaaatctttcttcaccctcccaccctcaccctcctttcttttaagtgcaatgtggttgcagacgccgaaggtctggcattctgtg

SEQ ID NO: 757881 - DNA, 586 bp, Homo sapiens
tatgcttattacctgggtaacaaaattgtatgtgcaccaaaccctcatgaaacacaatttacttacatggcaaacctgcacacatatcctggaacctaaaataaaagttaaaacaagaaaaataaaaaaactcctgaagcttaaaaatatatgtgtgtgtgtgtgtgtgtgtgtgtgcgtgtgtatgtctccagtgagtacacaaatgataagaaagtgaaacagcctttttgctgacatggggaaagttttagtggtctgaatagaaaatcaaaccatccacaacattcccttaaactaaagtmtaatgtggagcaaaaacttaacttttgttttaatcctctgaaggctgagaggggtgaggaagctacaaaagacaagttgaagcctagcaagtttgttttatgaggtaagggaataagccatttccataacaaagaatgcaggtgaagcaataggtgctgatggaaaagttgcagcaagttatccaaaagatgttgctaagataattgatgaaggtggctccattaaatattagatttttactgtacataaaacagcctcatattggaagaagttgccatct

SEQ ID NO: 757882 - DNA, 586 bp, Homo sapiens
tatgcttattacctgggtaacaaaattgtatgtgcaccaaaccctcatgaaacacaatttacttacatggcaaacctgcacacatatcctggaacctaaaataaaagttaaaacaagaaaaataaaaaaactcctgaagcttaaaaatatatgtgtgtgtgtgtgtgtgtgtgtgtgcgtgtgtatgtctccagtgagtacacaaatgataagaaagtgaaacagcctttttgctgacatggggaaagttttagtggtctgaatagaaaatcaaaccatccacaacattcccttaaactaaagtctaatgtggagcaaaaacttaacttttgttttaatcctmtgaaggctgagaggggtgaggaagctacaaaagacaagttgaagcctagcaagtttgttttatgaggtaagggaataagccatttccataacaaagaatgcaggtgaagcaataggtgctgatggaaaagttgcagcaagttatccaaaagatgttgctaagataattgatgaaggtggctccattaaatattagatttttactgtacataaaacagcctcatattggaagaagttgccatct

SEQ ID NO: 757883 - DNA, 592 bp, Homo sapiens
aagaatgaatggaataacgaaatgtttatgatattacaaagtgacatggcatgcttgtgtgtttctgttctatctctctccccttactgtgatccaaaaggtgctcatgagaaacttctgcttccaccctacgtgctgaaaacctgctgtttgaaacaagtatttgaagacaagactctcttccatttctctgatakctgagcaatcagatatctctttagatatcttttttacaactctgcttattcttccttgcacttggcagcttgtccttgtgaactgagaagaaaaagaatagagacctctcttcattctgttattttaaacttaaaattatcttactacttcttgcaacctcacacactgtaatattatttaataattacagagaagtaatagacagaatgtattccaaagtggggaaataataaataccaaatcacaaatagtttcttctggacctaacggagaaagtttaatgctactagagtatgtatggatatagtggtgatagtgggatccaatgaaataccatcttgctcttcttcatctccagcataatcaatgatgttattccaaagattagtgagca

SEQ ID NO: 757884 - DNA, 548 bp, Homo sapiens
ttagttttttaatggtatattgcactttggaatatcttgaattgtaggaagaaattcagggtctttttatttcattgtatgcctttatatctcatattggaattttgtaacccatcattttaaattatatattattttaggttttaaaaaatgtttatggatacgtaatagttgtacatatttatgggaaacaggatattttgatacaagcatacaatgtgtaataattaaattagggtatattgttgatgcataggaaatgactcttcgtgaatgctctcagtgaaaatttgggagtgttttatattttgctgcaaggggatatctattgttttcccaaatatagatatttakgcaatctggccttacctgccatcattctcataacagaattattttccattagaattaacctatctccatgttcatatgccgtattaagtcaattaaacttgaggttagaccttattccatccttgttggtataaataatagaattgggaatattaatatgttgtgataaagtagaatcccaatctagtgattca

SEQ ID NO: 757885 - DNA, 640 bp, Homo sapiens
gagtatttattccgaagtctttatccacaccccttatagtgacacaatgtaaacacaaraaaccttcctggccaccatctgtctccttctcaaggcagtagtaatttcttccacaaaagcagtttggtaaacataataagctactttaaattactaattactaatgttaacccaggctgaaagtaaaaagatataaactatattctaagttttgccacaaatgtgctgataaattttaaattgatctcatggtttccacatgtaaaacaagaccactttcactcctattctttgtttccccaaaatatattttgaatataaacacaatatttcacatttctaaatctcccagtattttccaccaaaccagtttgctaagtgaattattttggtacgatgtctagtattcttttaaaggatccataagtaactatcgtgataattctagatgccagtcatcaagtattaaaataggaacatctcaagaaatgttgtctctgacaagaagcagaatatgtgaaatcactccagatctcttctcttgagtttttatcatgcttttctgatgtttgagaattgtgtaacctggattagtttttggtgggagaataatattctatacaggatatatttacatgtt

SEQ ID NO: 757886 - DNA, 506 bp, Homo sapiens
tttcttacttcttttcttttttggtgggattagttagaaaatgatctcaatacatgtttctatatacatatggatgtttaggccaaaataaaattgggttctgtgttctggaggttatcaaaaaatctactatactctaggtagttaagtctagactgtaaacatcaggttgttaatattttagcatattaacactaaaattatcattgctatatatgtttcttkagcatcagcatttatatagaaataaatatttatatttctatttttatcttagttattacatctctcctctctttcagattatgcttagaggattctgcagcaattctcagtattggacatattcaaaatctcctcaacgtatatccttcccatctattgccttccagctttaactcagttgtgctcccttcaaacattttacatgatttgcgatggttacatgaactctggggaagtgatatttgcaacatctcatactttattcactatggcactttagg

SEQ ID NO: 757887 - DNA, 606 bp, Homo sapiens
ttaccaccatgggcatttgaggtgtttctagctcctcatttgagcatctggcaaacagcctgtatgaacctcaacctattccattgtcttctaacggcccccacatcataaactaaaaaaagttaggcttactccttcctttctctcccaatccctactttatcctagatgtcaaattagaagtcaacttctaggtagaacctggcccagtctcatcagagctacctgagaggacaagaaacttttttctggttccaatctagacttacttagtcagcaaatcataaatctattccctaaaatgagagaggaagaagagtcccttttgctgtttaaaaccaatgccttaacctgtgccacaatcccatctctctctcctatgatattagtgaacagctctggctgctctatttttcaaccgctccttctctaaggcaatmttcacaccctattaacatgctcactgcttattcatcttaaaaacccttctttgacctcacatccctttctggttgcagctgttcttttcttctcctccttactgatacttctttaaacagtaatctacccttgatttgaaagtgtgataatgacatatttccccct

SEQ ID NO: 757888 - DNA, 584 bp, Homo sapiens
agtatcaggtagtataattggttccttccataatcaatgattagtaaacattcgttgaatcaagtagaaaatattcagtactttctagttaatctgttgaagttctaagaagagagaaattaaatttcatgctactaccaagagttcctggagttctatgtagttttaatgagttaccaaaagcaatataactgtatattttttctcaytcttttaattcaatactaaaaaagtaattttcatgtaataaaaaaggtgtatataacagtgaatttagtctattactcaattcttatgcaaatgacctagtctcattgtatatatccttctaatacattttcacattcactaagcattctttcatttaaaaaacaactggacatatgttttacaacatgatagctattggggatacaagaggagtaagctgtgataggccattattaagaaattctgaatagaaaaggaaacactcactgaaataataaaatatataatatgttaggtataatgatagaggtatacacaatgttctctgtgtcatcaagatgagaacctagtaatagcaactaatacctacctaa

SEQ ID NO: 757889 - DNA, 614 bp, Homo sapiens
tcagatgaggtgtttatatgtttctcatggtcatattttagcaaattgaggcacagattagaaagagttacattatgtcacatatgatgaaagaattgatagttctcccaccctcctggaattgtcttgtgtgctttgaatacagagtgtttgaaaaatgcttccattcattttaaactctgctgatcattattgcaagtggcaggaagcacataatgcacacttgaccaggtaggaggtcaattactcaatttaaagaaaattttgtggactattgatagaaacagatgcatgactgatcataaaatcttagcaatttttatattagagattatgttaatttataaacaccctcaaaaragctgagagtaacgtttaagactttccttttgtttgcatcatggattaatttttgtcagcttttctcttgttttatgctggtcatataattcaaagccacatgaggcaaacctttgacactggaaacagcttaataaaaaatatgatactaagccatactgagggacagcagcagaatctcaaatgatttcaaatccaactagatgaaagtattacattttggacttcctgtaaacatttatttttctgtacct

SEQ ID NO: 757890 - DNA, 623 bp, Homo sapiens
ttaccaatatcaggtcttttaactaattctccacacagaaaagcaacatatgcaaaaaacaaaaaatcacagaaggggtaagaatgtaacactctacttactgtcatgcttgaaagttaatgattttatagaaaatgctatttttcataaaataatctctcatggaaaagaccaatgttaattgttaattcaatttgcaaacattattcatgaattaattattgattgggtcacatttaattccaaggaacagcaatgattgtcaccagaaatcatgtccctggcaaaatacagtgggtagctcctctttcaaagaaggcatctgaatactataatgtctccatttctcaattaagcttttgttatgcaattccattcaagctctaaatatttccagactaagrtatttcattctaaactccgtgcttttatttttttcccatttaacctgcactacgtccttcctctttcagtttggcacctgtgggtgaatgactttaggaaaagcttagtggtatgcccttttgaggtgagattgtttttagcatgtgaaggacagagaaactgaacaggaaagaatacatgagaaatacacataagtgaagtagcctaagaaatgcaga

SEQ ID NO: 757891 - DNA, 631 bp, Homo sapiens
gctctgacccaggcaattcttcatacagtggccaaatatttaaggtataaatcatgaatattatgtatctgctcaaaactctccaatggcttcccacaggttcaactgcaatgtattagtaatttctttgtttattgtttgtgtcactgaaatacaaactcctaaccaaaggactgtttgtttcattcaaaactgaatctccagtccctacaacagctggactatattagctgcttaaatatttcttgaataggtaagcatggcaacatagttcwcttaaagttaaattacaccaaaatgtctttattaaagaaataatgtcaaaggtagataatgtcagtcacagaactccaaaggataccattcatacagaaaataattatactgtttctgtctcttgttgggaaatgagagctgtactggaaaatgttaccattcatgcatttttggtattgctgttctctttcatgagtgtctcactagcttcccttcatctacagaaaatcacttggtagactagcaggtgtttattagattatgtcacctactttgttataaatgtgcatcataattagactttaaatagggctgagtcaaggaggtgacaacaagatatcacaggagtttttgt

SEQ ID NO: 757892 - DNA, 631 bp, Homo sapiens
gctctgacccaggcaattcttcatacagtggccaaatatttaaggtataaatcatgaatattatgtatctgctcaaaactctccaatggcttcccacaggttcaactgcaatgtattagtaatttctttgtttattgtttgtgtcactgaaatacaaactcctaaccaaaggactgtttgtttcattcaaaactgaatctccagtccctacaacagctggactatattagctgcttaaatatttcttgaataggtaagcatggcaacatagttcacttaaagttaaattacaccaaaatgtctttattaaagaaataatgtcaaaggtagataatgtcagtcacagaactccaaaggataccattcatacagaaaataattatwctgtttctgtctcttgttgggaaatgagagctgtactggaaaatgttaccattcatgcatttttggtattgctgttctctttcatgagtgtctcactagcttcccttcatctacagaaaatcacttggtagactagcaggtgtttattagattatgtcacctactttgttataaatgtgcatcataattagactttaaatagggctgagtcaaggaggtgacaacaagatatcacaggagtttttgt

SEQ ID NO: 757893 - DNA, 677 bp, Homo sapiens
aaggacacacacattaaacagcaatgatttttttgggaaataatcccaaggctagtgtcccttttagcacattttgggagtgctggattagaaaagtcatctcagattccaggtaaataaattacttcttttctttatggcagacttgctgtaatgagaagaaataaacattactaaactcatcaaggttcgggtaaaatttcagtgctgtcactcatcagccatgttgactgggacgtattatttagtagtatcagtactatgttatctcatctgcaagaaggtggtaacaatctcgaaagaataaaacttttgttgaggactgagaaaaatggaaagcacttagcgtagtacttggcaggcagttggcattcagtcagtgatgataacttttctttcccccacaacttgatctgagtctttgctttccattcctggactactgaagacaatttctaaagatmacacttgtcaatggccctcatccaagagaatatcacacaaatatgatctgcagagcacagggtataacagttctcacacattgtggaaatgtcaaggtttattatgcccctgtgacatattgccatggcttaatttacatttccatttgctttatgagaagtttcttactctggaacatctgacctctccttgatgcctcttttattcttcaa

SEQ ID NO: 757894 - DNA, 508 bp, Homo sapiens
tgtgatatatgaattttttccttttcataattaagaaatgccaagcaatactattaagagacaattttggatgtaaaattccctaaagctatccaatacagaagcaaagggtgaaacggagctgcagactcaaatggcttggctctgtatttcaggggcaaatgaggctacatatttagaaggaactgtacctgtattaatttttttctccatcctgctgggcctttgtggattttgctcatgacttctgttaacatgtgctgggccaataatgttatagatcataggacacatcccccatattgtggggaatttgcatcccatgctttaattaccctttggtttctgaagaggtaagggctgaatycagcagtcctttcctaacaggcctgtggttcaggcctggcttggaaagggccccaggggctggcaggcactccaggcaaattttccagcagcagcacggccccatttgcctccttcaacaggtcttcagttggctgtatta

SEQ ID NO: 757895 - DNA, 631 bp, Homo sapiens
tctgacagatgcaattaaactctacaaaactcacatttatttctcctattcaggagaggggcccatttaggagacatatgatagaaaaaatactgtatcctgcatactaattaagctagttctttacttctaaacatacccaaatagccaaaagtcacaaagcattagaggaaaatcaagagsttgcacaagaatatttttatgtaaataaaaagaaaaatagcccttagaaaagaactaaacatcaacaacaaaaatctaatcagtatccaaagaaaggtgtacagccccagaaaaatgcaaaaaaaaatttctgagactcttatgaacccctatgcacacaaactagaaacctagaagaaatggataaattcctagaaacatacaacctccaagattgaaccaggaagaaactgatatcctaaacagaccaataacgagttccaaaattgaattggtaccaaaaaacctaccacccagaaaaagctctggaccagatggcttcacagccaaattctaccagatatacaaagaggagctggcaccaacattaatgaaattatttcaaaaaattgaggagggaatcttccctaactcattccatgaggccagcattattctgatactaaaa

SEQ ID NO: 757896 - DNA, 631 bp, Homo sapiens
tctgacagatgcaattaaactctacaaaactcacatttatttctcctattcaggagaggggcccatttaggagacatatgatagaaaaaatactgtatcctgcatactaattaagctagttctttacttctaaacatacccaaatagccaaaagtcacaaagcattagaggaaaatcaagagcttgcacaagaatatttttatgtaaataaaaagaaaaatagcccttagaaaagaactaaacatcaacaacaaaaatctaatcagtatccaaagaaaggtgtacagccccagaaaaatgcaaaaaaaaatttctgagactcttatgaacscctatgcacacaaactagaaacctagaagaaatggataaattcctagaaacatacaacctccaagattgaaccaggaagaaactgatatcctaaacagaccaataacgagttccaaaattgaattggtaccaaaaaacctaccacccagaaaaagctctggaccagatggcttcacagccaaattctaccagatatacaaagaggagctggcaccaacattaatgaaattatttcaaaaaattgaggagggaatcttccctaactcattccatgaggccagcattattctgatactaaaa

SEQ ID NO: 757897 - DNA, 631 bp, Homo sapiens
tctgacagatgcaattaaactctacaaaactcacatttatttctcctattcaggagaggggcccatttaggagacatatgatagaaaaaatactgtatcctgcatactaattaagctagttctttacttctaaacatacccaaatagccaaaagtcacaaagcattagaggaaaatcaagagcttgcacaagaatatttttatgtaaataaaaagaaaaatagcccttagaaaagaactaaacatcaacaacaaaaatctaatcagtatccaaagaaaggtgtacagccccagaaaaatgcaaaaaaaaatttctgagactcttatgaacccctatgcacacaaactagaaacctagaagaaatggataaattcctagaaacatacaacctccaagattgaaccaggaagaaactgatatcctaaacagaccaataacgagttccaaaattgaattggtaccaaaaaacctaccamccagaaaaagctctggaccagatggcttcacagccaaattctaccagatatacaaagaggagctggcaccaacattaatgaaattatttcaaaaaattgaggagggaatcttccctaactcattccatgaggccagcattattctgatactaaaa

SEQ ID NO: 757898 - DNA, 604 bp, Homo sapiens
ccattaatttaactttaggcttttgggcctatgctagtctgagcttccaaaaagatacatacatgtttcacttttcattagctgaatgaggatattttaagaagttgaaagagaatttattttcaagttgtgagtaaattctcctttgaaattcacctgattattagataacttraagtttatttttaaaagctgacaactttttatgaatcttcgagttgacagttcctaaaagcgtaactcagatatcaatgggctgtgtattaaatggttttattttcagttttgcaatacagaacactgttgaaatatccatatcaacttgatttttttaaccttattcaggtgtcctttgacgtcccttaaatgttgggggtgggggtcagagccagttatccggcttctgttttgtcgattgcttagatttgttcctgttgtcaaaactgtcgccccccaaattggtgtgacacatgctcatgcataaaatgttaaaatgagtacatccttgtgtttgtatttgttttcaacatcgccaaggtgctacgggaaattatagtaacaaaattagaaaaaaaataaaattattgaaaagcaaaaaaaaacc

SEQ ID NO: 757899 - DNA, 631 bp, Homo sapiens
catatggtgatgtggaaatgaatttggaatcaggaggtctgtcttggaggccggctctctcactcacatttttgcttgttgctattatatttatgtatttatttatagctgtcctcagttcccaaagaatctaaagtttctgtatacagacaagttaattagaagaaaagaaaaactagctcaaagaaaagagaaagcaaatatgccatgcatgaaggctcacagagttgcragaattgccctctattggttgttctggtcttgctgggagcctagagaaaaaggggagcttgaggagacccataacccataatcattagagacagggaccctgactctgaagaacagatgatttcttgtggattttttttctgtgcacaaattcttaaaagatctaacatgaagtatatactagggggtattgataaacacactggacaaatctctcaacattgatttttatgccattcattactatgcctgttgggacaaacacttggatgttttcttttgctttttttgtcaagtgaggcttaaaagcaccacacccaggttagttgtaaatattaaatgagatcatacctaagatagtactttatcaataataaatgtagagacacaattacaagta

SEQ ID NO: 757900 - DNA, 679 bp, Homo sapiens
aacttttctaaaattcttcaactctatgaaagtaaaagtatgttacttgtgttttggaataactaaaaagtcaccgattctggtaatatttgatccacattagctctaacagtataccttgatgtttttaattcttaaactgatatctctttctgtttggtatgtaagcattttccctggagtcatccatagaaggaggctcttatctttgctactggatttagatattttgttttttttcttcagtttattgtcaatgtggtaagccataattgtactggtaataagcatttacatgacaatttgcaaatattaatgagtaaatctagatgacctgcctttaagatgcttaaaaagaaaagaaggaagcagtttaaaatgtctcttaatatcataaccttatgttctttaccaagaattgggggggraaggcatttccaatgacctgtaccaaattcactcatcagttggtcatgaacatgtgtagtttcccagaataaagaggaaaattctcagagcaatatattgtgtcaaacttttcttcccctcttacaagcatttattaagttagattataaaatattatttaaagtggttaatatgattcagaaattgaaaacatgtttctccatgagaaaataaattgtcatgtaatttgttgagtgtactatttgccagg

SEQ ID NO: 757901 - DNA, 397 bp, Homo sapiens
gggggtgggcatgtttcactcgtagaaaagattcttcagtaaaaacaccaatttgcaaacctcatatcaaatagcgaacaccacagcgccagtcatgaataagaattcctgctctaggcctttactccgatcaataattgtgaagggtctgagattttatcctacttgaaagctaacaaattagcctgcacagtttcatggatgttgrtagaaaacacaagactcctgggtcagagacaaaagactatttaactcacagcacagcaagcatcatcatcagcagcattatttgcatcagtttcccttgtccaccaagtcccatggggcagtgcaaacaagaccagatagcttcatgcacataaggtgcccttatcacaggaaagaaaccctgagctga

SEQ ID NO: 757902 - DNA, 518 bp, Homo sapiens
caaaagttattcactaaggttaatttattattcaagaaagaaaaatatgtttagcacatttagtgtagcctaaatgtgcagtgtttacaaagtccacagtagtgggcagcagtgtcctggggtttcatattcactcaccactcactcacccagagtaactttcagtcttgcaggctgcattcatggtaagtgccctgtacaggtttaccactttaaaaaaatcttttacaccatatttttactgagccttttctatgtttaggtatgttaagatacacacgtagttactattttattataatttctttcctacagtattcaatacagtaatttgctgtacagrtttgttgcctgtgaacaacaggctacaccatatagcctaggtgtgtagtagtctgtaccacctaggtttgtgtaaaagtccactttatgatatttgctcaacaatgaaatttctaatgacaattttcttcaaatgtatccctatcgttaagtgacacttgactctctcaatgtat

SEQ ID NO: 757903 - DNA, 518 bp, Homo sapiens
caaaagttattcactaaggttaatttattattcaagaaagaaaaatatgtttagcacatttagtgtagcctaaatgtgcagtgtttacaaagtccacagtagtgggcagcagtgtcctggggtttcatattcactcaccactcactcacccagagtaactttcagtcttgcaggctgcattcatggtaagtgccctgtacaggtttaccactttaaaaaaatcttttacaccatatttttactgagccttttctatgtttaggtatgttaagatacacacgtagttactattttattataatttctttcctacagtattcaatacagtaatttgctgtacagatttgttgcctrtgaacaacaggctacaccatatagcctaggtgtgtagtagtctgtaccacctaggtttgtgtaaaagtccactttatgatatttgctcaacaatgaaatttctaatgacaattttcttcaaatgtatccctatcgttaagtgacacttgactctctcaatgtat

SEQ ID NO: 757904 - DNA, 644 bp, Homo sapiens
gctaacggggctgcgtcacagcttcacaggtgagggaggggctaatggttctcattgtccttatgctcccatcccgccccaccttccccacaccaccaataattcaagaagatgaacaggtgaggggagaactgagcagctgtttcctctccatcagtagcaattcttcagtctctggagggccgctgcatcacttgatgctcagcaggctggattacaggatccagatttcrggaatgtggggcttacttcttgggagctgtcactcagcctttctaattctagagcctcagtaactgcccattctaggttgttgtatatatttatttcttggatccgttgaaacaaacacaaactggttagcttccactacagaaattcattggctcttgagcctggaagtccaagatcaatgtgttgtcacatttagttccttctgagggctgtgcaaaaggatctgttccaggcctctcccttagcttcttatagccccagacattccttggcttgtcaatggtattctccctgtgtctttatattgtcttccttctttacattctgtccctttacattgtgtccaaatctcctcttcttttaaggacaccagttatattggaatagggcccaccccaatgaccgtattt

SEQ ID NO: 757905 - DNA, 591 bp, Homo sapiens
ctgcaaaaatgagataataacaaccttgaaggtggttgggaggagtgtgggaatggataaagagggaagtgtatgtggttcttggtagatgctccagagtctggaataatggttaatattgggaacttgcatctcccaatccacttaccttacctaaactagtagcacagatttccctgtagtagtgccttagcctactgtgctgttctttacttctaatgactagatagtaaatactgaaagaatgtcttttctaacttttatttttcacaacttttctctctgaggagggatttcaaggctgaactaaagttttgttttattttctttaaaggggcccaggttctgttttctcctgagagtcatacacacattttgaacagaattgtttttcttgatggttttctmaataaacaccactgactgaaacatggagtaaaatgtgttatttggcatctcctactagaccaacaacaacaagaaaatacattttgctattgaacttttccttgttaaacaacagaggttaggtcatttccagtgacatggaatctaagagagggtttggaatctgaacaggtttggcaggac

SEQ ID NO: 757906 - DNA, 601 bp, Homo sapiens
tttaagtctttgtgatgaatggacatatcacaaggcagtttctcagaaagttctttccagtttttatctgaagatgattcctttttcaccatagatctccatgctctctgaaatatccctttgcagatttcacaaaaacagtgcttccaaactgctgaatgaaaagaaagttttaactctgtgagttgaatggacacatcacaaagcggtttctcagatagcttctttctagtttttatcacaggatattagctttttcatcactggactcaaagaactcccaaatgtccatttgcagaatggacaaaaaatagtgtttccaaagtgctgaatccaaataaaggtttaactctgtgcaatgaatgcacccatcaaaaagaaggttctyagtaagcttctttctaatttttatcagaagatgtttgctatttcaacatagacctcaatgatctccaaaatatccctttgcagattctgtaaaaacagtgtttccaaactgctgaatgaagagtcattttattctgcaagatgaatgtacatatcacttagcagtttctcagatagcttccttctagtttttattctgggatattcagttttt

SEQ ID NO: 757907 - DNA, 503 bp, Homo sapiens
aggatgtttcctttttcaccataggcctcaatgctctctgaaatatccctttgtagattctacaaaaacagtgtttccaaacagctgaatgtaaacaaaggtttgactctgtgagatgaatgcacacatcacaaagcagtttctcagaaagcgtccttctagtttttatctgagggtgtttccattttcaccataagcctcaatgctctctgaaatatccctttgcagattctacaaaaacagtgtttccaaactgctgaatgaaaagaaaagtttaactctgtgagatgaatagasagatcacatagccgtttctctgttagcttctatcttgtttttatcctgggatattccctcttttgccattggccccaaagagctccgaaatgtccatttgcagaatagaaaaaaaattgtttccaaaccactgaatctgaagaaagttttaagtcagtgagatgaatgcacacatcacaaagcaatttctcagaaagcttctttct

SEQ ID NO: 757908 - DNA, 629 bp, Homo sapiens
cctgtctgacagctttgaagagagtagtggttcaaccagcacgcagctggagatctgagaatgggcagacggcctccgcaagtgggtccctgacccctgacccctgagcagcctaactgggaggcaccccccagtaggggcaaagagatatctcacatggccaggtactcctgtgagacaaaactattccaatcaatagaaaaagaaggaatcctcccaaactcattttatgaggccagcatcatcctgatatgaaagctgggcagagacacaacaaaaaagagaattttagaccaatatccttgatgaayattgatgcaaaaatcctcaataaattactggcaaaccaaatccagcagcacatcaaaaagcttatccaccatgatcaagtgggcttcatccctgggatgcaaagctggttcaacatatgcaaatcaataaatgtaatccagcatataaacgaaccaaagacaaaaaccacatgattatctcaatagatgcagaaaaggcctttgacaaaattcaacaaaccttcatgctaaaaactctcaaattaggtattgatgggacttatctcaaaataataagagctatcaatgacaatcccacagccaatatcatactgaatg

SEQ ID NO: 757909 - DNA, 607 bp, Homo sapiens
ctcccttacaccttatacaaaaattaattcaatatgataatatgaaaaattcccagatagaaactagaaagaagctatctgtgaaactgctttgtaatgtgttgattcatctcagagagttaaacatttctttttatccagcaagttgaaaatactctttttggagaacctgcraatggacatttgggagcccattgtggcctatttggaaaaatccaatatcaccaggtaaaaaccagaaagaagctatctgtgaaactgctttgtgacgtgtggatttacctcccagaggtaaacctttcttttgtttcagcatgttggaaacactctttttggataatctgtgaatggacatttgggaacccattgaagcctatcgggaaaaacagaataacgccagaaaaaaactagaacgaagctatctgtgactctgctttgtgatgtgtcgattcttcccacagagttaaaactttctttcaatttagcagtttggaaacactctttgtggaaaatctgtgaagggacacatgggagcccattaaggcctataagaaaaagttaaatatcctttgataaaaactgaaaagaaacaaactgtgaaactgga

SEQ ID NO: 757910 - DNA, 550 bp, Homo sapiens
gacaatttggagcccattgtggcctatggggaaaaaaaactaatatcactggataaaaactaaaaagaaagctatctgtgaaactgctttgtgatatgtggattcatctcacagagttgaacctttcctttgattcagcaggttgaaaacactctttttagaggatctgcaaagaaacatttgggagccctttgaggcctatggggataaatctaatatcccatgtgaaactgatgtgatatatgtatttatttcacagttaaaccattcttttgactcagcaggttggaaacactcttttaggagaatatgctaagggacayttgggagcccatttaggcctatgtggaaaagccaaatacccccagatataaactagaaagaagctacctgtgaaactgctttgtaatgtgtggattcatcttaccaagttaaaactttcttttcattcagcaggttgaaacactctttttagagaatctatgaaggaacatttgggagccctttgaggcctatggagaaaaactgaatatcccaacatggaaactca

SEQ ID NO: 757911 - DNA, 598 bp, Homo sapiens
ctaagttactcacagatactgtgtatcacaaaacaaggagctctcttacataagttatgtgcttccatttgccctcagcatctagaatgaggctcaaaataactgagggaaggcaaatctcaattttagtaataggtctatacaatattagcactttttaaaaagcctgtgacattagcatttaagatggatatrtctatagtgcttcaagtagttttcatctctgaaatcattttaaaatcacagaatttgaagttatatgctagaaaggaccaatgaccttacatgccatttaatgcaacactcattttacagatcccaggaaaatgcaccttaaaactaatttgtccaaggccccaccaagtaggtgcagtttctcaacctaaactcaaattaggcagtatctctcaaactttgttgcacattaaaatcaccggagaagctttaataactgcctcaatttcaacatgaggcattttgatttaattagtattgggtatgagtttgggcattggggtgttcttaaaagtttcccaggtgacttcaatgtgcagaaaagtttggaatgattgagttggagtgaaaaatcagaatcttc

SEQ ID NO: 757912 - DNA, 598 bp, Homo sapiens
ctaagttactcacagatactgtgtatcacaaaacaaggagctctcttacataagttatgtgcttccatttgccctcagcatctagaatgaggctcaaaataactgagggaaggcaaatctcaattttagtaataggtctatacaatattagcactttttaaaaagcctgtgacattagcatttaagatggatatgtctatagtgcttcaagtagttttcatctctgaaatcattttaaaatcacagaatttgaagttatatgctagaaaggaccaatgaccttacatgccatttaatgcaacactcattttacagatcccaggaaaatgcaccttaaaactaatttgtccaaggccccaccaagtaggtgcagtttctcaacctaaactcaaattaggcagtatctctcaaactttgytgcacattaaaatcaccggagaagctttaataactgcctcaatttcaacatgaggcattttgatttaattagtattgggtatgagtttgggcattggggtgttcttaaaagtttcccaggtgacttcaatgtgcagaaaagtttggaatgattgagttggagtgaaaaatcagaatcttc

SEQ ID NO: 757913 - DNA, 631 bp, Homo sapiens
agccatataatggatgatgtaacactctgtaaattgatctctaacagtctggttagccttgcctacaaaagtttgacaaattgtggggctgtttaacataccctggggtaaaaccttccactgacatctggttgcatgttcattgttattaagagtaaggatggtaaaggcaaatttttttaaatctgcctctgccaaaggaattgtaagaaggcagtcttttgaatctataataacaagtggccagtctttagggagcatagtgggggatgggagccctagctgtaaggttgccatcagttgaattacagtgaygaccacttgcaagtcagtcagcatgcaccatgtactagatgtttttttttaaattaaagatactggggatttcaaaggagacaaattgggtgaaatacgtcctttttctagtagttttctatttcacaaagcacccacaacttgtcttttgggagtggccactgttcaacccagacagcgtgctgtgttatccattttaagagaaattgctcctccacagtgaggaaatgcaagtcgggcaatagtgggtgcagtgagctgagtctcagtgagccaagtcttggactccctttcccagcactcactcagctgaaga

SEQ ID NO: 757914 - DNA, 631 bp, Homo sapiens
agccatataatggatgatgtaacactctgtaaattgatctctaacagtctggttagccttgcctacaaaagtttgacaaattgtggggctgtttaacataccctggggtaaaaccttccactgacatctggttgcatgttcattgttattaagagtaaggatggtaaaggcaaatttttttaaatctgcctctgccaaaggaattgtaagaaggcagtcttttgaatctataataacaagtggccagtctttagggagcatagtgggggatgggagccctagctgtaaggttgccatcagttgaattacagtgatgaccacttgcaagtcagtcagcatgcaccatgtactagatgtttttttttaaattaaagatactggggatttcaaaggagacaaattgggtgaaatacgtcctttttctagtagttttctatttcacaaagcacccacaacttgtctttwgggagtggccactgttcaacccagacagcgtgctgtgttatccattttaagagaaattgctcctccacagtgaggaaatgcaagtcgggcaatagtgggtgcagtgagctgagtctcagtgagccaagtcttggactccctttcccagcactcactcagctgaaga

SEQ ID NO: 757915 - DNA, 483 bp, Homo sapiens
ggctgaatcaaaagaaaaggttgtctctttgagatgaatccacacgtctgaaagcagtttcaaacgaggtttctttctagtttttatctgggcatatgttgtttttccacataggcctcaaagggctcccaaatgtcccttcatagaatctccaaaaagaatgtttccaacttcctgaatctaaagaaagttttaactctgtcagatraattgaaacatcacatatcagtttcatagatagctcctttctactttttaatctgaagctattctgtttttccacatagtccttaatgggctcccaaatatcccttcacagattttacaaaaaaagggtttctaacctgctgaatcaaaggaaaggcttaacgctgtgagatgaatcccctcatcacaaagcagtttcacagatagctttttttctagttttcttttgtatttatattcagtttatctttataggcttcaatgggctcccaaatg

SEQ ID NO: 757916 - DNA, 483 bp, Homo sapiens
ggctgaatcaaaagaaaaggttgtctctttgagatgaatccacacgtctgaaagcagtttcaaacgaggtttctttctagtttttatctgggcatatgttgtttttccacataggcctcaaagggctcccaaatgtcccttcatagaatctccaaaaagaatgtttccaacttcctgaatctaaagaaagttttaactctgtcagataaattgaaacatcacatatcagtttcatagatagctcctttctactttttaatctgaagctattctgtttttccacatartccttaatgggctcccaaatatcccttcacagattttacaaaaaaagggtttctaacctgctgaatcaaaggaaaggcttaacgctgtgagatgaatcccctcatcacaaagcagtttcacagatagctttttttctagttttcttttgtatttatattcagtttatctttataggcttcaatgggctcccaaatg

SEQ ID NO: 757917 - DNA, 483 bp, Homo sapiens
ggctgaatcaaaagaaaaggttgtctctttgagatgaatccacacgtctgaaagcagtttcaaacgaggtttctttctagtttttatctgggcatatgttgtttttccacataggcctcaaagggctcccaaatgtcccttcatagaatctccaaaaagaatgtttccaacttcctgaatctaaagaaagttttaactctgtcagataaattgaaacatcacatatcagtttcatagatagctcctttctactttttaatctgaagctattctgtttttccacatagtccttaatgggctcccaaatatcccttcacagattttacaaaaaaarggtttctaacctgctgaatcaaaggaaaggcttaacgctgtgagatgaatcccctcatcacaaagcagtttcacagatagctttttttctagttttcttttgtatttatattcagtttatctttataggcttcaatgggctcccaaatg

SEQ ID NO: 757918 - DNA, 622 bp, Homo sapiens
aatcagctgaatcaaaggaaaggcttaactccatgagattaaggaacacatcacaaagcagtttcacaggtagctttattttcattttttcattgaaatgctacaaagcaatttcacagagagcttctgtctagtttttgtctggagatgctcggttttttctagtagaacaaagtgggctcccaactgtccatccacagrtactccaaagagactttccaacctcttgtgtcaaaagaagggttaactctgagaaaaatgcacgcaccacaaaactgttccacagataacttctttctagtttttatctgggaatgttctatttatccccttaggcctcaatgggctcccaaatatcccaccgcgtactacaaaaaatgtgtttccaacctgctgaatcaaaagaaagatttcactctgtgagatgaatccacccatcacaaagcaattccacagatactttctttgctgtttttacctgggaatatttggtttttcttcataggcctcaatgggctccaaaatgtccctttgtagatgccacaaaaagagtttttcagcctgcttaatcaaaaaatgttttaactctgtgagatcaatccacacatcacaaagcaatttc

SEQ ID NO: 757919 - DNA, 538 bp, Homo sapiens
ccaaagtgagtgtttccaacctgctgaatcaaaaggtttacctctgtgacatgaatccacctatcacaaaatatttcacagataacttctttctcatttttatctggggatattcagtttttccccacaagcctcagtgggctcccaaatgtcccttcacagatgatccaaaaagaatgtttctaacmtactgaatcaaaagaaaagtttaactctgtgagatgaatgcacacatccaaagcagtttcacagttagcttctttctaggttttatcaggggatattcagtttcatgcaatattcttcaatgggctccagaatgtccctttgttaattctccaaaaaagtgtttttaaccccctgaatcaaaagaatagtttcaatctgtgagatgaatccacatatcaaaaattagcttcacagataacttctttgtacttttcatctggggatattctgtttatccccatagccctcaatgagctcccaaatgttcattcacagatttcaaaaaggaatgttttcatcctcctgaatg

SEQ ID NO: 757920 - DNA, 538 bp, Homo sapiens
ccaaagtgagtgtttccaacctgctgaatcaaaaggtttacctctgtgacatgaatccacctatcacaaaatatttcacagataacttctttctcatttttatctggggatattcagtttttccccacaagcctcagtgggctcccaaatgtcccttcacagatgatccaaaaagaatgtttctaacctactgaatcaaaagaaaagtttaactctgtgagatgaatgcasacatccaaagcagtttcacagttagcttctttctaggttttatcaggggatattcagtttcatgcaatattcttcaatgggctccagaatgtccctttgttaattctccaaaaaagtgtttttaaccccctgaatcaaaagaatagtttcaatctgtgagatgaatccacatatcaaaaattagcttcacagataacttctttgtacttttcatctggggatattctgtttatccccatagccctcaatgagctcccaaatgttcattcacagatttcaaaaaggaatgttttcatcctcctgaatg

SEQ ID NO: 757921 - DNA, 598 bp, Homo sapiens
agtttaacagataacttcattctactttttatctggggatattcagtttttctgctaggcatcaatgggctccaaaatgtacattcacagatcctacaaaaaaagtgtttccaacctgctggatcaaaagaaaggtgtaaatctgtgagatgaatccacacatcacaaaccagtttcacaaacttatttcarttttcatctggggatattcaatttttccttataggcttcaatggacttccaattatcccttcacagattatacaaagagagtgatttgaacctgctgaatcaaaaataaaagtttaactctgtgagatgaatcctcacattgcaaaacagtttcacagataccttctttctagtttttatctagggatattcaattttcttcctaggcctcaatgggctccaagacgtcacttcatagattctccaaaaagagtttttccaacctgctgaattaattaaaatgattaactctgtaagatgaatccagctatcataaagcagtttcacaggtagcttttttctagtatttacctggggatatttgttttttcccagtggcccaaatgggatctcaaatgtcccttca

SEQ ID NO: 757922 - DNA, 592 bp, Homo sapiens
gtgaacatgtaaatatatatcctatgtcaattttatatataagcatatatgattaaaaatatagttaagaatttttaaacagtattataaagtaaaaatcagttaaacttctgatgattatttgttaattaagataatattattttgawtagggtgattttaaataaacaaaaatattaaattacatgaaaaaattctttataaaatgtttatgatttttacattggttttatcactttattccactattttattttaagataacctgccttgtttaaaacactgtattcatcttaattaaattaaattccatttgtaaaaaaattaacaaatgatttactctattatacagtgcggttataaactgagtcagtatctcaagatttatccccattatcgtcatctgtggccctatttgttttataaatgtattgtctttttccatgcctgtcacatctctattgctcgttcatttttctctttgtcccttacagggagcattgcctatctctagattaagcaaaagttgcatattaacaaagcacaataacctgctcaatctttctcacacagagaaatgtttgttaagtaa

SEQ ID NO: 757923 - DNA, 629 bp, Homo sapiens
gtttcacagatagcttctttctcgtttttatctggggatattcactttttccccacaggccccagtggctccaaaatgtccctttgctgatactccaaatagagtgtttccaaactgcgaatcaaaagaaggtttyaactctgtgagattaatccacaaatcaaaaggcatttcacagatagcttctttctagtttctatctgctctatctggggatattcagctcttccacattggccttaatgggctccaaaatgtttcattgcagattctctaaaaagtctttcaaacctgttgaatcaaaataagaggttaactctgtgagatgacccacacatcacaagtggttttaagagaccttctttgtactttttatcagggaatactcggttttgcccataggcttcagtgtgctccaaatgtgcattcgtagattttcaaaatagatggtttccaaactgctgaatcaaatgaaagctttaagtctgtgagatggatccacacatcacaaagcaatttcacagatagcttctttctagtttttatctggggacattcggattatttccattggcctcaagtggctcctaaatattccttcacagattctccaaaaagagtatttttaa

SEQ ID NO: 757924 - DNA, 578 bp, Homo sapiens
gctttgtgatttgtggattaaattcacagagttaagcctttcttttgattcagcaggttgaaaacactctttttggagaatcggcaaaaaaacatttgggagcccactgaggcctgggggaaacactgaatattctcagatgaaaactagaaagagctatctgtgaaactgctttgttatgtgtggattcatctcacagaaagaaacctttcttttgattcaacaggttggaaacgytctttttgtagaacctgcaaagggacagttgggaactcattgaagcctatggggaaaaaaaatccacagataaaatcaataaagaagctatctgtgcaactgctttgtgatgtgtggattcttctcacacaggtaaagttttcttttgattcaacaggttggaaatactctttttggagaatctgtgaaaggacatttggatgtccatttgggcctattgggaaacaatgaatatccccagataaaaaccagaaagaagctatctgtgaaactgctttgtgacatgtaaattcatctgacagagttaaacctttcttttgattcagcaagtagtaaacgct

SEQ ID NO: 757925 - DNA, 609 bp, Homo sapiens
ggttatccacccatcttggcctcccaaagtgctgggattacaggagagagccacatgcccagcctaaattttagctcatatagtggaggtgttagcgcatctcaatgagactatcggacactttcggttttggtatctgctgccacctcccgctagctactcctatcagagtagtagtgatgatggtccgtgttcactgccctcagcatagggttggtagagaaaaaatgcaggcaagaaaggatagtttacttagtttttctatttaaaagtagactgtgaggctgggcgcagcgcggtggcttatgcctgtaatcccagcactttgggaagccaaggcaggcggatcacctgaggtcaggggttaaagaccagcctggccaacatggcgaaacccagtctgtactaaaaatacaaaaaratagccgggcatggtggcaggagcctgcaattccagctacttaggaggctgaggcaggagaatcacttgaacccaggaggcagaagttgcagtgagctgagattgcaccattgcactccagcctgggcgacaagagggacactccatctcaaaaaaaaaaaaaaaaaaatgtagactgtgaaactcat

SEQ ID NO: 757926 - DNA, 639 bp, Homo sapiens
gggattacaggcatgagccaccgcgcccagcctatttatttatttatatttttgatatggagtctcattctgtctcccaggctggagtacggtggtgcgatctcagttcacagcaacttccgcctcctgggttcaagtgattctcctatctcagcctcctgagtagctaggattacaggtgcacgccatcatgcccagctaatttttgtatttttagtagagatggggttttaccgtgttgaccaagctggtcttgtacttctgacctcaaatgattcaccctcctcagcctcccaaagtgctgggattacaggcgtgacgactggtgctcagccagagtaggtgtactatttcacatttccatgaacaatragtaatccactttttccacatccttgccagcatttgatgttaccactgttttttattttagtcattctgacaggtgtgtagtgttattgcagtttttattttgcattgccctaatggcttacaatgttatgttcatttgccacctgtatatcctctccagtgaaatgtctattcatatctttttgcccactttctaatcatatttttttttttttttactcttgggttttaagatctctttatatattctagacaaaatatgttccc

SEQ ID NO: 757927 - DNA, 639 bp, Homo sapiens
gggattacaggcatgagccaccgcgcccagcctatttatttatttatatttttgatatggagtctcattctgtctcccaggctggagtacggtggtgcgatctcagttcacagcaacttccgcctcctgggttcaagtgattctcctatctcagcctcctgagtagctaggattacaggtgcacgccatcatgcccagctaatttttgtatttttagtagagatggggttttaccgtgttgaccaagctggtcttgtacttctgacctcaaatgattcaccctcctcagcctcccaaagtgctgggattacaggcgtgacgactggtgctcagccagagtaggtgtactatttcacatttccatgaacaatgagtaatccactttttccacatccttgccagcatttgatgttaccactgttttttattttagtcattctgacaggtgtgtagtgttattgcagtttttattttgyattgccctaatggcttacaatgttatgttcatttgccacctgtatatcctctccagtgaaatgtctattcatatctttttgcccactttctaatcatatttttttttttttttactcttgggttttaagatctctttatatattctagacaaaatatgttccc

SEQ ID NO: 757928 - DNA, 592 bp, Homo sapiens
gaaatggaacttcttattgtccttcctcctgattatcatgaacatttatgagcacagctgtttcctttctctgactaatcctaaagtcaatgccataatattgacccccttctattacatccctagagcctattacatatcactttgggttctattctgagcaggagaaattgcaaatttatcttttcattaagcagcaactggaaaacctaactaattaatttaacttggtactgagaagtttacaaaagatttttaaatttttatagacttaaaaatttgtacaaaaatatttttacaattatatatataatatatataacttatgggctttttataatgtcagaatatattttttcaaacaggctgaagaagtaggccatctaaaagttcttcctgacataatttyatttgttatagagtatgcatttatataccagggtcattatataagttgctttaaactttgtaattttagggtaaaatgtagtattatttggatggggcttttaaaagccatcaaagtaaatacacattagaaccttcacctatagtgctatttctagcagagaggatttaatattagatggac

SEQ ID NO: 757929 - DNA, 561 bp, Homo sapiens
tttgtccagatatcaagtaatggttttcaaaagaatgctttcctagatgacttacaaaaacaatcagaaatagtgtagtataatgtttcccttgtaaagtattcataaacattaattagtatgtattaaaattaaaatataaattccttaaatctagcaattcacttctaagaatatattctacacataaaatagcattcatgattaaaatatatgtacaagtatatttgttgcaacactgattgaatagcaaaaaacaaaaatacatcaagagagctggtagaatgacatataatacataaatacaatgaaactctatacaatcataaaaaatacaacacatgtacatgtattgaaccagaaatatgttcagaatatactcttaagcagaaacaaatttgcaaacagatatttttcctatgatgkatcattttatgatgtatgtacatgtgtacacattagtgtgtgtatacacatgcaacacagatggccataaagttaaattgcaggtaaatatgttgtgatacatatataaatatttacatgattatagtatgtaaa

SEQ ID NO: 757930 - DNA, 546 bp, Homo sapiens
cagcatcaatacaattaaaactttgctaattttactcctttatgtgagaccatgtcacatatgtgtatatatttccacagaatgtagaaccctgctggttcttaactacattatagttaactaaaacagaaatctttatattaaaacaacagaaaagaattttctcaacttagataaaattttgatgtaaatccttaaatattctagttgttaatattgttaacaatagtcattagactgtcattagactgtcagatggttttctattttaattatgytccaagctaatctggtaggggttaaaaaaacctatgctaaattgtttggaaggatgttttagtatgatttctttaaaactttaaaatatccctaacaacatgaaaatatagaaaatcaattcccattcaggtttttttaaatcatgatttgagaagaaattgttatttgtaactacaccatcatttcacccaagacaaatcaagatgggactgtgggataagaaagagatctctaaaagagagtcagcactacactaaattaaggatc

SEQ ID NO: 757931 - DNA, 613 bp, Homo sapiens
aattagatattctgaagtgactatagatactgaaatcgggaccaccttaaaataaacagaaagaagaaatcactctacaaaataaccacaagtagacgaatagctttcttatcaacaatgaaaaccagaaaagagttaatatctttaacatgttaacctgaaatcaggaacacagcaaaactaccttccaacaacaacaaggaacgatcttagtaaataaaaactgagtttaccaccaagagaccttctccaagggaatttgaggtacaatcatgggaaacaaaattgttaaaccaaaacactggataataacttgagagtttatagataagagatcagggttaaagtttcctaaggtccatagtatcattaagaaggagggttaagatactaatattagatatttttaagttaaatatgrtaagttttgagagtaaaagcatgggtatagaattaacatcctaactggtagaggggaaaatatcatgaaataagaagacaaacaaatatttagtcaattaaagaactgagaagtgaaacatagagaaatcaaaggaagtggaaagcacaaaataggatagcaggaaaaagtccaatcatacagtgttaatat

SEQ ID NO: 757932 - DNA, 518 bp, Homo sapiens
gtccactgcgtacctttgggctcagagcagtgcacattatttatccacttgtaatacctgttttggaaacaaaagagcaattgctttttatacagacttctctcacaaaatgttgtcatcatgacattataatgaactggatccgcgggttttctgatgacagttcagtttattaattattaaccccatgaaacactatttgctttatctgtactggccctctcacttttggccaaacacttagtaggaraacagcagcaatcaaaggtcaaatagaaaatcaaacaagaaactccaagtttgtatgaaacaatatacttggaaagagccagcttctaagcaagaaattccacatattgaaacacgagaaaaagttaaaatgttagtgcccaatttgttaactcccattgtttgggctatttaaaaccatagattttcaccaaattttatgactgaacactggcaatgacagcatttttacaactcactgtaaacacatgatcattacccttaaaaat

SEQ ID NO: 757933 - DNA, 572 bp, Homo sapiens
atccttatgctctctatatgcatgagttcaattgatttgatttttagagtccacaaataagtgagaacatgtgatgtttgtcttttggtgcctagcttatttcacttaacatgatgatttccagttccaaccacattgttgcaaataactgtatctcaccctttttatggctgaatattgctccattgtgtacatataccacttttttttatccattcacctgctaattgacacttaggttgcttccaaattttatagttactgtaaayaatgctgcaacaaatatatgaggcccagcctgcaaaaccatttttcctcctaggcatctgggcctgtgatgggaggggctgccacaaaggtctcttacatgccctggagatattttctttattgtcttgacaattaacacttggcttctcattacttgtgcaaatttctgcagcctgcttgaatttctcctcagaaaatgggtttttcttttctattgcatcatcgggctacaaatgtttcagatttctatgctgttttccttttaaaacagaatgcttttaacaccacccaaatcacttatt

SEQ ID NO: 757934 - DNA, 527 bp, Homo sapiens
ttttatttatttggatctctttttctcttagtctggctaaaggtttgttaattttatttaacttttcaaaaaaacaactttttgtttcattgatatatatatttttaatttcaatttcatttatttttgttctgatctttattatttctttacttctactaattttgggtttgagttgctcttgcttttctagttctttaagatgtattgcaatattgtttatttgaaatttttcttctgatgtaggcacttataaacatcccactgggtactgcttttgctgtgtcccataggtttttgtatgtcgtatttccattattttttttttgaattttttttcaatttccttctctgtttcttcattgacccactgktcattcaggagcatattattaattttcatgtatttgtatagtttccaaaattcctttcattattaatttctagttttattccactgtggtcagagaagatgcttgatgttacttcagtttttttttttaatattttaagacttgttttgtgat

SEQ ID NO: 757935 - DNA, 587 bp, Homo sapiens
cttcccaaagtccctgccctttgtgttaagatactagggtagatggaggtgcaaagccaggtggtggctggatcaatcaagtcccacactatggcctcccacatgccagcataagcagcagctctagtggagatcaaagggcagttctgtggcttctgagggaacattccagggaggagcacagctgcctttgttgtgcagaagaatccatatggtgagcaggggtagtacatagcagtagcctcacctggcccctacacacttgttaaggcacatctcacacctgcagtgttccacttgcagcagctaagtgggttccagatagcctgtgctcagcactcaaaactgccccaggccataagccttccctaccaagacagtaaaggtggctttcargccacacccctccctgtcggcctgcagacctggagtgcccaggtcctgcacctgtggcttatagtacttcccacttgtctcagttctcaccaaagtggttcatccctgttcaagattatattgtgaatctccactgggagcttctttcaacctgtgactgctgcctaagttaactgactgacttctgtgag

SEQ ID NO: 757936 - DNA, 588 bp, Homo sapiens
agacgcaacaagtctcttcattccactttcttctgcctgctttattctagccrcgctggcagctgattagatggtgaccacccagatgcgggtgggtctgcctctcccagtccactgactcaaatatttgtctcttttggcaataccctcagagacacacccaggaacaatactttgcatccttcaatccaatcaagttgacactcaatattaaccaccacaaacatactttattttcttttaaaattaagctgaaaatatatgagaacactagcatatgtaataaaaattagcatactttttacaaacaaattgaaaccataataaaattctagctattttatcagttcttagattattatctatgctttccatttgggctattcttggatattgcatatacaattttcgaataccactagattaataagatatatatggtgcagagctgtgctattcaatagagtagcctagcctctgggcacatgtgacagtgcagattatatgtgtcaaattatctttgtcataaaacatttcatcatcacccaagttctgttggtcagttatggtgtagagagttgaggtaaa

SEQ ID NO: 757937 - DNA, 557 bp, Homo sapiens
cagatgcttcctatacagcctgcagaatcatgagacaattaatcctcttttcttcataaattaaccagtctcaggtacttctttatagcaatgtgagaatagactaatacaacatgtttccatgtatcatttatgtatttttaatgtatcttgccctagaaaaacagcaagctctctggtggggaaagtgaatattgaatcttcatggcttaccactggtgtttattgcagtgcctctatccatagaacctcaataaatatcagttgaaataattgtattcatatatcattattcagagtggagagagcttcttggtttacttttatcccttaaaactcttatgtacattctttcagtayctgcatatgataatgtaactgagagaggacctctaaagagtgaattagcttataaaggcctttgaaattatatgccctaacatttcctaacaggagatctaaaactggtcaggatcactttttactacagtctaaggcctaagccagatcttctctgtcttttcccccagtgcatgttaaatagccaagagatccat

SEQ ID NO: 757938 - DNA, 543 bp, Homo sapiens
gatacaagatttatttaacatactcaaatcaataaatgttatccattacatgaacagaactaaaaactaaaaccacatgatcatctcaatagatgtagataaggcctttgataaaattcaacatctcttcataataaaaartctcaacaaactagacattgaaggaatatacttcaaaataataacagctatctaccaaagaccacagccgacatcatactaaatggaaaaaagctggaagcaatccccttgaaaaccagaacaagacaaggatgtactctcaccactctattcaacatagtgctgaaagtcctagccagagcaatcaggcaagagaaagaaataaaaggcatccaaataggaagagaggaaatcaaacaatccctgttttcacatgatataattccacacctagaaaaccccatagtctctgcccaaagcttccttgatctgataaacaactttagcaaatttttgggacacaaaatcattggacaaaaatcagtagaactcttatacaccaacagcatcaagttgagaacc

SEQ ID NO: 757939 - DNA, 573 bp, Homo sapiens
agccatccttccaccttagtctccaaagtaattggaactgtaggatacaccactacccatggctccttttgcatatttttctgttactttgtctttttttttaatttgtaggagctttttaatattctgaatgcatgtcatttgtatgatactttttttataaatatcttttcccaagattatctgtgtcttgaatggggaaaagtcgaacacctttcctctaagaactggaacaaggaaaggatgaccactttcacatttttccccatgtttattacagcatgactgacaatagccaagatatggaaacaggccagacagaatgtctcatgcctgtgatcccaacactttggaagscctagacagaagttcgagaacagcttgggcaagatggtgagagcctgtctctaaaaaaataaaaataaaaatcagccaggtatagtggcacatgcctgtagtcccaactgctcaggaggctgaggtggatggactgcttgagcctgggaagtcaaggccacaatgagctatgattacaccactgcactccagcctgagaccccgtctcaaaaaaac

SEQ ID NO: 757940 - DNA, 451 bp, Homo sapiens
gaatctaaaaggtcttctccagagtttcatatctgcccatgagtcaatgctgagcaagagtcagtgctgaggccaggcgcggtgtttcacacctgtaattccagcactttgggaggctgaggcaggcagatcacctgaggtcaggagttcgagaccagcctggccaacatggtaaaaccccatctttactaaaaacacaaaaataagccaggcgtggtggtggtgcacacttgtaatcccacctaactgggaggctgaggcaggagaatcgcttgaacctggggtgggggcggaagttgcaaygagccaggattgtgccattgcacttccagcctgggtgagagaacgaggttctgtctcaaaaaaaaaaaaaaaaaaaaaagagtcactgctgaggggcccacccaggaatccctcagggacagaggggaacttccagtgtattcacaac

SEQ ID NO: 757941 - DNA, 451 bp, Homo sapiens
gaatctaaaaggtcttctccagagtttcatatctgcccatgagtcaatgctgagcaagagtcagtgctgaggccaggcgcggtgtttcacacctgtaattccagcactttgggaggctgaggcaggcagatcacctgaggtcaggagttcgagaccagcctggccaacatggtaaaaccccatctttactaaaaacacaaaaataagccaggcgtggtggtggtgcacacttgtaatcccacctaactgggaggctgaggcaggagaatcgcttgaacctggggtgggggcggaagttgcaacgagccargattgtgccattgcacttccagcctgggtgagagaacgaggttctgtctcaaaaaaaaaaaaaaaaaaaaaagagtcactgctgaggggcccacccaggaatccctcagggacagaggggaacttccagtgtattcacaac

SEQ ID NO: 757942 - DNA, 618 bp, Homo sapiens
aggagtagctttcctttgtatatcaaaaacttggaagagagaggaatgtacattggctacccctgcccctccaggggtcacagtctatagccccatgagacctaggaataccagaaataaatgagcaataggattaattctggtaggaattgggtggcaataagactagtggcaccctggcagctttgcttaccacgagtcaaccctaaagaacttractcaggccgggcgcggtggctcacgcctgtaatctcagcactttgggaggctgaggcgggcggatcacaaggtcaggagatcgagaccatcctggctaacatggtgaaaccctgtctctgttaaaaatacaaaaaaattagccgggcgtggtggtgggcgcctgtagtcccagctacacgggaggctgaggcaggagaatggcgtgaacctgggaggaggagcttgcagtgagccaagattgcgccaccgcactccagcctgggcgacagagcgagaccctgtctcaaaaaaaaaaaaaaaaaaagaacttgactcaaactctagaatccccagttaccaacacaggtgaggcattaaagggaaatcaagagtccctaggctctttggcaaatgtagttc

SEQ ID NO: 757943 - DNA, 646 bp, Homo sapiens
cagagacgctcctcacttcccagatggcgtggcagccgggcagaggctgcaatctcggcactttgggaggccaaggcaggcggctgggaggtggaggttgtagcgagccgagatcaggccactgcactccagcctgggcaccattgagcactgagtgaacgagactctgtctgcaatcccagcacttcgggaggccgaggctggcggatcactcgcggttaggagctggagaccagcccggccaacacagcaaaaccctgtctccaccaaaaaaatacgaaaaccagtcaggcgtggcagtgcgcgctgcaatcgcaggcactcggcaggctgaggcaggagaatcaggcagggaggttgcagtgagccgagatggcagcagtacagtccagcttcagctcggcatcagaggragaccgtggaaagagagggagagggagaccgtggaaagagagggagagggagaccgtggaaagagagggagagggagaccgtggaaaggggagagggagagcgattttctgacttttaaaccttttattctccacttagtggcataaaggaatctctattatgcaaaactaatctgaaagtgaatagttatatagtggctacagaaaattttaccttttttttttttagacgg

SEQ ID NO: 757944 - DNA, 554 bp, Homo sapiens
tctgcacttccatgtttattacagcagtattcacaatagctaagactccggagcaacctaaatgtccattaacagataaatggattaagaaaatgtggtacatatacacaatggagtaccatacagctatagaaaagaacgagatcctgtcatttgcaataaaatggatggaactggggaacattatgttaagtgaaataagccaggcacagaaagacaaacattacctgttctcacttatctgtgggggctaaaaatgaamacaattgaactcatggagataggagaaggatggttgccagagaccaggaagggtagttggcggtgggggctggtgatggaaggggagatggttgatgggtacaaaaaaatagttagaaagaataaataagacctactatttgctagcacaacaaggtaactatagcaaaaaataatttaattgtacatttaaaaacaattaatagagtataattggattgtttgaaacataaaggttcaatgcttgcagtgatgaataccctatttacctgaatatgattattatgcattgc

SEQ ID NO: 757945 - DNA, 624 bp, Homo sapiens
atatgtatgatatatatatatactatatctatctatatatcctatatataatatatggttaggctttgtattcccacccaaatctcatcttgaattgtaatcaccaggtggaggtaattgaatcattggggcagcttcccccatgctgtcctcatgatagtgagtgatttctcatgagagctgatggttttataagaggctctttccccttcgctcsgcgcttctccttcctgctacctcttgaagaaggtgccttgcttccccttcaccctctgccttgattgtaagtttcctgaggcctccccagccatcctgaactgtgagtcaattaaacctctttcctttataaattacccagtctcaggctgttctttatagcagcatggaaatcgactaatactatatatatacttatatatataagttgtatgtataatatacatatatatatgagctttaacatctattaatgatggggatatggggagatggaaattttcatacttttttgtggataagagatgttaattttttaaaacttagctgatatctagtaaaatagaacgttcttacattttcagcccagcaatctcattcatgcgactccatcccttagaccctatg

SEQ ID NO: 757946 - DNA, 588 bp, Homo sapiens
aggataaataaaaatccattaaagaggtaaagacataaaaacgagaaacatggactggtttacacataacacatacaaagtctattataaaactagcatcagtatccttgaatgcaaacctttttctgagtatttaacaatcgcaccctttaaaaaatgtacaatagacattaagagacttaaacagatatataatcattttaaattaaaatagcgttaaacagtacctcaagctcaataagcattttaagtattctaatcttagtatttctctagctgacatgtaagaagcaatctatcttattgtatgcaattagctcattgtgtggataaaaaggtaaaaccattctgaaacaggaaaccaatacacttcctgtttwatcaacaaatctaaacatttattcttttcatctgtttactcttgctcttgtccaccacaatatgctattcacatgttcagtgtagttttatgacaaagaaaattttctgagttacttttgtatccccacccccttaaagaaaggaggaaaaactgtttcatacagaaggcgttaattgcatgaattagagctatcacctaagtgtggg

SEQ ID NO: 757947 - DNA, 601 bp, Homo sapiens
actctgtctcaaaacaaaaaacaaaaaacaaacaaacaaaaaagacaagtcccaagacttatccccacagcccaacataccggctgtggcagtctgtggccaaagggcctcttcaggcctaaacctgacccatccttcctcattgggcggggcttccctggaggatctccaataactccagctagaggctcagggacagaatttggatctccctgggcctgagcccctaagtgggaggggtggccatagtctctgcggaccagcagacttagcctttcttcctggtagttctgaggaatctgggcarcgcagaggagtgggtttctccacagcgaagcacaccctctccaacaaaggacaaagtgccttgttaagcgggtcctgctccccgtgccacccaactgggtgagacattccaacaggggttgtcaggcaccttatacaggagtgatcctaccggcatcaggttggtgcccctcaaagtcagaggccccagagggaggagcaggcacccatctttgctgttctccagcctccctgagtgacatctccaggcacgggagagaatcagataaatagggcctgaagtgaaccccaacag

SEQ ID NO: 757948 - DNA, 590 bp, Homo sapiens
aagtgccttgttaagcgggtcctgctccccgtgccacccaactgggtgagacattccaacaggggttgtcaggcaccttatacaggagtgatcctaccggcatcaggttggtgcccctcaaagtcagaggccccagagggaggagcaggcacccatctttgctgttctccagcctccctgagkgacatctccaggcacgggagagaatcagataaatagggcctgaagtgaaccccaacagactgcagcagccttgcagaagagggacctgactattgaaagaaaaacgaacaagcagaaagcaacaatagcatcaacaagaacaaaaaagctccccacaaaaaccctatccaagggtcagcaggctcaaagactgaaactagacaacctcacgaagatgataaagaatcaatgaaaaaatactgaaaacccaaaaggccagagtgcctcttctacaaatgatcacgatgtctctccatcaagggcacataactgaatggaggatcacatggacaaattgacagaagtaggattcagaagatgggtaacaaaaaacttcgctgagctaaaggagcatgttctaacccaat

SEQ ID NO: 757949 - DNA, 608 bp, Homo sapiens
gtacaattctatgattttttagtaaatttattatagagttgtgagactatcatcacaattcagttttagaacattttcatcaccacccaaatatttttatgcccattttcagtcaactccagctacccagggcaagtgccaagcaaccattaatctgcttcaattacacttttaagggatttgctgaccccaagattctatgaaactagaattctgagacttgggcacagatacaccttgggcccaaaatgtaagctcactccaggaaattccaaaggygtttttttttttttttttttttttctgagaacacacgccttccttgtacttgccattttgacacttagcagctttcctcattagcgcacttttcacactgagcagctttgcagacacctgttgattattttgctgttaacggagactctggtatcctagaaatactgagggtgaaaagtctgtgtcacatattataaatatcagcttctttgctaatgtaggcactttgcttccagataattcattatggatgaaatcaacagaacacaaggttttgaaaactttgaagtaccagatattttcttctgggctttccgtagaatgttatc

SEQ ID NO: 757950 - DNA, 534 bp, Homo sapiens
tatctacccatatgatagtcctctgctaaaatctgtactcaaatgtatatacactgtcacctaaacgttagtgaataacctaaactttaggttaaaaaactacttcaagtgcttctctcttggttactgtaagtgctgggtctaagtccyacccttttaggagcaaaagcttccatgaagcaaattttgcttcaggatttatttatgtgtgagtaagcaaggggagtacctctcccttccttcaccagcccttagatctttgctccatctttctttgcctttctctgtgccctaggaggctgacctctatgggcttcatcaattaaccccctatacctctggcttctggttgcattcaagtaacggaaggtatacctggagagcaatcagagcacaggaaactttttaaaagatcaaagtaattattcccctggctgtctcccagttccatactattcttctgtgatcacacttcttgtcagtggcccctcttctatggttgcagctatcactgtgcctggtagctctgttccc

SEQ ID NO: 757951 - DNA, 534 bp, Homo sapiens
tatctacccatatgatagtcctctgctaaaatctgtactcaaatgtatatacactgtcacctaaacgttagtgaataacctaaactttaggttaaaaaactacttcaagtgcttctctcttggttactgtaagtgctgggtctaagtcctacccttttaggagcaaaagcttccatgaagcaaattttgcttcaggatttatttatgtgtgagtaagcaaggggagtacctctcccttccttcaccagcccttagatctttgctccatctttctttgccyttctctgtgccctaggaggctgacctctatgggcttcatcaattaaccccctatacctctggcttctggttgcattcaagtaacggaaggtatacctggagagcaatcagagcacaggaaactttttaaaagatcaaagtaattattcccctggctgtctcccagttccatactattcttctgtgatcacacttcttgtcagtggcccctcttctatggttgcagctatcactgtgcctggtagctctgttccc

SEQ ID NO: 757952 - DNA, 636 bp, Homo sapiens
caacaattgaccaaagaaaagatgttatcggcttatggaatacactttgagattgctgttagtcttcataagagtattcttttctgttacatctgcagtttctctggtaataattgctggcatttattgagcactcagaacagggcctggcacatctgaagaatctamgtcctgttgtttgttgtaatcctcataatagtactatgctgtaggtacttttcatcatccttgttttactgataaggaaactgggagtgagagtttaagtgccatcccaagatcacacagctggtccctgcattagactgcctttctcattcacttgcaccttttctagtaggaacttgaccatgtacttttaaagtgtattaaatatggggtcaggcacagtggtttatactcctgtaatcctagtgctttggaaggttagcttgagctcaggagttcaaggctgcagtgagccatgattgcgccactgcattctagcttagccaacagagtgagaccgtgtctctcaaagaaacaaaaaacaagcatcttaaatttgggtgttgcggacatataatttaaagaggattaaatgaaactctaacctaaaaagaggattttgcaacaagttataaaaataataagcta

SEQ ID NO: 757953 - DNA, 647 bp, Homo sapiens
aatattgcatcatggcaggtgatgtactttgcctgcctaactgccatctcatccccacctcctccacaaaccttctgtttattgatacaactcccattttatttagggaacaatctgacattagctattatgctcctcttatccactttcccagaccccctgcatctaataatggccacattacccaacactggccaacaaaatgaagggaagaattctcctaggatgcttctgggaaagcttttattttcttgctgaaagagactgtaataaaaaaaaaaccgccctccccctactttttttttcttggagacagtatcttgctccgtcactcaggctgsagtgcagtagcatgatcatagctcagtgcagcctcaaactcccaggctcaagtgatcctcctgcctcagcctcccaagtagctgggaccacaggcatgtgccaccatgttgggctaattttttattttttgtagagacagggtcccactatgctgcccagaatggtctcaaattcctgggctcaagtgatcctcccacctcagcctgattacaggcatgggccaccacactcggccgggtttatatatatttttaaaagaaaagaccacccatatgttctgaggatcctggaaaacattgggatag

SEQ ID NO: 757954 - DNA, 594 bp, Homo sapiens
ccagaacagattctccctgataggcctcagaaggattccttgatcttggacttttagtctccagctagctagttttcccagcaaaatttatcacatagagaatcctttccccattgcttgtttgtatcgggtttgtcgaaaatcagatagttgtagatgtgtggtgtttattccgaggtctcatgaaacttttcataaagcattaatgatgtcaccactcttccacccaagcttcaccataaatatggtgtttgttctcgctttaatttttagcagaattcatgttgttctgatagaagctcttttcaaactgatatcttatccctgttaatgcctcaaactacatcctattgagacatgctctaacaagttagtatgagtttattttggtgccaaaattttttgaaatctatgcaaagttttttcataatatgcattttmcatgaactttctgaagaccccttgtacagataatgtaagagccccatgcatattaaataaacataggtaacaatcatgattaaaccctatatgctatcaatgagtgatacaaggaacataatttagattaggaggtcaaataaaacctctccg

SEQ ID NO: 757955 - DNA, 598 bp, Homo sapiens
acaaaatgttataattacctatgtaatctaaataaatgtttaaacaaaacctgagtcactcttgggtcttcactgccaaaataacaaagaaaagaagggaggctgggcatggtaactcatgcctataatcccagaactttgggaagccaaggcaggtggatcactggagcctgaaagttcaagactagcctgrgcaacacggtgaaactccattcctaaaagaatacaaaaattagctgggtatggttggtgtgtgcctgtagtcccagctactcgggaggccgaagtggaaggatcacctgggcccaggtaggtcgaggctgcagtgagccatgatcatgccactgcactgcagcctgagtgacagagtgaacccatttcaaaaaagaaaaaaaaaaaaaaaaaaaaaaagaggaggaggaggaagagaaagaagaggaggaggaggaacaacaacaacggttgtgccaaaaagggccatagctaggtacaacctatttgctgcacaaactgtgttggatgcacacctaaggacaaggctatttagaagtttgtcatttgaaatatagtagaaggtacagctgtcagggacatttcc

SEQ ID NO: 757956 - DNA, 573 bp, Homo sapiens
tgacagacttaaaacaagaaaagtctatgaagaaataaacaactggagaacaagaaatcttgaaaattaaaaatatgatcactgaaaaatttactgtatgggtgaaattaaaattcgatgctgtataggaccaagcttttattttattattgtttatttgagaaagrttctaactctgtcgcccaggctgcagtacagtggcatgaacacagctcactgcagcctcaaccttcctgtgctcagatgatcctcccacctcagcctgctgggaagctgggactacaggcatgcctggctaattttttattttttgtatctttagtagagatggggttccaccatgttgcccaggctggtcacaacacctgggctcaagtgatccaccagcctcagcctcccaaagcacttggattacaagcgtgagccactgtgccctgccctagaccaagtttttaaacctggaagataaattcaaagaaatctctgagaacagcaatgagaaagaccaagaaatgtaaagtacaaacaaatagatttaaaacacggagaccatgtcctaacagttgaaagctg

SEQ ID NO: 757957 - DNA, 538 bp, Homo sapiens
tacgtatgaccttagctgtatctgcaattttttatttacttaaaaaactcctaaatattacaaaacgtcaatctctacgacatttgtgtgatgggtaaataggtgtctgttatactgttttatatactttttcattggctgaaatcataaaaaatcaaataaattttcttagttatttcatggatcaccatcacaaacaattcaataactccttacaaacacatttatgtaatttaggaataattcacataacttccaaatgacattttgttatttggacttcagaacattacatacaaataaagcaatagagaaaagtacaaaatggaaagtgaaagaatgtaatgccagagagaatgtaatgtaagaatgyaatgccagagagaataccgcacagaagggttacgtgtgtcatgccaaggctccctgaactgtgacagcattgttaaaggagctgtctcaaatgggattaccaaattcaacaagcacatgagagggaccaatggaaatgcagaaatagaaatgtttttaaatcggt

SEQ ID NO: 757958 - DNA, 663 bp, Homo sapiens
tatctgttttatctacagctttagctgtgtattcaagcacctctgagccctgccctactctcagctctccttcccagatgttactactgagaccagcttggtgtctaccctttccaaccttcttctgtgcatttatgtttatgtatgcatcacactcgttgtgatttctttggaaaagtcatactgtaatctatcattctgtaacttaaaaaattcaaagtttattttaactctcagtacacacacaaaaaatagatttcaccatttactatctggatttaatatattcctttaaagtcatttcacaaataattttacagaaatgagaataaggggatagtaaaaaaaatcaacctcatgacaaattttaataagaatttaaacacagcaaatctcaaaagttttattccatattctcctggttttcaaggcatatatatctgaaatgggtaagacattctgaatgtcattgctcatcagccgtcaagcatgcatctrgaacatattcattcataaatactaaattccaaatttcaatacatttctaataggttctagagctgattatttctgattcttttcacatttgtatcaacaaaaatgcaaatacttgaagaagtttttgaaatcttttaaagctcataattttcttaaagagatggt

SEQ ID NO: 757959 - DNA, 548 bp, Homo sapiens
caagttttagagcaggaatcaaagttattaataatttaaaaagctttagggcaggaatgaaaggaagagggccaaacaggcgacttgagagatcaaatgcatgctttgacctctgacttccagggtcttgcattacttccctgattcttcccgtggggtgggctgtccacataggcagtggcctgctagcgtttgggaggggaacatgagtggtgtgtttagtggagttgtacgcatgctctcttgaggcgttctccccttaccagtcgaatgtccctagaaggtcatataccattwaaactctaccattttgcttcttaatgctcatgcttgagctcacttgcccaactcctgaggtcttattgggaagctgctgattaccagtttcaggcattttctatcttatcgggagactgcctttccctggcactagctgcacctgaccaattattattttggaaagacagttaacaaccgcctgaccatcacctgatggttgcctgacattcctggttgggggttggggagtcctctcctgccctgagcat

SEQ ID NO: 757960 - DNA, 548 bp, Homo sapiens
caagttttagagcaggaatcaaagttattaataatttaaaaagctttagggcaggaatgaaaggaagagggccaaacaggcgacttgagagatcaaatgcatgctttgacctctgacttccagggtcttgcattacttccctgattcttcccgtggggtgggctgtccacataggcagtggcctgctagcgtttgggaggggaacatgagtggtgtgtttagtggagttgtacgcatgctctcttgaggcgttctccccttaccagtcgaatgtccctagaaggtcatataccatttaaactstaccattttgcttcttaatgctcatgcttgagctcacttgcccaactcctgaggtcttattgggaagctgctgattaccagtttcaggcattttctatcttatcgggagactgcctttccctggcactagctgcacctgaccaattattattttggaaagacagttaacaaccgcctgaccatcacctgatggttgcctgacattcctggttgggggttggggagtcctctcctgccctgagcat

SEQ ID NO: 757961 - DNA, 548 bp, Homo sapiens
caagttttagagcaggaatcaaagttattaataatttaaaaagctttagggcaggaatgaaaggaagagggccaaacaggcgacttgagagatcaaatgcatgctttgacctctgacttccagggtcttgcattacttccctgattcttcccgtggggtgggctgtccacataggcagtggcctgctagcgtttgggaggggaacatgagtggtgtgtttagtggagttgtacgcatgctctcttgaggcgttctccccttaccagtcgaatgtccctagaaggtcatataccatttaaactctaccattttgcttcttaatgctcatgcttgagctcacttgcccaactcctgaggtcttattgggaagctgctgattaccagtttcaggcattttctatcttatcgggrgactgcctttccctggcactagctgcacctgaccaattattattttggaaagacagttaacaaccgcctgaccatcacctgatggttgcctgacattcctggttgggggttggggagtcctctcctgccctgagcat

SEQ ID NO: 757962 - DNA, 567 bp, Homo sapiens
agctgttttcagcattactaggaaatgaaaatgggtgtaagcgtcaaatataggtgatgcatagagactgccattggaagggcaacgttcaatgacataggaaagtggtgggaagaatggctggggggtggagagagagcaacatcccatcatggagcttgtggccacgattatgggaaacaaaatgggcaggatctggatatagaaaagcttacaggattactaaaaacagaggcagaaaggtgaacaaagatgcccgacgtagcagatggcaaaggcaagagagcagctaaagacttaggcagaaaatggtaaggaggccaacactctagaaaagggtacatcattaagatctgattttcagatgttcaaaagaaattcatatgtgctttcgtagcaactgtggaaaacrtttgtttggtggatggaaaaatgctgtgattgcaaaagtataaaaactaataatgattattaaatatatatgagatacagaaaaccattttggtttaaatttaaaattttataattctattttaaaattgaaaaactaaaatgacattgattttt

SEQ ID NO: 757963 - DNA, 610 bp, Homo sapiens
tcacagctcctgatttattttttccttttgtttaaagcccagtgtattgaactgggcagtcagcatggtatttactgttttatattgtccaggtaagaaacctggagcttattgggagcagaattacaaatataagcaatgccaaccttccctgcaccttagcattacctttaatagtgtcaaaaaaaaaaaaaaaaaaacttagaaggaggcatagttttctccacagtttttgagaaattctccacgatttttctcctgagctaagccagtgagaccacagaggataaagaggaaggcgtggaaggcaragataccagggggcagggcttggtgggactccactggcggtggggggttgaggaggaggtttccaggtgggaggtaaatgtgcctcctctagatggagatgtcaggggaaagcatgggttggggacgtagatttgccccttgtggtattaagagtaccactccccacagggacagtgaatgatgctggggccagcgcagctctgtaagtctttaaggcaaccaggaactgaacatacttgagccgatagcgaggcctgagcctatgcgatggacatggcatagcccatgcactgtggcc

SEQ ID NO: 757964 - DNA, 673 bp, Homo sapiens
accaaaatcttaggcacctccatatggacttccagaatttgctgcattgacagttgaaatcctgagcttctttgtgggctccagaatcagagatttaaaatttctcacataccttccgggagttctagctaagcatgagctgagaaaggtttccactagtgcagattctctctaatgttcagttacctgcaaaaaaggatgcttctgagccaattgggcaaacaaactgaaactccagtgctaatctaacgatacctgctggtttattttcacgatcttcatgtgaatatgtgccattttgcaaatcacagtgcccctgaaggagctgtggtacgttgctgtccmcatggcagtatgtgtgttttgctgaggttccctaattctttccaacataggcctcctcatcgtacccagcagggcagtgctcttacagaatgcagtcctctaacagatccagggtgaatggagacggaggtctccaaccactgggacttgtactttgccatagagcagtctagaaaacagatatgtttagagactagaattaagaaaacgtatactcattcagaggttggtgctggtggtggaagggatttgagaaatgaccttagcctcccagtaaaggaaaagcacaagctcttttccaggtggatcctgtagtagctgtgggtgt

SEQ ID NO: 757965 - DNA, 613 bp, Homo sapiens
atgaccttagcctcccagtaaaggaaaagcacaagctcttttccaggtggatcctgtagtagctgtgggtgtgtgtttcacgcggctggatgcggagccaggtgttcagggtttgtttttgtgagtcgactctgggactaattgggtccataatgaggtcagggttatttttctctgccagttttcgtggtctgggggccaggccctcgttytgcaggggtgaggagcacgcttagcagtgcagctggagagcctcggcaggcccctttgactgtcaagctgggtgacatctgagccccctgcagtcctgcttgaaatgcagtgcagcaggtgttcttggggcatcttttctacgcagatgttgtgctgagtgattcaaggggagacacgcagggcgttatctcagcaagcacagcctcaccggggttggacgcatgacaggacatgatgcctgccctcagagagctccagggtcatcaggctttacaggaggtggggcccagcttggaggtcaaaggtcagagaggctttagggaacagatgagcagtgaagatgatgggccttagaaagagggatgtttttgaaaatcaggattcaatggcaggaggaaca

SEQ ID NO: 757966 - DNA, 613 bp, Homo sapiens
atgaccttagcctcccagtaaaggaaaagcacaagctcttttccaggtggatcctgtagtagctgtgggtgtgtgtttcacgcggctggatgcggagccaggtgttcagggtttgtttttgtgagtcgactctgggactaattgggtccataatgaggtcagggttatttttctctgccagttttcgtggtctgggggccaggccctcgttctgcaggggtgaggagcacgcttagcagtgcagctggagagcctcggcaggcscctttgactgtcaagctgggtgacatctgagccccctgcagtcctgcttgaaatgcagtgcagcaggtgttcttggggcatcttttctacgcagatgttgtgctgagtgattcaaggggagacacgcagggcgttatctcagcaagcacagcctcaccggggttggacgcatgacaggacatgatgcctgccctcagagagctccagggtcatcaggctttacaggaggtggggcccagcttggaggtcaaaggtcagagaggctttagggaacagatgagcagtgaagatgatgggccttagaaagagggatgtttttgaaaatcaggattcaatggcaggaggaaca

SEQ ID NO: 757967 - DNA, 553 bp, Homo sapiens
acacagtcacggcagcccacatcaagaagttcaccttcgtctgcatggctctgtcactcacggtaaggacagaggcgctctctgcctcttctctctgtttggtttttgtaaaggggcaagttgctattttaaagggggaaatcttattttccacaatgtaatgtgatgctggattaattagcaatctcttcaatacactttcttcttcaaatgtgaacgattgttattcaaggaggcccttgagtctaggaataaaggacccacttcaggcatttcttgggacttctcaaatgctgcagaaaggaagaggttgcctttaattggaatartacacttgtcttgctgaaaaatttctagcccactttttaaacatcgaaagtcaactttacaaccatccctgtctcttttccaaatttaatccgcgttacttcagttttccccagtaaaatttcctttccagttatgtttgtgctgacatagcttacttacgtggccatcacgtgcccataggcattgagcccctgcgggatcccaggcccatctgtctgctgag

SEQ ID NO: 757968 - DNA, 543 bp, Homo sapiens
atgttagccaactagaatttttctagcctgaccttaagtaaaaactccttcccgtgtccccactgcctgtgatggtcatcatcatcatccctcctgtgaggttccctactttctcccactgagcaagacgcggatgtggaagcatccctctctcccatcatcccctcacgtgctgtatcgggaacacgtggctttgcacccttctgaggacaggtcagtcaatcccaagagcccattccttctggcagttgctacagstatgcacaccttaagcaccgttccccagaaatgggagtcatttgctactttcacatattgcctgctttcggcaattcaccctggtgaaatggcattgtttttccttctaaattgggaatctgagagtgtgtcctgatggaattccatgtcattccatttggggtgtactgagtcatgcaaacattaggaacactcctagagaggccccatccagctcatgggacagctcacaagtgagcaggaaaccaccgtgaggacaggtcagccacgcctccagcctccctc

SEQ ID NO: 757969 - DNA, 631 bp, Homo sapiens
aacacgctcggctaatttttgtatttttagtagagatggggtttcaccatcttggctaggttggtctcgaactcctgacctcaggtgatctgcccacctcggcctcccaaagtgctggcattacaggcatgagccactgcgcccagcctcattctttgttatggatgaataatattctattgkgtatatatgctacattttctttatcattcattcattgaaaggcacttaggttgcttccttactcttggctattgtgactagcgctatgataaacatgggagtgcaggtatcacttcaatatactgatttcctttcctttgagtgtatactcagcagtaggattgctggaccatatggtagctctatttttagttttttgagggatctccataccattttccatagtggctatactagtttatattcccaccagcagtatccaaacattctcttttctccacatcttccctagcatttgttattttttgtctttttgataatagccattgtaactggggtgagatgttatctcattgtagttttgatttgcatttcattgtagttttgatttgcatttctctgatgattagcgatgttgataattttttcatatacctgctatccattt

SEQ ID NO: 757970 - DNA, 631 bp, Homo sapiens
aacacgctcggctaatttttgtatttttagtagagatggggtttcaccatcttggctaggttggtctcgaactcctgacctcaggtgatctgcccacctcggcctcccaaagtgctggcattacaggcatgagccactgcgcccagcctcattctttgttatggatgaataatattctattgggtatatatgctacattttctttatcattcattcattgaaaggcacttaggttgcttccttactcttggctattgtgactagcgctatgataaacatgggartgcaggtatcacttcaatatactgatttcctttcctttgagtgtatactcagcagtaggattgctggaccatatggtagctctatttttagttttttgagggatctccataccattttccatagtggctatactagtttatattcccaccagcagtatccaaacattctcttttctccacatcttccctagcatttgttattttttgtctttttgataatagccattgtaactggggtgagatgttatctcattgtagttttgatttgcatttcattgtagttttgatttgcatttctctgatgattagcgatgttgataattttttcatatacctgctatccattt

SEQ ID NO: 757971 - DNA, 636 bp, Homo sapiens
aaccaaatgcatgctgtttccgtctgttttattaattgcagttctgagtcgaatttttttttttttctaagaaaaaaaaaagctgcagtccctccagttgaaggtgcagtcttcctgctccctcctgggaaatactggggaaactgcccggtccttggctgtaggtcctgccttctgacctcttcatttcacatccagatgaaatagttctaggatatcagagctgtaaggacctgctggtcccggagccccgcccctcatttcctacatgagactgaggcccagggaaggagcagaagtagccatgagctgcttttatgccctgggcacctcttgggtcctcttgtccatcactggcccctctgaagtgccaaatggctctgggggatgtgcagcaatgaagggctgtggggacaggtgactttcttgggtactgtgtaaaggtgcctgtctaagaagatgtggattcccaggcatcgcyggatagcttgtcctgtggctttccttgccatctacacactggcaactcccacatctgtatctcttgccccctcttctcttctctatgtctgacttaagtcccccaatacctactggaagtcaaacatggtgtctaatagactctgaagcctgtgt

SEQ ID NO: 757972 - DNA, 640 bp, Homo sapiens
aaagacaaaggaccaactcctgaggatccagagtgttgccattcctttcccatgtctcattctgcccttagcctagaggctggcactgacagcatgttgggaagataggagctagttcttcggaccgcccatccccatttaggggctggtcccaagtgggttgggatggtgacaggctatcaggtgctcccagcccctggggcgctgccacaaggtccttgtaggaatagtcagggcacatcgaggttgtgtggcscactcagctgcccaggcagcccccggggtccccatcttccccgtctggctcactcctgccctttcaagaggcactcggtttttgcgatttgtgacattgggctcctctgcctgtgccctgcacatgtgtgctggctgcccctctcccttccctgagtctccttcagtgctttcacaggatctgctgatctttaccctcaagggcacccattctgggctccctgtgcccatcacctggcgagagccactgggtggacttgggcttctgtgctgaagcctgacgccttgttacctttgcccacctccaccagccccagcagcacctgggatgtaagcagtgggggctgcttctgtgtccccatgaaagacacctgggcagagatgg

SEQ ID NO: 757973 - DNA, 584 bp, Homo sapiens
tgcctgtgccctgcacatgtgtgctggctgcccctctcccttccctgagtctccttcagtgctttcacaggatctgctgatctttaccctcaagggcacccattctgggctccctgtgcccatcacctggcgagagccactgggtggacttgggcttctgtgctgaagcctgacgccttgttacctttgcccacctccaccagccccagcagcacctgggatgtaagcagtgggggctgcttctgtgtccccatgaaagacacctgggcagagatgggacagggggacagcaggggtggaaaagtgggcagcgtgtttaccaagagcccctccttttcatcttcagggtatcgtggggtgaggtgagtgcctggaatcactgctctcatggtcagrgatgaggatatgcctgggatacctgaatgcagggacccacaggggctgcctcctggggtctgggcttggatcagggtctgggtcaggtctgagcagagctgagaaaggctgaggctactaggccatgtgcccagtgcatagagctcagggtcggcaactggctgcctgggctccggctgtgtgacact

SEQ ID NO: 757974 - DNA, 609 bp, Homo sapiens
cattttctttatacggttccatatttttgaaatgtgttactatgactaggtcctacacttataacacaaaaataccacacatagtaagttcaggtttgtttttgccttaagtcttcttgagggaatataaggaggttcaagaaagaggagacagaacattccccagacagaaacaaaggggaagggcccttgggccatcagggcagcatgtgctaagacacagaggctgcaagagagtgggaccagggacacactcagagtagcaagcacagagcatgactggcaggggacagccatagcaaatcctggaaacagaggtgaggtcagacgagagcagggcaaggtgggcacggtgagggattctgcccacaggctacgggaggcagtgagtgagaaggcaagaagccagctgggaagccgaaggacaaatgccttcccagacaccttwaataaaagcagagtcagggagcgcggaagcccacgccagggagagcaggaagatagttaagtgtcttacactcattgccatttacaaaatggttctccttaattttcttcaaacaaggctatgcatatattggtgtctggaaatgaaattaattagtaaat

SEQ ID NO: 757975 - DNA, 556 bp, Homo sapiens
gtgatctggaaggtggaagtgaagctgaatcttcctgctactatttctactggcaagcaataccagggaatcatgaagggcaaaaggacactccataggccaatccagtgccccatcactaactattaagatgttgagaaaagtttytgaggcctcagcagtggcttcctaatcacatcttccttatccctggattgtggctaaccagcctgaccaatatgatgaaaccccgtctccactaaaaatacaaaaattagtggggcatggtggcatgtgcctgtaatcacagttactcgggaggctgagacaggagaatctcttgaacctgggaggcagaggttgcggtgagccgcgatcgcaccactgcactccagcctgggcaacaagagtgaaactccgtctcagaaaaaaaaaaaaaaaaaaattcttaaacccagtagctccagtcttttcaataactttgttagcatctctttcctgttaaattatacagaatgtctttcctgaactttgttagatgcaggagggaaaaaaaaatagataaattaaccgatca

SEQ ID NO: 757976 - DNA, 571 bp, Homo sapiens
atgatgtaaagaaggttagattcttccgatgggtgaatgtgcatttgccctatggctcacctgcaagttttgtctctctgacatagaagcttgtcaattatggtaactcttttcagttatcatgaaagtatttcactttagatgagtttggcctggcaggggtggaataaaccatcataatttgtgggtgcttttctgaaaaaatggttttttcagaaaaaaccactagggcagcaacgtgctgaagcctggggagtgaatcgtgattgacttaaacaatacccttgccacttacccttgtgctaggataaccattggcaaakctctaacttatcaagtaaagtagagtgtgctaaagcatcttggaaaaaagcggggcttgttggtgtcaccctcatcccttcctttactgtggatgtgtcaccttttctgggagcctttctctgctctacttaaaacagactcccctctcctgctatcacaaaactacttacaacattttcttctccttagcccttagcaccaactaaggtccctgagaacagtgttgttttactctgttttagttaat

SEQ ID NO: 757977 - DNA, 612 bp, Homo sapiens
gatcaatttgtcatttttaagccacatgaattcttttcatcatttaagctcctaagtgctgtctgtattcatttgctcttccaagcaaatattttcagttcactttctaagtacctacattttgaaatcattctgggaaatactgatgagttgatttttttcgcatttccatttataaaaaccattatgtcttcccartttccctggcctgacagtaagtaagggaatcattcatttcagagaggttggtacagttttagttttagtttaaaaggtcttgtgatacaggttcatggccaacatgtggccaaagacctttatggaatttttttaattgagcccatttccatattcctagttggctatgaattgagactcagcaataagactcttgcttcaaaaatatcagcataatgacaacaattagcattggaaattcctatcttaatatgtggcaccccttctcaaccagttactcacagtagagatgtggtgcatggatatccttgtttctaagctctcctccttttggtgatcctcttcacctcccttctctcctgtcccctccatcctcctgctcctaagcctcctccattcagtctgtcagcaatc

SEQ ID NO: 757978 - DNA, 665 bp, Homo sapiens
ctatgaattgagactcagcaataagactcttgcttcaaaaatatcagcataatgacaacaattagcattggaaattcctatcttaatatgtggcaccccttctcaaccagttactcacagtagagatgtggtgcatggatatccttgtttctaagctctcctccttttggtgatcctcttcacctcccttctctcctgtcccctccatcctcctgctcctaagcctcctccattcagtctgtcagcaatccctgttgaatttggcaacaaagtgtcttctgacctcacttgttcttttcctgggtaactccagctaccctggtrttgcccacctcaggtccccacattgactgcacctggggcttcctgactggcctctccgcattcactcctcttccccaccaatccattcaccacccagtagcgacaccaaactttctggaaacatgttggctcttggaacatccccacttgaaattcattaatggattccccctcttgaaactaagaatgaaacccaaactccttacgtagcccacagggctcatgcgttatgtggcctcccagttcctctcaggccaccctcccttgctgtgtcacattagcttttttgttcttcagaaagtccacttagcacaccctctttttttttttttttttttttg

SEQ ID NO: 757979 - DNA, 484 bp, Homo sapiens
ggaaatttaatgttgatataacattgccaaatctgcagtttatatttaaatttgtcagttgttctggtaatgtcctttttagttatttctcccatgtccagaatccagtctagactcatatactgcatttagttttcatgttgagtcttttattgtgaaacaattcttmaacctttctttgtctttcttgtttggacatctgtgaagagtacaagccagttacagttactctgagggatgttcttcaattttttttctgatattagattttttaaaagcatatttttacttagctacttactgtacgctctggcacgttatgtctaggaaatgtatctgtcttgctcatttgtgtttccccatcattagtactgtgcctgggtacacagtaagtactcaataattgatttttgagtagacacataccaatatgtggcattcatttgatgcatattatttaatttttaatccttgctacaacttc

SEQ ID NO: 757980 - DNA, 484 bp, Homo sapiens
ggaaatttaatgttgatataacattgccaaatctgcagtttatatttaaatttgtcagttgttctggtaatgtcctttttagttatttctcccatgtccagaatccagtctagactcatatactgcatttagttttcatgttgagtcttttattgtgaaacaattcttaaacctttctttrtctttcttgtttggacatctgtgaagagtacaagccagttacagttactctgagggatgttcttcaattttttttctgatattagattttttaaaagcatatttttacttagctacttactgtacgctctggcacgttatgtctaggaaatgtatctgtcttgctcatttgtgtttccccatcattagtactgtgcctgggtacacagtaagtactcaataattgatttttgagtagacacataccaatatgtggcattcatttgatgcatattatttaatttttaatccttgctacaacttc

SEQ ID NO: 757981 - DNA, 484 bp, Homo sapiens
ggaaatttaatgttgatataacattgccaaatctgcagtttatatttaaatttgtcagttgttctggtaatgtcctttttagttatttctcccatgtccagaatccagtctagactcatatactgcatttagttttcatgttgagtcttttattgtgaaacaattcttaaacctttctttgtctttcttgtttggacatctgtgaagagtacaagccagttacagttactctgagggatgttcttcarttttttttctgatattagattttttaaaagcatatttttacttagctacttactgtacgctctggcacgttatgtctaggaaatgtatctgtcttgctcatttgtgtttccccatcattagtactgtgcctgggtacacagtaagtactcaataattgatttttgagtagacacataccaatatgtggcattcatttgatgcatattatttaatttttaatccttgctacaacttc

SEQ ID NO: 757982 - DNA, 513 bp, Homo sapiens
tgtaaacctaagtgctaacgtatttttatctgctaaatacatgaatatatgcatcttcctatgttcagtagcttctgaggatatttcacagtctcatatcatttgtctacaaatatatttataataagaatagaaattattacctttgaacatacaacaaagaattatgttacttcaagatctgtgaaattaggctgggcgcagtggctcatgcctataatcccagcactttgggaggtygaggcaggtggatcacctgaggtcaggagttcgagaccagcctggccaacatggtgaaaccccatctctactaaaaatacaaaaaaattagcagggcatggtggcaggcacctgtaaacccagttactcaggaggcggaggcaggagaatcgcttgaacctgggaggcagaggttgcagtgagccaagattgtgtcactgcacaccagcctgggcgacagagtgagactccgtctcagaaaaaaaaaaaaaaaaaaaaaatctgagaaattgg

SEQ ID NO: 757983 - DNA, 513 bp, Homo sapiens
tgtaaacctaagtgctaacgtatttttatctgctaaatacatgaatatatgcatcttcctatgttcagtagcttctgaggatatttcacagtctcatatcatttgtctacaaatatatttataataagaatagaaattattacctttgaacatacaacaaagaattatgttacttcaagatctgtgaaattaggctgggcgcagtggctcatgcctataatcccagcactttgggaggttgaggcaggtggatcacctgaggtcaggagttcgagaccagcctsgccaacatggtgaaaccccatctctactaaaaatacaaaaaaattagcagggcatggtggcaggcacctgtaaacccagttactcaggaggcggaggcaggagaatcgcttgaacctgggaggcagaggttgcagtgagccaagattgtgtcactgcacaccagcctgggcgacagagtgagactccgtctcagaaaaaaaaaaaaaaaaaaaaaatctgagaaattgg

SEQ ID NO: 757984 - DNA, 607 bp, Homo sapiens
tctatttttataaaagttgtgtaattttgaattatgcgtttaaatccatgtttcattttgagctaatttttgtataaggtgttagatttatattgaagctaaacatgtttttgtgtatacctgcctatttgtttcagcarttgttcttcaatgaattttgcatctttgttaaaaattggttaggcatgtttgtgtgggtctatctctggattcagcttcattgatctgtgtggccatccttctgccaataccaaacaaccttggttgtcatagctatatagaaagtcttgaaattgagtaaacctgttcctcccactttttctttttcaaaattattttagctattctacctactttgccttccatatatatttcaaaataattgtatgtatacctataaaagtcttgctaagattttcttagcaattggattaaatctgtatatcaattttggcagaattggcatccttactgtgttcttccaaaccatgaacatggtatgtacctccacttatttttctctttttttatcattgttttgcagtttttagttttagtagtcaagtcctgtatatgtcttgttagaattagctggcttcctctgaca

SEQ ID NO: 757985 - DNA, 607 bp, Homo sapiens
tctatttttataaaagttgtgtaattttgaattatgcgtttaaatccatgtttcattttgagctaatttttgtataaggtgttagatttatattgaagctaaacatgtttttgtgtatacctgcctatttgtttcagcaattgttcttcaatgaattttgcatctttgttaaaaattggttaggcatgtttgtgtgggtctrtctctggattcagcttcattgatctgtgtggccatccttctgccaataccaaacaaccttggttgtcatagctatatagaaagtcttgaaattgagtaaacctgttcctcccactttttctttttcaaaattattttagctattctacctactttgccttccatatatatttcaaaataattgtatgtatacctataaaagtcttgctaagattttcttagcaattggattaaatctgtatatcaattttggcagaattggcatccttactgtgttcttccaaaccatgaacatggtatgtacctccacttatttttctctttttttatcattgttttgcagtttttagttttagtagtcaagtcctgtatatgtcttgttagaattagctggcttcctctgaca

SEQ ID NO: 757986 - DNA, 607 bp, Homo sapiens
tctatttttataaaagttgtgtaattttgaattatgcgtttaaatccatgtttcattttgagctaatttttgtataaggtgttagatttatattgaagctaaacatgtttttgtgtatacctgcctatttgtttcagcaattgttcttcaatgaattttgcatctttgttaaaaattggttaggcatgtttgtgtgggtctatctstggattcagcttcattgatctgtgtggccatccttctgccaataccaaacaaccttggttgtcatagctatatagaaagtcttgaaattgagtaaacctgttcctcccactttttctttttcaaaattattttagctattctacctactttgccttccatatatatttcaaaataattgtatgtatacctataaaagtcttgctaagattttcttagcaattggattaaatctgtatatcaattttggcagaattggcatccttactgtgttcttccaaaccatgaacatggtatgtacctccacttatttttctctttttttatcattgttttgcagtttttagttttagtagtcaagtcctgtatatgtcttgttagaattagctggcttcctctgaca

SEQ ID NO: 757987 - DNA, 731 bp, Homo sapiens
agttacatatgcatatgtatacatgtgacatgctggtgtgctgcacccactaactcgtcatctagcaacagttttttaaaatgccattttcttttaaatgactctgccttgcttccttgaagataaagttttagaaataaataaaaatagtgacttaagaaaaataattttcartgacaccattctgctgtttctttaaaaagaccgattaatttctactcctggagaacccctttcttttcgtttatcgtctcaatgaaagctacttgattctataaaaggaggaaaaggaataggagaaaacaaagtcatgtaacttgatctattcccatcagatactccgctatttcctaccaagatactggtgatcaccttggcaaagtcacatcatccctctggatcgatctctatttttgtttctgtaaaatgaaggaactagaacaaatgaagccctatgacatttcccaccctaacatagaacaacacaagtcatacttgtctcagttaaatcatggactagaagacctatttttactgtttgaggcctttatgagcccttgagaccatgatgaccattgagagcattacaaaagaattgtgtatccttgaaggttttaagcttaaatttaatttgaaataaagttttaaatgtgtataggtaatacagatttctacaaatgttttgtcatgaatgaaagaaacttttaatctaattctctaggcacaacctt

SEQ ID NO: 757988 - DNA, 731 bp, Homo sapiens
agttacatatgcatatgtatacatgtgacatgctggtgtgctgcacccactaactcgtcatctagcaacagttttttaaaatgccattttcttttaaatgactctgccttgcttccttgaagataaagttttagaaataaataaaaatagtgacttaagaaaaataattttcagtgacaccattctgctgtttctttaaaaagaccgattaatttctactcctggagaacccctttcttttcgtttatcgtctcaatgaaagctacttgattctataaaaggaggaaaaggaataggagaaaacaaagtcatgtaacttgatctattcccatcagatactccgctatttcctaccaagatacyggtgatcaccttggcaaagtcacatcatccctctggatcgatctctatttttgtttctgtaaaatgaaggaactagaacaaatgaagccctatgacatttcccaccctaacatagaacaacacaagtcatacttgtctcagttaaatcatggactagaagacctatttttactgtttgaggcctttatgagcccttgagaccatgatgaccattgagagcattacaaaagaattgtgtatccttgaaggttttaagcttaaatttaatttgaaataaagttttaaatgtgtataggtaatacagatttctacaaatgttttgtcatgaatgaaagaaacttttaatctaattctctaggcacaacctt

SEQ ID NO: 757989 - DNA, 564 bp, Homo sapiens
tccatggcatccaaatcatccatgcagaattttgtccaacataacctcagatgacaggaaataatttcaaatgttgagttttctcatcaaaggttttttagaactatattctagggaatttttagtattaacaatcaatcttgtgtaatatttggaatatgtctccaagttacaaaggttatagttaattcacaaatggccaatactattggctctattcttttcatggtgtcmcagatcacaagcagtcttcagggtggcaattttcaaaattccatagttactccacttcagcctaagaaacttcaatattatgtttataaacttgttctggtcatcaattgttatttaacaactcaaaaactaaatgagatttttttaaagaaaacacccattttattacgctcacagcttctgtgagaatcaggaattaagacagcacatatcagggatggcttttctctgtgttatgatgcttggggcctcagatgaaaagactcatacagttgggggtgactcaaatggatgtggaaggaaccccagagtctgggttgaaaaggtttg

SEQ ID NO: 757990 - DNA, 586 bp, Homo sapiens
aactaattgatttgggatatttaattactaataaaagaacctttggatgaatgtaggctaccaaaaggacagagttgactgagtcatattaattttgacaaatttatacaatcaacatcttgcagtgttccacagttagaaaacaaacttgagacaaacttgaaaagctgaaaaataaacttcagaaaaaaagatgcaaygagagattttgagtgagaattattaataaatcactattacaaaaataaaaagcatctgtgtttttagcttataaactttaactggttagggcatgccagtgaatattaaagaagagaatgcacttgtatttattaagtggggtatcatttcacaatgctcacctctttggggaaagtctaataccattgaccatggcacaaagaaaacatccttgaggaaggtgggatcatataaaaggatacatagaatcacctgtagagatttttaatttatcttcccctactccaggattccaggattctgaatcagcccgtcatctcagagtgagaatcatgttctagaggccccagtattactgagaggggggtgctatatttgacatatt

SEQ ID NO: 757991 - DNA, 631 bp, Homo sapiens
aacaataagccataaacagtttttttcttttaaaaaaatttgtatttatttatttaaaaaaaatagtttcaacttttagattcagggtttacatgtgcaggtttgatacctgggtatattgtgcaatgctgaggtttggggtacaaatgatcttgccacccaggtagtgagcatgctactcaacagtcggtttttcaacccttgtctccttctctccctgccctcccttccccctctaaacaattattaaacatgtatatatatatttttttaacttatatgaacattccgttctcaatttagtcttcatctcatggctaagtttctgcttcacatttctacattctctccttcaaattctttattttcaaaagtaacctccaatctccagcttttattaccaaagactttagtcatttacagaatcattttaaaaaatgtatcyctcaaaaaagttcattgtgtcattagtagatataatatggtgaatatcacctccatgatacaagaatttttaagcatagtatatatatatgttgaattaaaaaatgcttaatatttttataattaattttaaaaaattgatttatagtgaattaaattttattgaacagtacaaatgctaactgat

SEQ ID NO: 757992 - DNA, 576 bp, Homo sapiens
cacttaaaaataagtggacctatttctttatccaggacttaaattgtgctttaaggggatggggccactgatttaaattacaacatgtgagtagataatgcttgttgttagaaaataagatgcttatctttaaagttctaagtgaacatttgtgggaaattattaaaataggaaattaatgtgtttttaattctaggaaagggccattttcaatgtcagcatacaattcagaatttagacagttagtgacactaaaaataaagtaccaagaatagtaaagtaacaaacagctttatcttatttgccttagcttgctttctttctgaaggtgctgctgagagcttggcactctgaaacccattctgtascagacagaaccagcagtaaagcaaaaggagacatagagcaaaggaaggtacctgcctacagtggggttttcctacgtggctggcttgggtctgactatttcatgggacagaagaagaaaagcaatagggccatgtggaggagtcccagttgacttatcactgatgtgcacttattgccttcacatctaaaaaagggcccagaatcctt

SEQ ID NO: 757993 - DNA, 624 bp, Homo sapiens
ttccctaataggcacacctcagtgaagaggggttattatagatggagacaaataattactatgtattgcgtcgttcgtctgtacaagcattattgctacatggttttgttttgttttttgagacagaatcttgctctgtcacccaggctggagtgcagtggtgtaatcttggctcattgcaacctccgcttctcaggttcaagcgattctcctgcctcagccttccaagtagcagggactacaagcacctaccaccgcacacagctaattttgtatttttagtagagacagggtttcaccatgttggccaggctggtctcgaactcatgacctcaagtgatccacccatctcagcctcccagrgtgctgggattgcaggcatgagccactgcacctagcctgctacatgttttttatattcatcttatttagactttataacttggtgaagtaattataaactacgttcacttcacagatgagagaattggccttagagaggttaagtaacttttctaaggcccctctcttagtcagtggcaaagtttgaatttgaactgatttatccagatgtaaaatccttagttccacatgcattgcactcatttgccagtcatttcatga

SEQ ID NO: 757994 - DNA, 663 bp, Homo sapiens
attcaaggaatcctactacctggatccaaactcttttgtcacggctcactagttatgaaactgggaatcctctacaaacctcatttcttaatctgcaaaatgaagataacagtctcttccttctagagttgtggtattacattattaatacccacaaggaacttagattagtgtatggcccatattaagtgcccaattttagccattattattactatacagttgacgatgaatacttaactttctttgccatgcatgtagatttctatacttagttgtgatagggctaaaaaaaaaagtttttcctttgtgttacaaaacatatggtaggttgagcatcttaaggtatcgttctgcagtagaacagactataaggtattcacataattcttttacaacaagctatttccaagagctcaataatcatccaggtccaatttttggcaaagctatcaagctctggtgatgtacttctctgctgggaaagcccataaaacacccaytgcttctcttccaagttgcactcctctaaaggatcaaaagtctgagtcttctcactaagaaaaggtattggccagaactaagtaaacactcagaaattattgtaaaggtctaatttaaacaagaacatccagattttgcttatagctcagaatcaaaaca

SEQ ID NO: 757995 - DNA, 430 bp, Homo sapiens
acatttctttatctagtctatcactgatgggcatttgggttggttgcaattctttgctattgtgactagtgctgcaataaacatacgtgtgcgtgtgtctttatagtagaatgatttataatcctttgggtatatacccagtaatgggatggctgggtcaaatggtatttctggttctagatccttgaggaatygccacactgtcttccacaatggttgaactgatttacactcccaccaacagtgtaaaatcgttcctatgtctccacatcctctccagcatctgttgtttcctgactttttaatgattgtcattctaactggtgtgagatggtatctcactgagggtttgatttgcatttctctagtgaccagtgatgatgagcttttgttcatgtatttttcagccacataaatgtcttcttctgag

SEQ ID NO: 757996 - DNA, 612 bp, Homo sapiens
atactttcagtaagtcttatcactggcttgctgtcaataaatacatgggtaaatctctgtttgaggcttttggctctgaaggctgtgagacccctgatttcccactccacactctatatttctgtgtgtgtgtctttacttcctctagtgccactgggttagggtttccatgacccagctggtcttggcagtaaatattgaaaaggaatagatacagttkccattatttacagatataatttccaaaaaatttccagagaataaatggaaaaactaacagaaacaaaacaagaatgtagtaaggtatgtggataagagatttgtatgtaaaaatcagtagctttgcaatgtgccagcagtaatctgctcagacatcagtaaatatctcattcgcatttcaaacaaaaaatttaaaatgccttgaaataatgtaaccagaaatacgaaaagatgatacgaaaacgtcgctgctgaaggacatgaaagaatgtaatactagattctgagatgcaatttttttcatttgttcttcctgaaaaaccgttaggttgatgtgcattacagtgttacgattatgtatgagtctaaggaaaatcagatgaaatgtccaaa

SEQ ID NO: 757997 - DNA, 644 bp, Homo sapiens
atagcattactaatttgccatgggggtcttgcaatgaaatacagatttttaatcccatggttttttgttatgtggtcttggactatgctggggtccagtgggacttttatgaatcataaataatccaggctgggccaaatcacactgaggttagcgatccataccagatgtgatgccatccgctggtccaaatgtggctcttgtctaacttaggcacatagattatttccccagtgagagagttctgcttcccatatcaatgcatgtatgagcacagtcaggggagggctccagygtgccatgaatatgtagacatagactgccgtgtactgaatctgcagctggtaaggctgtgatttgctttgcctgcacatctcttcccaaagagtgttttaaaccatctcagtgagacttaaactaaatgaagcagccttgcctctttgctagaggccaaattggctgctgtaatcctgctcctcagaaggcttactgcctgctgatggctttcacagatgggtcaggatgagggtccccaagggctccagagtaagtcacaactttgacataattaccatattttggaaatttggattttaatgccttgagtgcttataaaggttttgcctttccatcaaatgctcctt

SEQ ID NO: 757998 - DNA, 626 bp, Homo sapiens
ttatgttcaaagcagtcactatgcttcctgctttacacaggcagcagggcaggtttttcttgtcctccctgaactctcctttcctaaggcttacaaataatgtagagagaaagtcattgggagaatgaggaatcayaaaggtgggaaagaaagaaaagctcttttagcacaataacgtacaggggctctgcaggcaggaggcaaactggcacagaggaaagcctcattatcttttagatactttaaactccatgcagagacacagccaggtttaacaccaccaggagtggctggggagggaggtgggtgggaggacggggcttggaggaggtgggacctatacttttatatgggagggagggtggatacataacagcacgctcacctttaactaccttctctgtgtgcctttcaggcatgcttttagtctgcttcctctaacatctttctacatagtcttgattgacacggcaccacttctaaggccaaactatggaaagggtttcttcctatcccttccctaccttctcactcattttctcaagttccctcttgatcctaaaagaaacaaggcagaatcactggccacctatgcttacagttggggttgggacaaaaagaatatg

SEQ ID NO: 757999 - DNA, 658 bp, Homo sapiens
gaatatctccaaaggttagtaattttaccttgaccataactatgttttagcacagaataagttgcaattagattcatcatccagaacactcaactctcacttcaaactgtcgcaggaaggatgaagggtagataccaagtgtgaytgcctagtttttggctttccaaagcattgtctcataagtggtaaaatagaacatccagtactacccagagacaggggtgaattagttggatttgagccttgtaaagctgtaaaatatctcttttgggagtgtataaaattctttatttggcttttattttagtgactattactcatccatcaggtgtcagattaaatgtatctcctcaaagaactactttggctggcccctaatacaagattaggtcctcagttacatgctttgtagcaaaccctgcaatttttgttattaacacttataaaacttgtaattagatacttattggtataattatttatttaatgtttggcttccctactttcctttaaggcccaggagggcaggaatcttgcatgctttcttgtttcggaatcctcccagcacctagcatagtgcctgacacatggccagcacccagcaaacatctgttaagagataggccaacggcaggggtcctctgtagaaccagaaatg

SEQ ID NO: 758000 - DNA, 607 bp, Homo sapiens
gctactcgggaggctgaggtgggaggatcccacgagcctgagaggtggaggctacagtgagcagtgacgtcaccactgcacttccctgggcaatacagtgagaacctgtctggaaaaaaaaaagaaatatttatttgaaacgaagtccctgtctggggataaataaaagacataattaattaatttgaaacagtcttgctctgttgcccaggctagagtgcaatggcaagatctcggctcactgcaacctccgcctcctgggttcaagtgattctcctgcctcagcctcctgagtgcctgggattacaggcgcccgccaccatgcctgactaatttttgtatttttagtaaagatggggtttcaccatgttggccaggctggtctcgaactcttggcctcagtgatccaccrgcctccgcctcccaaagtgctgggatgacaggcgtgagccaccgcgcctggactcctgtgcttcataagcagttttaaccaatcctttgtttccagcttcagggtcaccctcttccccctttgctagaagcatttgtgagcttctaagggtttgctgcctgcttcagcttttccgtttcccaccatcggcccagg

SEQ ID NO: 758001 - DNA, 520 bp, Homo sapiens
cagtggcatgtgaaatgtattgatactactgagaattattttatgctaatagaaaaagcaaacgacagtcttttatttgtaaacataacactgaaagaacacttgaacttttctggaaagcaaatctttagtcatttgttgaagctatatgcctttcccatcctttagrtggcagtaactgcagatggcccataataaaatgaactttttaagtgaaatattttaaacatttaatacatttatatttttaaaaatgatttcatgatgttaataagatggtggcattgctacttcataatttcaaattctctaattaaaaagtctagctacctgacactgggaggtgtgtaaatgcaggctttaacataatactttttatcatccaacagtgattttaacctctttttgtttaccattccctttactatgtgatgaaatacagactctttccccagaagagcacatgtttgcatagacataatagcactcttccatagaatccctagaggatcaggctacc

SEQ ID NO: 758002 - DNA, 467 bp, Homo sapiens
ccagggatcagacacatagttttgtttttgtctgcaatatcccaatatcccaatgtaactcaaaatcactttcccccaatctaacagtgactttataacttaagttcatcaaatttaagtggattgctcaacaaacccatcataaaatagttctatataccatggttacatttccaagaataatcaaactttgtgcacacagggatataacagttctctctcaaaggagctacaatttgagtgttaaattcataaaaaggttttaaygcaacatgagatgttccagattttaatagaaaaaggcagatttccgaaagatcatatccttaaatacatgggttcataatctaagaaaactggattgatatgatctacaacagattctgtgaagcttactttcattgattacaactatataacatattacagtatccccttcagtagttttcacactgtgctccacagag

SEQ ID NO: 758003 - DNA, 609 bp, Homo sapiens
catggaccaaattagtgcccttataaaaaaggtccaaggtggatcacctgaggtcaggggttcaagaccagcctggccaacatggtgaaaccccatctctactaaaaatacaaaaattagctgggcatgatggtgggtgtctgtaatcccagctactcaggaggctgaggcaggggaatcacttgagcctgggggtggaggatgcagtgagccaagatcatgccattgcactccagcctgggcgacaagagcaagacwctatctcaaaaaaaaaaaaaaaatggcccaagagagactcctggtactttccaccatgtgaggacacagtgagaaggtgtcatctataaaccagaagtgggtcctcaccagacaccaaatctgcccatgccttcacgttcatcttgggcttcccaacctccagaactgtaagaaataaagttctactttctgtaagccacctagttgatagtattttgttacagtatcccaaaccgaccaaggcatatacccacttcgatgatatgccatgatggtagccaatgctagcacagacttaaggcttaataaaaatattatcatgtcacaattctgacctcagtaatagtacca

SEQ ID NO: 758004 - DNA, 557 bp, Homo sapiens
tctttgctttgactctcaaatctcaactgtcagcccaaatttgctccctcatttaaaactcccttcccctggcgggggatggtggctcatacctgtaatgccagcactttgggaggccgaggtgggcagatcacttgaggtcaggagttcaagaccagtctggccaacatggtgaaaccctgtgtctactaaaaacacaaaaattagccaggcgtggtggtgcacacctgtaatcccagctactcaggaggctgaggcaggagaatcacttgaacccaagaggcggaggttgcagtgagcagagatcccaccagtgcactctagcctggatgacagagcaagactctgtcgaaatgaaatgaaatgaaatggaacaaaacgaaacgaaaygaaacaaaactaccttctctcatccttgagtccaacatctgtgggcagccttcatgaccatctccaactagatttgaactgtatcaagctccatttcctccccagtaggacacacgttcctcttccatgagctcactacatcatcaccctctttcttaagctcacct

SEQ ID NO: 758005 - DNA, 626 bp, Homo sapiens
caacaaccaaaaagatgaatgtaaagcaatgagaaaagttcctgaaaggtgctgaacatcattgatcatcagagagatgcaaatcaaaactacagtgagatatcgtcttaccccagttaaaatggcttttatccaaaagacaggcaataacaagtgttgatgaggatgtagagaaaagggaaccttygtacactgttgtgggaatatgaattagtacaaccactatggagaacaatttggaggtcccttaaaaaactaaaaatggagctaccatatggtccagcaatccaactgctaggtatattaccaaaagaaaggaaattagtatatcgaggaagtatctgcaatactcctatatgtgttgaagcactattcacagtagccaagatttggaagcaacctttgttgctgatgaacctttgttcatcagcagatgaatggataagggaaatgtggtacttacacagaattgacttatacagacaaaaaaaatgagatcttattatttgcaataacatggatagaactgaaggtcattatgttaagtgaaataagccagacacagaaagacaaacttcacatattctcacttatttgtgggtgctaaaaatgaaaacaatccaact

SEQ ID NO: 758006 - DNA, 626 bp, Homo sapiens
caacaaccaaaaagatgaatgtaaagcaatgagaaaagttcctgaaaggtgctgaacatcattgatcatcagagagatgcaaatcaaaactacagtgagatatcgtcttaccccagttaaaatggcttttatccaaaagacaggcaataacaagtgttgatgaggatgtagagaaaagggaaccttcgtacactgttgtgggaatatgaattagtacaaccactatggagaacaatttggaggtcccttaaaaaactaaaaatggagctaccatatggtccagcaatccaactgctaggtatattaccaaaagaaaggaaattagtatatcgaggaagtatctgcaatactcctatatgtgttgaagcactattcacagtagccaagatttggaagcaacctttgttgcygatgaacctttgttcatcagcagatgaatggataagggaaatgtggtacttacacagaattgacttatacagacaaaaaaaatgagatcttattatttgcaataacatggatagaactgaaggtcattatgttaagtgaaataagccagacacagaaagacaaacttcacatattctcacttatttgtgggtgctaaaaatgaaaacaatccaact

SEQ ID NO: 758007 - DNA, 680 bp, Homo sapiens
tctggctatgctgagagagaatatgaactcctccacccagggttgagaaagaggactttggttggctcctgcttccagcatgtcctagctctttaatcttagtttttttttttatctctccaagcctaatttttctcaaatataacgtttaaataatctcattatatattcatgagttgttgtgaggattgcatgagataattatccaaggcatctagcacagtgtctggcacattagtgctccataaatattaactgctcttatagatgtaagtttgattctaaatacagtcttcatttacctccctatagtttggcttgtattcttctaatgggatgaatcaacagaaggctaagtggtttttccaacatctttaatgagttaaaagcacttttggcgttagaactcaggtttcaaaccatctatgccatgggccaggagccagaaattatttctggccacagttcagattctaggagaaaaaccggagtgactgcagtcttaacatcctttgttgaagtcaagaactstacactgatgctgatgctgacatttgtatcacttatgactcataggcacggacaggggtgaggatggtccagttaaattcagatggccagatccagctgaggaaggcaaacctgaaattagatcttttccatctagggtaaaagtgggg

SEQ ID NO: 758008 - DNA, 612 bp, Homo sapiens
attccctagcttcaggggtaggcttcaaagtcccttgggagcatcctatttgccaaggtaaaaccccaaagtaatcttatttttggtattagtgtttggtgggggaaaagctgtggattaaaataaactttcaaaagctccagwgactacttccaagaaagtgttttgttttgtctgagacagggtctcactttatcacccaggctagtgtttaggggcgtgatcacggctcactgcagccttgacttcctgagttcaaacattcctcccacctcagtctcctgaatagctgggactacagacaagcaccactgcgcctagctaattttttgtacagatgacgtctggctatgttgcccaggctgctctcgaactcctgggctcaagcagtcctcccaccttagtctcctaaagtgctgagattacaggtatgagccactgcactgagccccaatgaagttttaaacatgtatcatatctctgattgtcttgctcttaccaatccacaattagctgggtaccagtcatagctgaagaagaaaatgaggtagtcttggcttgtacattcagttttaactgtccaaagactcttcaaagcatatactaaaaagt

SEQ ID NO: 758009 - DNA, 658 bp, Homo sapiens
atggaagagctacctaggattgtcttaatttaacttcttttatagttcttttttttttttttttttttttttagacagggtctcactctgtcacccaggctggagtgcagtggcataatcttggcttatagcagccttgacctcctgggcccagttgatcctcccacctcagcctctcagctagctgggactacaggtgcatgccaccatgcctgactaattttttatattttttgtagtgacagggtttcaccatgttgcccaggctggtcttgacctcctaggctcaagtgatccacccatctcggcctcccaaagtgttgagattacaggcatgagccactgcaccctgcccaattttacttcttaagcatttttctatctcattccaatagctttttaatttttaagttacagataaaagatctggttttcctcgccagtaactrctataaagctttgggcaacttatgtaactgctctaaccctcaattttctcatctgttaaaaaagagaattagattaaagaaattctaatgttcctttcagcatgatgttctcttagtcaagaggtaaaacagctcaggagaaagatctgtgttgccactgagcttgtctgtgttcagcagtacaataagaggaatgcctccttaacatg

SEQ ID NO: 758010 - DNA, 645 bp, Homo sapiens
cagacatatctcagggagaccaaacaaatcttcagaagcaacccgcatgtggagaaaccatgttgcagagtttgaaacctcttaagatggagtaagcaaaatcatcctcctagctcagctgcctgggaaacttgagcccctggcacctgaacatcaccacggctccaagcaatgacaccatcttttgttctctggtttatttttctgcctaactccttctgtcacctgcctcttccctagggactgagctaatagaagattggtacctctctcagcaagtccatctggttcattgaaatttatctcacaaagagtagcaatttgaaagatgggaagagtggcacaaagtggtttagtttctataagtgccccccccccccgccaactttgtgggggaaaaaaaaagcaacagcttccctttcactgcagcagcaacctgtaaggtaatggatcrtttcagggcattcagatctggcctacattggcgctgatatttatccggcttattctggtattttcttcaggttaaacttgtactacttcagtgtcgcactgacagtgactttctttcttaatgttcacaacctggagggagtgaacaaggcatatacaaaaggtaacaacacattcacaatataaacaaag

SEQ ID NO: 758011 - DNA, 652 bp, Homo sapiens
ggtttccaccttttatacattggttacttacattagtcactcatttttctagcgggctttgctctttttctgttgttgatttgtaagagttccctgtatatttttggttgtagccataacaaactctcctccttttgttttgtttttgtttttgttttttttgagayggagtctcgctctgtcacccaagctggagggcagtggtgcaatctcagctcactgcaacctccacctcctcagttcaagcaactctcccacctcaatctcccaagtagctgggattacaggcatccgccaccatgcctggctaatttttagtagagatggggtttcatcatattggccaagctggtctcgaactcctgacctcaagagatccacccaccttggcctcccaaagtgctggattacaggcatgagccaccacacctgaccttctcccaattttttatctgtcaattcactttgtttatttggcctttgttgaacagcaagacttaatttggatgtcatctaagacattatttataattatatgatttgcacttttcaaggtttgtttgaaaagcctctctccatcccaaggtcacaaagacattcttctatctcgtcttctatttattctatggcttaacctttcacaatcaggtct

SEQ ID NO: 758012 - DNA, 584 bp, Homo sapiens
ttgttgatttgtaagagttccctgtatatttttggttgtagccataacaaactctcctccttttgttttgtttttgtttttgttttttttgagacggagtctcgctctgtcacccaagctggagggcagtggtgcaatctcagctcactgcaacctccacctcctcagttcaagcaactctcccacctcaatctcccaagtagctgggattacaggcatccgccaccatgcctggctaatttttagtagagatggggtttcatcatattggccaagctggtctcgaactcctgacctcaagagatccacccaccttggcctcccaaagtgctggattacaggcatgagccaccacacctgaccttctcccaattttttatctgtcaattcactttgtttatttggcctttgttgaacagcaaracttaatttggatgtcatctaagacattatttataattatatgatttgcacttttcaaggtttgtttgaaaagcctctctccatcccaaggtcacaaagacattcttctatctcgtcttctatttattctatggcttaacctttcacaatcaggtctttaa

SEQ ID NO: 758013 - DNA, 672 bp, Homo sapiens
ccctttttttaatgccactgttagttggatattctgttacttgcagccaaaagcatccttatgtgaaatacttagtagtagagaagattaaaagaaatcactaaaacgatccttttgagttgctatatgtgttgattatccaatctattcctctcttattctktttgtagcaatccatttcactgtagcactgatatcataacttcccattgaagtcagtgctgctttagttgtataaaggttttatttacaaaagggctgggctagtagaaacatggaaaaagagggacttcaattcagggccccatactgctgttttcctgctcttttggcattttgattataataaagacaatattagtaacttcttcactaggaggtaaagcttgagagttcctaactttataaaactctcatcaatgtttgaagctgctttcttaatgaaatgctcctagcatttgacagctttatttttttcattgacatttgcagcttttaaaatagatgaatatttaatatcatgtttaataggtcagattctttgaagaaaatttccattaattagttcccattttctaaagaattgatggtcactcagtattgttggaattcttaaaaaggttttaatcataaatttatttttaagtctggcgtatggaaactagcaaggtt

SEQ ID NO: 758014 - DNA, 662 bp, Homo sapiens
tatgcttatagaataacttatccccacacatttaaacaaaagatacatgctagacttggctacttctgaggatgttgcgcagtctcttttttaaaaattggtaacatttgcttggacaagggaccaagctagaaaacattcttccagtgtcacaggaaaccaaaataatggcagtamcaatagttaaccaaattgttaactgattggtttagacagcatttccactctgaagatgtagaaaagcaaaacagcccccaggataaagctataaataaaatttttcccggagttttctgccctttttttgcatagcaaaaccagaaataagtaatgttaaaagtgaaggtccactataatcataacttccagaaaaacaaaaaaaaaaacccactattaaacagccaagtgcatattctttctttccattttttctaagctatgctaactggattattcttgttttacaaaaatggggtcatgctatgcatattattttgtagttgtctttttgtgttttatttttcaagtttctgcttaaatcaactatgctttaaaaaaaaaaagtcctacttaaacctgcttgcaaccatgttttaaacaactgtaccacaaagaagaaatattttctttccttggtggcttcagattgtcaccaaacgtca

SEQ ID NO: 758015 - DNA, 607 bp, Homo sapiens
atgtgcctataatcccagctacttgggaggctgaggcaagagaattgccagagtctgggaggcagaggttgcagtgagccccgagattgtgccactgcactccagccggggcaacagaacgagactccacctcaaaaaaaaaaaaaaaagaaaaagaaaaaaaaaagaacatattcaaattcctagatttggaatgtggaaattgtttgtgggggtgtagtaattctgcctgctatatttmtaatgtgtgattatgaaaataaattggagaaagttaggtggtatctttgatattacttctattgctctgcttgaaatatgtttatgtgtctgtaactcagtttcatgcttaaatggcttagagaaatatatccaaaagggatgacaatcaatccatgttaaattgatagcttaacttgctaacaatctttcccgttttccctttccactgaagaggcctaaagtctgattataatgttataattataatcaatgtcatgttcaatataatgttatataataatcaagcccattcaaaaacctggacttgattatttgactttaagaattttaaaaatattagattgttttccttagggaatgattt

SEQ ID NO: 758016 - DNA, 569 bp, Homo sapiens
gaaataaaaacaaccatctgaaaatattatgaacacctctatgcacataaactagaaaatctagaagaaatggagaaattcctgaaaacatacaccctttcaagactaaccagaaaaaatttaattcctgagcaaactaataatgagttctaaaattgagtcagtaataaatagggtaccaaccaaaaaataaaagcccaagaccagatggattcacaatcgaattctaccagatgtacaaagaagagctggtacctttcctgctgaaactatttcaaaaaaattgagaaggagggacgcctccttaactcattayataaggccagcatcatcctgatatgaaaacctggcagagacacatagaaaaaagaaaacttaagaccaatatccttgatgaatatcaatgcaaaaaccctccacaaaatactggcaaactgaatccagctgcacatcaaaaagcttatctaccacaattaggtaggttttattcctgggatgcaaagttgattcaatgtacccaaatcaataaatgtgatttatcacgtaaacagaactaaagacaaaaacca

SEQ ID NO: 758017 - DNA, 646 bp, Homo sapiens
attaaattatagcttctattcacattatactaggcttttctacttaggcactttatgttttcagaatttatttccggttcctaccttgcatttaattgtcatttcctttgttttctataatctatgatggattctcaatttgttcactactgtcacagttttaaatattgctcgtcaagtattttgtagaatgtgggtttttctgayttcttcacggttatgttgaatatcatagaagtaatacgcccttcttagtgcatcatatcctggagtacctaatctctacatatcttactattgctgaggcacatggtaatcaattaattaaagtggtgattgttggctttctttatggcacggttgtcatttttatttgtctaattaatatgtatcttgaaggagatactatgagagtatgcaagtactatgtttctctgggaactttcacccactgatttgagcttctattaatcaatcaatcttgcctgcaacaattattaccatagtgtttgtctaatggtgttttgaatttcccttattatgatagggcaaagaatatatattgggggagggacatgtttttcaataaattatcctggaaaaaatgaatatcaattggctgaggaatgaaattggatccctctca

SEQ ID NO: 758018 - DNA, 617 bp, Homo sapiens
aggctggagtgtagaggtgtggtcatagctcactctaacctcacctcgaacttctgggctcaagtgattctcttttctcagccacaggctatcgggggaaccagccccaaatatttcaacgtaggttctttctattttccctaagtgtcrgctggtctgagaaataaagagaaagagtacaaagaaacgaattttgcagctgggcctccaggggtgacatcacatattgatcacatattggtaggaccatgatgaccctgagccacaaaaccggcaagtttttattagggattttaaaaggggagggggtgtaaggacagggagtaagtcacaaagaacacatgctccaaaaggcaataaagatcacaaggcaaaggcaaaattagaattactgaggagggtctatgtcccactgtgcacatattgtcttgataaacatcttaacaggaaacagggtttgagaccagagaaccggtctgactagaatttaccaggctggaatttcccaatcctagtaagcctgagggtactgcagaccagggcgtatttcaatccttatctcaactgcataatacagacactcccagagcagctatttatagcccttccccccagga

SEQ ID NO: 758019 - DNA, 592 bp, Homo sapiens
tgttacataggtacacatttgtcatggtggtttgctgaacctatcaacccatcatctaggttttaaagccccatgtggattaggtatttgtcctaatgctctccctcccctttccccacaatcccccgacaggccccggtgtgtcatgttcccctccctgtgtccatgtgttttcattgttcaactcccacttatgagtgagaacatgcgggtttggttttgtctttctgtgttactttgctgaggatgatggtttccagcttcatccatgtccctgaaaaggacatgaactcattcttttttatcactgcatastattccattgtgtttatgtgtcacattttctttatccagtctatcattgacgggcattcgggttggttccaaatctttgctattgtaaatagtgccgcagtaaacatacacatgcatgtgtctttatagtagaataatttacaatcctttgggtatatacccagtagtaggattgctgggtcaaatggtatttttggttctgggtccttgaggaattgccacactgtcttccacaatggttgcactaatttacactcctatcaacagtgtaaaagca

SEQ ID NO: 758020 - DNA, 585 bp, Homo sapiens
ctcaatctgccatccctattcaaacacaaaatctaggtcttgtctaagagttattaaattggcattttgtcttgtcttgtgaattagctcatattcacacattgaaatctcagatcatatctgtagttggcaaggaaaacagtaacactgagccgtgctgttaaaaggtagatgacctgttaaaataaggaataaacaaagagataaaaaaaaaaagaragaaagtttctgctctttttgaaaccatgttctcttaatatgattcagccttgttttgtggctggtgaagtgtttcgcatttgtaaatttgggctcaataactgtttagctcagaaaagccaactgtatgtcattaattgttggactgtttacagtagtctcatttctaactggaaaaggcccctggaaaatgttttcagaatccaaaaagacaaattgttaatgtagagcatttaaaataaaacatcatttttcaatatatcagttgttttaaagtattttctatgctggcatttgcaatgtatatcactgttgatgatagggtatcttaatcctcctcttatatattggaaatttctagtggct

SEQ ID NO: 758021 - DNA, 564 bp, Homo sapiens
tttgcaatgtatatcactgttgatgatagggtatcttaatcctcctcttatatattggaaatttctagtggctttcattgtatctatctatatatatgtttaataagggttggcaggtattgcaatttacatacattttacatagaactgatcaactatgttttgttttgtttcttgagatggagtctcgctctgtccctcctactggagtgcagtggcgtgatctcggctcactgcmacctctgcctcctggattcaagcaattctcctgcctcagcctcccaagaagcaggaccacaggtgttcaccaccatgcctggctaattttttgtactttttttagtagagacagggttttgccatgttggccaggctggtcttgaactcctgacctcaggtgatttgccccgctcagcctcccaaagtgctgggattacaggagtgagccaccacgcctggccagaactaatcaattatgtttttgttgcatctttgcctgtctctcccactgggctataagctccttgagaccgggaattgtggctttgtcttatatacttctgc

SEQ ID NO: 758022 - DNA, 560 bp, Homo sapiens
ttgtgttccctgttccatgtgctgtccacagaagcaacaagacagaggaagctgaggaggcaaatctatgaggccacaaatctaagagtacaacaaatctacaagatttacattttacagatgaaaaaattgagacttaacatccaacatcacacactaacacaactggaatttcaacttgaatctgctgattgcaaaaccctagctcttttcttcacgccrtacataccagtataccatatcgctctactgcatctcagagatatttgttttgccaacataaagccttttcatttatagtgcagattatgattatatcattctgtagcaaatgggttttcatgctttaaaagacagtataccaacatgaatttaatcttgaaaatctgagccattatcataaatcaaatgctgcttgacattctaaaagaaataggactggccagagaaattttagattcattataattcctcatagatattcatacttttgtgactgtcattggatacagaaatgataggtttgggtttggttgtaacttctctaattttaggaagaa

SEQ ID NO: 758023 - DNA, 577 bp, Homo sapiens
tttgaaaccttcttgtgttccctgttccatgtgctgtccacagaagcaacaagacagaggaagctgaggaggcaaatctatgaggccacaaatctaagagtacaacaaatctacaagatttacattttacagatgaaaaaattgagacttaacatccaacatcacacactaacacaactggaatttcaacttgaatctgctgattgcaaaaccctagctcttttcttcacgccatacataccagtataccatatcgctctactgcatctcagagatrtttgttttgccaacataaagccttttcatttatagtgcagattatgattatatcattctgtagcaaatgggttttcatgctttaaaagacagtataccaacatgaatttaatcttgaaaatctgagccattatcataaatcaaatgctgcttgacattctaaaagaaataggactggccagagaaattttagattcattataattcctcatagatattcatacttttgtgactgtcattggatacagaaatgataggtttgggtttggttgtaacttctctaattttaggaagaatttct

SEQ ID NO: 758024 - DNA, 495 bp, Homo sapiens
tcccagagttcccttccctgacccggtaaacatctctgtccttcccccacctccccgtgggtagtgggtatttatagaaacagatacgtgttaggggacagccagaccggcctgcccggaaaatcgatcccccaaagagcctcccaggcctggctccagccagcagggagcatcgccaattgtcccccgcgtgtgtaagcatgttttatgagtgctacaggtttgagcacagcagaaattgtaatyaacattaacaaaaataagggccgccgcagcagtcaaaacaagccacccctgtaggattctgcagttggacattattcaaaaggaaagggcaagcgttgctttggaggtgggaaagaaaaagcacctaacaggtgctgtggtctctgggaggggagaggccagcgtgggactggttgctggtggctgcggagactggcaagctggattcgactaaagcatgtaccttttctcagctcccagggatcaccc

SEQ ID NO: 758025 - DNA, 543 bp, Homo sapiens
atgttccctgttgcctctgccctgctgcatttgccacatgaaggctgctcagcctcgtctcttggatcacagcatgctcctgtgacctgggggccacggctaaggctctaggcgcccgcaattggaggcctgtcagccacgaaatgataaacagcaaaggatgcttttattaacacctctccacactgaccaatgtggctttctttcttgctcctaagctcaatggactaagactcagggaagttttaattcaatagtrttctccttgccaaatttccctcaggattctagttaacactaaccctgaacgagaaacaccgtaagggaagcacatctctcattgttaggctcaccattaaatgtaatgactgatttctttaatccgtgggtatgtaagtctgtgtttctttcattgtcaatctataattaatcaccttatataaaataagaagtgagagagaaataaaaagtcatagaaatgaactcataattaagagtacattatacagactttattatttcatggtataagccccaaagcat

SEQ ID NO: 758026 - DNA, 630 bp, Homo sapiens
ctctgagtgctgccgtctccttacccgcaagccactgggaaatgcatcagccccttgctcccactgcataaagcaggaaataatacatttcaagaagctacgtcttcatattcagattcacattacagggaggttaaaagaagaaaccttgtttgtgttagttgcagatgtatcccaagcacctgaacaatgcctgcaacatatacgatgttcaatgagtgaatgatggcacagagactaggtaggctgctgcctgccaaatggaggactttcagggtcatagtagagcagcacagtcaagggggattttcytgaaccctgatctaccatttctaacttcctgaattgtttttgacctttccttctctccactgaagaaaaaatgttaattttcttgggtgtaggtctattgcttattcataggacatgtgtataattaccatactatactgtaattgattacttatttcctccagagccaacccatccattaggcgtagtagtaaacacacacacaacacgcacacacacacaacaatcttgaggctgcagaaaatgttttaatataaagtattaaaataatcaactttatactaacacagttgtaaaataacagttttaatatttttt

SEQ ID NO: 758027 - DNA, 658 bp, Homo sapiens
cttggtctcccaaagtgctgggattacagggttgagctaccacgcccagccatcatgcagtaggtatgcttttggtttttttgctttttgttttttgtttttgctcttgttgcccaggctggagtgcagtggtgcaatcttggctcactgcaacctccacctcccaggttcaagtgattctcctgcctcagcctcccaagtagctgggattacgggcatgcgccacaacgcccggytaatttttgtacttttttagtagagacggggtttcaccatgttggccaggctggtctcgaactcctgacctcaggtgatccacctgcctcgacctctcaaagtactgggattacaggcatgagccaccgcaccaggccagtatgtatgcttttgatattggctttgttctatcagcaaactttccttgagcttcatccaagttgttgcaagtatcaagagttactcctttttattgctcaggggtggtatttcatagtactgcaatttaatcattcacccattgaaggacattgaattcctttttagtccttggctattgcaaataaagacactatgaacattcacgtacaagtttccatgtgaaaatacttttttcctttctctgggaagaatgcccaagagtacaatagttaagtcaggt

SEQ ID NO: 758028 - DNA, 655 bp, Homo sapiens
taagttcagtacaccccagggctggggttttaggagaggcctggttcctgccggagcccccatccagcctggatgcggggaggtgggaggagatgggtggtgccgagtgggccgtttcctggaatggcgcctctggggaatccaagtcatcgtccccttcccaagctcagcagaagctctccctgccagacacctccagagagcccgagatgtccccggggaggctggcacacagcaggcctcacccacagacagctggcagggaaccagttaagagagcgtgagtggctccccagccttccagccaggcttcacatctctcgcgctctgtttaatcctcartcaactctccccgtggcagggtgtttcgggatgccgctgagtcctgggctctggaggagagacccttatctaccagcaccaggcaccacccacctcggggccagcccggccgcgtgctgagctaatctaacatggcgtgcaggcttgtaggactaacttgagttcagcgtgagaaaggcggctgcgtgcacattttatttccttgagtgaaataggaacatccttttgatctgccccattagtaatcccactacaaagcctgcctgctggagcacatgccgggggatcctgctctgagacaggaagccgccgc

SEQ ID NO: 758029 - DNA, 556 bp, Homo sapiens
ggtgcacgcctactgtcttagctacttgggaggctgaggtgggaggatcacctgagcccaggcggtcaaggctgcagtgagctgtgatcatgccacagcactccagcccgggcgacagactgagaccctgtctcaaaagaaaaagcttgctgaagcctgacttaagtcatgaagtaacttttctagtrtaactcgcagtgtaacagcatcggggtgaacaccacgtcccacagaccagcttcagcacactctgggagcaatcgcaggtgtgtctgttgcagacatgggcagcagtcccagtttgtactgagcgtggcagctgcgcgcgccccactaccggcttccgggcctctgactgcccctgccgggaagcagtccggctccaggcatggagagtcctggcctcctgctctgccccgctctgggtcctgtgccctctgcaccatcagcccaagccagccatgtactgtgggcacgctgcccccagaactcaggggcagctcagggagcggggccatttgcacctcagcctcatggggacctggatcctgctgcc

SEQ ID NO: 758030 - DNA, 469 bp, Homo sapiens
tgaatgagcagcatctaagtatgagcttaaaattttacacattatctctaattcatgcagcaactcttcaaggttgcttgaatcaattactcactacctctgtgacttcagtaaataattctatcaatctcagtttagaagttggcctatcagggccaggcgcagtggctcacgcctgtaatcttakcaatttgagaggcttaagtgggcagatcacttgaggtcaggagtttgaaaccagcctggtcaacaaggtgaaactccatctctactaaaaatacaaaaaaaaaaaaataattagccaggcgtggtggtgcgtgcctgtagtcccagctagtcaggaagctgaggcaggagaactgcttgaacccaggaggtggaggttgcagtgagccaagatagcgccactgcactacagcctgggtagctcggttgaagaagaggaagaggaggaagaaggagaggaaga

SEQ ID NO: 758031 - DNA, 632 bp, Homo sapiens
ataatcatagtaataatataataagctccctgagcaattatgaagcttaaatgacagcatgtgttcaaatcactcagtacacagaaagtcctaattgctgaattggcaatgcctcctaaccctaggtgcctcatgatattttcctggttagctgtgcttaggtacattgtcattaacctaaatattcatgtttgtgaaacaaattatatcatccgaattgatgcttacagtaatcctgtgacatagagaatggtctgatttatttccatccagtaaatcaaggtgctccctgcgtggtattgaagtatgacgctaggattctttacttagtcctctttctgccaccctctgttcatgtccaggacttacctgtgctgctccagaagctgggattgccacagaacagagaytgcataagctaaactcttctaggaaccaaagcagaagctcatcaagagagttaccacatttttcagacgtggattgttgtctgagagtgtttaggaggtaaaacaagtgcaagttgcctcacaaggtcaattgatagttatagctggtggcagagaatcagataatgttgcttttcctttgaattgtacttttcttccaactgtcccgcatggttcacaatc

SEQ ID NO: 758032 - DNA, 671 bp, Homo sapiens
ctgcttagaaatcttcattagaaaaaaaatgttgttagatatttctaacgtctttgtcatctcaatgttagcatttattgattgctctttttcatttggttcaagatacttctaattattgacataaaaagcaatttttattgaaacctgggtatttcacattatgttctgaaatgatttcatttaaattttctgctttatatggctctctttgacaccactctgtcaagggaagggttactgccaccttgttactgctaggtaggagtagaagtccaggttctccactttgtctccatgacactcaaggcagagagggctcctcactmctgacaagtggaaatagaagttctgtctctccccagggtcttcactgacattgtgttgggtgagagctcatttccagtgagaatgaaggtcctggcttgctattcggccttttctgatgccaccatggtgaggctgttgggcaatctaattacagcctcatgagagtgaaagtctaagctccccatccagactttgctggagtggttaaaagtaaagccattgtttttgcttggtgtttgggtggggtagagtgtttgttgcccaaaacatttttgtcttgctaggtcgccctgtttctggtcctttggttaaaaacagaaaccttttcttggaactatttt

SEQ ID NO: 758033 - DNA, 671 bp, Homo sapiens
ctgcttagaaatcttcattagaaaaaaaatgttgttagatatttctaacgtctttgtcatctcaatgttagcatttattgattgctctttttcatttggttcaagatacttctaattattgacataaaaagcaatttttattgaaacctgggtatttcacattatgttctgaaatgatttcatttaaattttctgctttatatggctctctttgacaccactctgtcaagggaagggttactgccaccttgttactgctaggtaggagtagaagtccaggttctccactttgtctccatgacactcaaggcagagagggctcctcactcctgacaagtggaaatagaagttctgtctctccccagggtcttcactgacattgtgttgggtgagagctcatttccagtgagaatgaaggtcctggcttgctattcggccttttctgwtgccaccatggtgaggctgttgggcaatctaattacagcctcatgagagtgaaagtctaagctccccatccagactttgctggagtggttaaaagtaaagccattgtttttgcttggtgtttgggtggggtagagtgtttgttgcccaaaacatttttgtcttgctaggtcgccctgtttctggtcctttggttaaaaacagaaaccttttcttggaactatttt

SEQ ID NO: 758034 - DNA, 514 bp, Homo sapiens
ctttatattattcctacaaataatattttcaaatttaatacccctttaaagataattagcagaaacaagattgcagccacaaattaatgagacttggatgactagaataaaggtatatattctcagacagccatgcttaccatttataaagaaataaaaagaaagatagaaaatacctgaaatgcaagagaaactattaaaagctgacacaatttgaaaaagaaccaagtagaccttctagaaatgaaaaatacaacggaagtaaaagttcaataagaataacaacagagtctacttaaggggaaatacttgaagcattaccattaaaatccaatttttaactcaatgctgttttgtgtrtacgagccaatgcaattaaaaagaggaattagagatagaaatttggaaaataagtgattaaattttaattatttgcagaagttataataaaatatctggaaaaccaaaggatcaacttaaaactactataagcaataagagaatttagttttag

SEQ ID NO: 758035 - DNA, 542 bp, Homo sapiens
ttgcattacaaatggtttcatgtctcagacaaacttgggcccaggatcctgaataaggcaaactggcatgtgagcgctatcaggtcagacgtcagtcagactgaaacaaccctcaagccaaggcagaggggaagaatccaggtayggcccaccagggataatccaggagactagaaaaaagagaaggcaggaaatagggtctggaatgcccagcctggacaattccctgaactgaccagaaaataggtcacagtaggtcttttatgggattgctgtggccttgagcctgggtataagcaggaacaaaggctggccattctagagacacactcaattggctcttctgatttctcacttataaccagaagcctctttgctaacctcaataacatattgcttattttttaatgattgctctttttgtttcgttttgtttttaaatcaataaacgtaatccatcatataaacagagccaaagacaaaaaccacatgattatctcaatagatacagaaaaggcctttgacaaaattcaacaaccctt

SEQ ID NO: 758036 - DNA, 635 bp, Homo sapiens
ttctttgaaaatgatccatgggctgagtagaatgtgcatcctgcaaccattggatgaaatgttctgtaaatatctattaggtccatttggtctattgtgcagattaattccaatgtttctttgttgattttctgtctggatgatctgtccagtgctgaaagtggagtattgaagtctccaactattggattgtggtctatctctctctttagcttgaataatatttgctttatatatctgggcccttcagggttgggtgcatttatatttatatgcaccttgctgaattgacccttcttwtcctcttgctgaattgacccttttatcattatgtaatgactttctttgtctttttatggtttttgtcatgaaatctaatttgtgtgatataaatagagctattcttgctcttttttggtttccatttgcatggaatatctttttccacccttttagtttcagtctatgtgtgcctttataggtgaagtgtgtttcttattgggagcagattgttgagtctttttttttaatctattcagccactttatgtcctattggagagtttggtccatttacattcagtgttatcattcataagtaaggacttatgcttgccatttttaaaatttgttttc

SEQ ID NO: 758037 - DNA, 642 bp, Homo sapiens
tttttttttttttttttttttttttttgagacagagtctcactttgttgctcaggctggagctcagtggtgtgatctcggctcactgcaacctccacctcccaggttcaagcgattctcctgtcccaacctctggagtagctgggattacaggcatgcaccaccatgcccagctattgtttgtatttttagtagagatggggtttcattctgttggccagtttggtttcgaactcttggcctcaagtgatccacctgtctctgcctccgaaagtgctgggattacaggtgtgagccaccctgcctggcctactgctgactttaaaatcacatcacagaggagggacatttaattggtaagcctcaaactaaaggtggagaattgaagacagtcatttttttggccaaatcaacacttttaaaaagggtctttgaaaggttttgaggcttgrttgggatctggatatttggtggatttatacagattcacaaattgcagagttagggtcatttcatacatacacacatgcatacacatatttgaaaatgtgattaatacatagtaatttcaactgaaaacatgactagctgatacagttaaagtgagttcatacaataatgattttctgggcctaaggatcct

SEQ ID NO: 758038 - DNA, 602 bp, Homo sapiens
aacttttacaaagtcttgagtcacattgaaaggatgtaggagccactctgaaggctctatcattgcccaaagttgtaataatttgagcatcaaaaggaatgattgaagcctactaaaacacactgaatcagtgaaaatctatgattccataatacttaaaaataaacgcagaaaatctcaattgttaatagttaaaacagctattaaaataacaccttacttgaaaaatgagtaattaaagggaaagaagaatttattttgcttttgcagtaagaaattgtatatcaagataactgagttgatgaggtaaaagtcttcattattgaacatgtgaggcaataaatataaaaagaaaggaagaaattttttaaaaacacaatctygcaaattcaaatgaaattctttaattcttacaaagattagtgagcagtttttaaaataattaagtaaatggttaattcatatagcaccaaagtacataatacagatttctttttcatggcaagtaatacttatagaaataatacattaaatgacatttaggaaaaatatatagcatttaatatttataatagaaaagaagaaaggctgaaattaatgag

SEQ ID NO: 758039 - DNA, 619 bp, Homo sapiens
cagttcattcaacctagttaattcaatatgcaaaaaaattcaccaatgaattgacaagctaatgttctcaaaattgttgatcagtgagttgtaacctaagaagatttggctaagacagtctgaaaagccagggctctcctcccatctcactattccttcaacaactcattttgcttattccttccacttacaataaacttcagcatcttatagtgcctcttttaccctaattcaataagccttctctatcattaaacccaaagtttctaaagtcttatctctagaccattcctggacaattaaaagagtataggtgattcttctaagcagtttggagattcaacagtcctctctgaaaagcttcctaatttatgacttttttatcttctatcctagaatatgtagacactgtgggccccaattaactttctctattggtggatggaacctaagatractcaataatctccccttatagtactcatgcccttgcataatcctctcctcttgagtgtgagtagcatctgggatttgcttctaactaatagaatatgacaaagatgacatgtccatcccacgatttattatattatatggcaaaagtgctaggatgttattc

SEQ ID NO: 758040 - DNA, 640 bp, Homo sapiens
agtatgttatttctttatttaagaaatataagttattgggaaaatgctgaaaaagataatggaaaggacggaaccacgcaacaatccactagaaacctcccttgtgattgacatcaatgcactaataagcactattgaggtagcgattgagctacttaactgttttcgaatttcatatttttctatattaagaataagaacaatttaagattttcccartttaagaatgagtcctggacaattatttctttaggttcttcatctgctaaccctatcatagaaataaattcggatatgctgttgtcattagaaacacgctggctttcttgtgacctttctcgggatatttacacattatcgcttaataatttattctaaaatctctttcaagattcatatcaatagtttgcataatttttcttcctactttttgaaaactaggaaattaatttgatatagctacacaaaagctgttcaaaaaaggtcaaacaagttcaaggaaattagtatgatatgctgcattattataaagcacactgctagatttctctgtaattatacttttaattctaaatcaattactttgagaatctatattaaactttgaatgatgaccaattaaaaacgtctttaaatggca

SEQ ID NO: 758041 - DNA, 640 bp, Homo sapiens
agtatgttatttctttatttaagaaatataagttattgggaaaatgctgaaaaagataatggaaaggacggaaccacgcaacaatccactagaaacctcccttgtgattgacatcaatgcactaataagcactattgaggtagcgattgagctacttaactgttttcgaatttcatatttttctatattaagaataagaacaatttaagattttcccaatttaagaatgagycctggacaattatttctttaggttcttcatctgctaaccctatcatagaaataaattcggatatgctgttgtcattagaaacacgctggctttcttgtgacctttctcgggatatttacacattatcgcttaataatttattctaaaatctctttcaagattcatatcaatagtttgcataatttttcttcctactttttgaaaactaggaaattaatttgatatagctacacaaaagctgttcaaaaaaggtcaaacaagttcaaggaaattagtatgatatgctgcattattataaagcacactgctagatttctctgtaattatacttttaattctaaatcaattactttgagaatctatattaaactttgaatgatgaccaattaaaaacgtctttaaatggca

SEQ ID NO: 758042 - DNA, 640 bp, Homo sapiens
agtatgttatttctttatttaagaaatataagttattgggaaaatgctgaaaaagataatggaaaggacggaaccacgcaacaatccactagaaacctcccttgtgattgacatcaatgcactaataagcactattgaggtagcgattgagctacttaactgttttcgaatttcatatttttctatattaagaataagaacaatttaagattttcccaatttaagaatgagtcctggacaattatttctttaggttcttcatctgctaaccctatcatagaaataaattcgratatgctgttgtcattagaaacacgctggctttcttgtgacctttctcgggatatttacacattatcgcttaataatttattctaaaatctctttcaagattcatatcaatagtttgcataatttttcttcctactttttgaaaactaggaaattaatttgatatagctacacaaaagctgttcaaaaaaggtcaaacaagttcaaggaaattagtatgatatgctgcattattataaagcacactgctagatttctctgtaattatacttttaattctaaatcaattactttgagaatctatattaaactttgaatgatgaccaattaaaaacgtctttaaatggca

SEQ ID NO: 758043 - DNA, 607 bp, Homo sapiens
accatacttgctatgttgtgatttgaacacactgaaaatctcttttccgaaaataatcactttgtccctaaaacacctactttaaaagctgatttttattcaaaaatgacataagtacttacgaaggacctattagatgttttaatacgttaataataataatatgtttgttagcttacactctgtgattgataaagcacatgtccttttggtgcagaaatagtatttctaggtgcaggtaatgtactgggtaacaggattaagtgagaatgcaacagggaagagttcgaggtggaagatgttttataataaaacataatsattttataggggaaataagttttgctgtaaatcatatgaagttttagtgaaaatactgtacacagaaactgaatatttgtatgcagttaaagaggtttacttgttctttgaactttctaggaaataaaaatgcagaattatataaaacgtcattaggaaatgggtcattttgctaaataattcacattagaattcctttatataggtccctaaaatacctgagggtccaatgttttactttggcatggattaagcaggatatgagtaagaagtagaaaatgaaaat

SEQ ID NO: 758044 - DNA, 666 bp, Homo sapiens
cacttaacactttatgctgaatgtctggaactacccgacatacttgcagcaatttttagccccctaaattaagtcaagtgtatttatcatggcggtgtgccctacaaacatccatgctcactatttcacctttattgtaatgatggtattgtacagaaaatattaaatggtcaggggaggaggaggtgcaagatagagaaattctaatctagaataaggttttgtttgggagaaggcacagttagagcaataaaagctggtaagtctctctgcttcagtatagtgtcattgaagaggcaaatctasacgcacattcatttattttcgaaggtcctacactctgaccatcttgatcctctcacctaagcttgtctagtctagtccagctcaagagagtgtaatattctttttacttctggattaaagaaaaacataccactggcttatttccccatgtgcaaatcggaaatgagtatctatcaactttagaacataggagtacttaatacaataataaagcatacaatgaagacagaaaatgggataaaagtagaacagagagacaaaaattattaccagaatagatgagaacatttggttcatcaaaaataaaaagcccaatgctgaaagagaaaaccaagcaaatgatctaaaagaaaaattaat

SEQ ID NO: 758045 - DNA, 583 bp, Homo sapiens
tagaaacttttatttttgtgatatgcattcagaaagaaaatgcaataaccaactagggctttagtcaaacatttgctagaatgaatattttttttttcttatggccttaaccaaaaattcaactagaatttctcaaaaacttacttatacttgtgtatgtagacacaattcaagatggtcctaaaatcatctaattaagcaccggcgaagtgtattttctattaatattttctggtactaagggatgatgttgtatgacacataaagccaaacgtaaatatctggagtcttacattcacttcagaaacacatgtaaatattcagaatctacactgtattcactaccatttggggggtataaaaaggggaaggaaagaaggaagaaacggagacaccgtagagctcacaggtttaaggggttgttttgagatcctattttaaaawacagcataaaagggagattagatttcaggatagattcatttcctattaatatggacagacccacataaaacttcacaaataggttagagcctaggaaaaaatttataacaaaatttgcctccgctatctatatatgacc

SEQ ID NO: 758046 - DNA, 621 bp, Homo sapiens
acccaatttaatttattgggttctaggagaactgctgtgttctcaccctaacttggaagagtgatgtttcagtcaagcaaagaatttcctaccatacaatataacacttgtgtgaggctctgtcctaaatatctcaattaccaatatgtggtttggtagtatttctcgccatgctttgctcatgcgcaatgagactaccactagggtgtaaattttaagtatcccatctaaaactcatacaatgataggaaaaatccatttgtttttcatttgatttttactgaggaatcagctcaatcttcaatgaatactggtctctttccaaagcatttttgatcaaagtaaagactgagtcaagggctttttttttttctttttcttgttttaagagacagagccttgctctattgcacaggctggactacacgcattcamctagagtctagaacacaatttaatttattgggttctaggagaactgtcatgagtattgataatatgagagttctttatattcaaacattattctcaaccagagatagggatgtcatagaagaaaatccattcattcaatcattaattcattaattcacatgtccattatgtacctccatgagctgg

SEQ ID NO: 758047 - DNA, 626 bp, Homo sapiens
tatttctaatctagtaagtttttctcaggaatacttgtttgattttgtcaaatctttttcctgcatctagtgagatgctcattttttttcctttaaaaatgcgtttatgtagagaattacgtgaattgaactttgaatgttaaagcaatcttgcattgggttatggtatattatccttttctatattgttggattctatttgttaaaattttatttagaattgttgcatttatactcttgaaagtaataggtatcaaggaatgcttmtcccatagaataagttgggaattatttgcccctcttgaatgttctgggaagtttgtgtataattgttgctctttctttcttaaatatatgagagaattcaccagtgagtcatctaggcttgatgtttctttgcatgtggtttttaattataaattcaatttccttaatagacataatattttcaggttatctattttttcttgagtggctttggtaatttgtgtctttttaaggaacttctgcatttcatctaagttttcaaatttactgttgtaatgttgttcataatattattataattttaatatctgaagactctgtaaagatgtacctctttcattcccaacatcggtattttg

SEQ ID NO: 758048 - DNA, 640 bp, Homo sapiens
ttagtggagctgaatagagaacacaggcccctttactgtgctgactcatctttgagatgatgatgcaattcaacaagaaaagattcaatgtgtacaaattggattggggcaattattcaagaacaaattgtataaagtgagctacacctcaagctctttgctttgcttcccatttaggggcatttcctatgagtccttatacaactctctgtggtggttataacctggtatcaaatcaaatcaaaatcagaatcagtgcagacaatcattgcatgagatttgctgtcttcatggaggttttgtgtagtgaaacattgggctgacatcgcctagggaatttcatgtgaaaattcctcccaaacatttttattctcagagttcctcttcttagcaccaccasggagtagggatctggagggtgaagtgaggttttttctctctttccccttctcctgtcttgctctctgcctcaccactcactggctcctacctgaacttccaggttagtcctccactcacacttggaatttcttatccttttgccctgcagaacacttaattgaacatattgtgttagttgagcatttctttggggtcccaagtttttccccaaggggtttatcagcaattattctgaaca

SEQ ID NO: 758049 - DNA, 558 bp, Homo sapiens
cctcccaggttcaaaagattcttctgcctcagcctcccaagtagctgggactacaggcatgaacaaccacgcctggctaatttttgtatttttagtagagacagggtttcgccatattggccaggctggtctccaactcctgacttcaagtgattcgcccgcctcagcctcccaaagtgctgggattataggcgtgagacactgcacctggcctatatgtgattttgaagctcttcctacaaccttgaacctaggttgcccttgtggtttgcttcagctgacagaatrcagggaaagtgaagccctatcaggtccaagcctaggcctcaacaggccttggatgctcttagagcccgacctcactatgtgaacaatcctacattagtttgctggaggatgagaggccatatgaaacaaagccaaagtatctcggccaaggccatcatagacatccaggccccagctgatctgacagctgaccacaaacacatgagtgagcctagatgaggtcagctagacctgacccagattagcaacagcacctcaccaacccataga

SEQ ID NO: 758050 - DNA, 643 bp, Homo sapiens
tatgtttacactatactgtagtctaagtgtacaatagcagtatgtctaaaaaagtacataccttaattttaaaaataacttcttcctaaaaaatgctaatgatcatctgagcctaagatgattattaaaaaaaagttgttgggytgggtgcggtggctcacacccgtaatcccagcactttgggaggcggaggcaggtggatcacaaggtcaagagattgagacccatcctggccaacatggtgaaaccccgtctctactaaaaatgcaaaaattgtctgggcgaggtggtgcgcgcctgtggtcccagctgctcgggaggctgaggcgggagaatcacttgaatctgggaggcaaagtttgcagtgagttgagatctccgtcttaaaaaaaaaaaaaaagttgtaatcttttagctggtggagggtcttgtctcaatgttgatggctactgacttatgagggtagtggttgctgaaggttagggtggctgtggcagtttcttaaaataagaccactctgaagtgggccacatcagctgactcttcctttcacaaaagatttctctgcagcgtgccatgctattcgatagcaatttgcccacagtagaactttaaaacttggagtcaatcctctcaaaccctg

SEQ ID NO: 758051 - DNA, 643 bp, Homo sapiens
tatgtttacactatactgtagtctaagtgtacaatagcagtatgtctaaaaaagtacataccttaattttaaaaataacttcttcctaaaaaatgctaatgatcatctgagcctaagatgattattaaaaaaaagttgttgggctgggtgcggtggctcacacccgtaatcccagcactttgggaggcggaggcaggtggatcacaaggtcaagagattgagacccatcctggccaacatggtgaaaccccgtctctactaaaaatgcaaaaattgtctgggcgaggtggtgcgcgcctgtggtcccagctgctcgggaggctgaggcgggagaatcacttgaatctgggaggcaaagtttgcagtgagttgagatctccrtcttaaaaaaaaaaaaaaagttgtaatcttttagctggtggagggtcttgtctcaatgttgatggctactgacttatgagggtagtggttgctgaaggttagggtggctgtggcagtttcttaaaataagaccactctgaagtgggccacatcagctgactcttcctttcacaaaagatttctctgcagcgtgccatgctattcgatagcaatttgcccacagtagaactttaaaacttggagtcaatcctctcaaaccctg

SEQ ID NO: 758052 - DNA, 593 bp, Homo sapiens
atttggcatgcttatcacctaacagctgaaaaggaagtatcaaaggatacaatcaggacattgggtaatgatctcttttttctttgtacagataaaacaaaactcacagtttcaattcagttattcagtttcaaccaccataggaaaggttctgaattgaaattttgataaagtagagcaacatctrtattatttgaaagatatagtcttcttaaaaataaaaaatgggctttctgggggccctctcaaaacaatataacatagagattaattctattccctaaaccaaaatataaaactcttgagttagacttgttctccaatcctgtaatatggaatactaattaaaagcatttgcataacaatatcaatctcacaaggaagttttgttattaccaataaaaacaatagctacaacttactgagcttttataatatgctagctcatgtgcttatttctctatacatgatatttaattttaattcattttagtttccttgtgagtaagatgatagaatattgttattactatcaaaaagtaaaagaaactaagatttagtggcttaagtatataactgaaggtagtgtagca

SEQ ID NO: 758053 - DNA, 556 bp, Homo sapiens
cggttatattactttcccctcttttgtttatgaatacaatcacttttgtttcctttctaaaaaacatccacaattgcatttaacatttagggcccaattggctagtccaggataatctctccatctcaagatccttcatttaatcacatctatatgtgtgatcactctctttcccaccttccctttctttcttcttcctttctttctttcttgcttgctttcttgctttctctctctctctctttccctccctcccttcyttccttctttccttccttccctccttccttctttctttttttccttttttctttcttccataaaaggtaatattaatagtttttagggatcaggacatgggtatctttgggggtggggggttggggttgggtggtattttttttttacactatcacaacctttttcaggtatctgctaaaatgtcaatgtttctgcaaatccttctttaaacatattatttgaaatttcccacccactactaccaatgcccctgaactcactgttgctgtttcctttattttttttatcaccatac

SEQ ID NO: 758054 - DNA, 578 bp, Homo sapiens
tggaaggagaaagttgtgatgaacgactttgtgctactgcactccaggttgggtgacaggctgagaccctgtcaaaaaagagagagagagagatggcaacctataatttcaacctgtaatttattaagacaatttttattttataacttattctatcctttgtttctcaaatacctctatttttaaagatatttcttatttaaaacaaatatatttcccatttcttatagacatgattatttaatactagagttcatttttatttaactttcacttataggcctattgggaaattcatccatagacataatggacaaatctatataactgacacaatatttttcaatggaagttaagtttaagaatggaaaacaatgacaataatttttttagaaatatcaacagcctcatattctatatatcstccaatcttatttttagtcaataaatttatttaatccctgactccaatgtttctaaggcaagaaaaaataattacaagtgatataaaggagaacatttatttaaaattagtcagaagtataaagaaatctgaaaaaattatcgtattttgtatt

SEQ ID NO: 758055 - DNA, 618 bp, Homo sapiens
ccccacttcagggataagaaactgaagcatagagagatgatgatgtattttacccaatgtcaaatggctggcaagtggtaaagccggaattcaaatgagacagtttgatccatgagcttgtgctctgcactcccatatcagccctgtattcacctttctagacctagccagcagaggcagaggtagagttaggcactgtttaatatcctcctaatgtwtaaaaagtatcttgtctgtatgagttttgttgactgatagtatctttccttactgaataaattaatttaaagagcacgaagggtaaatcagagacattaatatgcaatatattgcttgtatagtccacatttttgctctgctaaattattgcaataaacaagggtgcttcaattatacaagaatgcaagcgcacgcaagaacacaagtacacaaaatctaagctgccatatttttatctcttctgatttgttttcctctaaaacgcttatttatgtatactcaacaatcaaaaaatgtactgtgctgcaattattccttgccccattcttcagttcaatggtaggaaagttcttatagattaaatcccaaaatcagaaattccgttttgtccagaaaaaa

SEQ ID NO: 758056 - DNA, 501 bp, Homo sapiens
ctaaaagctgaactgcaatgatgtttatttcttttctggatctagccatgcagcagagctactaggctccaggctggtactgaggagtgtctgccaagagtcctgtgatgtaattcatcttcaggtctttcagccatggataccagcacctgctccagtgcaggtagcaggggagcgaagtggagtctttgagggtcmttggatgtaatttggttgtgtgctggttggcctccagccaaaaggtggctctttcaagagcgtaatagctgcggttgtatggagaggattcaagcttgccctaggttcaggcaatgggcggggccatagagctcccaagggattatgtcctttgtctttagctaccagggcaggtagaaaaagatcatcaggtggggagagggttaggcatgtctgagttcagactcttcttgggcagggcttgctgaaactgccatgggggatggaggtgtggttttcagacacatggagctgtttccaggg

SEQ ID NO: 758057 - DNA, 606 bp, Homo sapiens
ttaaatgttaatgaggatcctaaacagcttttgcttatgtggattacatctatcagtatttaccttactagaaattaaaatgatctttttaaaacacaagagtatgcagcactgtcagcctgcccagcattgtaagaatctcagtttccaggctttcctgcccatgagacagctcactatctttcaggtaagacaggattgctgtcactccatgaatgcaaattgtcagcaaaagaacaccttagcgtacaaatgtgctattcataggccatgtctgtcattggaataacaccccaatccacagagaggttgtggaaatcactctggaycccatttttaaagaaagattcactatcccagaatgtatattttggaccaaattgacagcatagggaggtttctattaatctatccaaatggataattccaagaagtatcttcatgaactagcaggagatggagaatctagaaagttagtatataaaccaactcatatggacgaggagtttcctacacaatggaacgaacctggaaaagtggctggtatttgtgtttgtcaagggtccttaactttgctttattttccaaaatagatttcccatagac

SEQ ID NO: 758058 - DNA, 618 bp, Homo sapiens
atcgcaagatacaaaatgcagtgagttgaaaatgttgtgcttaatatattatttgcaattattttattcataagatttgcatttgaaaattacttcataatctgaatttatagaatataactagacattaatttaattactttttyatatcttagaaattagtggtgaactacaatcgctagcacaattatttaagtgagatgttagtccaaatatactgaactcaatattggaaacgttgcttctggttcctgaatacagttgccaatgtgagcaaatggtgacaagttctaattacagttattatagtggagaaaaaagagtaaccacctctggaggctctggaaaaatccttcagggatttttgctgcttggctgaatcaaacatgttttgttaccacaaggacttcaatggaacctaagaattcttaaagtatccttgctgctcaagacacattttctaaaatctaagccacaggtgcattacttagaaaatctgagactgttataaagcagtagaataagttagtataaatatatttgataatgagaagttttaaaatatgacagctttcttatactttttgtaatactgttaagtttcttctctatagtgaa

SEQ ID NO: 758059 - DNA, 601 bp, Homo sapiens
tttttatgtaaaaaagaagctatatccagtggcttcccataaattcctattgttttatttaagattctcagcacttttgaaatggtttagcatgctgtcttcattctcacatatttgaaactcttaagtctgtgtgggagacaggtctcccaggatgagaccagatgagaacagaccacctcttatcctacttcccttgatgatttgagattttttttttgagagcctacatgacaacgttttcctttgaaaaaacytgtttatagccaagaacattctgttatatccttcaggcattcttgacaaacaatagtttcagatttagatgcttaaacataaaaacttagtgccgagattgtattgacttgagaatagagataagtaagcacaataaacatctcttcttcatgacatcagaaagttgcttaaagtgttagaattattttaaaagaatgaaaatatgatatttttctgggtaatttaatacaaggaaactatgtactttataattttattactttcctagatttttatttttaaaatgaggaaataaaaattaatgataagtgccctttgttttccaagtagtataaaactaaac

SEQ ID NO: 758060 - DNA, 617 bp, Homo sapiens
agggcttaatggaagaagtagaaaacatgcaagaaaagatagacgatgtaaaaagagcaatggaaattctaggttttaaaaaatttctagtgataagaaagactaacagaaatgacaaatgtttttatggactcaytggtagactggatactgatgagaaaataatctctgagtttgagaatatgacaatagaaacttccaaaactgagaagcaagagagaaaagatggaaaaaaaaaaaaaagcagaatgttcaagaaccatgggacaactaagaatgccataacatttgcataacgagcacaccagaggagcagaaaaagagaaaggagcagaagcaatatttgaagcaacaatgactgtgaatttccccaaaactaatgtaagacactaaaccacagatacaggaagctcataaaacttcaacagataaacgtcaaacaaacaaacaaaacctacaactggttatatcatattcaaactacagaaaatcaaagattaaaaaaaaaaacctaaataaagccagaggaaatgaaagctcctctgcagaggagcaaagaattacatctgacttctcagaaaacatgaaagtaaaaaagagagagtagagttagatat

SEQ ID NO: 758061 - DNA, 617 bp, Homo sapiens
agggcttaatggaagaagtagaaaacatgcaagaaaagatagacgatgtaaaaagagcaatggaaattctaggttttaaaaaatttctagtgataagaaagactaacagaaatgacaaatgtttttatggactcactggtagactggatactgatgagaaaataatctctgagtttgagaatatgacaatagaaacttccaaaactgagaagcaagagagaaaagatggaaaaaaaaaaaaaagcagaatgttcaagaaccatgggacaactaagaatgccataacatttgcataaygagcacaccagaggagcagaaaaagagaaaggagcagaagcaatatttgaagcaacaatgactgtgaatttccccaaaactaatgtaagacactaaaccacagatacaggaagctcataaaacttcaacagataaacgtcaaacaaacaaacaaaacctacaactggttatatcatattcaaactacagaaaatcaaagattaaaaaaaaaaacctaaataaagccagaggaaatgaaagctcctctgcagaggagcaaagaattacatctgacttctcagaaaacatgaaagtaaaaaagagagagtagagttagatat

SEQ ID NO: 758062 - DNA, 589 bp, Homo sapiens
gtgagaaaggctgggatcctcgcctcgagttacaggaggaagcaggcctggctccagctctagccaggggtgccccaggagcactgggggagcatgtgaagtgcttaccagggttacttggctgagtaaggtgagagcaagcctgtaactgagctcttccagcccagtctctacaggggatctcccactctgcagcagcacctgtggctctggagcaccacccygggagggaacccagcaggacgggaaaagccagggaagcctatgtctcctcccaggggcctcggctttgagaatgagctacccctgaactctcatctgttgtcaagatgtgtgttttatttccacagtggcaggtggtcctttccctaaaatctgttccctaattttaagagtaatacgttcattatagaacatttagaaaatgcaaaatagtattttctaactcccatttccatattggttatttccttccattttctttcctacatatatgcacaggtttaacataattcgtaccttaccctacatacagtttggcattcttgatgttttccagttcacgttatatatgagaatgtgccaatcc

SEQ ID NO: 758063 - DNA, 589 bp, Homo sapiens
gtgagaaaggctgggatcctcgcctcgagttacaggaggaagcaggcctggctccagctctagccaggggtgccccaggagcactgggggagcatgtgaagtgcttaccagggttacttggctgagtaaggtgagagcaagcctgtaactgagctcttccagcccagtctctacaggggatctcccactctgcagcagcacctgtggctctggagcaccaccccgggagggaacccagcaggacgggaaaagccagggaagcctatgtctcctcccaggggcctyggctttgagaatgagctacccctgaactctcatctgttgtcaagatgtgtgttttatttccacagtggcaggtggtcctttccctaaaatctgttccctaattttaagagtaatacgttcattatagaacatttagaaaatgcaaaatagtattttctaactcccatttccatattggttatttccttccattttctttcctacatatatgcacaggtttaacataattcgtaccttaccctacatacagtttggcattcttgatgttttccagttcacgttatatatgagaatgtgccaatcc

SEQ ID NO: 758064 - DNA, 589 bp, Homo sapiens
gtgagaaaggctgggatcctcgcctcgagttacaggaggaagcaggcctggctccagctctagccaggggtgccccaggagcactgggggagcatgtgaagtgcttaccagggttacttggctgagtaaggtgagagcaagcctgtaactgagctcttccagcccagtctctacaggggatctcccactctgcagcagcacctgtggctctggagcaccaccccgggagggaacccagcaggacgggaaaagccagggaagcctatgtctcctcccaggggcctcggctttgagaatgagctacccctgaactctcatctgttgtcaagatgtgtgttttatttccacagtggcaggtggtcctttccctaaaatctgttccctaattttaagagtaatacgttcattayagaacatttagaaaatgcaaaatagtattttctaactcccatttccatattggttatttccttccattttctttcctacatatatgcacaggtttaacataattcgtaccttaccctacatacagtttggcattcttgatgttttccagttcacgttatatatgagaatgtgccaatcc

SEQ ID NO: 758065 - DNA, 424 bp, Homo sapiens
ccttgttatattttattttattttaaaattattattagttttttgagatggagtctcactctgtcacccaggctggagtgcagtggactgatctcgtctcactgcaacctctgcctcccagttcaagtgattctcatgcctcagcctcccgagtagctgggattacaggcatgcaccagtatgcccggctaatttttgtatttttagtagagacgaggtttcactatgttgccgggctggtcttgaactcctgayctcaggtgatccgtccctctcagcctaccaaagcagtgggattacaggtgtgagccactgctcccagccccacttgttatattttagatgagagaaagtcactctggagtcagttaggagtgtttgggttgggcccatctcattgtccttcttcaaagggactaattca

SEQ ID NO: 758066 - DNA, 517 bp, Homo sapiens
cctctaatcccagagctttcagaggccaaggtgggagaatttcttgaggccagaagttaaagaccagcctgggcaacatagcaagacccagtctctacaaaaaaattaaagaaataactgggcatgttagtgcatgactgtactctcagcyatttgggaggctgaggcaggaggatctcttgagcccaggagttcaaggcttctgtgggctatgatttacatgactgtacttcagcctgggcaacaaaataagaccctccttgtctcagaaaaaaaaaaaaaggggggggccaccagaaaaataatgactatccaactgactatccaaagctttttacagagacttggtcacatagaatgaacactcgtttggcagaaatatttcagttccctggagattgtagtgacatttgtacttttgcatttgtagtaacatacggagcttcatggaggatgaataatctcaagctattgggttgtccagccttagcttcaaattagttttttaagaacacat

SEQ ID NO: 758067 - DNA, 517 bp, Homo sapiens
cctctaatcccagagctttcagaggccaaggtgggagaatttcttgaggccagaagttaaagaccagcctgggcaacatagcaagacccagtctctacaaaaaaattaaagaaataactgggcatgttagtgcatgactgtactctcagccatttgggaggctgaggcaggaggatctcttgagcccaggagttcaaggcttctgtgggctatgatttacatgactgtactycagcctgggcaacaaaataagaccctccttgtctcagaaaaaaaaaaaaaggggggggccaccagaaaaataatgactatccaactgactatccaaagctttttacagagacttggtcacatagaatgaacactcgtttggcagaaatatttcagttccctggagattgtagtgacatttgtacttttgcatttgtagtaacatacggagcttcatggaggatgaataatctcaagctattgggttgtccagccttagcttcaaattagttttttaagaacacat

SEQ ID NO: 758068 - DNA, 613 bp, Homo sapiens
atatgcataaagggcttccagggccccatctatgacatttccagaaatttaaaaaacaaaacagattgcagttactaggagaatctatgaaagaccaaagtccataattatattcaaaatagacaaataacataaagtgaggtagaaagattcatccttaccaatacaggccaattgatcttttcccagttatagaaaaagaaaacacactactcacagtggttagatctgtgatacctcaccacttctcagagggacactgcagggaattgaattgtcgttttgctctttgaaagaaacccagcatcarggccacccactaaagggggcagtcaagtgtgaatcgtgggaaagacttcagggaaattgacttcccaggccacctgaaagatgggggcaatgatactgctttctcctcccgagtgaggatgtggcctaattctttctgaatttggccgaaaacccaggaaagttggacatttgtagacacaccctcaaagcaaagcatgtggattgttggagtaggttcctccaggatggtggtactcagtgtgcataagtgaaagctcatggcttaagttgggcaaggcctttccctgtgtagacagagtca

SEQ ID NO: 758069 - DNA, 625 bp, Homo sapiens
ccttcccaaggccttttttctgaggctccaactctctcttccttcatccacctaagcccagcccctgcttctcttctcaaaacaaaaaagtaacatccaccctcttgccttgaatatctcatctcccaaaacttggattattttatgtggtaactgcattatttcaatttagggtgagagttgggatgcagtctgtatgaaccaaaaggcaaaaataacatcacaatgtattattcaaaagaattaaaaagaaatgtctatgatttccagtttttattaccagcacttcacttattgctttggggacttctgggtttgttctggtttgttttggttttgcttctttccccccaacatagcaggaatacttaaaatctaaatatgcaaaaaagaaaaactgaaagttttcaaaagggagaaatgctgatcttgtctaatgatgccacaagtttactccaaaattgctcaatacyccgtaatggaggagagaaaattgatcgtcctcattatcactgcagctctgtcaataccaatattgccttgttttgaataaaatgcgctgtttttttcaacgttagttccagtaaaatggggttttagtgaagatagcagtagcaggaaacca

SEQ ID NO: 758070 - DNA, 624 bp, Homo sapiens
tactcaccagggaaggacccaggaatgctgaagctgcccaccaggcacagcttatacccaagctcatcttcctattcaatgagccgagcctcatcccctccaagatccccaccatcattggcatcctggcctgtcagctgaggggccacttcagcacccaggacttgctcaggtaccacaccaagctgcccagggggaagagcagggccccagggctgtttaaaaagggaggacagaccccagctctctccccattgtgctcaaccctgaatcacttggaaccttctaggaatttttgcycagggctgagagttggggaaaggatggtttgctgaagtcaggatgggacaggccggtttccccagcagggctgtgtgtttactgttcccactgctcaggctcccccactgtggccaaatattcaggaatttccataagcactgccatccttggcagccaatgacccacatgcctggctcctgcagactcctgaagagcagtcccagccaccagtgtgtttccccttctctttcctgtcactatctgattgatcaggtagagccagagttagcgtctctggtgaatcctgactgattttagaagtctctggaaatacacagcatg

SEQ ID NO: 758071 - DNA, 688 bp, Homo sapiens
ataaagaaatctgaaagacctagatgatgcgccagagacttaccttgtgatggctgtaggttggaaggtccaagaaagcttctccaaggaggtgataatgagagatgaaggagcggccctccaacatctgggggaggagagcttgggaaaggacccagcaaatgscaaagctccggggtacaaatgggcttgtatatttgagagcagagagaggcccatgtggctgggcacagacaccccttgggggagtgggagtggctcagaggaggtggcaggagccggccaccaagcatcattccaagttcttcagggaattgggaaagttgtctataactctatatctgggcctctatatctgtattttcatctggctctagctctccttctcctctaccaaacccctgtgccccacactgagagggcttccttcaacctcccccacacactcatgatttcctgccatgttccaggcccttgggttaaggccagggaatactgatgaaaaagggcacagtccctgccccaggaggtcctcctgcttctaggctggtgaaataattatgctgtaaaaagaggtgcccagaagagagagagtgcaagtctggtttggaggagcttgatctgagacttggaggaggaggtggaggaggaaagatgtgagggcaggttgatggtgaggaagagcccc

SEQ ID NO: 758072 - DNA, 566 bp, Homo sapiens
atgatttcctgccatgttccaggcccttgggttaaggccagggaatactgatgaaaaagggcacagtccctgccccaggaggtcctcctgcttctaggctggtgaaataattatgctgtaaaaagaggtgcccagaagagagagagtgcaagtctggtttggaggagcttgatctgagacttggaggaggaggtggaggaggaaagatgtgagggcaggttgatggtgaggaagagccccctccagatgcaaaggatggaccctcgtgatcatctgccttgtgggccaggtgctgtcttggcattactggagtatcctatccagttcatcttaattttatgtatttatttatattctgactctctccccagaggctttatggtacctctagatgaggatgtgtgcaataaaataaggaaatgagatcaggaaagaaaatratcatagaagaaagtcaattcctaggaaattcagagcttgaatatacagtctctaaagactcaccgtcacataccagcactgtgctccagcttcctgaatgccactgtggagtggtaggcaagagg

SEQ ID NO: 758073 - DNA, 607 bp, Homo sapiens
caagaagtgtcctaccaataatgccgtccttgaaatgcaagcattgcaggtataaataacattgaatcataacatgctacgtgactttcactgttttgttttgtttttttgttttttttttgtttttttgaggtggagtttcactcttgttgcccagcctggagtgcagtggctcaatctcggctcactgcaacctctgcctcctgggttcaagcgattctctcgcctcagcctcctgagtagctgggattacaggcatgtgccaccacacccggctaatttttttatttttagtagagatggggtttctccatgttggtcaggctggcctcgaactcctgacctcaggtgatccacmcaccttggcctcccaaagtgctaggattacaggcgtgagccaccacgcccagcgactttcactgctaaatccatttctttgacaaaagaaagtgaagttatcaagtgctctgatagaaagcctcagtggtcattcatgtggtcagcctgtctataagtcatcttggggactggtttttaataagcagagggtttcctgtgctccaaaatttgcttagggctgaccctgacaactctatttatttattta

SEQ ID NO: 758074 - DNA, 587 bp, Homo sapiens
ctactttattgtttcaaattatcttgaactcttaaactcataatcctacataagatgactatttctaccatggcaatccctgtggttatttgttcaatgcccactgccttctgatgcaactggctcccagtacaccagaaaggtcctttattggctgagcacaytgatgggtggttgtatgcagtttgaataaagataggagattattaggtaaaatagagggaaaagaaacctaaagttggataatgataacctagaggaaaggtagtcagaagctggggaaggtgaatgcttcttagtcctgagaagactaaagtgtaaagaatctccttggcagcatggtagtgtcagaggcctttgaaccagagcaacttcatcttaaataggggctgggtaaaataaggctgagacctactaggctgcattcccaggagattaggcattcctagtcacaggatgagatgggaagtcggcacaagatacaggtcacaaagactttgctgataaaacagattggggtaaagaagccggccaaaacctaccaaaatgaagatggcatcaaaagtgacctctggttgtcctcactt

SEQ ID NO: 758075 - DNA, 587 bp, Homo sapiens
ctactttattgtttcaaattatcttgaactcttaaactcataatcctacataagatgactatttctaccatggcaatccctgtggttatttgttcaatgcccactgccttctgatgcaactggctcccagtacaccagaaaggtcctttattggctgagcacattgatgggtggttgtatgcagtttgaataaagataggagattattaggtaaaatagagggaaaagaaacctaaagttggataatgataacctagaggaaaggtagtcagaagctggggaagrtgaatgcttcttagtcctgagaagactaaagtgtaaagaatctccttggcagcatggtagtgtcagaggcctttgaaccagagcaacttcatcttaaataggggctgggtaaaataaggctgagacctactaggctgcattcccaggagattaggcattcctagtcacaggatgagatgggaagtcggcacaagatacaggtcacaaagactttgctgataaaacagattggggtaaagaagccggccaaaacctaccaaaatgaagatggcatcaaaagtgacctctggttgtcctcactt

SEQ ID NO: 758076 - DNA, 593 bp, Homo sapiens
cactgtttatacaatattttcatgtatctcatcctgacagcaccatgaggaagtaggcagcaaagtattaataactacacatttcagctgatgatgagtgaggctgaaaggctgtcttacccaaggtcatagagcaaataaacagtgacgttcagacaagtatccatgtctttcaataccagatttaatattattttcattatgcctcactttaaatcataaactttagttaactttaacactaacatatcaaagtaaattctgaattttaattatttaatttaaaacaaaactgcttcttcctgttgatctattataacttccagctatttccagctattagaamctgacacggtatttttaaggtttccattagacatatcttcaggtaatagaagtcgagataatctacagcctcttaagaaaagatggaaggtatatgctgctctaagggtcttttattaaaatactccaagagaggaagtctttccaagattaggcataatgtgagaattgaagaaagagatagtgtagaataaaagctctctgaagaacccttaacatgaaatgcaatcacataatgatcttcagag

SEQ ID NO: 758077 - DNA, 448 bp, Homo sapiens
ctgcagataacatcactattacagagcgagcctaagattggccttttgagatatcttttcaggtttttacatttctgaggacagtctacccctgcccatctgtcatgtggccccacccaaactgactccttgtcccaccaaactatccttgaaaaaccctagcctctgaattttcaaggagattaatttggtaataactccayctctcacatggcatagctgaccttgtgtctattaaaatctttattgcaatgctgtggtcttagtgaattggctttgtgcagtgggcaggaagaacccattgggtcgtttccggactgtcatgtcagtttgattaatcagtagatcaacatactttgttttagatcccataaattcagctttcttattagtagctgtattagtctgttcttgcactgctatgaatacctgcgactgggaaatttat

SEQ ID NO: 758078 - DNA, 448 bp, Homo sapiens
ctgcagataacatcactattacagagcgagcctaagattggccttttgagatatcttttcaggtttttacatttctgaggacagtctacccctgcccatctgtcatgtggccccacccaaactgactccttgtcccaccaaactatccttgaaaaaccctagcctctgaattttcaaggagattaatttggtaataactccatctcycacatggcatagctgaccttgtgtctattaaaatctttattgcaatgctgtggtcttagtgaattggctttgtgcagtgggcaggaagaacccattgggtcgtttccggactgtcatgtcagtttgattaatcagtagatcaacatactttgttttagatcccataaattcagctttcttattagtagctgtattagtctgttcttgcactgctatgaatacctgcgactgggaaatttat

SEQ ID NO: 758079 - DNA, 652 bp, Homo sapiens
tcgtcacaatagcaaaggcatggaatcaacataaatacctatcaacagtgaattgaataaagagaaagtgttatgtatacaccccgaaatactatgcagccataaaaaggaataaactcatgtcctttgcagcaacatggatgacagctggaggccatgattctaagcaaattaatgcaggaatagtacaacaaataccgcttgttttcacatatgagtgggtgctaaataktggattcatatgggcataaagacagcaacaatagacccctgggtctactagaggggggaggttctacaaacgacctattaggcactatactcactacctggatgatgagatcaattgtaccccaaatcttacccatcacacaacatacccttataagaaatctgcatatgcactcttggatccaaaataaaagttgaaattttttttttaatagctgaaatgcctatacttttaagcaaagtagattttgaagtaaccattactcttagggatcaagaaagtcatttcctaatgaaaaatggttctggtcatcttccctctggctgtatgtgttcatcaacagagtttgacttcagattaattgagattaaagttttcttcaccactgaagaagctccctgaataacagcagtgggtacc

SEQ ID NO: 758080 - DNA, 590 bp, Homo sapiens
actgggattatcaggagatacagtcataagtatgttcctggtaacaaatctagtaaggattttcaatcaaatctggcttcttctaccacagacacctttatttacacaatatcttaatttattacttcaatttacttgctggtctgttttatttgtaggcttagtctaattttaacactgtcaagaataattcacagagtatcaggtgagtctgcttagaagagggaacctacgttaatcttttctgacattaatagaattggaccttattaattctgacatgatttatttcatatcgtgtaaatactaaatgcaagcatcatgttctcattgaaacaagtgttttacatgcttcatatactgcaatttgcaacatgaattgaaartgagccttgaaaaccatttgaaatgacttaattcttgtcaaacttagaaagattattactgccaaatgggaaacacgaaatgctgacaaacagtgctccaggacgtcactgggaagaaagagagcaaaggcatgcacagcctgcggggcttgccaatatcactcaggcagatattcttcttacgttaacaaaaattattcccaa

SEQ ID NO: 758081 - DNA, 549 bp, Homo sapiens
gaacatttccgcttgctggcaggtgtgtgcctggggctgggtattggacccacctgattatttcctggtgtatctcgtcctttccacttagctccctgctgcctattctagaagcagcatacacagatgcatgagccagtgtctgtggcttactgctgagccattctcttctaaataccaccagtagtcccattccaactgagagccaaagataggttamaatagagtattttcagtttctacagtttgtggcatgtatttatttttgttttggtttttactcatctgattgatttgggggggttgggaattaccaaaatgctttcgcacagaaaatactttaggatcttggtttcaaaggacacaactcttacctatcacagggatgcacccattcacttaatagtttataatgagacagtgtgattcatacgatcaacactgaagccacagtatatcgtattctgtgccatatgttctctgttgcatgggtattctggagcaagggggaagtgaggcatcttaaactggaaactaaaatgtaaagaa

SEQ ID NO: 758082 - DNA, 549 bp, Homo sapiens
gaacatttccgcttgctggcaggtgtgtgcctggggctgggtattggacccacctgattatttcctggtgtatctcgtcctttccacttagctccctgctgcctattctagaagcagcatacacagatgcatgagccagtgtctgtggcttactgctgagccattctcttctaaataccaccagtagtcccattccaactgagagccaaagataggttaaaatagagtattttcagtttcyacagtttgtggcatgtatttatttttgttttggtttttactcatctgattgatttgggggggttgggaattaccaaaatgctttcgcacagaaaatactttaggatcttggtttcaaaggacacaactcttacctatcacagggatgcacccattcacttaatagtttataatgagacagtgtgattcatacgatcaacactgaagccacagtatatcgtattctgtgccatatgttctctgttgcatgggtattctggagcaagggggaagtgaggcatcttaaactggaaactaaaatgtaaagaa

SEQ ID NO: 758083 - DNA, 654 bp, Homo sapiens
aatgatttcattcctggaagatttttgggggtcagctcttagctcccaattcctggactgtgggctctaactctggggacttgtattgggccctgactttgttctctggctcctccagtttaggagtctactgtgctgggtgtggctgaggtgctccctgactgctggtcactccactccaaagggtggtgtcagccaaagcgtttcayagtgcggtgacgatgggatccgcccatgtttgcacgtgccaggagcagcggtagcagcagctccagggaggtgcacacttgtcagcggcagtggggtgctggcgggtgccagagggcctgccgccctaaggtcgttcacgatggtgtcagcggcaatgcagctggggtggagggcctgctggcagctgtgcgtgcagtgacactggtggtgttggctgcacacacacagtttggtgttggctccaacactaacatttcaagtctggtggtatatatctatcgtctatagtacacattcattttctatcatgcgcaaacactgtgttaaggtttttaatttttagtcaccttaaaaacaatcttcttgtattgttttgttttgatacaaaaactcttaggattgttgtaagtatctccattttcagagaagaaaatggaagcaaat

SEQ ID NO: 758084 - DNA, 548 bp, Homo sapiens
aatgtactttttctgaatggtaaacagaactaaatgagacttaaagggcctaatacgatgcctcgtccatagtgagtactcaatgctgaccattagtcctttttttttttttttaatcaattgttcattggttttactatgctttgtttgcatatgaaccagcccaggctggggtgtagagatgagctttgcattggaacaattcatagctctatctatgaaaggctggggatagaatgacaaaggcaggggaattcagttctggggttgacagaattggattactcacaaattaatgttttcttgaactgaaaatagattttcatggaaragaacaatgaaagactggatgtttctgccaagtcttccaatgatgtgcaatccctgaaacctgaggctgtgccattagagaagatcaacatggccagggatggcccttgaatatgaccaacttcctaaccatcctgagatagggcaattacttaatttttatggacagctaatgctaacctagcagcttgcttgaaagaaacctccttttcaatgca

SEQ ID NO: 758085 - DNA, 591 bp, Homo sapiens
attttaccaagcaagacaggcataatctccaggttatcaggcaataggccgctgttttaggcctttgttgcttcttgaagggggaacaagaagcaaattggtttcaacacagaataaatggcacagaggactcctgccctggggagaaggagattgccaataaggaggtaatgttctagctcttggctgctcgtgtatcacttttgctccctcccaccttgagttaaccggcacattgaaagaataatagattcagcagcacaatatggtgtaatgaaagtctgatacacttacatatcagcctcagagcaagaaggcaatctccctactgtatttaatattcctcatatctgcctaggtatgttaggcttgcgctttggtctacttgttgaaagaataagaaatgtacaggtaagtgagtayaataattagggttcatggtgctgtgaaggaaaacaggttaatgtgttatggtttgaaaaacctgggaaggtaagggcaggaggtaaggacttaataacactttctaaatatgtaaaaagctaccatgtgatatatccgagtactgagcacaaagaagtaagctagaat

SEQ ID NO: 758086 - DNA, 566 bp, Homo sapiens
ccaaagaaaatatacaagtgtgtgttatagacagaggtgtgtacacatctacagagacagcagtgctgcaatacaacaacaggtgaacctaggtgaaggataagtgggcgtgtctgttacagacaggtgtgtacacatgtgtaaatagagacagcagtgctgcaatacaacaacaggcaaacctaggtgaaggggaagtgggcgtgtgtttcagagagaggcgtgtacacatgtgtaaagagagacagcagtgctgcaatacaacaggcgaacctaggtgacagggtagtgcgtgttgtgtgttacagacagyggtgtgtacacatgtgtaaagagagacagcagtgccgcaatacaacaggtgaacctaggtgaagggttagtgggcgtgtgtttcagagagaggtgtgtacacatgtgtaaagagacagcggtgctgcaatacaacaggtgaacctaggtgaagggttagtgggcgtgtgtttcagagagaggtgtgtacacatgtgtaaagagacagcagtgctgcaatacaacaggcgaacctaggtgaagggtttgtgggt

SEQ ID NO: 758087 - DNA, 566 bp, Homo sapiens
ccaaagaaaatatacaagtgtgtgttatagacagaggtgtgtacacatctacagagacagcagtgctgcaatacaacaacaggtgaacctaggtgaaggataagtgggcgtgtctgttacagacaggtgtgtacacatgtgtaaatagagacagcagtgctgcaatacaacaacaggcaaacctaggtgaaggggaagtgggcgtgtgtttcagagagaggcgtgtacacatgtgtaaagagagacagcagtgctgcaatacaacaggcgaacctaggtgacagggtagtgcgtgttgtgtgttacagacagtggtgtgtacacatgtgtaaagagagacagcagtgccgcaatacaacaggtgaacctakgtgaagggttagtgggcgtgtgtttcagagagaggtgtgtacacatgtgtaaagagacagcggtgctgcaatacaacaggtgaacctaggtgaagggttagtgggcgtgtgtttcagagagaggtgtgtacacatgtgtaaagagacagcagtgctgcaatacaacaggcgaacctaggtgaagggtttgtgggt

SEQ ID NO: 758088 - DNA, 441 bp, Homo sapiens
aaaaatgaaaactaaaacacacacgtttatcaccccccaatgaggcaacccggccaggagcccagcaggcagatgtgcctgtacgagatgctggccagcagtgcagagggtgagacgggggccaggcctcgtggaaggggatggcaygggcacagctgtgcggaggagggaagtctcaaggcttcttgcgcccaagagcgcgcactgcagaggggaagaggctgggaaggcaggcggccaccgcggggacagtgagggcacgggctggactggggccccagcagaggtgacagcagatgccctgaggccactcctccagcaccaacgaaattgagattgttgcccccagaatctgctatcccagaatctgctatggaggcacagggagcacagagaccacgagactgaaaatgtgaactcaatgacggagggcctgtggga

SEQ ID NO: 758089 - DNA, 605 bp, Homo sapiens
tttgcatttccctgatggctagtgacactatcttttcatgtgcttgtcatccacatatcctcttcagtgaggtgtctcttcacacccattttctaacagtattattcgggttttttactgttgagatttaagagttctttacatactctatagtatgaattatatgtcacataggttaagctgcaaatcatttctcccaatctgttgctcttcattctaagagtttttcatgaagcaacacttctttaatgttgataattttttctatgcatcacacttttaaagtcatgacaagaacttttcatgaatccctaggggccaaasattttctcctgtttctcctgaattttttatagttttctgtttcacatctaaatttattacctatatggtactgacctttttataaggtgtaaaatttaagtcaaggtttttttgttgtttgttttcacctgtgtatccaattatcccagcctcatttgttgaagatgatccatcctagattgaactgctttggacttttgtcaaaaaatcaactcactgtacttgtgtggggttatttcttggttctctattctgttccaccgatctacatatttatcctt

SEQ ID NO: 758090 - DNA, 579 bp, Homo sapiens
ttcgaactcctggcctcaagtggtctgcccagctcggcctcccaaaatgctgggattactggcctgagccaccacagcaggcctcctgaaggtaattttattttgccctaggggatcctgaataaactatgttgcgcacccacattttgactacaacctgtctgtcacaaggtaaggtgtggaaatttccacttgtgtcatgttatggattttgaatttttggattaggatgctcaaccggcgtagcataaatcttatttaaatgtttaatcaccagtttagggggttttcaggttggtatcatgggaagagggacaaggaagtggcaggtgtttgtaaaactactgaaatggtataccatggaatctaaaatagacaggaagggaagtgaaaacaraaagaattaatggagagatactggaagaaagttggtggactggcagatctaccagaggctgaagagctactacaaagaattgctgtaaggctcaaatggatcaataaatacaaagagtcactaatcctcataacatccctatgagacagagttcccaaatccaattaagagcctttcaacac

SEQ ID NO: 758091 - DNA, 643 bp, Homo sapiens
aaacgtcgagtcacttggctgagaccatacgcatcttccgtactgcttgtattaggatgcaagattgaatgtgtcttttttttaaaaatgcagccttgtgttgcactctgaaataagtgatttaaaaagaaaaacatgatacagagatcccatcctgaccttggaggcttggataaagctgtggggagacagcctcatggtccagccaggctagtcygcctgcttcaggactctcaagatctccccaagactttcaggatcagctgctgttaatcaaacaagtgcttataaaatggaaattgggacaaaggaaatgttaaatttcctccctgcaaccaggcagatgagaaatatggaaataaggaaaagggaaaatgaagatatgacaaagttgatgaaaaggttgaaatagtgatttatacatgatgggcaatcaagtgccccttttgccctgttttttggagagggtgtatcattgcctcaatggtgcgtctgcctgcactgagggcattacacatggctgactcgacctccctgcctctcacactctgtgtattttgtgaagctccacaaacggggtcacgtcatccaggtgaggccaccaccggtacagaaacctctcggcaatggttcttagccaggg

SEQ ID NO: 758092 - DNA, 623 bp, Homo sapiens
atttgagataatgaaaaagcataggaaatagtgctggtggttgcacaacaatgtgaattgatttaatgccactgaagtacacacataaaaacagttaaaatagtaagtttcatattatgtatatttaaccacaatctttatcttaaaaagtttgaggagaaaaattcaacatcacaaccactcttggaacctgcttctataaatccaaaataataattaatagttttctttttaattcaaatgtgttgaaatatgtggccctcagggagaggctcraggaaccgaagaggccctgaaatggctaagatgggagacccacgccctaaagatgaaaagtaccataaaaacaagaagagagggggaagaaaggtttcatcagtttatgttaaactctttcataaacttttcttctgaaatgtaaaaaaaagtgtttgacatggtgctaagtatattaaatagtcttacccgtggtaaaatcggattaaacatgtaaacaaaggatgttatcacttgaattgcactgagaatcactgaagaaacccaggcaaaatctgcagaggaaatcatgtcctcaccagctgaggctgtgctggcagtggctggggtgattaccttaaccagtg

SEQ ID NO: 758093 - DNA, 605 bp, Homo sapiens
ttaccatacagtaggctagcaatatgtaaataacagtagggttatttcaaggtgtagggaaggctagttcagattaagtggtcaggaaggcctctctgaaataaagattatatgacaatgagatccaaccattgtcttctctattgcagtgatgacgaggaaaagcattctaagtagaagtaaaaacaaggacaaaggtgtagagtttggaatgaccttgatatattcaaggatcagaaaggagacctgtatggttgaagcatacagtgagaaagaaggaatgggatgggagaataagatcactgaggtaggcaggggatgggtttcataggaccttgaagactacaataaagagttttattccaaayaccagtgaaggactataaaaaggggtatgatttatagacaatataacagacataaagaataaatgatataaatttactttaaaatgttactaaatttgtggaggttttctgttgtggatttcatcaattaatgaatactgaaagcaaaattgattatcatgttaataagggagttttataattgaaactcttgggaaccactgtctcataaagcttacatttatttggaatttaaat

SEQ ID NO: 758094 - DNA, 599 bp, Homo sapiens
tcacttactctcaggcaactcttacatattaggagagaattaggtctcatctcaatttcaagaactatctccagaggcctgaagtgtgcccactctctactttcactcatgttttagatcagtttcgccctcagtcaggtcacaggcaatagtaaacatgccaagaacagccttgcccagaaatgtgagcattaacatctgatctctttgattaaaaaagacttccaggcactttaaaagacatagtcaaagctattaagttattgctaagaatggaaatcagygaaagcaatctgaaaatgtagcacaaatcttctataataaaaatttttaaccaaaaacatcactcactaattttcttttgcactgaatggtcaactttgggatcaaatgtcaggggaagcaataaatgattttcacagtcaccttggcctacagtattgtctatccatttgggaactcagacatccaagtcttcattgaggacatgacagtccacagctctttcacacagacatactccttgcagagcctcttaaaagtttctaattccgagttattttcaaaggacaactccatccatctattgtgaaatattt

SEQ ID NO: 758095 - DNA, 594 bp, Homo sapiens
tccacctcctgccctgtagatgtgcctgcttccccttcaccttctgccatgattgtaagtttcctgaggcccctccagccatgcttcctgtacagcctgtggaactgtgtgccaattaagtctcttttatttataaattacccagtcttaggtagtgctttataggratgtgagaacaaataatacaatgtcattaggtgataggaatttttcagttccattatagccttcttaggggaccattatcctatatgcagtccatcactgaatgaaacattgtcatgcacggcatggccgtatgtagacaggaacaattatgctagatactgggaatcttgaaggaaataaaacacaatccttgccctcaagagagataaagggtaagaatattagatggagatgaaagatattccatagagttatatgatttgagactgaagttgagtggttagagatgaaaaaatttcctgggatgtgtcaggcagaagagaggaacgagtgtaaagcacctgaggaaaaactgggaagatatttcttatatcgccagaaagctggtaggcttgtgttacggtgggatattaatggaacttgaag

SEQ ID NO: 758096 - DNA, 640 bp, Homo sapiens
gaggaacgttcagctgccaccctgctgcaacttaaataatttcctaagtctctactacgactgctgcccctattgcagaaaataaaacaggaaaaacttctagaaattagaattctcgttttattgaaacatcacacaggccaatgtgatgagacaatgactaaggagcaactgcctttgctcttctggattccgtggtgggaactaactttggatcctcaccctgcaggatcccctgctatatgaccctacttgcccaatactccacttcatcaaggtgaagtgacccaccaagagagactttcagggtctgggcattaccaggtagtttctaaatggtaatcaacaagccaattttgctattgatagaagattgtaggatggggacgtgtagaaatttgcaaggtttaaatacatctrattttaaggtttgtggtcttcagtttaacaaaccatctttctagtacagcaatttataatattgactctataatgctggctgttgcaatagtagatcaatgacaatattaagggatgatgagactattccagtttacaagtgtgctgtactggaaagagaacatgtttgaggccaaaagacctgcgatttggtcccagttaatatggcttgcataaacta

SEQ ID NO: 758097 - DNA, 591 bp, Homo sapiens
cctgggcttccagtcataatatacacatttcaatcttcgagatattaagatttttgtaagttgattttattctttaaatagacacatagactggttttgaatgtgcattctaagattttcccaaacttgtgaaggagaaatatatcactcagggaaggattcgttagtgacattctgtcccagtgcatcagcaagacaatggggcttaataatatattgccaggtgtaacatatcaccgagcactggggcraggaaagaagtcactttaatcaattattagtgctatgtttcatcaaggtgtcaccagttggctctcaagaacacaaacctgtgtaggagaggttataatattgttactttcattagtagtatctttgaattccaggtgattaaaaaaaattgttaaggactcttcaaaaagtaagtgtagtgatttcaatgtttatgcaaacactgccaatgctgtcatgtagcaaattaaaatgttaaatgactcttcgaaattttaaggtatttgaaaattctactcacgaaattgtaactaattttacattcttaagagtacacatgattatagataatgggataat

SEQ ID NO: 758098 - DNA, 606 bp, Homo sapiens
gaacaagagtaaaaaaaggaggaggaagaaggagaggagaaagagatgaagagagagaaggaagagagagaagcaggggagggagagaggaggcatggaagagaggaaaagggaacaaagaaatgaaaggcagagagatggagcaaaagaatgatggaaagataaaagtctaaaaacgcttacataaaaaaacaaaatttgccctgattaatcaaacttcaaaccattgagttccttaatatacagttgcataaaactgttcaactgcctaccagagcmttttcctccagactgttggaaagtctctctacaatctgccttagccaaccaagtaaaccttcaagtagaccatgaaggtttacttggttgagttctcatttccctctaaatctccttccatgttttccccaagcccaagtatgatagaattgaaaaaaactgcataatcgacgcaaaagggagaaaacatatagcctatgccataagtatccttagaataccaagaggtaaataatatccatgaatgttaacactttaatacttttgattttataaaacttttctttgcccaaacttctatgattcttcagagactccttttattta

SEQ ID NO: 758099 - DNA, 619 bp, Homo sapiens
aggtaaacagtttggaagtggtagtgcctgataattttctaacttaaaagtgcaatgcccacttggaattctatccaattaaggcaaggaagtacccactgtcaccaatactgctttatcagccagttttattctagcagctgcatcaagcagctggttctgagactaattccacatctttccaaaacattattggtttttcctctctccctgagtagtgttaaggatggtagaagtagatggatagctttgctctatgttgacttataygcattgaagtatcaactactgacctgcctgtatgagaaatgtgtgctttcttcagatgataaacaatgtcttgtcagttggatctctttaggaatctcatctctgattaataatatctgattgaagacttaacttgaaacttattaggtcaacaaaaagattagtaataaaaaatatacaccctgaagtgaaacataaacagaaaatatgcaaacaagccaaaattaactttttaaagtcatgatttttatttctatattaaaataagtatatatctttgcaatttatcatataagtatcatacaatatactgagcatccactatgccatagtgttcctggtatttttg

SEQ ID NO: 758100 - DNA, 619 bp, Homo sapiens
aggtaaacagtttggaagtggtagtgcctgataattttctaacttaaaagtgcaatgcccacttggaattctatccaattaaggcaaggaagtacccactgtcaccaatactgctttatcagccagttttattctagcagctgcatcaagcagctggttctgagactaattccacatctttccaaaacattattggtttttcctctctccctgagtagtgttaaggatggtagaagtagatggatagctttgctctatgttgacttatatgcattgaagtatcaactactgacctgcctgtatgagaaatgtgtgctttcttcagatgataaacaatgtcttgtcagttggatctctttaggaatctcatctctgattaataatatctgattgaagacttaacttgaaacttattaggtcaacaaaaagattagtaataaaaaatatacaccctgaagtgaaacataaacagaaaatatgcaaacaagcyaaaattaactttttaaagtcatgatttttatttctatattaaaataagtatatatctttgcaatttatcatataagtatcatacaatatactgagcatccactatgccatagtgttcctggtatttttg

SEQ ID NO: 758101 - DNA, 632 bp, Homo sapiens
cagctggttctgagactaattccacatctttccaaaacattattggtttttcctctctccctgagtagtgttaaggatggtagaagtagatggatagctttgctctatgttgacttatatgcattgaagtatcaactactgacctgcctgtatgagaaatgtgtgctttcttcagatgataaacaatgtcttgtcagttggatctctttaggaatctcatctctgattaataatatctgattgaagacttaacttgaaacttattaggtcaacaaaaagattagtaataaaaaatatacaccctgaagtgaaacataaacagaaaatatgcaaacaagccaaaattaactttttaaagtcatgatttttatttctatattaaaataagtatatatctttgcaatttatcatataagtatcatacaatatactgagcatccactatgccatagtgttcctggtatttttgagaaagcgtcctatgttyaaatactgcattggttctcactaaaggaatggtattaaagtaattatattaccacacacaaccttaaacttctcatccataaataacaccttatttgcacagttatttaaaggatttataaaagatatgccagtcatttgttaac

SEQ ID NO: 758102 - DNA, 661 bp, Homo sapiens
gcaggatccttgaaagtgtattagatttctatttagtcaatattttcttatacatacacaaagcaaactgtccacaatttaaaagttaaaatataatttcaaataaatttgtgttcacccaaaattcataggctaaagttctaacaattggtacctcacaaagcgactggacttagagatacataattagaaraggggctttgaaatggtcatatgagtgggccctagtgaactcttaccagtgtccttgtaactcagagataccagggatgtgtacacagaatgacgaagacacagtaagaaggtgactatctgaaagccaaggatagaagcctcaggagaaaccaaatctgctcacaccttgatagtgaacttcggtctccagaattatgagaaaatcagtatttgttaagtcatctagtctatggtacgtagacctagcaaactaatgtatccacctaaaagggaaatatctctaagaccaggcagaaggtaagcggcctccattatagaaacagcaatgataattggctatgtgtcttagggctgacagaatgtgtaaagtgaccagcctccctggaattcacttctctgttggcacttctctgcaataaccaatcagagagttatctatgctgcttttactcagaatatcctttct

SEQ ID NO: 758103 - DNA, 661 bp, Homo sapiens
gcaggatccttgaaagtgtattagatttctatttagtcaatattttcttatacatacacaaagcaaactgtccacaatttaaaagttaaaatataatttcaaataaatttgtgttcacccaaaattcataggctaaagttctaacaattggtacctcacaaagcgactggacttagagatacataattagaaaaggggctttgaaatggtcatatgagtgggccctagtsaactcttaccagtgtccttgtaactcagagataccagggatgtgtacacagaatgacgaagacacagtaagaaggtgactatctgaaagccaaggatagaagcctcaggagaaaccaaatctgctcacaccttgatagtgaacttcggtctccagaattatgagaaaatcagtatttgttaagtcatctagtctatggtacgtagacctagcaaactaatgtatccacctaaaagggaaatatctctaagaccaggcagaaggtaagcggcctccattatagaaacagcaatgataattggctatgtgtcttagggctgacagaatgtgtaaagtgaccagcctccctggaattcacttctctgttggcacttctctgcaataaccaatcagagagttatctatgctgcttttactcagaatatcctttct

SEQ ID NO: 758104 - DNA, 661 bp, Homo sapiens
gcaggatccttgaaagtgtattagatttctatttagtcaatattttcttatacatacacaaagcaaactgtccacaatttaaaagttaaaatataatttcaaataaatttgtgttcacccaaaattcataggctaaagttctaacaattggtacctcacaaagcgactggacttagagatacataattagaaaaggggctttgaaatggtcatatgagtgggccctagtgaactcttaccagtgtccttgtaactcagagataccagggatgtgtacacagaatgacgaagacacagtaagaaggtgactatctgaaagccaaggatmgaagcctcaggagaaaccaaatctgctcacaccttgatagtgaacttcggtctccagaattatgagaaaatcagtatttgttaagtcatctagtctatggtacgtagacctagcaaactaatgtatccacctaaaagggaaatatctctaagaccaggcagaaggtaagcggcctccattatagaaacagcaatgataattggctatgtgtcttagggctgacagaatgtgtaaagtgaccagcctccctggaattcacttctctgttggcacttctctgcaataaccaatcagagagttatctatgctgcttttactcagaatatcctttct

SEQ ID NO: 758105 - DNA, 519 bp, Homo sapiens
gctaaaaccactgcacctagattagttacagacaagagcagagcttttgatgtaaatgtttaaaaaatggaatcaagatcttaaagcatttcttcaacacccgtaacaggaggcgaaacatggctttaccagtgtgatcctgaagacaaaacacaatgaaagcaatgggtaccaaaagttagacatggtccacttaaaacaaaagaggaccagtcaagagcaaaggtaatggcragagttttttgggggcactcaaggcattttgcttattgacttcctggagggccagagaacaatagtatctgcttatcacgagagtgttttgagaaagctagccaaagttttatcagaaagacacccagaaaagctttaccagagagtccttctccaccatgacaatgctcttgctactgctcattactattaccaaacaaggacaactttgtaagagttttgatggacaatcattaggcatcaaccttaccgttctggtttggatcctctgacttctttttgttt

SEQ ID NO: 758106 - DNA, 635 bp, Homo sapiens
aacaactaacagcagaaacaatagctaacaccatagatagctcaactagttcagcttaacaattctgactaaaaaattaaacttgagcaagcttttcacagaatgggtgctaaaaccactgcacctagattagttacagacaagagcagagcttttgatgtaaatgtttaaaaaatggaatcaagatcttaaagcatttcttcaacacccgtaacaggaggcgaaacatggctttaccagtgtgatcctgaagacaaaacacaatgaaagcaatgggtaccaaaagttagacatggtccacttaaaacaaaagaggaccagtcaagagcaaaggtaatggcaagagttttttgggggcactcaaggcattttscttattgacttcctggagggccagagaacaatagtatctgcttatcacgagagtgttttgagaaagctagccaaagttttatcagaaagacacccagaaaagctttaccagagagtccttctccaccatgacaatgctcttgctactgctcattactattaccaaacaaggacaactttgtaagagttttgatggacaatcattaggcatcaaccttaccgttctggtttggatcctctgacttctttttgtttcctaatct

SEQ ID NO: 758107 - DNA, 621 bp, Homo sapiens
gtttgaccaaatatctgagccaccctgtggcccagtcaaactgatagtttttccttaggttatctccagtgtcatttaaatattaatatttatagtatattatatattgatgtaaatattaacatttattacccaggggttgcgttctcttgataatgttctatttttttaatctctgtgaaaaaatgttttatgaagtgtggaatttatctgctacactgacatattctgcattaatctttctctattttgtggttgtcaatcactggtacagtttcagagagcaggaaatgaagattcagcctttaactcctacacaatccacagtgtttttttcccctcagaactgtcataaaaactgttgtattttatttagatttttaaattaacaactaaakccatattctagtaatactttaataatctagatttcatatttttagagtagaaggctgcatcatatttaaaatcactgcagagactttgaggttttcaaattaatatcatattaaaaatttttgcactctgaaggctttcatttattgctttaaaaaaatgttgaaactcagagttcaaatgatttaaaaaactctacatctagatacagttaatgtaaacttt

SEQ ID NO: 758108 - DNA, 379 bp, Homo sapiens
cccagaggtccacagtgagagtggcctgtccctccatcccttcacttatcccttccccaggaggcattcaggtctgggaactagccctgtcatgcaagtatcctgtgcagggtttccagcttcctccctcttcagccttgttgtctgcatcacctctgtaatgactctcagcattttctctctgaagatgggctcaaaatacattgctktactcaatattttggtgtctctcagtgggagcagtgcttcctggctgtgtctagttggccatcttgttatggtaacaatttcttttggagattttttggagtccacttgtggcagtcaaaagataactagacagtggtggcagatgacaactgggtccacagattgcaca

SEQ ID NO: 758109 - DNA, 629 bp, Homo sapiens
acaaaaaaggaatgaggagctgatacatgccacaacatggagaaccctgaaaacattatgttaactgaaagaagtcagtaacaaaagaccacatattattgactccattcataagaaatgtccacaataggacaatctactgggagaaagaagcctagktgctgcttaggaagacaaggagtaatagctgaagcatgtggcttttttttctttctttttttttcttaagatggagtcttgccctgtcacccaggctggaatgcagggttcaagcaattctcctacctcagcctcccaagtagttgggactacaggcgcgtgccacagtgcctggataatttttgtatttttagtagagacggggtttcaccatattggccaggctgatctcaaactcctgacctcgtgatctgcccgcctcggcctcccaaagtgctgggattacaggcgtgagccactgcgcccggccatggcttttatttctgaggtgataaaaatgttcaaaagttgactgtggggatggttgcacatatctctaaaacactaaaaaatattgaattgtaaattttatatgggtgaattgtacggtgcatgagtcgtacctcaatgaagctaggtagaaagtaaac

SEQ ID NO: 758110 - DNA, 629 bp, Homo sapiens
acaaaaaaggaatgaggagctgatacatgccacaacatggagaaccctgaaaacattatgttaactgaaagaagtcagtaacaaaagaccacatattattgactccattcataagaaatgtccacaataggacaatctactgggagaaagaagcctagttgctgcttaggaagacaaggagtaatagctgaagcatgtggcttttttttctttctttttttttcttaagatggagtcttgccctgtcacccaggctggaatgcagggttcaagcaattctcctacctcagcctcccaagtagttgggactacaggcgcgtgccacagtgcctggataatttttgtatttttagtagagacggggtttcaccatattggccaggctgatctcaaactcctgacctcgtgatctgcccgcctcggcctcccaaagtgctgggattacaggcgtgagccactgcrcccggccatggcttttatttctgaggtgataaaaatgttcaaaagttgactgtggggatggttgcacatatctctaaaacactaaaaaatattgaattgtaaattttatatgggtgaattgtacggtgcatgagtcgtacctcaatgaagctaggtagaaagtaaac

SEQ ID NO: 758111 - DNA, 629 bp, Homo sapiens
tctatttactcagtaacattcatcaagcctttccaactcatataacattattgcttcctaccctaaagaaatctatctgaaaacatcactcatagctgaacaaatcagtgctggagcaaaaactagaattctgatttttggctccagtatatttccatgacctaaacttgtctcttaaacactgactacttgattacaagtccagattckgcagaacactgatcatgtttttctgctgttgttaggacatttgttcaaatgactggtctaaatagtccatattaaggcctctccacagtaatagccttcctagatataaaggatcacgggggagaaaatgaagacagattttttaaaattttgtttaagcccaatttttcttcttctatattgctttcagcacttgaggcacatgaagactttgtacgaccttttctctgaatggaaaatgaattctcctgcactcagcatatcaaatcctgagagactttcctggaccgactttggccacctcaatttctgaaatgttatactgattacttctttaagatattgtttggcccaaggtcatgtaacatatgagttcattctgtgcatgaagctccccagagaacaacggtacacaatgt

SEQ ID NO: 758112 - DNA, 630 bp, Homo sapiens
acaacggtacacaatgtcagtttggttatggcatctgaaaactcataagagcagactttcattaaaagcagtattacccccagcccttgccttctgagaattcacatatgaataattaggagtctgtaagtaggggcctacctgtrgtacatatttctcctgtttttgaagtaaaaggatatttctataaagtttctcaaacattttctactttttcatcattgtcaagtcatttattttttgaagttgagctttacatttacttgcatatttggagtttatagccctgttgttttgttttaaattacaagatgataaaaataaatctttaagtcctttcctaaattcatcagttaattgtaatccaatcatatataaagaaaagtattatttattgcctctatattcatcattaaaagaaatacatataaaattaaaaggagcatgccagttaaaaaccaagaaagaatactgggcttctgagcttaacagggaaatctattatcagactattttaatcattttctaattgtgcgtatgaaagactgacagaaatatacgttgtctttactgagtgctgggagtatgagttgtatgatcataaaattatagtcttaaatatttgagaca

SEQ ID NO: 758113 - DNA, 494 bp, Homo sapiens
ataaggaaaatgtggcatctacttacaacaaaatattattgtctgaaatgaaatccttccatatgtggcaacatggatgaaccttgatgacgttatgctaagcgaaataagccaaaaggaaaatacagtgtgagtccgttattatatgtccaatataaaataaccccattcacagaagcacaaagtgcagtgggttaccaggggctgggagaagtggaaaatagggagttacttttaacargtataaagcttcaggtatgcaagatgaataagtcctagagatctgctatgtacaacattgtgcctgtagttaagaacactgtgttgtattcctaaaaatttaagagggtagctctcatgctgtttttatcccagtttttaaaaattagattgcatggaaaagaagatccttgcacatggacttttcctctttccataatttcaaattgcaagcaaattaatctgggatgatgacttatatttctcctcaacta

SEQ ID NO: 758114 - DNA, 617 bp, Homo sapiens
tggaccctgtccgtgtctgccctccggcctccagggctcctctccccagagccgccgtcccgcgcctgggtcccgcgctgggggaagcgcctactgcttatctctgtctacctcaggtctgacttttgatgccaaaatctgagcccctggggtgcctctcycccgcctcccgtgcaccagggtctgcagcagccactggggcctggttgcctgctgcatctggcggccctggagggggccatgggcccctttgcacccgcccgcctcggtgtctggggaggggctgcgcagggccgtgggctgggtcgtctctctggggctgcgtgtgttgcgctcccgtgtgtacgtgtgtgtgtcgggaatcctgcgtgtcgtgcctgtgtgggcgatccggccccctggctgtgggtgggactggattctaactcaggggacttgggcctgctgttaacttcgatgattgtagggacaggtggggcgggaggtgggtgggcacggggctgggtcctgggcggcctggcgactccaggagaaggaaatcactgaaggcagtggtcgtggaaatgggagggggtcgcagggggtctgtggggcccggtcctggatactgggtagga

SEQ ID NO: 758115 - DNA, 641 bp, Homo sapiens
gaagagcacatcgggggacacacagacatgggaacgtgcagggtttttagaactgagagacccaattgaggctctcagcaaagtcatttttcaggaagtggcatttaagctgagacctaaatgatgatttgtagccaggaaagaaatccagagagggggaggggagaccacataagcaaagaccttgtgtcaggaaagaactttataccagagacggatggaggatgagagtggaagtcagaaaggcgggggctgggccgggygcggtggctcacgcctgtaatcctagcactttgggaggccgaggcgggcggatcacaaggtcatcagatcgagaccatcctggctaacgtggtgaaaccccgtctctactaaaaatacaaaaaaattagcggggcgtagtggtgggcgcctgtagtcccagctactcgggagactgaggcaggagaatggcgtgaacccggaaggcggagcttgcagtgagccgagatggcgccactgcactccagcctgggtgacagagcgagactccatctcacaaaaaaaaaaaaaaaaaaaaaaaaaaaaggcgggggctaagtcactgaggcctgaggctgcacagggagctggatggtgtctttggaggaaacaaagacaaa

SEQ ID NO: 758116 - DNA, 641 bp, Homo sapiens
gaagagcacatcgggggacacacagacatgggaacgtgcagggtttttagaactgagagacccaattgaggctctcagcaaagtcatttttcaggaagtggcatttaagctgagacctaaatgatgatttgtagccaggaaagaaatccagagagggggaggggagaccacataagcaaagaccttgtgtcaggaaagaactttataccagagacggatggaggatgagagtggaagtcagaaaggcgggggctgggccgggcgcggtggctcacgcctgtaatcctagcactttgggaggccgaggcgggcrgatcacaaggtcatcagatcgagaccatcctggctaacgtggtgaaaccccgtctctactaaaaatacaaaaaaattagcggggcgtagtggtgggcgcctgtagtcccagctactcgggagactgaggcaggagaatggcgtgaacccggaaggcggagcttgcagtgagccgagatggcgccactgcactccagcctgggtgacagagcgagactccatctcacaaaaaaaaaaaaaaaaaaaaaaaaaaaaggcgggggctaagtcactgaggcctgaggctgcacagggagctggatggtgtctttggaggaaacaaagacaaa

SEQ ID NO: 758117 - DNA, 594 bp, Homo sapiens
aaaccaaatacagcttgttctcacttgtaagtgggagctaaacactgagtacacattgacataaatatggtaacactaggcactgtgaactactggaaggggcaggagggaggggagatgggttgaaaaactgcctgttaggtaatatgctcactacctgggtgatggaatccatatcctaaacatcagcattattccacatacctgtgtaaaaacttgcagctatgtcccctgaatataaaataaaatcaaaattatttttttaaaaagaaattgttgtcattacaggaagtggtagatattttgggttctgcctaggctgtttctgaatcagaagggagtccatatgattctgtttgacataagtatccctgctcaaaccattctggaaggaatcaactttatacatggagacatctgtcatctctctgaggtagagaaagccttccaggatataaatgttacctgtgkgttccatattgtcttttatgttatgtcagggtggaaacaattgaatcaaaaactgcttgaagaagtcaatgtgggggacacaggcaatgtcctccaggcttgcaggaggataggagtaataaa

SEQ ID NO: 758118 - DNA, 621 bp, Homo sapiens
aacaatattcatgtcattaaatcaataaatgggcacagaataatggaagcaaggtcgtggatgaacagatggcagtgtaatggagtcaatcttttactgatttagccactctcctcttatttctaatgtcccttccatcacgatgagttctctttgggatgatgtgtatctaactgaagctcctcctcaacagctgctgagaattgagtgttgatggtaattatccgtatgatttttaatcagacacttttcacagattcaagtggaatgataactctatgggaaattgataggacagccagagttatgtaaattttggaaaaaaaaattaatcaacagckaatacaaatattatgtctaaaggctaacaactggatgatcataataactcaatggctaataaataaactagggaaatccaagccggaattagaagtaaaaattggccattatataattatgaccaagaagttctttcttaattagcaaggggtacagctgtatgtttatttcaaagtaattttttgtttgcagttacaatgttgaatgaaaggctaaaacaattccttccttagccctttccctttgtatgtgaaaaattaactctgagtaccctcagta

SEQ ID NO: 758119 - DNA, 581 bp, Homo sapiens
attttgcatgaattgtctgccagcactgttttaggggcagaaagaatatgatagtacctaagaaaggccctcattcttatatctctttaaaggaagataaaaacttttaacaaggtaaatatttaaaaatactttaaaggagaccaggcgtggtgactcatgcctgtaatcctaacactttgggagggagaagtgggtggattgcttgaggtcaggagtttgagaccagcctgggcaaaatggtgaaaccctgtctggactagacatacccgcccctaaaaaaattagcygggtgtggtggcacgtgcctgtaatcccagctacttgggaggctgaggcaggagactcacttgaacctgggaggcagaggttgcagtgagtggagatcatgccactgcactccagcctagtcaacacagcaagactccatctcaaaaacaaaaaacaaagaaactttaaaagacacaaaatgctataatagcagagagtgataattgctacaaggaaaataaaatatgattatggaaaacaaatgaactggttgatccaactcctgtctgtgtccactgctaccattttgg

SEQ ID NO: 758120 - DNA, 495 bp, Homo sapiens
atccaactcctgtctgtgtccactgctaccattttggagtgagctcttgttaggtcgccactcacccaggctccagtgataccctaattggtttccttctgttaatggccttcattgctttttctgcagcgcagtcaatctgtcaggtagggctctctagaagcagagcctgcaatagcaattattgagcaacttttcttgagagaataaccttatgagaggggaatagtaagtagggtgagacaaagatgagatctayctaagccaggatgatctcagcacaagactggctcagcctgacacccagagttttggagcatggattgcattacagagttggcctgacgttgaggctagaggaatagccctttataccatgtgtcagtcagtcactggctacaggttgtccaggcgaggcagctcccttaagtctgaagaagtgctcaggagagaacagggcacttgtgagcccttagctaccaacaatagtatgcg

SEQ ID NO: 758121 - DNA, 576 bp, Homo sapiens
atttttccaagggtgccaaacaaatgggaattggtagcaaaagctgagtaccaagctgatagtcaataaccaaggatctcaatacaaagagaacagagttgaagcccaactctgttctctcacagacactgtgtcaacacagacttgacaggcctcaagaagcaaggcacaagaggcctccatagatagcgcacttgatcaggttccaaagtccatagtgatgagcagttaagaatgtgtctcagtggagcttctaggaaaattacagaaatacagaccaggcatggtggctcatgcctataaacccagcactttgggaggctgaggcaggtggatcacctgaggtcaggagttcgagaccagcctggccaacatggtgaaaccctgtctctacaaaaaawacaaaaattagacaggtgtggtagcacatgcctgtagtttcagctacttgggaggctgaggcaggagaatctcttgaacctgggaggcagagattgcagtgagcccatatcgtgctgctgcactccagtctgggcgacagggcaagattcagtctcaaaaaaattaaaaaattaa

SEQ ID NO: 758122 - DNA, 659 bp, Homo sapiens
atagatagcgcacttgatcaggttccaaagtccatagtgatgagcagttaagaatgtgtctcagtggagcttctaggaaaattacagaaatacagaccaggcatggtggctcatgcctataaacccagcactttgggaggctgaggcaggtggatcacctgaggtcaggagttcgagaccagcctggccaacatggtgaaaccctgtctctacaaaaaatacaaaaattagacaggtgtggtagcacatgcctgtagtttcagctacttgggaggctgaggcaggagaatctcttgaayctgggaggcagagattgcagtgagcccatatcgtgctgctgcactccagtctgggcgacagggcaagattcagtctcaaaaaaattaaaaaattaaaaaaaaacagaaaattacagaaataaaggagacagcttaatgagaacagaagctatttatttcttgcttgctagagaaagggaggcagtcactatcatttatgtttgacagagactcaggctgggagaatgggaaagctttatagtgaaaaggggcaaggctttggggtaggaggctatgggcatggagaggcgcaggtaggctaaagagaagcaaggcatctgatgggataggtttggagagagtatttggctttctttaatt

SEQ ID NO: 758123 - DNA, 451 bp, Homo sapiens
gtagatgctggatattagacctttgtcagatggatagattgcaaaatttttctcccattctgtagcttgtctgttcactctgatgacagtttcttttgctgtacagaagctctttagtttaattagatcccatttgtcaatttttgcttttgttgcaattgcttttggcatcttcatcatgaaatatttgcccatacctgtgtcctgaatggtattgactaggttttcttttaggwtttttataattttgggttatacatttaagtctttaacacatcttgtgttgatttttctatatggtccattttctgcatatggctagccagagttctcccaacaccatttattaaatagggaatcctttccccattgcttgtttttgtcaggtttgttgaagattagatggctataagtctgtggtcttagttctgggttatcgtttctgttccct

SEQ ID NO: 758124 - DNA, 519 bp, Homo sapiens
ggcctcccaaagagctgggattacaggcgtgaagccactgtgcctggccaagaatcaacttactgataaacacaacaagacagctgaatcgcaaataatagtatgctgagggaaagaagcttttaacgaatgcctacctgcctgccctccttccttttcttcttttatgtttttaacctggcttaattttcttggyttcattattttaagcaatttttgcagtgttgaaaaatttgcaagtaagttttcagaaacagttaacttcaaaatcctacacatgctatacatgaagacagtaaaaacatggatggaaagaaataatcagtttatttacattttctgtttatatgataagtagtaatttagctgaggttgacaattcatttaaatgagataaaagtcatttacattgtctctgtggctgttttcacgatacaaagggatgcaaaggtagggtgttactgagcaaacaatgggcttgctgcctaatgtacatggaggccaagaccacggcactgg

SEQ ID NO: 758125 - DNA, 512 bp, Homo sapiens
gagttttcataataagtggatattcaattttgtcaaacatttttatgtacctagttgtgtgactgttagattttatcaaagcattgcaagaaaattgctatgagtaatgcagaggattagctcttcttgttattcccagatcagccctatattttgactggaatttttcatttcactaatatgtatctagaggactgtatattcttccctatttatttaagcaattatttatatacatttagaattaaaaataatttaatactttgggatataattcaatactactttgtttattttattgcacaaattgttctagttttggccactgggagttctttctgttggctcctgtattcctttgatataccmccatcattgagggttttttaaatgtggtttattattaatgaaattaaaatgatctattcatagcacctgagatgatttcagatatcatattatgcaagcattaagataatattaagaattagactggtaaatgaaaatcatag

SEQ ID NO: 758126 - DNA, 404 bp, Homo sapiens
ttgcttttgcctgctgtattcctttagtttttaaaatagtccaaattcctcacccttccctgaaaatgttgctcttacgttgacataatatgtctagtttcattcagcagttaatattataatatagtactcagattagagtttgcagctgttgtcgttaaatttaggtcattctaaatttacaagttagttgggaagaaaacaaccgcaaattctcaaccctcatcaccatttctgctctcagtgctcatatraagtcactacagaaaaagacggaatgcagcaattaaacaagctcatctgtaacacgattaatttttaactctttaattcacttgtttcgcataggaaactacattaacatgacaggtttttgtttttttttttttttttttgagacggag

SEQ ID NO: 758127 - DNA, 629 bp, Homo sapiens
tgctcagtcacccaggctggagtgcagtggtgtgatcgtggctcactgcaagctccgcctcctgggttcacggcattctcctgcctcagcctccggagtagctgggactacaggcacctgccaccacgcccggctaatttttytttttttttttttttttgtatttttagtagagacggggtttcaccgtgttagtcaggatggtctcaatctcctgacctcgtgatccacccacctcggcctcccaaagtgctgggattacaggcgtgaaccactgcacccagccgaccctatttcaatctttttagctttcactgaatgtttctctacctgtccgtgaatgaatggtctccctttattttccatttgtctttcacatattccaacttaacatttatttccacaactgacatttatttgataaaggtcctttgaatacattttagctctaatatgcctactctgtctttaatgtgtgacaatttcactaatggaaatacaatcatatgtgccctgtaaatctcccaagttgtctcaattctccaaagaattacatcatgtctgtccacacccaccaaacagaaaactgaaaagtgaccagttcagcttcaggctagtgttttttcatt

SEQ ID NO: 758128 - DNA, 629 bp, Homo sapiens
tgctcagtcacccaggctggagtgcagtggtgtgatcgtggctcactgcaagctccgcctcctgggttcacggcattctcctgcctcagcctccggagtagctgggactacaggcacctgccaccacgcccggctaatttttctttttttttttttttttgtatttttagtagagacggggtttcaccrtgttagtcaggatggtctcaatctcctgacctcgtgatccacccacctcggcctcccaaagtgctgggattacaggcgtgaaccactgcacccagccgaccctatttcaatctttttagctttcactgaatgtttctctacctgtccgtgaatgaatggtctccctttattttccatttgtctttcacatattccaacttaacatttatttccacaactgacatttatttgataaaggtcctttgaatacattttagctctaatatgcctactctgtctttaatgtgtgacaatttcactaatggaaatacaatcatatgtgccctgtaaatctcccaagttgtctcaattctccaaagaattacatcatgtctgtccacacccaccaaacagaaaactgaaaagtgaccagttcagcttcaggctagtgttttttcatt

SEQ ID NO: 758129 - DNA, 572 bp, Homo sapiens
gtggatccctggtcatattaaaataaaagtttttcccccatcaggttagcagaaatgtaaaatggagattggaatttagatgtagagttttgtgtcagaaccacgtttgatagtcagttacacacatctggcccacagttaagaatgtaaactaacagcattaagagccagacatcctgggttcaaataccagctctgctgtataaggcttggcctttctgtgcctcagttgtctcacttgcaaaatcaggatgatatcatcctccaaggattactgtgaggattaaattgttaatatgcttaaagtgcttggaacagaacacacrctctgtgaagtcattactattatcattacattaacacttctctttttgaaaaaggacactttttctattagttaagacaaagcaagccatatatttgcaaattcctaaaacaatgattgaaattaaaattctataggagaatgacttaaattttctttgtaatcagaatagatatgcctccagttccattcttgaagcaggatacatgccaaggtcagaaggaaggtgacttctgctttcacaagc

SEQ ID NO: 758130 - DNA, 500 bp, Homo sapiens
ggatccagcagttatgcaaagctcttttggtcaaattcagctagtaaactttaatattccctaatgttagtcagctggatcttgcaagttaatgaaaaagtgttgcatttttgtgttgtggatttgaaacgattgaaatttttaaaatagaagatttgttaaagctagaaattctcttcccaagttttttwaatatgcagatattagagactttatagatgtcacacactatttttgacaacaaaactctatgattgtggaactgttaccattcatccagtttcatactttatagcattaattccattcagacaatatttactttctcactcattgtgaacatatcacctttattgggaagtgatagagtaggagtgtttatttttatatgcttatttatttttcattgtcataaactatacatcacataaaagttactattttaatcattttttagtgtacagttaggtggcattaagtgtattcatgttgtacagcca

SEQ ID NO: 758131 - DNA, 608 bp, Homo sapiens
tctcctttctatcatagctctaatgtcggtgttggctgagctggtggggtatgtgcagacacacagaatgacgaacttgcagtcatctgctcagctgatggctggttgagttatgtctctttacgatattcctaagtacgattagaaaggacaggaaatgactccagggctaaaaagttttattctgatttggataagtggcttgagtcaacccggatggtgatacttcacatgacaatatttgagttaaatgaaaagtctttggagaaggaatactaatgacaataggttgcgttaagtgagcctctcccaggtgccacttttcttcgaagctttgtcgcatctatcagttcatttaacaaactgagctacaaattgtgtaaaaaaattcctaatatttctctgacaaactaataaactagactygggaaaacaggatttaaagctttgatctgtcatctcatagcacacatagttccaaagaaatagactttttagaaatttataggctacatacataggttacgtgtttatagtcaattataattcagctctgaactcctgaatatattttgagtttaacctataaaaaattataaaaggagtaa

SEQ ID NO: 758132 - DNA, 573 bp, Homo sapiens
caatgtggcataaagtatgcaccagcagattccatttagtgtggatttcagagcatcctggaaaaatcattatccatctctcctaggttacagctaccatttcgcaactttgctcctggtaacttgcagatgttgcctatatttgcaacacaaggcctcatttgtttgagccccaattatgccaaattatgaaattctgatggggcagatctgacggttatctgttaygtttttaaacacaacagtttatcaaggtataatccccacaccgtacaatatgcccatttaaagtatacaattcaatggtttttagtatattcaaagacttgtatacccaacactataaccaattttccaattttagaatattttcatcacaccaaaaataaatcccatacctctgccagcccccagaaaaccactaatccacttttttttttttttttgagacaaggttttactcctgtcactcaggctggattgcagtggtgcaatcttggctcactgcaaccttcgccacctgggctcaagtgattcctttgcctcagcttcctgagtagctgggattacagg

SEQ ID NO: 758133 - DNA, 458 bp, Homo sapiens
ccgagagagttttaaaaaagaaagtccttgtgttttcatcagtaactttgttgtgtatcagtgttttcccttcatgtaacttaaatgtccactaatgcaagtgaaggcaatctatgcctaatttcttcactaaatattctactaataaatgatttactgacaaaatgaaattatataactgaaaaggtttaaaaatgataagaaatatcccaatggaagctgttttttaaataatgttattactgtcagtaacaaaattatgatgacacagrtccaacaccttttaaaagagaggaggtaaaaaggagagttggatatgaagaatctcagactgcagtgcagctctgagaaagtctcagccaggtacatgggtgcccgggagcagagattgcctgtcagaagggccccatgagggcagaagtgacctggctctcgtgtccctgccatgatcagtcatt

SEQ ID NO: 758134 - DNA, 560 bp, Homo sapiens
gcgtggtggtagatgcctgtagccctagctatctcggaggctgaggcaggaagatctcctgagcccaagcgttcaaggctgcagtgagctgtgattgccactgcacttcagcctaggtgacagagcaagatcccacctcaaaaaaaaaaaaaaaaaaaaaaaactatgggctgggcgcagtggctcatgcccaccctcagcactcctgtttctcaggccttcagacttgamcgggattccacacatcatcagctctcaggctctcagggctcaggactcagaattttaccatcagctccctgggtcttcagctcacagatggtagatagtgggaattcttagtctctataatcatgagagcaattccttataatatacctaattatgtatgtatctccatatcctattgcttctgttattctggagaaccccgactttagtattctagagaaaaacttttttctactcatgcaacacttatgacaccaaatgtatggagtttatcctcacatttagcaattctccaactctccagacacaaactggatgacctacaagta

SEQ ID NO: 758135 - DNA, 567 bp, Homo sapiens
tctttaactgatgggtgtgggttagaaagaactcatcggccgggcacggtggctcacacctgtaatcccagcactttgggaggccaaggtgggcagatcacctgaggtcaggagtttgagaccagcctgaccaacatgaagaaatcccatctctactaaaaatacaaaattagccaggcgtggtggcrcatccctgtaatcccagctacttgggaggctgaggaaggagcaacgcttggacccgggaggtggaggttgcagtgagctgagatcggccattgcactccagcctgggtaacaataatataataataataataataataataataataataataataataaaatagaaagaactgatcaacatgcttaactctagagtgaggtattcaaaactcagtctttttactttcgaaactttactctaaatcctattaaatttatgtagttaggtatagtaggtttcatttgagcagaaggttagattttcagttgaatagccttcagataattggctcaatgattcaagaaatatttactgatactcactgattcaaaaaatat

SEQ ID NO: 758136 - DNA, 612 bp, Homo sapiens
gttatttatgtaatgatttctaaactgaagggctaacagccaagtttgtattttacgcccttattcaattaatgtactacagcaactgaaaattgaattgtgttttggaggaactggtgttattgaactaaactgtggtagctgtaatttgtgcatattaaaaatatgcaaaatgatgactgccttactgctctgaggaactgcaaaggttgtgggtagtaggtagagaaaacatttaaggtcaagagtagatattttaaagtgggaaaaattacagcctgttcgtatgaggatagaaatggtgccgaagagatattgacagacgaggagatatttatgggagtcacatyctgtgcaggccaaagtagccaaagtggatggaatctagtgcacaagtggaggattggttttagacagaagcaccaatagttcattcattttaactgcaatatagaatacatggatgtgggggctggtaggttgttggtggaaaaacaagttctctcttgattgctgctactgcataataaataatacaattttttaattctcatttaaagttttacaagttttaaatgtttataaaaaatttaaagacctggctttaaataa

SEQ ID NO: 758137 - DNA, 423 bp, Homo sapiens
aagcaggacctgtagtcttgcctagagcattcttttttctcacccatatccacttgaactcagtttgcttctctcactttctactctcacattaatggagttaaacaggacctcagagatcctgtatttaacaatcattgattttacagggacatgagactcatcatgggttagtgacttgctctatgtcctgcagctaaatactgacaaaatcgatgwgttattggactcagagtcttgaaatactccaggtagcatttctttcacttccagtaatatcagtttattcaactcctactctggaccaggcacagatctaggtgctggggtaaacacggcaagtgaaacaaaggccttgccctcataggtcatacattctggtggaggaaacaaacaataaacaagtatctaatatgtcctgtg

SEQ ID NO: 758138 - DNA, 617 bp, Homo sapiens
atataaaataaaataaaataaaatagtgtgggctctagaatctgaattctctaagtttgaatcttggttccaccccttactaaactgtttaatttctctgggcctcagttaccttgtccataaaatggagatgcaaacagtgataacctcatagagctgtgagaaaagcctgatttaggcccggtgcggtggctcatgcctgtaatcccagcactttgggaggccgaggtggggtggatcacaaggtcaggagatcgagaccatcctggccaacacggtgaaaccccgtctctactaaaaaaaaatacaaaaaattagccrggtgtggtggcaggcgcctgtagtcccagctacttgggaggctgaggcaggagaatggcgtgaacccgggaggtggagcttgcagtgagccgagatcgcgccactgcactccagcctgggcaacagagcgagactctgtctcaaacaaaaaagagaaaagcgtgatttggtgtatgtaaaacttctagcacaatgctggcgtgggataatcattaactcattatttgcttctattattattattgttgtatagcaaagcagacagacattaaatatgtcaatataaagaattacat

SEQ ID NO: 758139 - DNA, 614 bp, Homo sapiens
cttgtaggactgaggttctcctcacagtactgagaccattttgggtataatgtaagttgtcccagggtagctggcctaggaagtgtcctttttttttttttttgagacagagtttcgctcttactgcccaggctggagttcagtggcatgatctcggctcaccgcaacctccacctcctgggttcaagtgattctcctgcctcagctttcttgagtagctgggattacaggaatgtgccaccacacctggctaattttgtatttttaatagagatgggktttctccatgttggtcaggctggtctcgaacttgtgacctcatctgatcctcccatcttggcttcccaaagtgctgggattacaggcatgagccaccgtgcctggctggaaatgttcttaataatacctgacatttatttgcacttactgccaggcaccctgctcttatttggactatcttattttagcctaagaggtaagtacttttttctgttttacagttagggaaactcaggtaatgagaagttatataactcacccaaggtcccagaattatcaagtggtcaatctaggatttggaactggcagtctagccctcccttgaaaatgtagat

SEQ ID NO: 758140 - DNA, 614 bp, Homo sapiens
cttgtaggactgaggttctcctcacagtactgagaccattttgggtataatgtaagttgtcccagggtagctggcctaggaagtgtcctttttttttttttttgagacagagtttcgctcttactgcccaggctggagttcagtggcatgatctcggctcaccgcaacctccacctcctgggttcaagtgattctcctgcctcagctttcttgagtagctgggattacaggaatgtgccaccacacctggctaattttgtatttttaatagagatgggttttctccatgttggtcaggctggkctcgaacttgtgacctcatctgatcctcccatcttggcttcccaaagtgctgggattacaggcatgagccaccgtgcctggctggaaatgttcttaataatacctgacatttatttgcacttactgccaggcaccctgctcttatttggactatcttattttagcctaagaggtaagtacttttttctgttttacagttagggaaactcaggtaatgagaagttatataactcacccaaggtcccagaattatcaagtggtcaatctaggatttggaactggcagtctagccctcccttgaaaatgtagat

SEQ ID NO: 758141 - DNA, 634 bp, Homo sapiens
aacacccaagaaaatcaactgaaaaagtgagtaatcaaaattcagtaaggtggctaggtataaaatcactaataaaatcagtagccttcctaaatacacaaacaaccagatagaaaatataacagattgtctggccaggcaaggtgtttcatgcctgtaatcccagcactttaagaggccaaggtgggcggatcacttgaggtcaggagtttgagaccaccctggccaacatggcaaaacacatctctactaaaaatgtaaaaattagctgggtgtggtggtgggcacctgtaatcccagctacttgggaggctgaggcaggagaatcgcttgaaccagggaggcggcggttgcagggagccgagattatgcaaccgcacttcagcctgggcaacacagtaggtgagaytccatctcaaaataaaaaatatataataatagattgccaaaaatcccatttacagtagcaaccaaaaggatacaatttcttggactctatttaggaagcatgcaagatctatgtttagaaaataaaagcaagccaggtacaattgtgtgcccctatagtcccagccactcaggaggctgaggcaggagtatggcttgagaccaggctctagtacatactagaatt

SEQ ID NO: 758142 - DNA, 601 bp, Homo sapiens
ttaagcccagtagcagaaaatactcttgacattggcagaagtgaatattgttaatatttagattaatcattcaggattcagatatatccagatatgacataatatctaaacaaagatttctcctgacatctgctgtattaaattattatagaatgaaataaacaactagattcaagtagtagattacaacactggagcccacagcagccttgagagcagattatctcctcttttctagragtctggttgattactgctggcaccagcttttgaggaaaataaggatggaagtagagatcccttgacttgtgcacattctgggagagagagtggccctgggccaggctggctgcatgggtcccaatcagtggggctgcactccatcatggtgtgcccaggatgaggaataagtgacacttcagctgtcgtgacactgctgaggcctctgggtgccagagaaacatcttgcttctgaggaattcaattatcagtgctgtcagattagaaaagtggagatgagctgtggataatacccctcagatttaaacatttgcaggatgaaacaggaggagcaggttaacgaagaagacaagtcttcagt

SEQ ID NO: 758143 - DNA, 601 bp, Homo sapiens
ttaagcccagtagcagaaaatactcttgacattggcagaagtgaatattgttaatatttagattaatcattcaggattcagatatatccagatatgacataatatctaaacaaagatttctcctgacatctgctgtattaaattattatagaatgaaataaacaactagattcaagtagtagattacaacactggagcccacagcagccttgagagcagattatctcctcttttctagaagtctggttgattactgctggcaccagcttttgaggaaaataaggatggaagtagagaycccttgacttgtgcacattctgggagagagagtggccctgggccaggctggctgcatgggtcccaatcagtggggctgcactccatcatggtgtgcccaggatgaggaataagtgacacttcagctgtcgtgacactgctgaggcctctgggtgccagagaaacatcttgcttctgaggaattcaattatcagtgctgtcagattagaaaagtggagatgagctgtggataatacccctcagatttaaacatttgcaggatgaaacaggaggagcaggttaacgaagaagacaagtcttcagt

SEQ ID NO: 758144 - DNA, 488 bp, Homo sapiens
caacgtgaagaagtgggagatcgagctgcagacccttcgggagagcaatgcacggctgaccacagcactgcaggagtcggcagccagtgtggagcagtggaagaggcagttctccatctgccgtgatgagaatgaccggctccgcaacaaggtgggtacggtggatgcagtgagccccsaggccagctggtgtgggcagtgggagatgggggcacccacaaccctttttctccctccccaactttgcccttatccccatggccagaggaagacttgctgcctctcccatgggaacgtccctccccctccctgcctttcttagtaggaatttaaccacgtacataattgactcattaccttttctggttttattttctttctttttttttgagatggagtctcgctctgtcacccaggctggagtgcagtggcacgatctcagtgcactgcagcctcctgtctcccaggttcaagtgattctcttgcct

SEQ ID NO: 758145 - DNA, 590 bp, Homo sapiens
agttcatttaggcagtgatatggtttggctgtgccaccacccaaatctcatttcgcagttccaacaaaccccgtgtgttgtgggagggaggtaaatgaatcatgggggtagtttcccccatgctattcttgtgatagtgggtaagttctcatgagatctgacagttttttatttttttgagagggagtctcactctgtcgccagrctgaagttcagtggcacaatctcagctcactgcaacctctgcctcctgggttcaagcgattctcctgcctcagcctcctgagtagctgggactacaggtgtgtgccaccacacccagctaatttttgtatttttagtagagaccgggtttcaccgtgttggccagaatggtctcgatctcttgacctcgtgatccacccgccttggcctcccaaagtgctgggattacaggcgtaagccactgcacctggccacgatctgacagttttataaggggcttccccctttacttggttctcacttttctctctcctgccaccatataaagaaggacgtgtttgcttccctttctgccataattgtaagtttcctgaggcctccccagc

SEQ ID NO: 758146 - DNA, 538 bp, Homo sapiens
atcggtcctctagagaaagaatccgtcctcacctctcctagcctctaatgcccccagcagtcctcggcgctcttggcctgcagctacatcaccccaatctctgcctccatgttcccatggccttcttcccagtggctgtctctgtctccaaatctctctttccttatcaggacagcagtcgctggacttagggcccaccctaatccagtatgaccccatcttaacttgattacatcggtaaagacctcatttccaaataagaccacattcacaggtatcaggggttacagcctcaacatattggtttgggggacccarttcaacctacaacaggctgcattagcaaacaaagcagacatggatctggctacggctgagtttcccaagtcaatggctgggtgccttgggtgcaccctacagcacagagggtgaatgaagaaccatggcaggcaagtggagcaagagcagaggcactccctcagtgtgcagtgatctgggaaggcttcctggaggaagagacatccaccagaatcaggaa

SEQ ID NO: 758147 - DNA, 560 bp, Homo sapiens
tggaaagatgtttcctggccaggcttaatccactcttctctatcacatcacccagtttatttccttcaagacacatcacaacttgcaatggttaattatttgctcacttattgtctctggaagttaagtctctgcgggtacggtcctgccaccttttttcacagatatagccagagcacttaacacagtgcctagcatattgtacacaataaaaatgaagaaataaatgactgaatatgtgaatgaacawgtggaaatagtttcattgaggctagattgcagagtctgaggcaagaactggcaagacaggaagctgacgtgggaaatgtgggctagaacattcaggatcctgtagccagatccaggagctgggacttgttgtgtaagcaatggagattggggtagagtgagatggggttttttgacaaaggaaagtgcataggggcttgaacttggcatctagcaatgggctagcaatcggcaagcatcccaagatctgggtagaaacagattctgaaagacctggaaattcatacctaaaacatgcattgcttaaagca

SEQ ID NO: 758148 - DNA, 560 bp, Homo sapiens
tggaaagatgtttcctggccaggcttaatccactcttctctatcacatcacccagtttatttccttcaagacacatcacaacttgcaatggttaattatttgctcacttattgtctctggaagttaagtctctgcgggtacggtcctgccaccttttttcacagatatagccagagcacttaacacagtgcctagcatattgtacacaataaaaatgaagaaataaatgactgaatatgtgaatgaacatgtggaaatagtttcattgaggctagattgcagagtctgaggcaagaactggcaagacaggaagctgacgtgggaaatgtgggstagaacattcaggatcctgtagccagatccaggagctgggacttgttgtgtaagcaatggagattggggtagagtgagatggggttttttgacaaaggaaagtgcataggggcttgaacttggcatctagcaatgggctagcaatcggcaagcatcccaagatctgggtagaaacagattctgaaagacctggaaattcatacctaaaacatgcattgcttaaagca

SEQ ID NO: 758149 - DNA, 680 bp, Homo sapiens
atgtcagtgtagacggcaccctgccagcaatccccctgcctggacggaggtgtcctctggggtggagagagcatgtagagtcagtcttagccaaacagtggtgtgggtgacacatccgggtgctttctggctttcygccgtggtggcaggcggggctgtctgaaccacacactgtttttatgaaacagctttctcttttcaagggctcttacgtttgcttccattgctggtcttggaacaactctcaggttggtatcatttcatccatttacagttgagcaaactgaggagtggcattggtaggtgagttgcaagagatgacactattcctatactggggacctgaagatgagctcctgccatctcacaccaagccctgtgcctgtcctgtgaggccctgcaaactgggcccaggctatgtgagcagggtgggggacactaggccagtccaagccaccataccagtgctcaaatgtggaggtggtgaagccaggtaggacaaggagaaacatccccagggtgcaggagcacagtaaaacatgcatgtcggaaccctcatgcttcctaaaagccaggcttttagggccagggccaggctcaagagtagcctgatctttggtgtctctggaaatcaggttgtcagagagataggatcctttgtggaataagagccaggggtc

SEQ ID NO: 758150 - DNA, 519 bp, Homo sapiens
atagtaagggatgtggagcgcttggtggggaaggatgaacttgatctgaggcatcagggaaagcttcacagaagtgatgttcaaggtgagcatgatgtttaagtgatttgctaggattacacaaagggcatggaattcctagcaaaaggcacgccatacatagagtcttgttgtttcatgagcctggygcttggctgcttggaatttggcttgttggaaattgtgctactgacggacaggacaaacttccaggggttatcctggcacatctctgatgcacatagtctccagggcaggtggtgaggggtgatgaaccctgctatccatgaaggttccctgattctcaattccgatttcaccagacagccatctatttgttaaattaaaaccagccggttattgaaagaaacatatttattgagaattaactgccatgtgcaaaacgggtatttactacctacttgtcaaacatcagtgaatttgtgtttaatagtcatttttttcaattaactgacaaaa

SEQ ID NO: 758151 - DNA, 593 bp, Homo sapiens
tctattaaaaatacaaaaatttgctgggcgtggtggcacgcgcctgtagtcctagctactctggagcctgaggcaggagaatcgcttgaaccgggcaggcagaggttgcagtgagccgagattgcgccactgcactccagcctggcgacagagtgagactctgtctcaaaaaaacaaaacaaaacaacaacaacaamaaaaagacaatgtggtacatgtacaccatggaataccatgcagataaaaaaaaagaaaatcatgtcctttgcagcaacatggatgcagctggagctcattattctacagaaactagcaagaacagaaaaaccaaatactgcatgttctcacttgtaactgggagctaaacattaggtactcgtggacataaaaatggtaacagtagacactggggactactagagtggggagggacagggacaagggttgaaaaactgctgggtactatgcttactacctcagtgatcagatcatttgtatctcaaacctcagcatcatgtaatgcatctacgtaacaaacctgcacatgtacccactaaatctaaaataaaagctgaaattataaaataaaaaaa

SEQ ID NO: 758152 - DNA, 591 bp, Homo sapiens
gtttcagctaccaccggtttggagggttccatagtcaatgctcatacccatctgaggcctggagcagtcctgagctgtaccctgctactcaggagcccttggtctgggagagacaatggtgtggtacactggacaagcctctacctacagctacatggcttatggccactcagttgcatgacattagcagtttctcaggaggaataagagatatgccaaatcaggtcaaagacctcaggtycccctttctatggggtattagtctgggtcagtgcccaccccccaacccccccacaccatgatgggatctgcttcttggtcagaggcttcttcctagtgtgggaagctaccaaaatagccggctgtgaactatctgcaggcctccttccacatctgtggccaaaaggcttgtcaatagctctcctctagcaataccaggaaagcttctcattcatttgtcccttatttactaagtgcccactctgtgctgagctgctgctcacactggaaaacaagcctaagtgaggggctcctctcactagtctcctcctccaacttggccttcctggcctagaggctttcagtattctc

SEQ ID NO: 758153 - DNA, 439 bp, Homo sapiens
gaaaagaaaaggatcctgaactaagctatgtaaaccctatattcaagaaggcagaccagccagccaaaaaaaggtagaaggagaaccagcacactgtaatggtaaggaagccaaggcaaagaggatatcggtagccttaggttaatcagaggatgaagatggagctaatagaagctgctcaaacaacycacggttaagagagtctgcaggatgctgagcttggcaaagggaaagagactgcaagaaaggaagtgcccaaagcagaagacacactccctcccttaagaaacacagtgtgtacctggaaaagcatggttaatcttctttccaaaataacaattaataaaagacaagacatagttcactctgtggtatgtggtacattttataagagctgcagaaaatctgagaagggcaggttttcacatcaaggaaggtt

SEQ ID NO: 758154 - DNA, 604 bp, Homo sapiens
taagccaggattgccattgcctcgcctgccctggccaacatacacacttaattctagagagaggaagctatccaaggcaccatgagtttgaaaaatctggtaccaagatgattcaagtagagagatattttaaacagactcagcctcatagggcctttcctgagctcaggccattcaaacctgagcaaggcgttttstcatgagcattgccagctgagtttcacaaaaagttattacactctgttcttcccaccatgagaacatattcagttattggattggaaataaagactccagctccctcagctgagctgctgatgtttgaatgtgttctccaaactcattcttcttgccctgccaagttaaatgaaatatttccaccactgtccctgagggcattatagcaaataaggtgagtcagactgacatgtataaataaattgtttctcttttttcccatcattccttcctccacatataactttttttaatggagctgaatttgaaaatgagaaaagtaccgcaacacaaccagatgaattctgttcatagaaagattccaactgggaaaatgaatcttatctctactcatcatggtccctgg

SEQ ID NO: 758155 - DNA, 604 bp, Homo sapiens
taagccaggattgccattgcctcgcctgccctggccaacatacacacttaattctagagagaggaagctatccaaggcaccatgagtttgaaaaatctggtaccaagatgattcaagtagagagatattttaaacagactcagcctcatagggcctttcctgagctcaggccattcaaacctgagcaaggcgttttctcatgagcattgccagctgagtttcacaaaaarttattacactctgttcttcccaccatgagaacatattcagttattggattggaaataaagactccagctccctcagctgagctgctgatgtttgaatgtgttctccaaactcattcttcttgccctgccaagttaaatgaaatatttccaccactgtccctgagggcattatagcaaataaggtgagtcagactgacatgtataaataaattgtttctcttttttcccatcattccttcctccacatataactttttttaatggagctgaatttgaaaatgagaaaagtaccgcaacacaaccagatgaattctgttcatagaaagattccaactgggaaaatgaatcttatctctactcatcatggtccctgg

SEQ ID NO: 758156 - DNA, 616 bp, Homo sapiens
taaatggtttaaaacttgttttgtggcctaacatattatctatcctgaaaaatgttccttgtgtgcttaagaagaatatacattctgctgctgttggatggaatgttctatatatgtctattagagtcacatggccaaaaatgttgttcaagtccactgtctctctactgattttctgtctggataatctgcccattgttgaatgtatgtggaatattaaagttcccctactgttattgcattacagtctatctcaccatttagaactattaataattkctttatgtatttatatgctccaatactgagaagatatatttaataatgtgtatcctttcaatgaactgtttcctttatcataatataataatcttccttgtcattttttacattttgagctaagactattttgtctgatggaagtttagccagtcctgctctctttggttaccacttgcctgaaataactttttccaacaatttaatctcagtctgtgtttccaaggctaaagtaaggctctgctagggaccgtagagttggatcttgtttttaactttttttaaaaaaattcatccagccactctgcttcttttgattggaaaattaaatccattt

SEQ ID NO: 758157 - DNA, 551 bp, Homo sapiens
ttagttctctacctgtattttcttgcatcttactgaacttcattaagatgattattttgaattttttgtaggcaattagtatctcttcatttcttctttcgagttgacaactggggctttataaggtccatctggtgatgtcatgtttgcttgattcttagctatccacatagtcctgcactggtgttcatgaatttgaagaagcaaacccctcttttagtcattacagactggtttcagcaaggtgaagtattttcctgttaggtctctggaataacgggattgcctctggaattgcagttgaatggkgttggatccacatcatatggttgatgctttgtctgaagtgaaggccacatttgtttggcctatgtcaggggaactggtgggtatggggcctatctgggacctaggaggacttgactatctccaggattttggtctgtgaggctgtgatgagtgtctgcttcagagttcacaggcagtaggcctgttaccaagtgcaacgacagatgtagcttcctcagggtctctgagggtgtccctgttgg

SEQ ID NO: 758158 - DNA, 551 bp, Homo sapiens
ttagttctctacctgtattttcttgcatcttactgaacttcattaagatgattattttgaattttttgtaggcaattagtatctcttcatttcttctttcgagttgacaactggggctttataaggtccatctggtgatgtcatgtttgcttgattcttagctatccacatagtcctgcactggtgttcatgaatttgaagaagcaaacccctcttttagtcattacagactggtttcagcaaggtgaagtattttcctgttaggtctctggaataacgggattgcctctggaattgcagttgaatggggttggatccamatcatatggttgatgctttgtctgaagtgaaggccacatttgtttggcctatgtcaggggaactggtgggtatggggcctatctgggacctaggaggacttgactatctccaggattttggtctgtgaggctgtgatgagtgtctgcttcagagttcacaggcagtaggcctgttaccaagtgcaacgacagatgtagcttcctcagggtctctgagggtgtccctgttgg

SEQ ID NO: 758159 - DNA, 520 bp, Homo sapiens
gacaggcactggactgcaggctttccatgcatcatcttgtttaatcattgccataaaactttaaaatgtgttacatatacttcacagtaaaagaaagagaagttcagggaggctgagacaaaaagttgtggcatcaggattgatgccctgttatattggaatgcagagcccatacacttcactttcctcaagcctcagggcctgggagaggagcagaagttggaggtgtttgatcagaagctgaagcaggactggatcttcagtgaggtccatcagcagactcagctgtgaagagcgctgcacrgagaaaagagcaagtacacagctagcaggtggtcatctattcagtgctgtgtccctccaaaccactctttgcagactccaggccaagctcagacatgacacagcacatcagtgctgccctcagaaagcttataacctcgtctatttccccttgaagtctaaacaatcttgttgtagcttttcatttgttgtcttcaataatttcttacattgtaca

SEQ ID NO: 758160 - DNA, 591 bp, Homo sapiens
ttgttttttggtcccctattagccaagctactcccagtcaccatgtggtacctacaaggtgctgagagtgagataaactctatttcagtgtgactagccctcatcactggtaaagattcaacactcgaaaaggaaaagggacagataaggtgatggtacttccatttcctatgaagacaaaagacatatctgaggcaaatatggcaatatctaaaaaaattgagtagtatcagatgacagatttcggccttctctgtgtttgagatatcttattaccaaaatgattaatttttaatagtatttattcacttccaggctggatatcagcatatgattagtaaccatgaaacaaataatacctgattgttattctgccattgacatgatgtccatcactcaggtcacttgycaccacctctttgtcatccctgtgttttgtagattacaaaaaatatggactcacaagctggttctatataagtgcccctgtgaaaaacactgctctttatttcctaagatctcgtcgttttttcttccttataaatacaaaatctgagagttactcagtgcattgccgacatagatgcattt

SEQ ID NO: 758161 - DNA, 641 bp, Homo sapiens
ctgtgctgaagatgaacaagcataaatgttgagaattgtttggttttcaaatgcagaatcaaattagctgtaaagtcatttcattatgtaagctacgctgcgtctctccctatggtagtgtatatatgatattatgrtaaaaggaaatggaatagagcagccttaaaacccttgattgaatccaacaagtctgggacaattacctcattcctcaaatattttatttaatgtcctggtggtattcacactctcatcccctaatgtaattctgttttataatcagtattatcaatgataaattggtatctttaatcataatgagaattgtaggcaaatcttctccctgcttcaataagaaatctaatttttcttttagaaaagaaaggatgttttcctctagtgatacatataactacacttcttattaaataatttcagctctcttgtgttttctaaagctttcattttgcagttcaatagtacttaaggtaggattgagtcccacatctgttttagcatgctggtgccgccaaagtaccacaaactggaggccccagacaacaaaaatgtattaactcacaagttctagagccagaagtccaaaatcaaggctttggcagtgctggcttcttcctggaggt

SEQ ID NO: 758162 - DNA, 641 bp, Homo sapiens
ctgtgctgaagatgaacaagcataaatgttgagaattgtttggttttcaaatgcagaatcaaattagctgtaaagtcatttcattatgtaagctacgctgcgtctctccctatggtagtgtatatatgatattatggtaaaaggaaatggaatagagcagccttaaaacccttgattraatccaacaagtctgggacaattacctcattcctcaaatattttatttaatgtcctggtggtattcacactctcatcccctaatgtaattctgttttataatcagtattatcaatgataaattggtatctttaatcataatgagaattgtaggcaaatcttctccctgcttcaataagaaatctaatttttcttttagaaaagaaaggatgttttcctctagtgatacatataactacacttcttattaaataatttcagctctcttgtgttttctaaagctttcattttgcagttcaatagtacttaaggtaggattgagtcccacatctgttttagcatgctggtgccgccaaagtaccacaaactggaggccccagacaacaaaaatgtattaactcacaagttctagagccagaagtccaaaatcaaggctttggcagtgctggcttcttcctggaggt

SEQ ID NO: 758163 - DNA, 641 bp, Homo sapiens
ctgtgctgaagatgaacaagcataaatgttgagaattgtttggttttcaaatgcagaatcaaattagctgtaaagtcatttcattatgtaagctacgctgcgtctctccctatggtagtgtatatatgatattatggtaaaaggaaatggaatagagcagccttaaaacccttgattgaatccaacaagtctgggacaattacctcattcctcaaatattttatttaatgtcctggtggtattcasactctcatcccctaatgtaattctgttttataatcagtattatcaatgataaattggtatctttaatcataatgagaattgtaggcaaatcttctccctgcttcaataagaaatctaatttttcttttagaaaagaaaggatgttttcctctagtgatacatataactacacttcttattaaataatttcagctctcttgtgttttctaaagctttcattttgcagttcaatagtacttaaggtaggattgagtcccacatctgttttagcatgctggtgccgccaaagtaccacaaactggaggccccagacaacaaaaatgtattaactcacaagttctagagccagaagtccaaaatcaaggctttggcagtgctggcttcttcctggaggt

SEQ ID NO: 758164 - DNA, 503 bp, Homo sapiens
ctgtgcaaatgatatttcaagtaatctttatgacatggggaatattttcactatataatgtcatctgaaaaaacatgcataacgccaatctgtttacacaatttcatctcaattattgaaaagaacacatatctataagaaaaaaaaaaaaaggaagaggcagactcccgtggagggcagttgtgccaagcagaggcatggcctgatgggctcattggcaccacagacgttgctctgtggttgggaagaggaggctggggggccaaatctaagatgtgtggctctctgcatatatagctacgygcgcgcgcacacacacacacacacacacacacacacaaaggattttcaacagagatgcaatctacaaacttcctagtgacaggtatcatgtagtgagtaaacccccaaaaggatcttatgcctatgaggcagaaaattacagatttatcaaactttcccaattatccatatctgtccctgtccctttcctccccttggca

SEQ ID NO: 758165 - DNA, 503 bp, Homo sapiens
ctgtgcaaatgatatttcaagtaatctttatgacatggggaatattttcactatataatgtcatctgaaaaaacatgcataacgccaatctgtttacacaatttcatctcaattattgaaaagaacacatatctataagaaaaaaaaaaaaaggaagaggcagactcccgtggagggcagttgtgccaagcagaggcatggcctgatgggctcattggcaccacagacgttgctctgtggttgggaagaggaggctggggggccaaatctaagatgtgtggctctctgcatatatagctacgtgcgcgcrcacacacacacacacacacacacacacacaaaggattttcaacagagatgcaatctacaaacttcctagtgacaggtatcatgtagtgagtaaacccccaaaaggatcttatgcctatgaggcagaaaattacagatttatcaaactttcccaattatccatatctgtccctgtccctttcctccccttggca

SEQ ID NO: 758166 - DNA, 511 bp, Homo sapiens
ccaggaatgggattgctgggttagatggttgttctgtttttagccctttgaggtatcaccacactgctttccacactggttaaaagaacttacactgccaccaacagtgtgtaagtggctctcagcgtggctgttgttggtttataagaatgctagtgattttttgtacattgattttgtatcctgaaacattgctgaagttgtttatcagattaaggagctttgtggcaaaaactatggggttttctagatacagaatcatgtcatctgcaaacagggatagcttgacctcctctcttcctattggataccctttattactttatcttgcctaattgccckgtccaggacttccaatactatgttgaataggaatggtgagagagggcatgcttgtcttgtaccagttttcaagggtaatgcttccagcttttgcccattcagtatgatgttgtctgtgtgggtttgtcatagatggctcttattattttgaggtatgttccttcaatac

SEQ ID NO: 758167 - DNA, 587 bp, Homo sapiens
gtacactcctcaggtgtcaggtgtactaaaatctcagacttcaccactacacaattcatccatgtatccaaaaaccacttctacccctaaagctactgaagtaaaatatatatatatatacacaattccatttgaaatgacatcaaaaagaataaaatactaaggtataatttaacaaaagaattgcaagatttgtatactaaaaactwcaaaccagttttaaaagaaattaaagatctaaataaatggaaagatattacctagacaatatttttgttgttgttgttgttgtttgtttgtttgttttgaggcagagtttcactcttgttgcccaggctggagtacaatggcacaatctcggctcactgaaacctcccctgcctctcgagttcaagcgattctcctgcctcagcctcccaaagacttaatattgttaaatgaccatactttgtaagctgatctacagattcaacacaatctctatcaaaatcttagctagctctttttcagaaactgacaaactgatcttaaaagttctgaaaattcagggaccaagaatccccaaaacaattttgaaaaagaataaa

SEQ ID NO: 758168 - DNA, 495 bp, Homo sapiens
tcctggaaagcccctgataaaagcactgcattttcttaatcagtttccttttctgtagaataaatttctgttatgcttcttaatcagcaaaatgacaaacaaattaagaaataacctcaaacttaacaaaacagaacaaagtcttccctgaaggtcttggagaaccacgtgagatcagatcacaacccaaggtctgccctgagaaatggggaaagccagggacctgccacacctcccttcctcttgtctaactggagatgagaaactaacttaattttcatgatcttactatgttagcctcatacgtaatcatcttctcttttgtytaaatggttccctattttcaccttatacttaactatcatatatagggcatatgaatacatttatctcagatcccattcagaagttgcaaaggaatacattattaataaatcaaatatttctacattacatggaagaaagtgtggaacagttaagaggatgggtactggt

SEQ ID NO: 758169 - DNA, 582 bp, Homo sapiens
ttttcttccacgcccatacttgaatattcatgcatcttctgaattgtttccacttggatttttctcagacacctaagattcagcctgtcaattctatccatcattcttccaaatcctcttcctgcccctgagctccscctccaaatgcctagcagcatcattccctcctgacacttccttcttaccacccccccacctatgccctcctgccacaattaagttctgtgaacccattttcttaaaaactctttaattcttgaattcatatcatcatgacttctcaccttcgctattgtaacaaaatttaatgatctccctgcttctatttttttgattccctctcacatttccttcatagcaatcttttaaaatttaaatctaaccctgtcacctttactttaaaatccctacaaggcttcttactgctttcagagaaaagtttaggcttcttagttcagcatagaagacacctgttggttaaatgttgagtaaattaaactttgaggttttattaggtaaattaaaatcctttaacctctaagaactctagcatcctagatgcaataccaaatcctctatcta

SEQ ID NO: 758170 - DNA, 582 bp, Homo sapiens
ttttcttccacgcccatacttgaatattcatgcatcttctgaattgtttccacttggatttttctcagacacctaagattcagcctgtcaattctatccatcattcttccaaatcctcttcctgcccctgagctccgcctccmaatgcctagcagcatcattccctcctgacacttccttcttaccacccccccacctatgccctcctgccacaattaagttctgtgaacccattttcttaaaaactctttaattcttgaattcatatcatcatgacttctcaccttcgctattgtaacaaaatttaatgatctccctgcttctatttttttgattccctctcacatttccttcatagcaatcttttaaaatttaaatctaaccctgtcacctttactttaaaatccctacaaggcttcttactgctttcagagaaaagtttaggcttcttagttcagcatagaagacacctgttggttaaatgttgagtaaattaaactttgaggttttattaggtaaattaaaatcctttaacctctaagaactctagcatcctagatgcaataccaaatcctctatcta

SEQ ID NO: 758171 - DNA, 685 bp, Homo sapiens
cccccttccttcctatttccccaccaggaacaggccaatatagttgctgcttattaaaagtttgtgggaagaaaaataaacgcagacggtagtttccctaaatcctaaatgtttctacagactctctttgaattatcartttgggaagagcgtttagaagctggacctggaactttccaggaagctggcttaaaccatccttacctgtctgtccactactagagcagcctccagaacatctgcttcagaggccaggagcgctctgcgcagcggtgcaatcttcaggttgttggcccaggaaatcttccaggactcgccattcccattcttcaaacgccttcaggcagtggctgcatattgttcccactcaacttgccctcctatcttggaaatatattttcattttcttatgcttttatttaattgtctgtgttcacgctgttttacctcagtacgtagctgcaaaccttgtagaacgataccatataaaatagttaacatcctcttggcagcactctcaacctctccatctcactgagaaacaagttgacataccaggttggagatcaacacaaactaaccaagaagctacactgttctaaattaaatgttcatcacactttaaccgagattgctacctaagtaactctaattgctgaagttgccttcatggaaagccctcagg

SEQ ID NO: 758172 - DNA, 629 bp, Homo sapiens
tgttttgtactgtggtttcttatgtttccggcacaccaaacggcccactgccttttgcagcgcacttttcagctgcggatgtctcctcttttatcatcctcaatgttttaccccctaactgcatcaccttttcccttaagctttttaattcctatgaggccccttccacttcccctatccccttaggcccacccccaagaatgtgcaagaccccagccacagggcccatcagggcactagcggccgcagctcagagccgtggcctctccgaagtggcagatggggcgggcgcggccagagcaagtgccaggcgggaacagagggactgggcgcgcctcacaactcaccacctcgcccgctggtccttcctggctcgcctggctctgaagctgcacctggaggggaaacctcaraacagtaggcgggattgcctagtaaatatctcccattcagggaggcccaggtcgtgtgacgtcgacagttgctgggtagatgaggccaacacaggttgcaagaagaggcggggtttagaggcgtgaaactccgcagtgctcagccaagcagggagcaacgctaggaagggcgggcagaaagggcacgctcttgtgggtgactacaggttaggagac

SEQ ID NO: 758173 - DNA, 589 bp, Homo sapiens
ggaaaacttacgtgtgccgcagcttctcactacttaaagatgtttctgatgagattggtggtgatattaacaaatatggtttaaaaaatattgtttaataaaatatgtcaacattttaaaaaactgcgtaaacccatgaatcaataatttacaaataatcaatgcatgatattgcaaagtcatgcatagaggaaaagatccatttaaagatagactagtgaattttaacacaacagaatatgaaaagttaatttataaggtttcagattccacactgcaactaacctttaagaatctgccatttcttgagttttggtgtcttatcaaggaagaacagttacaatagctgaaatggttattgaaactttccttcttttcccaactgtgtataagagtgaggccagattytcctcttgtactttagccaaaacaacatattgttacagcttgaatgtagaagaatatataaccaagctagctttattaagccagacattaaagagatttttacaaatgtaaaataattccttttttttcactatttttttgtgctggagaagacagctattttccataaaagtatgttgtt

SEQ ID NO: 758174 - DNA, 535 bp, Homo sapiens
aactccaaaaaaaattcacgttctgaggtactgggtttattcaacattatgaacttatagggggacacagttcagcccaaaaagaggaaaatggggcaaagggaaaatccttcttctccatcttctttcctgttctctctcaaaggccaaggtgagtgagagcaacattggatcatgggatcttggttgccctgcaactcaagagatatytggcttcaacgttagcagtgagcaacagcagagctgagaacagtggtatagaactgagtcacactgagtcaggctacatttcccaggctaatttgcaaaccagaattccagatataatttttattcactcaaactttccactcatgaacttcttaaatgtattttgaaaaactatgcacatcctcatacatgttttttaaatttaactttttattttgaggtaattagagagtgacatgcagttgtaagaaataatacagacagaaccttttaccctttaatccagtttccctgatggtaacatcttataacacttcagtacagt

SEQ ID NO: 758175 - DNA, 506 bp, Homo sapiens
ggtctcgaactcctgacctcaatgatctgcctgcctcggcctcccaaagtgctgggattacaggcgtgagccaccacgcccagcctggattatgcttttgatgtcaagcctacgaattctttgcctggccctacatctcaaagattttctcctatttttctaaaattttaatagttttacacttcacatttactctgtaatccatcttttttgtttstttatctatttttagagatggggtcttgctctgttgctcaggctggagtgaagtgacgtgatcacagctcactgcagtatgtaaccttttgggactggcatttttcactcagtataactctctggagattcatccaggttgttgtgtgtatcagtcattcttttttattgctgagtattatttcatggtataagtgtacaatagttggtttaaccatttacctgttaaaggatatctgggttatctttggctacaatgagtaggcagttagacaaacatttgcatacaa

SEQ ID NO: 758176 - DNA, 606 bp, Homo sapiens
tctggccgggcacggtgcctcaggcctgtaatcccaccactttgggaggccgaggcagggggaatcacttgaggccaggagtttgagaccagcctggccaacatggcgaaaccatgtctctactaaaaatacaaaattagctgggcatggtggcgcatgcctgtaayatcccagctactcgggagactgaggcaggagaatcgcttgaacctgggagacagaggttgtggtaagccgagatcgcaccattgcacactagcctgggcaacaagagcaaaaactccgtctcaaaaaaataataataataataatagtttttctagctctgtgaagtatctcaatggtagtttaataagaagagtattgaatctataaattgttttgggcagtatggccattttaatgatattgattcctcttatccatgagcatgagatgtttttccatttgtttgtgtcatctctgatttctttgaacggtggtttgtagttctccttgtagatatctttcacctccccagttagctatattcctaggtattttattttttttgtgacaattgtgaacgggagttcattcctgatttggctctcagcttgactgttg

SEQ ID NO: 758177 - DNA, 606 bp, Homo sapiens
tctggccgggcacggtgcctcaggcctgtaatcccaccactttgggaggccgaggcagggggaatcacttgaggccaggagtttgagaccagcctggccaacatggcgaaaccatgtctctactaaaaatacaaaattagctgggcatggtggcgcatgcctgtaatatcccagctactcgggagactgaggcaggagaatcgcttgaacctgggagacagaggttgtggtaagccgagatcgcaccattgcacactagcctgggcaacaagagcaaaaactccgtctcaaaaaaawaataataataataatagtttttctagctctgtgaagtatctcaatggtagtttaataagaagagtattgaatctataaattgttttgggcagtatggccattttaatgatattgattcctcttatccatgagcatgagatgtttttccatttgtttgtgtcatctctgatttctttgaacggtggtttgtagttctccttgtagatatctttcacctccccagttagctatattcctaggtattttattttttttgtgacaattgtgaacgggagttcattcctgatttggctctcagcttgactgttg

SEQ ID NO: 758178 - DNA, 596 bp, Homo sapiens
caacccgttctgagtcattttcctcttcctcgtatttctttagcatccaaggggcatagctgtgtctctttctcttttctccttttcctctgtctcttctcacctttaatttccaaataggtaactcaggtattagtgtccctgatggtttgccaacccgtgtgacatctcttgtccatgtatccacagttgctggaagtgcaggtgcgggaatctctggcaaagtccagccaggtggccattgaggytctgtcggccatgcctacagttcgaagctttgccaacgaggagggcgaagcccagaagtttagggaaaagctgcaagaaataaagacactcaaccagaaggaggctgtggcctatgcagtcaactcctggaccactagtgtgagcacctgaagatgaatacccattcccttgtccttaagatgccgtgactccattcccattcctatgaccctgctcccactcctcctttactgggaaatggttggttcagtattttcgtcctagcaacctgaggctcaatgactctactcagtgtccctagccccctccctctctttaaagatgctaggtggcttcctttcagtatg

SEQ ID NO: 758179 - DNA, 596 bp, Homo sapiens
caacccgttctgagtcattttcctcttcctcgtatttctttagcatccaaggggcatagctgtgtctctttctcttttctccttttcctctgtctcttctcacctttaatttccaaataggtaactcaggtattagtgtccctgatggtttgccaacccgtgtgacatctcttgtccatgtatccacagttgctggaagtgcaggtgcgggaatctctggcaaagtccagccaggtggccattgaggctctgtcggccatgcctacagttcgaagctttgccaacgaggagggcgaagcccagaagtttagggaaaagctgcaagaaataaagacactcaaccagaaggaggctgtggcctatgcagtcaactcctggaccactagtgtgagcacctgaagatgaatacccattcccttgtccttaagatgccgtgactccattcccattccyatgaccctgctcccactcctcctttactgggaaatggttggttcagtattttcgtcctagcaacctgaggctcaatgactctactcagtgtccctagccccctccctctctttaaagatgctaggtggcttcctttcagtatg

SEQ ID NO: 758180 - DNA, 614 bp, Homo sapiens
tctgtccaatactggatccgcaatcctcatgaacacatcaactctccaatgagagtcctggaagtttcttgtgtagtcaaatggcacaaactctaaagttatcagaatcctgcattcaggagaatctgtcagggtcctwtccatgaactccaccaaagaagcaagaattggactgtagctaaccacaaactgctttttgagaagaaagaaagaaaacaataactgtctgtggttgaaaaagtccaagacaaaatttaaaaaggccaaagacaaaattaacaaggaaatttggctatttctgtggcacacaacagttgaacataataattattattgctgatagcatatgctaagacatatcagaattataggagtctcatacaactttggaacacatattattaacacatttatataaatataacccaaagaatgttaaaaacaatttcatgtttgacaatgcttcctgtatgattttcacatatcaaataagtcaaatatgtctgccttggacttcaggggccctaatatacaaaacttagtttgaggtcaaaagactaaacttagaatttggaaagtttgtgaaatatcaaaggtttaaaacacttgatatt

SEQ ID NO: 758181 - DNA, 571 bp, Homo sapiens
tagattctcctaggagtgcaaacgctgcagtgaactgtgcatgtgagggatgtaggctgagcactccttatgagaatcgaactaatgcctgatgatctgaggtggaacagtttcatccaggaaccaacccccaccacatcggtcaaaaaactgtcttccatgcaactagtccctggagccaaaaagactggggactgctgctgcagaggataaatacatgcttgtaaatggatttaaaaagtttattggatactgctacacatcaattggcaaagaaagaaattaaaaggatggttccttctctgtgaaaacttacagtgtaattctaagtcaatttacaatgccatatgacagtgatgtgtgatatgtacyggaaacaaaatggacaatgtttgacaaacattatatttatctgggggagtcagagaaaataacctgagtgatgccccacttcggaggatgcttctttgagtaatctctgaggcattttccatggccaaaatgtaaagcactgatagagagaaatcatttctgcctgtctggaagacacaagtggctttgtcttactgca

SEQ ID NO: 758182 - DNA, 612 bp, Homo sapiens
catacagaatagatcaccacgttaaaaaaaattctccgtgcctcgcctattcaaacaccctcttccataaaccctaggagtcactgatctgttcaccttttccagaatttcaaataaatgaaataatacagtacctagtcttttcagagtggtttgtttcatgtagcatatataactcatgtttttgcatggcttaatagcttatttcttttcaatgctgaatgatattctattatggaacaccacaatttgtttatttattcatctcttgaagagcatctcagttgcttccagctttattatgaataaagcttctataaatactcacatkccagtatttttgtgggcattagttttaaaataacttgagtagatacctggaatgcaatggcctgattgcataagattatatttagctttgtaagaaactgccaaaatgtcttccaaagttagtgcatcactttgaattcctattaataataaatgagagctcctgttgctctgcatatttctcaacaacatcagatttgaaggattttaaacattctcataagtgtgagtggtatcttgtttttaatttgcattttcagaatgacaaacaatgttgcacat

SEQ ID NO: 758183 - DNA, 649 bp, Homo sapiens
agccaaaaacagggttaagacttaaaaacaaaaccaccaccaaaacaaacaaataaaccaaaacacatttcctgtccctcaaccagagactccgattaaacagggcccaagcttcagtatttctaaaagctccccggtgattgyaatgcgcagctgagggccactgatcagcgtggcaaagattagcccagtacttccattaccccgaggagaaaaagaaagctgcttttactcttctataatctccaccacattgtaggagaagagaggactgaagattactgttgaattattccacttacaaaagatactctcattatgaacccaggaaaaatggctcattgttttaatcctctggtttgtgtctcgaggtatctgatacgatgggaagagcagtgatcagagatgctgtaggacatgttgggagctagtctggaaatacctgtgaggaacttgggttggctggtggcctctatcctgagccagcaagtgtgcacatacatggttactgataatcaggagtgtgcactttgatcctgggcaagtgacacgatccctgctttggcactaaatttaccaatatctaagtgccagagatagctggtgagagcctgcagtgttctcagaaataaagtacacctggaaaaaa

SEQ ID NO: 758184 - DNA, 613 bp, Homo sapiens
caaagactctttcatttttctgaggaaccagctgtagtttgtcactttttgaaagagactttcatgttaagtgtttaggcaaaattttttggtggggaaggggtggggatggaggcaggtggaacaaaactccagaggagaaggggagagaagcactgcccagaagctgggctttccccgtggcttcctatttgctcggccttygtttttgtgagtccttgcacaaacagactaaatacctggattatgccctcatctggactcaaatacacatacattacatacccttttctccctaatcagcctgacacattcctttgttggtaaatggttccaaaacaaacactgtcagggcacctaattagcaggtttgtgggctgcgcttggcagtcttgttacatcctgttcaacaatagagaacaacagccttggctaggccggtcttcagggagggagtagcttcccccaatgtatatgccattttttaatgatatttcctttctgtggcttttcttgggaagcagccactcagtgagtattgcagtgaggtgtgggatcctagaagcagctaaaggaaacttctgctcctctgtagagtaccttttcagaggag

SEQ ID NO: 758185 - DNA, 536 bp, Homo sapiens
ccacgaaatcctcaaagctatgcaaatatcctcttgcagattctacaaaaagagtgtttcaaaactgctctatgaaaagaaaggttcaactctgtcagtagagggcacacatcacaaacaagtttctgagaatgcttgtgtctagttgttatgggaagatatttcctttttcaacataggcctgaaagcgctccaaatgtccacttccagatactacaaaaggagtgattccaacctgctctatgatagggaatgttcaactctgtgtcctgaatacaaacatcacaaagatgtttctcagaacgctgcagtctgcaatttgtatgaattcccgcttccaacgaaatcctcaaaactagccaaatatccacttgcagattccasaaaaagagcatttcaaaactgctctatcaaaagaaagtttcaactttgttagttgagtagatacagcataaacaagtttctgagaatgcttctgtccagtttttatgggaagatatttcctttttcaccttagccctgaaagcgctccaaaa

SEQ ID NO: 758186 - DNA, 631 bp, Homo sapiens
ccgtgtctgtgggctcaaaaggctgacagtttggaaccatctgggggatgtggtcagccaagcaggctgttgggggaagtgcccaagtcagcaggctgcagctgaactcaaaggaacctgacatggatctggcagccaacgggtgacctgcaggtgtggaaagtgggatcctgggttctagggtcccttggggaggtcactggctatcagtaatttactggtagccctggccattcctagtctttcctagtgagggtgtgtgtaaagaacccacaggaaggccgggcgcggtggctcatgcctataatcccagcactttgggaggccgatgtgggtggatcacctgaggtcaggagttcaagactagcctggccaatatggtgaaaccctgtctctactaaaaatacaaaaaaattagccaggcatggtggtgcatrcctgtaatcccagctacttgggaggctgaggcaggagaattacttgaacccaggaggtggaggttgcagtgagctgagattgcgccactgcactctagcctggcaacagagtgagactccatctcaaaggaaaaaaaagaactcacaggaaaataggagtcaagcactatcattgctatgctaggcactttgca

SEQ ID NO: 758187 - DNA, 641 bp, Homo sapiens
attatttctcttagattcttaagtgttagactaacttcctataaatgtattctaagaataacagtcctataagaaccccccaccccccaactttttttctgaaacaggatctcgctctttcacccaggctagagtgcagtgacccagtcatagctcactgcagcctcaaacccctgggctcaagtaatcctccctcctcagcctccagagtagctgggactataggtgcatgccaccaygccgggctaatcatttcattttttctgtacagacagggtctcactatgtaacccaggctggcctcgaattcctggcctcaagcgatcctcctacctcagcctctcaaaatgctaggataagagaagtgagccactgccctcagctaagaaatccctttttaaaaaaatgttgaaatcggaggggttggggtgagagggaactctgtgaccaaaccattcaggagaatactgcaaatgatatttctttcttagaaatactgtagtcgataaacccagagctccccaaacttagtgaacaagaaaatcttttttttcatataatccccactatgatcccaaggaatttgtgttgcacaatacaaaaacacatcagaaaactcttagaaaaacctattatcatga

SEQ ID NO: 758188 - DNA, 629 bp, Homo sapiens
ttgttttacaaactgaaggtttgtgacaatgctgcattgggcaagtggcatttttccaataacatattgtcacttcatctctccatgtcacattttaataattctcataacatgtcaaaattttcattattatttctgttatggtgaygtataaacaatgaaatttgatgttactcttctaattgcttttgggtgtcacaaactgtgcccatgcaagatggtgaacttaatcagtaaatgttgtgtttgttctgacttctctactaatcaaccattcccttgtctttcatttcatccttgaacatctctatccctgagacacaatattgaaagtgtgaaaattaataaatatacaatggcctctaagtgttcaagtgaaaggaagagtcacatgtctctcactttcaatcaaaagctagaaattattaacctgagtgagaaaagcatgttgagagccaagatagatctcttatgccaaattagccaagttgtgaatgcaaaggaaaaattattgaacgaaatcacaaatgctactccagtgaacacacaaattataagaaagcaaaacaatcttttttgctgatacggagaaagttttagtggtttggatataagatcaaaccaaccac

SEQ ID NO: 758189 - DNA, 574 bp, Homo sapiens
agaagtttccagtattttccagctttaagtgaataaaacagagtggtcatatttgtcacctcttgttacaactccttgatccttgaattacaattttaggtgattttttttccagtctcttttcactgttctgaggttggtgatgaggtgacartgactctatgtaaactttactccagtggtgatctcagggtagcagtccccttgatgtagaaatttgctccttagttcagctaaaactggattcgcatcacatgaccaagaaggattaggaatgcagacacattgaaaggtgaggggaatggaatttactgggtgaaaaaggaaaagaagaagaagaagaagaagaaaaaaaaaaactcccagcaaagtgaaaggggttcctgctaacagccccccgcccacctcacagacagaatctcatattcatgagaataaatattgtatataactgatatccccctaaacagaaggtatgtaaatccacccttccaccaatattaattgaaaatccccaatgggaaccagttatattgtccaagcatgcatggtgtagagtagaagctggagtgct

SEQ ID NO: 758190 - DNA, 584 bp, Homo sapiens
tctccatccagtctctaagagaggatccttggctcatgtgcaggaggaaacgcaagcctagtcgcagagtgtagtgagaagagagtttattgaaagctgctcctttacagagtgggggcgtctgtccacagaaagcaagccaaggaatrcaccgcctgtgttttcagtttttcttatataggggtcttatctttgtaaacactagggccaggcacggtggctcatgcctataatcccaacacttttggaggctgaggtgggcggatcacctgaggtcaggagtttgagaccaggctggccaacatggcaaaaccccgtctctactaaaaatacaaaaattagacaggcatggtggtgcatgcctgtaaccccagctactcagaggctgagacaggagaatcgcttgaattgggaggcagagtttgcagtgagccaagatcatgccactgcactccagcctgggcaacagagctagactccatctcaaaaaaaagaaagactaaattaagctgtgcctatgtgcggatgggctgataacatgataaagtttattactttattgatttaaagaaagctatccccga

SEQ ID NO: 758191 - DNA, 584 bp, Homo sapiens
tctccatccagtctctaagagaggatccttggctcatgtgcaggaggaaacgcaagcctagtcgcagagtgtagtgagaagagagtttattgaaagctgctcctttacagagtgggggcgtctgtccacagaaagcaagccaaggaatgcaccgcctgtgttttcagtttttcttatataggggtcttatctttgtaaacactagggccaggcacggtggctcatgcctataatcccaacacttttggaggctgaggtgggcggatcacctgaggtcaggagtttgagaccaggctggccaacatggcaaaacyccgtctctactaaaaatacaaaaattagacaggcatggtggtgcatgcctgtaaccccagctactcagaggctgagacaggagaatcgcttgaattgggaggcagagtttgcagtgagccaagatcatgccactgcactccagcctgggcaacagagctagactccatctcaaaaaaaagaaagactaaattaagctgtgcctatgtgcggatgggctgataacatgataaagtttattactttattgatttaaagaaagctatccccga

SEQ ID NO: 758192 - DNA, 577 bp, Homo sapiens
ctggcggggtggtccggagccagagacgtttctcggtcgtgctgctgacgtgttgaaaaacgacctggagctgcgcaaacagatggtctggggcggggtggggcctccgagcagtgctggagaaatcaccccggctcggctggtgcctgctccccaggggcgaggcgcggcctggcagattgcccattaatgaaactcagtgggcagaggctgctgagggacacggattcccactccccgggggagggggtggaaatggcttcctccctctgcttccctaccaccagtartggggagctcaccatgcttagaagactcttccttgcctggagttcgggcctcctccctgcacctaccaccctagtggccccaagtcttaaggctgaaggtaaatcctgtgtccttcagaagcaaaggctgcaaccgataccaaacagaggtggccagcgcgggccatccctgggatacctagcttggcagaaggtcattctcagttgtagactccctgcccccctggcatgctgatactgggtatgaggcctggcacctgccaggttccgagtccatgccggatggg

SEQ ID NO: 758193 - DNA, 577 bp, Homo sapiens
ctggcggggtggtccggagccagagacgtttctcggtcgtgctgctgacgtgttgaaaaacgacctggagctgcgcaaacagatggtctggggcggggtggggcctccgagcagtgctggagaaatcaccccggctcggctggtgcctgctccccaggggcgaggcgcggcctggcagattgcccattaatgaaactcagtgggcagaggctgctgagggacacggattcccactccccgggggagggggtggaaatggcttcctccctctgcttccctaccaccagtagtggggagctcaccatgcttagaagactcttccttgcmtggagttcgggcctcctccctgcacctaccaccctagtggccccaagtcttaaggctgaaggtaaatcctgtgtccttcagaagcaaaggctgcaaccgataccaaacagaggtggccagcgcgggccatccctgggatacctagcttggcagaaggtcattctcagttgtagactccctgcccccctggcatgctgatactgggtatgaggcctggcacctgccaggttccgagtccatgccggatggg

SEQ ID NO: 758194 - DNA, 627 bp, Homo sapiens
gcaataagccaatacttaactgaaataaagagcttacttaaaaaatgttttcattaaagtaacctgtgtttttacaacttcggatgaaaacactaatatgtaatggttgaatggtgttcctataaaataatgaaactgatatccatgcaggaaaatcagcttcagtatttatagttacaatacagcccaaagtaacttctatgatgtatgcaaaatgaaatgacattttaatccaaatatacttgttttaatttttctcccaatttaaaaaaaattaaacattttgaaaatcatcttattctaatattgagccataaaatgaccatttcttccaactggagaaaattcttgtmtgtcaatcacagtgatacacgcgagcctgttgctaattatgtgatatgagtcagtaatttagatattttaaaatttctatcatataaacctttctctacttgaatatatcattgctttaagcatatattttagaataagtttctattaaatgaaaaaggaatatactgtaatgtgtgtatgtatctattttaccttctgtggtaatttttaacatggtacagggttatttaacagattatccatgttactcgatgatttctctaaaaatccata

SEQ ID NO: 758195 - DNA, 654 bp, Homo sapiens
tataaagtttattaacatgtacgaagtacaaaaagaaaatctgacatttaatacaaacaaaaaattattttcttctctccattcacactagttataatcttgaatatttttacattcatgttcacaaactcagttgcgtgtacacacatatacacacacacaaaccaactaaaacacttcttaaacctgctgctagaatttgtcttgtctagtatttggctcatataatatttgtcttgggtagtattaaaattcaaataactaaaagttattcactccatgtaagcattcaataatttatgtgtttaaattatatgatattcttacacaaaattgagatatttaattcatcctgtcttttattttagatcccacaagcctagaaatcgtgagcacattactgccatcaggagttacttaaagataaattactgtaacrcttactatattgcaaaatttttatattatgtgccttttcgccaattgcaatttttactgattttaataatctgtaaatcatgaattgtgtaaatattgcattgattattcatatattattacattactaaaagaaaatataaaatacttatatcaaaatattagataaaacagaatataagatactatttgcaataccattacaaaaatgtgaaa

SEQ ID NO: 758196 - DNA, 597 bp, Homo sapiens
caatgtatacaatttggtgtatgtcaagaaacctgagtatatgcacccaaattaattattatttttctatgaataatcactggtcttctctgggtttaggaaaattcttaattatgattctttgtccagtttgggctgaaagtttaaattctacagttgcctgaatacttatctaatgggagggatggatttttataagcaattggactatttggagtcattatgaaaaggtagttggtctagaaaggggaagaggagaaaggagttaacaggctgtggaaggagagagatcaaatggataattggagtatggagaactgtatataggaaagcaatggaacaacaaggagcagggagtagtcactaraaaaattactttgttcctgctcaatacgattgtcaaattgttcattagtgttggataaataaccttttaatgaaataattttttaaaatcagcatttcatggaggtcttcacataaaattgtttctcatttggtgtgataattttttacctctttggtgaatttatgatatttagacaaatggcacacagattaggattgtagtaagaataatgaaagtacacataacac

SEQ ID NO: 758197 - DNA, 655 bp, Homo sapiens
aagtaaatagaagtcaattgtagttcttgttgaatgtaattagtacaactgaattatataattaaaaatcataaaaatgggaaattttatgttctgtatattttaccacaataaaaaaaatttagacaggccaaatgtgaaaacaatttcataggccaggcgtggtggttcacgcctgtaatcccagcactttgggaggccaaggcgggtggatcaactgaggtcagcagttcaagaccagcctgaccratatggtgaaaccccgtctctactaaaaatacaaaaattagctgcgtgtggtggtgtgtgcctgtagtcccagctacccaggaggctgagacatgagaattgcttgaacccgggaggcagaggttgcagtgagccgaaatcgtaccactgcactgcagcctgggtgacacagtgagacactgtctcaaaacaaaaacaaaaacaaaacagaacaattttataaacatataataaataaacatttctaaatcatagcataaatcatatatattcaatatagtgatagaacaaattatatacccgccacacactccccagttcattcttctctgcttaggatactgggcaggatttttaggcaaaatttatgtatcattggagaaatctttttctttctctctctctc

SEQ ID NO: 758198 - DNA, 607 bp, Homo sapiens
gctcatgctaagttttagggctgaccaataatgttttttgtacctgaactctaagaagctcaggaagaactgatgggcattatttctataatgtattattctagagaggtcaagaatggagaatgtccctaaagatatattcttaagatctacttggtttaatattttatttatatatgacacctttgaatctttataataaaattcctcatataaatttagtawgaattggattaatgtaactgatttcatctataatatataatctttaactctttcatgaggattctgaattctagttataaatattgaggaagaaaaaagatatttgtttatctattacgtatgatagatgaacagcatgagtgataatatttaaacaatgaaaaaatttaaacaattcaaataatacacaagatatattattggaagtaatatattaaaaattatatctgatataaaatcataaacattaaataaaaatatacaacaacatataacatttatgctattttagtggcatgagaaaatcatcatgaagaaaatgttacaaaagtgacaggatataagattgaatttgtatatacacaaaaacaccccctcacat

SEQ ID NO: 758199 - DNA, 599 bp, Homo sapiens
ccattatagtatcatgcagggtaatttcacagtgctcaatattctctgtgctccatctagtcattcttctctccttaccccagaccctgggcaccactctcttttcgttgtctcaatagatcgttcacttaacaatatgtatttcagcttttcatgcttgatggcatatttctttttattaagtaatattctgctataccaatgtattgcattgtatttattcatctattgaaagacatactcgktgcttccaaatttagagaattatcaataaaaccactataaacatttatgagcatgtttttgtgtggacatacttttcaactcgtttggataaatacctaagaaatcagttgctggattatagggtaagactatgcttatattgtaagaaactgccaaactgtcttccaaagtggctgtaccattttacgtttccaccatcaatgaatgaattccttctgctccacatccttgccatcatttgttagtttttcagatattagacattctaattggtgtataatggtatctcatcatgttaatttgaagttccctaataacatattgttttgagcatcttttcttatgtttattta

SEQ ID NO: 758200 - DNA, 621 bp, Homo sapiens
gacattaaagcatctttgaaaaggaaattggccaagttaactaaattttctcatgaagcttaacctagaactagatttattgtgcttacaaaatagtcttacatttccacccattctgtagatgttagattctattaaattttaaaattatgtcctttaactataactacagttttttcaagtttttttaatttatcttctttcttttttataatgaaacaaatgtatagctaattttctaaaagatttattgtaagtgatgggagggtaaggagtggagagaagagaacctaagaaaatgatgagaggaggacctcatctctcatactaaatatgaatgtgtgacatccaaacattcttcaggaacatgtccaytgaagccaaaccacatgtattttagcctagaacagcaagagtcatctgagggcacttagcaaagctagattcctgcaccatcccacagatattaagatttagaacctatgaaaagaggtccatgatgctacattttctaaactttcaggtgatatttatgaccaattagttttggaatctgtgctccgtagaactttattttcctgcatagaataaactagggaatctacttataggctatttatg

SEQ ID NO: 758201 - DNA, 624 bp, Homo sapiens
gggccggtccttcctgtgctagtctcatcatagtgaatatgtctcacaagatctgatgggtttatcaggggtttctgcttttgcttcttccccattttctcttgctgccaccatgtaggaagtgcctttcacctcccgccatgattctgaggcctccacarccatgtataagtccaactaatcctctttttcctcccagtctcaggtatatctgtcttgctcaacagcatgtaaacagaaataatagaagaggtgtcaaactctcagttaatctttcctaggttggacaaggaaatgcctcgagaaagtctggctgcatcaatgtagattctctacagatgcaaacatcccccccaccaaaaaaaaacccctggctttttagctcttcttacataacaagctattctaagtagccatcttaaactgtgtgaaggaaatctattttgcaaaaaaatattttggtttccttcaccacttttcatccacctgcctgaagagttggttcagcactgagttttgaataacacaaagcagcaattcatccttgtttattggttactccttttaagtaataactatttaaagattttgaggtcataaagtcagtgagtggatagaaataaa

SEQ ID NO: 758202 - DNA, 624 bp, Homo sapiens
gggccggtccttcctgtgctagtctcatcatagtgaatatgtctcacaagatctgatgggtttatcaggggtttctgcttttgcttcttccccattttctcttgctgccaccatgtaggaagtgcctttcacctcccgccatgattctgaggcctccacaaccatgtataagtccaactaatcctctttttcctcccagtctcrggtatatctgtcttgctcaacagcatgtaaacagaaataatagaagaggtgtcaaactctcagttaatctttcctaggttggacaaggaaatgcctcgagaaagtctggctgcatcaatgtagattctctacagatgcaaacatcccccccaccaaaaaaaaacccctggctttttagctcttcttacataacaagctattctaagtagccatcttaaactgtgtgaaggaaatctattttgcaaaaaaatattttggtttccttcaccacttttcatccacctgcctgaagagttggttcagcactgagttttgaataacacaaagcagcaattcatccttgtttattggttactccttttaagtaataactatttaaagattttgaggtcataaagtcagtgagtggatagaaataaa

SEQ ID NO: 758203 - DNA, 633 bp, Homo sapiens
caaaaccagatataaacaatgttaaaaaaaagtactgaccaataaaacaagaatcttcacaaaacatcagcaaatcaatccagcaacatctggaatggataacatgtaaacaatcaagtagaatttatctgaggaatgcaaggctgttcaacaaacaacaagaaatccaccatatcaacagattaagaagaaaacccatataatcccagtcatacacacacaaaaaaaagcactgacaaaaattcaactttcattcatgattaaaaacaaccayctctcagtaaactaagataaaagggaacttcctcaatctaacaaatggcaaaatagaaatacaagggaacttccttaacctgataaaaggcatcaaccaaaaaaaaaaccacttactggtgaaagacagcttttacccagtattaagagtaaggtaagtatgcctgctcaccattcctaattaacaacatcctgaaagtccaaactagtgcaataaggcaagaaaaagaaataaagagcattcaaaaggagggaaaaaaactgcctctatacacagatgacatgactgcctacacataggaaaacacccaggaatctaaacaagaaagttcctacaactagtaattttaagactgcaag

SEQ ID NO: 758204 - DNA, 535 bp, Homo sapiens
caaatccactggcgaagcgtggaagccttagtggttaaaggtgtttaagtacatttgaccaatcattggctgaccacatatgctaacccacaggcaaccactagaggaagctagagttgaaaataacaacaacaacaacaayaataaaaaccccaaactgaacagatacatcagtggctgcacactgaggttgagactgattctacaggatttgttcagtgaagtcactaaaacaaaaatacagcaacagtcccttgggggtaaggggaaggagcagaatccagagttgctacaatattacataaagtgtccagttttaaaaattatgagacatgcaaagaaacaggaaagtgtgatccctatttgggtggtaagtcgggaggaagctgggaggaagctatcaatagacactgtctgatggggcccagatgtttgaatttagtagacaaagatttcaaagcagctatgataaaatgtttaaagacctaaaagaaaccgtttcttttaatttgatgtgacttttttttttttcttg

SEQ ID NO: 758205 - DNA, 646 bp, Homo sapiens
tacgtgctttcacttttatttctccatataatcaagaagttactttaacaagataagtttctggcaacagattttactgacagggttatcgcagagaatattatttcttttttgtttgtttgtttggttttgagacagagtctcactctgtcgcccaggctggagtgcagtggcacratcttggttcactgcaacctccatctcccaggttcaagtgatttttctgcctcagcctcccatgtagctgggactacaggcgcacgccaccaagcctggctaatttttgtatttttagtagagatggggtttcaccatattggccggggtggtctcaaactcctgatctcgtcgtgatccacctgccttggtctcccaaagtgctgaggttacaggcgtgagccaccgcgcctggcgagaatattatttctagagaaattccattctagaaaatttcaaaaattctagagaaatgtcaaaaattcaatttttgaaggcaattagtcaaacgaccttcattaatgaattgcaacctgaaagtgtaaaatctgatgccttgaacacccaactacaggtgaagcatccctaacctgaaaatctgaaatgctccaaaatcggaaacttttttttgagtgtcaaaatgaagctc

SEQ ID NO: 758206 - DNA, 580 bp, Homo sapiens
tgaatgaggaacatagatacttaatgtttttagatgtcctccacatgcaccttaccagtaggtcaggaggttacaaaaggtcatggctggttaagagtatgggctcctggctgggtgcagtggctcacgcctgtaatcctaacactttgggaggtggaggcggatggatcacttgagatcagaagttcaaaaccagtctggccaacatggtgaaaacctctactaaaaatacaaaaaatttagccaggcgtggtggcacacacctgtagtcccagctacttaggaggctgaggcaggagaattgcctgaacccagggggtggaggttgcagtgaaccaagatcgcaccactgcactccagcctgggcgacagagggagactcttgtytcaaaaaaaaaaaaaaaaaaaagcatgggctcagaggtcggatgaccagcagctaaattgaggctcacctcactctagctgtgaccctgggcaaactgcttactgtcactcaacctcagttcttagtaaaacagggatgatgacaatacctaccaaccatacacgactgttagctttattattttaccaacat

SEQ ID NO: 758207 - DNA, 536 bp, Homo sapiens
ccccgtctccactaaaaatgcaaaaagtagccagacatggtagcaggtgcctgtagccccaccacttgggagactgaggcaggagaatcgcttgaacctgggaggcagaggttgcagtgagctgagatcatgtcactgcattccagcctgagtgacagagtgagactccttcacggaaaaaaaaaaaaaaaaaagaagtaaatattctgtggtaacataatagttttttaagcaggacacacattgaccaaatatcttaaattttctttctaagttgttatkaactcccccacatgaaatagtagtcagttatataataaaagttttactgttcttattgaagttggataattaacagcagagtaagctcaactaatttacatgggaaaagacaacaatagtataaataaatttccttcatttgacaccatcaaacaaagttgtttaaactttctcgttcgttttcacatcgttatctcttcaatttatccaaagcatttaaaatatgttcttgttattcttcataataggtaccc

SEQ ID NO: 758208 - DNA, 610 bp, Homo sapiens
gaactacatagtgatgattgtaaaatcttgtgaacacaacaaaaagcactgagttgtaaattctaacatgattaatatattaaatgttatataaattttatcttaataaaaagaattaaataaactccaaacccttgtgccaaaagtggaaacagcttttcagctataaatgtggcaaaaaactcatcaacatgaaattaacagaatggaaaattgaaatgagaaaagcagagtcaacaaatttccactgatgttttgcagtcacgcaggagagccaagaaaagacacgcccaggcttcagttatgcatttgatgcaactttctgtcatagaaatttatctggtcctagtagttgaatcaattgggcatattggtgtgaccttaaaaatgcttaaaatacatctttttaaaaaaattaagtctggcactcataaaratacaaacacatgttaaaatattttatttaacttataagagattagcagatacaataaccagtagaaaaaaagaatccaacaaacagaggaatattaaccaggagtatttaaatgagtatgtaaatgggaagaaagctcatttccttcctctgtgagaggagagaaaattgacc

SEQ ID NO: 758209 - DNA, 616 bp, Homo sapiens
agtaaaatgaataagcacatgattatttcaattgatgcagaaaaagcattgatgatatacaactctcttttatgataaaaatacccaataaactaagcacagaagggaacttctgcaacatgacaatgggatataaaaaactgacagttaatatcgtgctcaatggtgaaacactgaaagctgttttcctaacatctagaacaggacaaggatggtgcatttgccaattctgttcagcatagcactggaaattctagccagagcaattaggcaagacaaagaaataaaaggcatctaaattagaaatgaaaaatagaagtaaaattatatctacacatgatcttatgtgtataaagctctaaagaatacccaaaacccatcagaactaataaaagaggaaggaagcaagacaaacacatgctaattagttgtatttctatatagctgtaatgaactatgraaacatttttaaaattccatttataatagcatcaaagaataagatattcaggcataaatctaaacatggtggtatgcacaaaacttcgctgaaagaaactgaagagtttaaataactggaaagacattctgtgttcatgggttgtaagacaatatt

SEQ ID NO: 758210 - DNA, 628 bp, Homo sapiens
acagctaataagctaataataggagcagtttttaagtgaaatctgagctgaactagggagtcatttatagatcctgttaggtgtgcacatttttacttgggcaaactaaattagctgtgtaaataacatttaaaatatttgaaagtcagtctcatggacttcttacctctggcattatcctatcatatgcagggaaggagaacttggaragggtaaacagccatgcaaaagtggatgggtttactcagaagatgctaagagacccaagagacggatgcttgacttctataagtttttctttagagaagctatcttatctctctgaaggggataggccttcatgttggcagaaaggaagtccagagacctctgtgaatttccaaatttgtgaatgccacaataaaacactattttcctacaaaacaaaagcaaaaccacaagtgaagatctatgcacctcttcagacacatggtgattgatctctctcacctacaagtacatttttactggctctggtacttgctgtatcaatttttcaatctgcttttatttatttccatacggaacacacaagagagctcagttgcctcatagagcggagctattgtaaaacaattcaatagatcat

SEQ ID NO: 758211 - DNA, 520 bp, Homo sapiens
gtaacaaaggtttttaactataaatttcaagatcctttcaacattgaaaatattccattcttcgcctgtaatcccagcaatttggaaggccaaggtaggaggactgcttaagctcaggactttgagaccagcctgggcaatgtagtgagaccctatctcttttttaaattaaaaaaaaatccattctaattgattcatcagccattaaaaaaacaaacttaaaacaagaaacagctaggatatgttttatttacagcatttcacaataaagggagtatggatctaygtgacatttgtacatttagtacatattttaatgtgattgaaactaagtctgaggagactatataggcttaagaatccttgacttcagtcactggatatcatcaggatttttggaaatgtttaacacattaaaaacattcataaccttatagagaggatggggtgaaagtagatccagagtcttaagagtaaaatgttttaatgggtcgccaaggcttgcagcaacacttccaat

SEQ ID NO: 758212 - DNA, 622 bp, Homo sapiens
atatgagttatcataaatggggacatgaccactgcactctgagcaattggtagagctgccagacaggaaattatcaaagatatagaggaactgaacattaccatcaaccagtaaaaagtgtaaaatgtaattggcatttatgaaacagtccacgtaacaataacagaatacacattctttttaagttcccataaagcttttaccaagagaaattgtcctggtcatgaaacaaactcaacaaatatgaaggaattaaagtcatttagtgtatattctctgactacaatgtaatcaaaccaagagacaataactaaaagaaagcaagaaaatcttcaaatacttggaaattaaacaacacacttwtaaaccactctcagatcaataaacaagcctcagaggaaatgcaaaaatacacacagctaaattaaaataaaaacacaatatattaaaatctttagaatgctgttaaagtagtgctgacagagaaatttatgtaccaaatacttacattaaagagtaaaggtctcaattcaaaacgtacattcctatttcaagaaacaagaaaaagaagagaaaaataagcccaaagcaagcagaagaaaaaaaaataatagcaataaga

SEQ ID NO: 758213 - DNA, 567 bp, Homo sapiens
catgggtgactctacacagcatatgagtgtttctgggaagacctgggatatgacatttagcattcgaatgcaggtctgaaaatttaggagccaatcaaaagaaaaggaacagggaaaaggcaatgagaaaggaggattagatcccctttagcgaatataccagggtaggatctgaaccaggattaccgttaatataaggtatcgaggaaactaaatgtatttgattggtgcaaaagtaattgcggttttgccattgaaagtaatggtaaaaacygcaattactttcgcactaatctaataaaaagtcactcactcttgggggctgaccctgcacttgcaggagcctaagagtgagcacctccttacactttgcacctgggcaccttactcttaaggagcactgagccccaggactatgtgagtgtagagccagcccctgaaagtaagcaccttggtgctttacatttcgtgccctcgggacctcattctagttccagccatgggcaagaacaagcaggtggctttgaggaacagaaataaagccaatgtttctggagaaaaatacat

SEQ ID NO: 758214 - DNA, 625 bp, Homo sapiens
gttgagtatgggttaatataccagataaaaagttgctttttactttatatgtgatgtgaatttactggagggttttcagcagggaaatgtcatgatctagttaatattctaaaaagtttacagtaacaacccaactaaaaacagacatgtcacccaagaaggtatgcagatggtaaataagcccatgaaaacatgcaacaaatcctatgtcattagagaaatacagattaaaacaatgacacacatattagagcagccgaaatctggaacactgacaacaccaaatgctggtagaggatgtggagcaagagcaactctcattcmttgctgatgggaatgcaaaatggtactttggaagacagtctggcagtttcttgcaacactaaacacactcttatcatataatttagtaattgcattttttgatatttatacaaacgacttgaaaacttatgtttgcacaaaacccggcaaatagaagttcatagcagccttattcataattgccaaaccttggaagcaaccaagatgttcttcagtggacgaatggataaatagactgtggtacatccagacaatggaatattattcaacaataagaagaaatgatctatcaagccacaaa

SEQ ID NO: 758215 - DNA, 593 bp, Homo sapiens
atggatatatgcctcagccttccacaatatctgtattgtcataaaaactgaatatttaatcaaaacattcatcactttcttattgggaggatggagaatgaacataattttgtagtatagagtttgtgtaaaagaactaaatccttttccttcacaatggcaagttaaatgagaatgtccaaacctaacatttatttaggaatattgatgtacaaaaagaaycagataaatgatggaatccagttgcctctagagaggaagacttgggaatgtccattctcataccgctataaagaactacctgagactgggcaacttataaagaaaagaggcttaattggctcacaattccacaggccaggaaggcctcaggaaacttacaatcatggtggaaggtgaaggggaagcaggcacatcttacatggctggagcaggaagaagagtgtgaagcggggaggctacacacttttttgttgtatttattaagttctggggtacatgtgtgggtgcgcagttttgttatataggtaaatgtgtgccatggtggtttgctgcacctatcaacctatcacctaagtattaagctcagcatg

SEQ ID NO: 758216 - DNA, 625 bp, Homo sapiens
acagggtggagcctgcctgagatgggatagagcccctgaaaaggggtgggctgctatctctgctgtttggtcaactcaatcattccagcctgcgggctttggagactccaaatggtcccgatgaggaaaggtccccccagtgcagtaccgctgctttgcctgaacctggtcagactgcttttttttttcttttagacggagtctcactctgttgcccaggctggagtgcaaatggcaccatctaggttcactgcaacctctgcctcccyggttcaagtgattcttctgtcccagcctcccaagtagctgggattacagatgcctgccaccatgcccaggtaatttttgtatttttagtagagacgtagtttcgccaatgttggccaggctggtctcgaactcttgacctcaggtgatccgcccacctcggcctcccaaagtagactgcttctttaagtgggacctcaacccactccccctcactaggtgggacctcccagccagagcctccagctacccttgcctacccatattctacggacagagctctgatctctccctgggacagtgcctgcggggaggggaggccccatcaccttggctatttgggcaactcagccattcc

SEQ ID NO: 758217 - DNA, 625 bp, Homo sapiens
acagggtggagcctgcctgagatgggatagagcccctgaaaaggggtgggctgctatctctgctgtttggtcaactcaatcattccagcctgcgggctttggagactccaaatggtcccgatgaggaaaggtccccccagtgcagtaccgctgctttgcctgaacctggtcagactgcttttttttttcttttagacggagtctcactctgttgcccaggctggagtgcaaatggcaccatctaggttcactgcaacctctgcctccctggttcaagtgattcttctgtcccagcctcccaagtagctgggattacagrtgcctgccaccatgcccaggtaatttttgtatttttagtagagacgtagtttcgccaatgttggccaggctggtctcgaactcttgacctcaggtgatccgcccacctcggcctcccaaagtagactgcttctttaagtgggacctcaacccactccccctcactaggtgggacctcccagccagagcctccagctacccttgcctacccatattctacggacagagctctgatctctccctgggacagtgcctgcggggaggggaggccccatcaccttggctatttgggcaactcagccattcc

SEQ ID NO: 758218 - DNA, 604 bp, Homo sapiens
aaagaggaggatttatgaaaccaggtcatgaatttatagcaggaacccagtcatcatttttcccttctgtcattaaggtctctttctgcagagattccctgttccagacagaaaaattccaaattataaatattttctrtaggagttgcccagtcaaaccctattcaatgagcaggtaagttctgtggcaatccgtgtcaactgaggaagaatagatgtgttcatgtgctcattttactgtgtgtggcctctagctgagaatctttactcagttttcttgctcccatccttctcttccctttctgttctcccctagcacacacgttgaagggcccagatggaagggaccctccctatgtgagaaggggaagcccagctgagatggagaaaatcatagcaaaagtggtcactgaggaggtggaagaggcaggtggtggaagaggaggacggcctggcaagcccctgtagaggatgtgagacttcatcctctgggcaaggggtaatgattgaagtagctcccaggggataagcatggcaggggcaccctgagagcagtgtctctacacgatctctcagactgcagagtggaggtcacacagatgcg

SEQ ID NO: 758219 - DNA, 595 bp, Homo sapiens
tgatctctctcctgttagggatattaggagagaaaggactgggaaacacattttccatggagtcctctgtctatttgagcacagcagtctattctagctgggctgggtgaaaaggcagctcagcttctgggatttttgcttttttgctggaccctagagggaagagatgagttttacgtctgttactggctgtggtaacactcggctgggaagttcatgtccccggaagacacaggccttttggctccatcacaacagtgcttcctagggatgcacagtctcaccctggaggccccagttgcaatrttgggtgtcacaaatgtgagagtgaaagcagctgatagaagacacagaatgcagaaactcaaggccttagtcccaaacacactcaagttgcatgaccgaaaaaaaaaaaaaagagagagagagagagatagttgaatgtaataaggatgtaatatgctaacttctcagtgcttggcagaggccccctcaccagctgggccacaccagacatagaagagaccagacactggcttaggcttccagaaagaacaagtcacaacaacaccccctctggcatctcccccaaagc

SEQ ID NO: 758220 - DNA, 589 bp, Homo sapiens
ttttgggtaaatagcgtttacttttccagactgaactgccaaagaccttaagaaaattaaagaaagaaaagaaaaactgagttgccatgtctggtaaacagtgtttctctaattaggtggctgcatggttattaactagagcagttgtgtatcctgacgtatgatttatttaccttggcacacagagttagggtgctgagcaacagagccaaatacggtgacagggtgaggaaaatgagaggatgcaaaaccatggtgaggactgagttctgtacatcttacagaattggttttcccagaggagggaaacaggaatattatctcattgcaaaatagtcattaaactataattgastgctcacagctaacaatgtctaacttcactttcagtcaaaatgaaaatgaaaatcaatatcctgacacaaagcaataatacaaattagagagcaatactagaaaggttctctagaaggatttagaatatgctgtagttgaaaaaatatataagaaaagaaaaaaatgattatttgccattactcgtcccattgctggaagggtgacttgtgaaacagaaggtcttcttggagat

SEQ ID NO: 758221 - DNA, 559 bp, Homo sapiens
tctgttgatgtgtatttctttggatacatcttatttgagactatttgagtttcctggatttgagtgttcattttgtttcacagatatgggaagttttcagctgtctgggggtttttcatatatgctttctggttctccttctcccccctctctctctcctctctcctccccctggaaaatctcttgatgtgaatataggtctgcttgatggtatcaaataagttccttcagctttcttcatgcctttttttttattatcgttttctctttcgctcctttgactgaataattttacrtggccagtctttgacttcactgattctttcttctgcttgatctagtctgctgttgaagctccctagtaaatgttttagtgcagttaatgtaccgttaagctccaggatctctgtttggtaccctttaatattttctatatctttattgaaattctcattttgttcatgcattcttttgttaaccttggtgaacatactttatggcagttattttacattctccatcaggtatatcatataactcagtttcctctgggtcagct

SEQ ID NO: 758222 - DNA, 599 bp, Homo sapiens
aactaaacctactcttaccatcggatccagcaatcatgctcctatgtttacatgaaaatctgcaaatggatgtttataacagcttaagtagtaatcgccaaaacttggaamcaaccaagttattcttcagtagttgattgactaaataatctgtggtgcattcagacaatggaatattatgcagcactaaaaagaaatgagctatcaagtcatgaaaagacatggaggaaacctaaatacatattaataagtaaaagaagccaatctgaaaatgctacacacggtatgattccaaataaatggcaatctggaaaggcaaaactgtggaggaagtaaaaggattagtggttgcaatgagttggggagaaaggtgagatgaataggcagaacacacatcatcattaggacatagtatagtgaaactattttatataatactacagtggtggatacatgtcattatatgtttgtcaaaacccatagaatgcacaacactgagtgaaccctaatgtaaattatagactttgggtgacagtgatatgttgatgtaggttcatcaattataacaaatataccaatctggcaggggatgttgatag

SEQ ID NO: 758223 - DNA, 629 bp, Homo sapiens
tcttaaaaactccctggatagttataaaatacaacctagaagaaaccttaagaaactcaattccccaaagtaactcttagaattaactacatagaaaaccctgcctggattttcatctcataaataatacttaatcttaatggttctagacatagagcctggccatacttattcaaatatgaattcagtgtgagtttgagagtgggagtgtgaaaaacatgggcctattttatatgtgttactggtgagcttgccagattcagcaaataaaaatagagaatgcgcagtttgatttgaatttcagataaacattgaataattttttcgtataagtatgtcatgtgcaatgcttaggacatgcttgtactaaaaaaatatttattgtgtatctgaaattcaaatttagctggcatcatgcatttatttggcagctccaattacaggacatgcaggaaatttttaccarttccactttaatcaaagcattttacttgacttgtaaccaatcacctatgaaaccatttcgtatagttctaatcacagtgaagtcacacagaacaagcaatctagcccttgtggctgagacatttaacccaattcactaaacctcccggcctactttttcactt

SEQ ID NO: 758224 - DNA, 568 bp, Homo sapiens
aagggtgccaaacaaatgggaattggtagcaaaagctgagtaccaagctgatagtcaataaccaaggatctcaatacaaagagaacagagttgaagcccaactctgttctctcacagacactgtgtcaacacagacttgacaggcctcaagaagcaaggcacaagaggcctccatagatagcrcacttgatcagggtccaaagtccatagtgatgagcagttaagaatgtgtctcagtggagcttctaggaaaattacagaaatacagaccaggcatggtggctcatgcctataaacccagcactttgggaggctgaggcaggtggatcacctgaggtcaggagttcgagaccagcctggccaacatggtgaaaccctgtctctacaaaaaatacaaaaattagacaggtgtggtagcacatgcctgtagtttcagctacttgggaggctgaggcaggagaatctcttgaatctgggaggcagagattgcagtgagcccatatcgtgctgctgcactccagtctgggcgacagggcaagattcagtctcaaaaaaattaaaaaattaa

SEQ ID NO: 758225 - DNA, 568 bp, Homo sapiens
aagggtgccaaacaaatgggaattggtagcaaaagctgagtaccaagctgatagtcaataaccaaggatctcaatacaaagagaacagagttgaagcccaactctgttctctcacagacactgtgtcaacacagacttgacaggcctcaagaagcaaggcacaagaggcctccatagatagcacacttgatcagggtccaaagtccatagtgatgagcagttaagaatgtgtctcagtggagcttctaggaaaattacagaaatacagaccaggcatggtggctcatgcctataaacccagcactttgggaggctgaggcaggtggatcacctgaggtcaggagttcgagaccagcctggccaacatggtgaaaccctgtctctacaaaaaawacaaaaattagacaggtgtggtagcacatgcctgtagtttcagctacttgggaggctgaggcaggagaatctcttgaatctgggaggcagagattgcagtgagcccatatcgtgctgctgcactccagtctgggcgacagggcaagattcagtctcaaaaaaattaaaaaattaa

SEQ ID NO: 758226 - DNA, 614 bp, Homo sapiens
aaggagccctcattttacttaataatggcaccaaagcacaagaatagtgatgctggcttattgttagaattgttctatgttattagtagctattgttgttaatctcttaccgtgcctaatttataaactttattataaatatatatgtaaaggaaacacaatatgtatggtgtcctgtactactgaagatttcaggtgtccactgaggatcttggaaggaatcccctgtggataagggtgcaccactgtaaatatgttcagctttgagggcaacatagtctctgtcacaactgctctacctgcaacagcgccagrcaaatctggctaaactttaatccaacaaagttatgagttggtctgagccctcaggctgaaggtcatgtaaactgagcatgcccagatgaaccaagtatgcaaccacaaggggaacagaagtgcccagaccaaggagaagaccaaagagcagggactgaattaagaagcagacgcagtatggaaggatccaggatccaatcaaattgagctctggcatcagcccattgtggaatcgaatcagatcatgcctcctggcatcatctcattgcagaattcaatcagatcacacctcattaccc

SEQ ID NO: 758227 - DNA, 614 bp, Homo sapiens
aaggagccctcattttacttaataatggcaccaaagcacaagaatagtgatgctggcttattgttagaattgttctatgttattagtagctattgttgttaatctcttaccgtgcctaatttataaactttattataaatatatatgtaaaggaaacacaatatgtatggtgtcctgtactactgaagatttcaggtgtccactgaggatcttggaaggaatcccctgtggataagggtgcaccactgtaaatatgttcagctttgagggcaacatagtctctgtcacaactgctctacctgcaacagcgccagacaaatctggctaaactttaatccaacaaagttatgagttggtctgagccctcaggctgaaggtcatgtaaactgagcatgcccagatgaaccaagtatgcaaccacaaggggaacagaagtgcccagaccaaggagaagaccaargagcagggactgaattaagaagcagacgcagtatggaaggatccaggatccaatcaaattgagctctggcatcagcccattgtggaatcgaatcagatcatgcctcctggcatcatctcattgcagaattcaatcagatcacacctcattaccc

SEQ ID NO: 758228 - DNA, 646 bp, Homo sapiens
gagcagggactgaattaagaagcagacgcagtatggaaggatccaggatccaatcaaattgagctctggcatcagcccattgtggaatcgaatcagatcatgcctcctggcatcatctcattgcagaattcaatcagatcacacctcattascctatgcttataaaacccgacccaaacgtcagctgggggtgatatattggagcacttcctcctgtctccttgccagtccacttgcaatgaagcttttttttcctcaaaagccagtgccatggtcttggcctccatgtacattaggcagcaagcccattgtttgctcagtaacaccctacctttgcatccctttgtatcgtgaaaacagccacagagacaatgtaaatgacttttatctcatttaaatgaattgtcaacctcagctaaattactacttatcatataaacagaaaatgtaaataaactgattatttctttccatccatgtttttactgtcttcatgtatagcatgtgtaggattttgaagttaactgtttctgaaaacttacttgcaaatttttcaacactgcaaaaattgcttaaaataatgaagccaagaaaattaagccaggttaaaaacataaaagaagaaaaggaaggagggcaggcaggt

SEQ ID NO: 758229 - DNA, 646 bp, Homo sapiens
gagcagggactgaattaagaagcagacgcagtatggaaggatccaggatccaatcaaattgagctctggcatcagcccattgtggaatcgaatcagatcatgcctcctggcatcatctcattgcagaattcaatcagatcacacctcattaccctatgcttataaaacccgacccaaacgtcagctgggggtgatatattggagcacttcctcctgtctccttgccagtccacttgcaatgaagcttttttttcctcaaaagccagtgccatggtcttggcctccatgtacattaggcagcaagcccattgtttgctcagtaacaccctacctttgcatccctttgtatcrtgaaaacagccacagagacaatgtaaatgacttttatctcatttaaatgaattgtcaacctcagctaaattactacttatcatataaacagaaaatgtaaataaactgattatttctttccatccatgtttttactgtcttcatgtatagcatgtgtaggattttgaagttaactgtttctgaaaacttacttgcaaatttttcaacactgcaaaaattgcttaaaataatgaagccaagaaaattaagccaggttaaaaacataaaagaagaaaaggaaggagggcaggcaggt

SEQ ID NO: 758230 - DNA, 625 bp, Homo sapiens
acagagttgttaacacaacccccattcattgttaacatgcccgtttgtcaggctgctgacggtgggactaaaagagctgttagcatggctgtaacatcccctctggggcttcagagtcgagtgctttcctgtttgggcgccaccaagttcccttcatctgcatgccagagttcacccccggagtcacttccgacaggcctgatscagctgcaggccccaaagggagcccgctcctgtgccagcacttggagttgctggcaagatgaggcactcacttgatcacacaccccctcctactggggctgagcatgcagtctcggtggctgcaggatccccaccagagtgcaagcccaagtgggcagggcacctcctgcctggggcagagctaggcatgggcaggggcatcgccagccagaagtctgcagttggaaaagtgtccgagaaaaatcctgcgtcactttggaagcagtcttcctatcctagaatgccagagggcaagcatctgaaagatctggaaggatgaggcagcaaaggccacgatgtgaatgtacactgcccctgtcagaggtgatcgaaccagagcgattccatcttgaataggggctgggtaaaataaggctgagac

SEQ ID NO: 758231 - DNA, 625 bp, Homo sapiens
acagagttgttaacacaacccccattcattgttaacatgcccgtttgtcaggctgctgacggtgggactaaaagagctgttagcatggctgtaacatcccctctggggcttcagagtcgagtgctttcctgtttgggcgccaccaagttcccttcatctgcatgccagagttcacccccggagtcacttccgacaggcctgatcmagctgcaggccccaaagggagcccgctcctgtgccagcacttggagttgctggcaagatgaggcactcacttgatcacacaccccctcctactggggctgagcatgcagtctcggtggctgcaggatccccaccagagtgcaagcccaagtgggcagggcacctcctgcctggggcagagctaggcatgggcaggggcatcgccagccagaagtctgcagttggaaaagtgtccgagaaaaatcctgcgtcactttggaagcagtcttcctatcctagaatgccagagggcaagcatctgaaagatctggaaggatgaggcagcaaaggccacgatgtgaatgtacactgcccctgtcagaggtgatcgaaccagagcgattccatcttgaataggggctgggtaaaataaggctgagac

SEQ ID NO: 758232 - DNA, 664 bp, Homo sapiens
ccagggaactttcacactgtggtcatgtcattgaagccacatctgcaatctgacccatgcaggtggatctcctgctgctgcgcttctgtctgggtctctggtggctgcagaaacaatggctacaagctgagcagataaagaaactcagagagttcattctaaacaagtgaacaacctcttcttcctgatytaaggcaaaaagcatttaacctttcatcatttatttctccacaagtgtggcatgtcatcattgccactcactgacccacacactcatggttcatagcctgagaaatagtttgcaaaggcatatttaccttcattgaaaccttagaaaacatatataaaggcagttcaaaaatcaaccttaaaatatgccataaaaagacagagagaggtaagaagatactcatgaaatcagtcattgtctcaaacaagaataattttagagaaagtggattgggtccttctttccctggttctcttgcttttttctattctcttctgcgagcaataatccttttgtctggcttcttcattatttcaaaggagaaagtacaatatgagcatgcattcacctatactgtcaattccagaaaaaaatagcagagttaaatataaatggaccttagtcatatttaaccattgctctccttgacaatcc

SEQ ID NO: 758233 - DNA, 664 bp, Homo sapiens
ccagggaactttcacactgtggtcatgtcattgaagccacatctgcaatctgacccatgcaggtggatctcctgctgctgcgcttctgtctgggtctctggtggctgcagaaacaatggctacaagctgagcagataaagaaactcagagagttcattctaaacaagtgaacaacctcttcttcctgatctaaggcaaaaagcatttaacctttcatcatttatttctccacaagtgtggcatgtcatcattgccactcactgacccacacactcatggttcatagcctgagaaatagtttgcaaaggcatatttaccttcattgaaaccttagaaaacatwtataaaggcagttcaaaaatcaaccttaaaatatgccataaaaagacagagagaggtaagaagatactcatgaaatcagtcattgtctcaaacaagaataattttagagaaagtggattgggtccttctttccctggttctcttgcttttttctattctcttctgcgagcaataatccttttgtctggcttcttcattatttcaaaggagaaagtacaatatgagcatgcattcacctatactgtcaattccagaaaaaaatagcagagttaaatataaatggaccttagtcatatttaaccattgctctccttgacaatcc

SEQ ID NO: 758234 - DNA, 664 bp, Homo sapiens
ccagggaactttcacactgtggtcatgtcattgaagccacatctgcaatctgacccatgcaggtggatctcctgctgctgcgcttctgtctgggtctctggtggctgcagaaacaatggctacaagctgagcagataaagaaactcagagagttcattctaaacaagtgaacaacctcttcttcctgatctaaggcaaaaagcatttaacctttcatcatttatttctccacaagtgtggcatgtcatcattgccactcactgacccacacactcatggttcatagcctgagaaatagtttgcaaaggcatatttaccttcattgaaaccttagaaaacatatataaaggcagttcaaaaatcaaccttaaaatatgccataaaaagacagagagaggtaagaagatactcatgaaatcagtcattgtctcaaacaagaataattttagagaaagtggattgggtccttctttccctggttctcttgcttttttctattctcttctgcragcaataatccttttgtctggcttcttcattatttcaaaggagaaagtacaatatgagcatgcattcacctatactgtcaattccagaaaaaaatagcagagttaaatataaatggaccttagtcatatttaaccattgctctccttgacaatcc

SEQ ID NO: 758235 - DNA, 380 bp, Homo sapiens
gttgtgcaatctgtggacccagttgtcatctgccaccactgtctagttatcttttgactgccacaagtggactccaaaaaatctccaaaagaaattgttaccataacaagatggccaactagacacagccaggaagcactgctcccactgagagacaccaaaatattgagtamaccaatgtattttgagcccatcttcagagagaaaatgctgagagtcattacagaggtgatgcagacaacaaggctgaagagggaggaagctggaaaccctgcacaggatacttgcatgacagggctagttcccagacctgaatgcctcctggggaagggataagtgaagggatggagggacaggccactctcactgtggacctctgg

SEQ ID NO: 758236 - DNA, 603 bp, Homo sapiens
aaagtacacaggtcccagaacagagcagtttttcctcaagacaggaaattccggtctacctgagtcagtgcaaaaaggaacttttctctgctttaacccttacaacaaattaacctggattaaccctgatcttaaccaatcagctttttgtctattgttttgtttaattgttctcattttacagragctactgttcttccattgtctgtgaaagctctcatactattttgtagaatgcaggctgccctgattcatgacttacaaatagaagccaattacatctataactaaatttgttctaattttgtcttttaaaaagttatcgtcataggccaggcacagtggctcacacctaaaatcccagcactttggaaggtcaaggcaggcagattgcttgaacccaggagtttgagaccagcctgggcaacatggtgaaacacagtttctacaaaaaataaccagatatggtggcatgcgcctgtaatcccagctactccaaagactgaggtggaagaatcacttgagcccaggaggtcaaggctgcagtgagccatgatcactacagcctgggcaacagggcaagactctgtctcaataaaacaa

SEQ ID NO: 758237 - DNA, 603 bp, Homo sapiens
aaagtacacaggtcccagaacagagcagtttttcctcaagacaggaaattccggtctacctgagtcagtgcaaaaaggaacttttctctgctttaacccttacaacaaattaacctggattaaccctgatcttaaccaatcagctttttgtctattgttttgtttaattgttctcattttacaggagctactgttcttccattgtctgtgaaagctctcatactattttgtagaatgcaggctgccctgattcatgacttacaaatagaagccaattacatctataactaaatttgttctaattttgtcttttaaaaagttatcgtcataggccaggcacagtggctcacacctaaaatcccagcactttggaaggtcaaggcaggcagattgcttgaacccaggagtttgagaccagcctgggcaacatggtgaaacacagtttctacaaaaaataaccagatatgktggcatgcgcctgtaatcccagctactccaaagactgaggtggaagaatcacttgagcccaggaggtcaaggctgcagtgagccatgatcactacagcctgggcaacagggcaagactctgtctcaataaaacaa

SEQ ID NO: 758238 - DNA, 622 bp, Homo sapiens
ttctacctagcttcattgaggtacgactcatgcaccgtacaattcacccatataaaatttacaattcaatattttttagtgttttagagatatgtgcaaccatccccacagtcaacttttgaacacttttatcacctcagaaataaaagccatggccgggygcagtggctcacgcctgtaatcccagcactttgggaggccgaggcgggcagatcacgaggtcaggagtttgagatcagcctggccaatatggtgaaaccccatctctactaaaaatacaaaaattatccaggcactgtggcacgcgcctgtagtcccaactacttgggaggctgaggtaggagaattgcttgaaccctgcattccagcctgggtgacagggcaagactccatcttaagaaaaaaaaagaaagaaaaaaaagccacatgcttcagctattactccttgtcttcctaagcagcacctaggcttctttctcccagtagattgtcctattgtggacatttcttatgaatggagtcaataatatgtggtcttttgttactgacttctttcagttaacataatgttttcagggttctccatgttgtggcatgtatcagctcctcattccttttttgt

SEQ ID NO: 758239 - DNA, 526 bp, Homo sapiens
tggactacaagtgaagttgagatgactcctatttccttcactgagaggcaaggtttctgttcagacttgccctaagctgaggtgtttcgccaggggaaagagaagacaatagagtttactttctacctagcttcattgaggtacgactcatgcaccgtacaattcacccatataaaatttacaattcaatattttttagtgttttagagatatgtgcaaccatccccacagtcaacttttgaacacttttatcacctcagaaataaaagccatggccgggcgcagtggctcacgcctgtaatcccagcactttgggaggccgaggcgggcagatcacgaggtcaggagtttgagatcagcctggccaatatggtgaaaccccrtctctactaaaaatacaaaaattatccaggcactgtggcacgcgcctgtagtcccaactacttgggaggctgaggtaggagaattgcttgaaccctgcattccagcctgggtgacagggcaagactccatcttaagaaaaaaa

SEQ ID NO: 758240 - DNA, 634 bp, Homo sapiens
tgtctcaaatatttaagactataattttatgatcatacaactcatactcccagcactcagtaaagacaacgtatatttctgtcagtctttcatacgcacaattagaaaatgattaaaatagtctgataatagatttccctgttaagctcagaagcccagtattctttcttggtttttaactggcatgctccttttaattttatatgtatttcttttaatgatgaatatagaggcaataaataatacttttctttatatatgattggattacaattaactgatgaatttaggaaaggacttaaagatttatttttatcatcttgtaatttaaaacaaaacaacagggctataaactccaaatatgcaagtaaatgtaaagctcaacttcaaaaaataaatgacttgacaatgatgaaaaagtagaaaatgtttgagaaactttatagaaatatccttttacttcaaaaacaggagaaatatgtacyacaggtaggcccctacttacagactcctaattattcatatgtgaattctcagaaggcaagggctgggggtaatactgcttttaatgaaagtctgctcttatgagttttcagatgccataaccaaactgacattgtgtaccgttgttctc

SEQ ID NO: 758241 - DNA, 633 bp, Homo sapiens
acattgtgtaccgttgttctctggggagcttcatgcacagaatgaactcatatgttacatgaccttgggccaaacaatatcttaaagaagtaatcagtataacatttcagaaattgaggtggccaaagtcggtccaggaaagtctctcaggatttgatatgctgagtgcaggagaattcattttccattcagagaaaaggtcgtacaaagtcttcatgtgcctcaagtgctgaaagcaatatagaagaagaaaaattgggcttaaacaaaattttaaaaaatctgtcttcattttctcccccgtgatcctttatatctaggaaggctattactgtggagaggccttaatatggactatttagaccagtcatttgaacaaatgtcctaacaacagcagaaaaacatgatcagtgttctgcmgaatctggacttgtaatcaagtagtcagtgtttaagagacaagtttaggtcatggaaatatactggagccaaaaatcagaattctagtttttgctccagcactgatttgttcagctatgagtgatgttttcagatagatttctttagggtaggaagcaataatgttatatgagttggaaaggcttgatgaatgttactgagtaaatagatgtt

SEQ ID NO: 758242 - DNA, 568 bp, Homo sapiens
gagccaattaaacctctttgctttataaattacccagtctcagttatttctttatagcaatatgagaatggactaatacaaggacctacagtatggacacaccagacaaagagatgattcacatcgcaggagggatggagtaggacaggcggagatttcatcacgatactcagaatggcacacaatttaaaacttatgcaatgtttatttctggaattttccatgcaatgttttctgacctcagttgactgaaggtaattgaaaccatggaaagagaaactgtggctaaggagaactactgtatcaattacctatgactkcatgtcaaacaattacacagaattagggattcctttctccacttgtctctctttgggtatttcctccatgttctctctggcttccaagagtcccttttcccaactcctctgtccagaaggacaggttttctctcaggtgactgtgtcaccataccactgcagggcagctcccagacagggaatggcttcagggaaacggagggagagaaaaaaaggaatcagcagtttccaccactttctctagcttg

SEQ ID NO: 758243 - DNA, 587 bp, Homo sapiens
ttcacatgtgattatttgtagaaaataatctctacttatgagatgcaactttttatagttaatttctttttacatgattgttttcttgtagagttagaaaatataatacttggccaggcgcggtggctcatgcctgtaatctcagcactttgggaggccgaggcaggcagaacacgaggtcaggagatcgaaatcatcctggctaacacggtgaaaccccgtctctattaaaaatacaaaaaaattagccaggtgtggtggcgggcgcctgtagtcccagctccttgggaggctgaggcaggagaatggcgtgaacccgagaggcggagcttgcagtgagccgagatagcaccactgcactccagcctgggcgacagagcgagactcygtctcaaaaaaaaaaaaaagaaaatataatactttttttggtgtattttgttgacttagaattgattggtgacaatcattctgctttcaaaaaaaaggatttttctgtatcaagctactgaatactcaaattataagaattagaatagaataatataagtaagttacatgtgttcctctaatttgtgttcatccagggg

SEQ ID NO: 758244 - DNA, 603 bp, Homo sapiens
ctatgtgtacaaagtgcatttgaaacataaatttcatgtttagccttgggtcccattcccaagagatctcattatataaatgcaaatattccaaaatgtgaaaaaatccaaaatgtgaaacactattggtcccagcattttggataaagaatatgtgacctgtatttttaaaaatttgtgaatracaaaaagccaactaagctggacatggtggcttacacctgtaatcccagctattttggagactgagcctggaggatcacttgagcccaggagttcaagaccagcctgggcaacatagcaagaccctgtctaaaaaaaaaaaacaaaacaaacaaacaaaaaaaaaaccaaggcaatgggaaataatggagtccagaaagctaagcacttgcaaccagtttctctggggcctctgctgagagggtgagacactaagcagggcttctgttggccatgggaggctaggggacaaaacatgtaattagtagagaacccaccaaggaagacagtcagataaaatccccactttgaactgggatctgaaaaggctacattctaaacataatagtgaaggagaattagatcaccccgataggaact

SEQ ID NO: 758245 - DNA, 618 bp, Homo sapiens
aattacatgactgctttgctttgcggagagcagggtagaatagttgccccagagatgacagaacgggagagatggtccctgaagaggcagcagcattgctcgctcttgacacttcaaactcatggaaaatgatggctgcacaaacaaaagatagagactcattgatgaacaatggaatgccaatctgaagattgaattttagtttacattagtgctrttgtataaatataaaacagttcttttaagacagagactttctgaattacttttaggaactacaagcagatcattagagatttacacttttaatatttgaaaggtctagctcataaaatctatgtgttcagccaacttttattgagctctgactacattcactgtttctatatttcacattttttttaggccattgtttcttaacatcctgcaccttccttgttgctacagtattctttctggtgaaatagatccttcagtgggtcatttactgagagcccattattgtgaaactttcatagtcttgtttttcatcttgaatgagtttatctcctgatttttgagtgtcttgactgactttcataatttttctcatgtgcttaggaatttgtatgttcatgt

SEQ ID NO: 758246 - DNA, 625 bp, Homo sapiens
gacttaaattctattttggctgctataagtatagctattcctggtttattttggtgatcacttgcatgaaatacctttttccaccctttagtttcagcctatgtgtgtccttaattctaaagtgggtcgtttatagacagtatatagtagaatcttggtgtttttgatcaattcagctactgcatatgtttggattgggtagtttaatccatttatgtttaaggtaattattgatagtaagaacttactattgccattttgttarttgctttttgtctgttttgcagttgttcctattttcatttttctcattttcctctataattttaatttttttgtagttttatgcttttattccttttactttttctcttgtgtacctactataggtattttatgtgtggtattataaggtttacattcaacatcttgtagttataatactgtattttaagttgatagtaactttacataaatcacacacaaatattctatacttttacttctttcctcactccacatactttatattaatgatgccacaatctacatcttttaatattgtgtatccactaacattttaaatttattcttactgcttttttcttttaacttttattctaga

SEQ ID NO: 758247 - DNA, 624 bp, Homo sapiens
  misc_feature 383: n = A,T,C or G
atacatttctgttgtttaagctacgcactttgtaatactttgttatagcagccatgataacctaatacagccaggtaccaggatggcttctaaagtttagatagcaggaattatttacttgccagtctcctcatgtagttgttactgtaacaaatagattctagaattcttgtgtttgtttttggtgtttatatctttcatttcaagattcagagtccctggaagaaaagtccatgcattaaacttggatccaacatccccccaccctgagattgtaagagagcaggacaccattatatatagttccataacaattgtacaccacctaagtgagccaatcyccacaaaagaactgggtttattgccgaaggagtggagttgantaggatgctggggagccaagaagtacaaatattcacttcatgagtcaaagttgatttgtagattctgaaacacacatttgaaatatgtgagaaacataaacatattgcatgttgatgtggcttatctatctccaaggaaattctttacatggaaaaatgcacagaaatgaagaaggaaaaggaggaggaggcagaggaggaggaggcggaggaggtggagaaggaggagaggcaggaggtg

SEQ ID NO: 758248 - DNA, 645 bp, Homo sapiens
agaaaaagttaaacattcatgagttaaatttccatattaaaaagttaaaaaatctccaaagaatgaagtagaaaaagtaataaaatcaaaaataatttaaattttaaaaatcatacattataaagaaaaaccaaactgacaagactaattaagactaaaaraaaactaagcaatagtgaaaattaacagggaacctaactatacatacagcagatattgagattacattatattacatacaactttatgcaaaaaccctgaaaacatatacaaaatggtaaattcttagaaaaaaatactacatactaaaattgattcaagaataaataaaatgtttaaatagtcccatatacattaaataaatttagtttcctattaaaaaatcttttcacaaaggaaactccaggctcaaagatttttacatgataattctaccaaatattcaaggatgattctaattttatataaactcttccagaaaataaaattaacaatgctcaaatcattttataaactacatatagtcttgacaccaaactcgataatacattagaatgaaaaatttagccaatctcactcataaatgtagatgcaataaatacgaaaatattagcaagacaaatcgagcaatgtaaattaaaaagt

SEQ ID NO: 758249 - DNA, 610 bp, Homo sapiens
tttataatattttctgttgtgaggatgggaaaatatcacatctttctcacagaatggtttgtcaatttaaaaaaatattgatagcttagaaaagtatttttttttaagtttcacagttcattcttgctaacattgagtgtmtgcactctctcagatggtgcttcttgtcctatggcaaccttggtaaattgtacccttaggattttctaggaatggccttgaaggctatgcccagcagctgtgaaagatgcatcagaagcatgtctaccttgccacccgtggttcatgctgctataacaaagcaccaaagactgcatataaaagcagatttttttacccacagttctggaggatggaagtctgagatcaggattccagtacagttgggttctggtgagggtccccttctgggctgcagactgctaacttctcattgtatcctcatgaggtgggaagagatcaagctagtactctggcataggattagggtctcaatgtatgaattgtggggcaacacaaacatccagtccattgcactcccttgatccattgttcttgggacagggcacaacttaggcatggatcctgggtcctactgcctcccagcaga

SEQ ID NO: 758250 - DNA, 562 bp, Homo sapiens
tggttaatgggatattgtcagcaaagagaaattgtctcatttcagttcattactccaactctgcacaccacaccaaccccttgtttctgactgtaacatgtggctaaggacacaataacttaataagcaaagggcattctgaggttatataagaatgaaaactggagggttttttcagtgatcaaggagcaatatccacaactcacagtgctgtgccttgtcataaagaatccaacaccagtggggatgtgccactcaacacaagagccttcacttactctttcctctgtaagaccctttccaatcccttcaagttttaycgataaatcatttcagggagagaaggtgagttctttgcacattccaggagtttcttttctgaatggaaagggataactttctagtgatcacaggcattaacaatgcatagattctcctctgttccactttcagaattcacctttttatttctcaaaacagagggagagagctgattttacggaaagagcaaatacttttgtgttagacaccttagctttaactgcagtcctgattctttctt

SEQ ID NO: 758251 - DNA, 613 bp, Homo sapiens
agtgtgcaataataattaattaatgtattatgcattcagtgacttttgtgatatttatctgccctttaacattgggacttagtgtgatttattttcttttgctaaataaatactcaatttcacacctaattttttgtaattttgcattctgtctctcagaggagatctcaattattgtataagtttccagccccacaaaatctggatcatttcctggccccaacatcactttcccttatccctaaatcatccagtcccggttctcatctaaagttccccatcttcaacacaatcctcaactcaacatatcactttccctgatatactarccaaccatgcatttctaactactcaaaagattataaatcacaaatctcaggaacaactttggtgaaaggagaaatctttttagaatacagaggaggaaaagaagttgaataagcaaagactgtatatcaatcttgggaaatgataaggggtataagactagtaacacatgcatgttaatatttatcttcttataaaatatatatttctattcaacatatacaactttcatccaaagtttccacatgattcagttacagtcaccatattttacctagcaccactg

SEQ ID NO: 758252 - DNA, 583 bp, Homo sapiens
tgggtttttttctaggtatagaatcatattgtcagtaaacagggatagattgacttcctgtattcctatttggatagtcataggccctggtaaagattttatgatgaagatgtcaaaagcaattgcaacaaaaacaaaaytgacaaataggatctaattaaacttaagcgcttctgcacagcaaaagaaactgtcaacagagtaaacagcctacagaaagggagaaaatattcacaaactatgcatctgacaaaggactaatatccagaatctataaggaacttaaacaaattaacaatcaggaaccaaacaacccttaaacaaattaacaagcagaaaacaaataaccccattataaagtgggtaaatgacaagaacagatagttttcgaaagaagacatacacacagtcaacaaacatatgaaaaaatactgaacatcactaatcattagagaaatgcaaatgaaaaccacagtgcgataccatctcactccagtcaagatggctattactgaaaagtcaagaaataacagatactggcgaggctgtggagaaaagggaacccttatacactgctggaatg

SEQ ID NO: 758253 - DNA, 576 bp, Homo sapiens
ataccttatctgacttctgttttaacaggatcccctgggctactgtgttgagaattgactctagggaaaaaagtataagtagggctgcaatttaagaatctgacaataatccaggtaagattcatgacatcaagacatcatgaggactcagacaatgacagttacaagtgcaggagtaagaggcagtagattgagcatatatttaaaaagtagagccaagagatttctgactcatccacctaatacagactgaggcatcaagaatgaccccaaggatttaaagytagagtcaccaaaaaaagacactatagatagagaagagataaagactacagactaaacccttggacactcacaaattacgagggtgaggacaagaggagaaataaggaaaagagaatgacaaggataatccagtgagagaagaggaaaattccagaagagcttggcattctggaagccagtgaagaatgaatttcaagtaagaaggaatgagtgaccatgtcaagagctgccaatcaaaatggataccactggggacattgacatgagcggtttcagtgaagtagtcaggtg

SEQ ID NO: 758254 - DNA, 605 bp, Homo sapiens
agactggccattcatactcagttctaagaaagaccggctatacaaagaggtcatatttgaattctctttagcaaaaaaggagacggccatagaatagccaagctgggaaagctaccctaacctatctccaactccctgccattccataaacatygtctcctaatagtccaggaaaactacctcatttaaacatggaggaaagaaaaatatgaatcaaattcatatttttataaaatacagaaaatgacaaaataatttgaaagaaaatgaataaaggacatagaaaaatgaagtctaatacacgtattactgaaaccctgaaaaagaaaactaagcagagaaaaaaatatttgtaattctaaaagcaacttttctcaaataaaagggctaaactgatgtactaaatgggtgtactgtgtatttgggaaaactgacccaagaataatcaataaaacaaatcatagtaagactactggattttaaagataaagaaaaaattcctttgcgtaaccagacaagtcacttatgataaaaagtaagtcaagacggcatcatatttcctgacggcaacattttattctgaaacagaatgaaatagctgggca

SEQ ID NO: 758255 - DNA, 605 bp, Homo sapiens
agactggccattcatactcagttctaagaaagaccggctatacaaagaggtcatatttgaattctctttagcaaaaaaggagacggccatagaatagccaagctgggaaagctaccctaacctatctccaactccctgccattccataaacattgtctcctaatagtccaggaaaactacctcatttaaacatggaggaaagaaaaatatgaatcaaattcatatttttataaaatacagaaaatgacaaaataatttgaaagaaaatgaataaaggacatagaaaaatgaagtctaatacaygtattactgaaaccctgaaaaagaaaactaagcagagaaaaaaatatttgtaattctaaaagcaacttttctcaaataaaagggctaaactgatgtactaaatgggtgtactgtgtatttgggaaaactgacccaagaataatcaataaaacaaatcatagtaagactactggattttaaagataaagaaaaaattcctttgcgtaaccagacaagtcacttatgataaaaagtaagtcaagacggcatcatatttcctgacggcaacattttattctgaaacagaatgaaatagctgggca

SEQ ID NO: 758256 - DNA, 493 bp, Homo sapiens
actggctttccattttgacagcttcttgggacatggagaatactaatgaaaactcagggtccatcgatggtaggaagcctaacaggatacccctacacaaagctgaagatgtgtaaaggtgaaagaaagaaggaaacactagagacatttgcctgcattaacaataatgctagataaggccaggtgcagcggctcatgtctgtaattctagcactttgggaggccaaggtgagtggatcaactgaacccaggagtgtgagaccagcctggacaatatggtgaaacctcacctctacaaaaaatataaaaattarctgggcatggtggtgtgcatctgtagtcccagctacttggagggaggcctgccaaggcaggaggatggcttgagccaggaaggtcaaggctgctgtgattgcaccactgcactccagcctgggtgacagagagcctatctctaaataaataaaaatttaaaaataacagcaatgctaga

SEQ ID NO: 758257 - DNA, 560 bp, Homo sapiens
aaataaataaaaatttaaaaataacagcaatgctagataagtggtggaagaaagtaaaaacttttttgaaaatataacagtaatgcccgataagtgacggaaaaaagtaaaaacttccttgaaaatatataagcacaagttcgccctcaatgggtctgaaaaaaacttgagaatttagcctagaatgttcctggctarttgtgcacccaggggactggcagaaacaaggaatttagtttccatctaggcctcaaccacattctatctacagacataattccaaggaagatatttgcagtcaaaaatcaacacccaaggatgtcataagtaagaaagcaatagaccccaaaaccataaacattgggattctcaggcagaatatacaaccatatttaatgtgattaaagaaataaaagagaaccttgaaaacacaggtaatgtggattttaaaaataactactagaaatagaacttttagaaactattaataattaaaattcaaaactctgtgggaagattaaccagaagactatatgtggcagaagacagaactggtgaag

SEQ ID NO: 758258 - DNA, 626 bp, Homo sapiens
tgcctgaaacacattttacgctggaaatcagatcctaacgttaaatcagctaatctttcacatttccaccacatccccatttctaaccttagccccaaattaagtcaggattccaggcatagctggcatacttgggtttgtctgggtaagttaaatggtcaaayagtattagccaaattcctacagagtcctgtacctggtatgccaaacactaaggaaaaagcaagcggatatctgcttacaaagtcaataatctaacatagggggagagtctggggtaggctatgggggaaggctggtctagggcatagaactggggggctggagagaaagaatgatgtcgtgaacagcagacattctcttcaaggaacagacagtaaatacctggggctttctcggtctaggccaagaggtaaagtgaaagctatcatatgggtacttatcaaaccatttaaaatgtaaccacttaaaaatataaaaaacgttttttcttcacagggccatttaaaaaatccatgctggggcagggcacagtggctcacacctgtaatcccagcattttgggagaccgaggcgggcggatcacgaggtcaggagatgagaccatcctggctaacacagtgaaa

SEQ ID NO: 758259 - DNA, 625 bp, Homo sapiens
tttagcagagtgccactctactaattaattcaaaataaatgtagtttgccatgctcaattatcattatcctgaaatctttgtatttattctattgagaattatatatattttgacaataaaatacattttcttatataaaaattaggggttttaatcataaggcacatgggaatgttgttttggagaaagattactcaaaatgaagtaagaagaaaattcaaatccacgtcccttgaaatggtcaagaaygtcaccatctagacaaaccataatgcatctattgcacactgatctaaaagaaaggtaggccgggtgcggtggctcacgcctgtaatcccagcagtttcggaagccgaggtgggtggatcacctgaggtcaagagtttgagaccagcctggccaacatggtgaaaccccgtctctactaaaaatacaaaaaatgagccggtcatggtggcatgcacctgtaatcccagctactcgggaggctgaggcaggagaatcacctgaacccaggaggtggaggttgcagtgagctgagatcccaccactgcactccagcctgggcaacaagagtgaaacttcatttcaaaagaaagaaagaaagaaagaaagagagaaaga

SEQ ID NO: 758260 - DNA, 619 bp, Homo sapiens
catgctaccgcaaacttggtggcttaaaacaacacaaatctatcatcttaccattctggctgtcagaaatctgagaagggtctcattgggctacaataaagaggttggcagggctgtgatcctttctggaagctgcaagggggaattcgccttctcaccttttccagcttttagaggctgcctgtattccttggctcatggcctgcttcagtcttcaaagccagtaataacctgtctatcttcatcatgattccaactctggttctccctcttctgcctccctcttacatttttaaaagacccttgtgggctgagcgtggtggctcacgcctgtaatcccagcacgttgggaggctgaggggggcggatcacgaggtcaggagatcaagaccatctgggccaacacggtgaaaccctgtctctagcaaaatacaagaaaattagccaggggcgtggtggcatgcamctgtagtcccagctactcgggaggctgaggcaagggaatcacttgaacctggaaggcagaggttgcagtgagccgaggttgggccactggactccagcctggcgacagagtgagactctgtctcaaaaaaaataataataaataaaatgaccc

SEQ ID NO: 758261 - DNA, 564 bp, Homo sapiens
tgtaccatggttatggtacaattcccaatggccgaaactggaacaatttgagaaaaaaaaattaatagtatctatagaacaaaataaacctccatgaattcatattggtataaattaataactgaataaataaaaaatggaagagaaaagatagctcttattttcagaagaattccaattacttaatgtggaagaaataagagaaatagaaaattaccattagaacaccatagtaagaattgttagaggtaaggcccacttatggatgctaatatcrgtgggtgaacatttgagtctcaagaactcataatatttgatatcaccaagggaaaattagtaactttgcaaggaagaaacccaatagttaccatcttaaccaagaaaccaagataacgtcgtcagtaataagacatattgctgtcacacacctcatcatatgataggctaagaaggcgcatcacctccagggtattcctgccaaaattatattacctcaatgtaatcatgggtaaacactggaagaatccaagttgaggaggcattctacaaagtaaccaatcagta

SEQ ID NO: 758262 - DNA, 609 bp, Homo sapiens
tagaacttcaaaagtcatccaggattccaactaatttgtcccagaagacacctatggaaagcgacaggttcccaaaagtatttaaaaaccaaaggttcattctcagaagctgtgtaaggagttgctggctaggacctttcacaatctccctgttccgggcacatgatgtyttgtcctttgtttgtttcctctgtatgttgattggttttgattcattacacaacacagggtccacgagaacaggtcatttttcaagttaacaggtgcaggatgaaattagattaaagtttggtaaatttgcaggtggaaaaaacatcaacatgggaccgatagaaggggtctggagtgagagaaatatccagggcaacatattaagacttgtcttatttgggcatgtgaatatttctcattcacacggaaggattttcagggggagaaaatctgtgctccttcttcttccatctctatttgtgtcagtttccctcctgagctttgcttgtcttgccctttctctggacgagggcttgactctgggtcttgtcacatctcactcatgccgcggggctgttaggttcagcaggcagagagctgtgtgacctggggccatgt

SEQ ID NO: 758263 - DNA, 683 bp, Homo sapiens
aaaagctttacttgtaagagccaaacctgtacacatctcatgtacatgttgctataatctgaatgtttgtgtccctccaaaatttatgttgaaacctaacccccattgtggcggtatcaagatgtgggggccttaagaaggtcactaggtcatgatggtgctgccctcatgaatgggattagtaacagtatcagaaaggcttaaggaagcgttctgcctacttctgccatgtgaggactcagtgagaaagtaccgtctttgaagcagagagcacttatcaccagacaccaaatctgcgggtgccttgatcttggacacctcagcttccaaaactgtaaccaataaatttttgttgtttattaattacccagcccgtggtattttgttatagcagcttgaacagactaagacatacgccaacatgagaaaggataaacaagctgtaatatattcatacaatagaacacttctctgcaataaaaacgaaaggataaatttctgatacacaggatgaatctcaaaattatgatgaacaaaagaagccagacagaaaagaaaatgtatatagctttgcttatatgaagttctagaaaagtcaaaattaatgtatggtggtaaaaatgaaaactctgatttcctttgaatagtsttgattgacaggaagagagtatgataacacattt

SEQ ID NO: 758264 - DNA, 614 bp, Homo sapiens
ggtgccttgatcttggacacctcagcttccaaaactgtaaccaataaatttttgttgtttattaattacccagcccgtggtattttgttatagcagcttgaacagactaagacatacgccaacatgagaaaggataaacaagctgtaatatattcatacaatagaacacttctctgcaataaaaacgaaaggataaatttctgatacacaggatgaatctcaaaattatgatgaacaaaagaagccagacagaaaagaaaatgtatatagctttgcttatatgaagttctagaaaagtcaaaattaatgtatggtggtaaaaatgaaaactctgatttcctttgaatagtcttgattgacaggaagagagtatgakaacacattttgtggtaataaaaatgttctatatattgattgcagtgatatttacatagatataaacacttgtcaaaacttattgaatcatatacttaaaatttgtgcattttactcactgtatataaattatttctcaattttaacaaattaaaaaattttagaatccaaaataaataaccaaacttttttggggtttttcacacattatgtgcaacacattgctctagatgttgggt

SEQ ID NO: 758265 - DNA, 614 bp, Homo sapiens
ggtgccttgatcttggacacctcagcttccaaaactgtaaccaataaatttttgttgtttattaattacccagcccgtggtattttgttatagcagcttgaacagactaagacatacgccaacatgagaaaggataaacaagctgtaatatattcatacaatagaacacttctctgcaataaaaacgaaaggataaatttctgatacacaggatgaatctcaaaattatgatgaacaaaagaagccagacagaaaagaaaatgtatatagctttgcttatatgaagttctagaaaagtcaaaattaatgtatggtggtaaaaatgaaaactctgatttcctttgaatagtcttgattgacaggaagagagtatgataacacattttgtggtaataaaaatgttctatatatwgattgcagtgatatttacatagatataaacacttgtcaaaacttattgaatcatatacttaaaatttgtgcattttactcactgtatataaattatttctcaattttaacaaattaaaaaattttagaatccaaaataaataaccaaacttttttggggtttttcacacattatgtgcaacacattgctctagatgttgggt

SEQ ID NO: 758266 - DNA, 632 bp, Homo sapiens
caatatatgtgataagtctgtgtcacatgtggtcatggtattctctgcaattttttatgtttcacttttcacaaaagaaaaaaaaaaaacttggtatgaaaaagctaaccagagctctgcatttgtgactaaggcatgtgaactggcagctttgctgttggatgaccaggcaraggtcagtgcagaaagaccgccatctttccatctgcagacattcagctttcagccctgcagctcttgtgagccccaagcctgtccctttcagcatgtcttgagtagggacagatacagttttgtggaacctgatgcttttacaatgagagatcattttagatgaaagagcacaaaatcatgaatctgaattcagaatttatttacaatgggaaaataagttacaaccaatagcacatttagcaaagccgacaaattcctcaaatgtcacaaaatctaggaaaatgacactttttattcactctatcgtgctttttatgctttttggtttttgttttgttttgttttgttttttgctacagactctttgtctctttatattacaatcttataatatcatttactttacagaggccaggaaaataattcagtttttcctctagctttattagattttttta

SEQ ID NO: 758267 - DNA, 710 bp, Homo sapiens
gatgtataaaaagttagcataattctacacaaaacattgtgttttacacctcattagatttcattgatctcaatcatagttatatatgctacagatgagcttaaacaggatttagacctttaggtgtttcaagctttatattccttagactcttagaatatctttataattacttgcttccagatagattaaaaatcattatacattgaagagattaaacattactgtgttttgaagagattagtttctgagagagagaaaatggtgtgattgaaaaatgaaatcttatcatcctgcctgaaatgtaatcctgtgcacaaaagagtgaggcagagagggcagagtttaatgaatgtgccccgatggtattttcttgcattctatcatgttggaaaatagaacttacagttaatttttttaacastcacatctagttttagtgagttagagtctgatatggagggaatctcagaatctacctccacatcagatttcgctagctcagaactcacggactgaaagacaaccagccgttccatgttgcaccccaacctcaaggcagccagagaagtctcttttcacaggacactacagtagcaatgacttagtcaccacttgcctttggtgtcttcacagtccaggatcttaataaaatcatttatattcttgtagtacactggatgtcttctccttaagagtggtggacatcc

SEQ ID NO: 758268 - DNA, 710 bp, Homo sapiens
gatgtataaaaagttagcataattctacacaaaacattgtgttttacacctcattagatttcattgatctcaatcatagttatatatgctacagatgagcttaaacaggatttagacctttaggtgtttcaagctttatattccttagactcttagaatatctttataattacttgcttccagatagattaaaaatcattatacattgaagagattaaacattactgtgttttgaagagattagtttctgagagagagaaaatggtgtgattgaaaaatgaaatcttatcatcctgcctgaaatgtaatcctgtgcacaaaagagtgaggcagagagggcagagtttaatgaatgtgccccgatggtattttcttgcattctatcatgttggaaaatagaacttacagttaatttttttaacactcacatctagttttagtgagttagagtctgatatggagggaatctcagaatctacctccacatcagatttcgctagctcagaactcacggactgaaagwcaaccagccgttccatgttgcaccccaacctcaaggcagccagagaagtctcttttcacaggacactacagtagcaatgacttagtcaccacttgcctttggtgtcttcacagtccaggatcttaataaaatcatttatattcttgtagtacactggatgtcttctccttaagagtggtggacatcc

SEQ ID NO: 758269 - DNA, 616 bp, Homo sapiens
aggcttctctttccatcattctggtacacagctctgtgccactcatctcctctctccatggcttttctggagcaaatgtgtatatatcgtacagatgccaccagggctctgttcctacatcctcagaccttaccattatgtgcatgtagacccagctcctgatcccagctctcatctctttgcctaagatagataggtaggtaggtagatagatagacagacagacagacagacagacagttattcccatggaagagcagctccatctgttttttgtagtcctcggtgtaatcaacctactagcctgaaaggcaggattyttacacacttctctccatacctattttaacctaggttcccctagaagcagatcctgattttgaaggattcagtgctaatagtttatttggaaggtgaacctagaactcatagaagagacagggaagggtggggagtgaagaaagtatgcaatatcaagttgcccctttaggtgactggagtggaatcttgctaggctttctggtagtcggtgtagaacacacgttagaattattttaccaatggttgagcacttggttgaggcacttactggttgagggctgctccttggtggtgg

SEQ ID NO: 758270 - DNA, 610 bp, Homo sapiens
catatttcagaatccatagagaaagcagcaatagcaattaatggatgtcatagtttttcaccaacttctagccaaaggctcattaaagtgagtcaggaaaacagtcaaaccatcatttgaatagaagctaccaagactgtttagagacacatttaattctagcagaaagatggttgatttttaggtattaaaaagtttttaaaatgttaacattcacaattctcatacaaactcttcaggttaatacaacytgctttttcataagcaaattatttttattggtgatcccatggtttaacaaaaaccctaaactggaacatggaatactcagctctaacattaatttgttttgcaacaacgaatgattgatcacaaagtgatcgcaaagtatttattaagcatctcttgtatatgtactaagagtgatgaattacaaaaatatcagatatggtcatgcctacaagggtaaaaatatatagtcactacctcaaatttcatgtaaatgtgcaggaaatactgcattgacactccaacacatgattctttaaaaaaaaaaaaaatgctgggcgtgatggctcacacctgtaatcctagcactttgggaggccaa

SEQ ID NO: 758271 - DNA, 619 bp, Homo sapiens
ggtggcacatgcctataatcccagctactcaggaggctgaggcaggagagttgctttaacccgggaggcggaggttgcagtgagccgagatggcatcattgcactccagtctgagtgacagggcgagactccatctcagaaaaaaaaaaaaaagttaacatccagaagagaagagaaaaaataagaagttgtagaaatggagttggaaatctgatggaattttgcctgatcactatctttgttctgaaatttctctctaatgagartcagtaaaaccaatctgtattttaagctaccttgagtttgttttcttctgcagtaaaaatagttcaaatgatcacaagattttatatatatatatgtacacatatatctgtatctatatatctatatatgatagaatgtgaatcgggagacatattatattaccaataagacatatataaatcaggggatatatgtctatatttcttattagtaataattataatatattatagtaatgtaattatactattatataatatataacatattttatatgttatataacataatatattataattactataatacattataatataaatataaaatatatataactataattaca

SEQ ID NO: 758272 - DNA, 590 bp, Homo sapiens
gagaaaagaaatgggtaggatatttatttaaagaaatagtattagaaaacttttcaaatatagatagatatataaatatccaggtacagaaaggtcaagggcctccaataagattcaatccaaataagactacctcatgacattataatcaaaatatcacagatcccaggcaaagacagaattttgaaagaagcaaaagaaaaaaagcaaacatactagggagtcccagtatgcccagtagcaggcttcttagtcaaaacttcacagtccaggaaacaatgggataatatactyaaactgttcttcagaaataaaggagaggtaaagacttgaataaacaaaatctgaaggagttaatcacctctaaacctgtattataagaaatgctaaaggaaattcttcaagacgaaagaaaaggatgctagtaagtaacataacatctgaaagtatgtaacttactggtgaaagtacttagtcaaattatgaatatactaataatctcattgttgtgtgtaaatcacttatatctttagcatgaaaactgaaagacaaaacttttaaaaataataactgcaacaatttgctgagag

SEQ ID NO: 758273 - DNA, 637 bp, Homo sapiens
tttaaaatcctaatcagcaaaatcactcacaatacccacttctaaaagtgaaacagttagctgcaatgtggtatcaatggacttagcattgtacctttaatatgtgtacactgtacatctcaaagggagtcaacttcacatatttgttcattaaacaatagtaatgatcttaataaggtactatgcatatttgatgagttttaatgtaaagcatatttcctaatatacaaaatatascaaaagtaatctttcaattcgagtaattttcttccctagaatttattaacagcagaaacttccaaatgaatagaaatgaattatatataaatgattttttttctggaaaatcccacgcaaccaaaagagttaatattgcataaaaaatagataggcaaattaactgtggtacaagcattaaaagtatataaatgctggccaaaaaagctaaacagcccatggaaaaggacaactgtaattcaacaaatttaaattctaggcctaagggtaacaaaaatatagaccctaataagatggttccaactcaagttttcagaggaatcactatttctgtggaatgactacaaatagtttctaatgctattatcaacaaaataataaaagcctggaggcaagataa

SEQ ID NO: 758274 - DNA, 637 bp, Homo sapiens
tttaaaatcctaatcagcaaaatcactcacaatacccacttctaaaagtgaaacagttagctgcaatgtggtatcaatggacttagcattgtacctttaatatgtgtacactgtacatctcaaagggagtcaacttcacatatttgttcattaaacaatagtaatgatcttaataaggtactatgcatatttgatgagttttaatgtaaagcatatttcctaatatacaaaatataccaaaagtaayctttcaattcgagtaattttcttccctagaatttattaacagcagaaacttccaaatgaatagaaatgaattatatataaatgattttttttctggaaaatcccacgcaaccaaaagagttaatattgcataaaaaatagataggcaaattaactgtggtacaagcattaaaagtatataaatgctggccaaaaaagctaaacagcccatggaaaaggacaactgtaattcaacaaatttaaattctaggcctaagggtaacaaaaatatagaccctaataagatggttccaactcaagttttcagaggaatcactatttctgtggaatgactacaaatagtttctaatgctattatcaacaaaataataaaagcctggaggcaagataa

SEQ ID NO: 758275 - DNA, 677 bp, Homo sapiens
cagctttgcatatgctgttccctctatttggaatgctcttccccatctcccacccctggctggcttttcctggccacccactctgaatgatgcgctcctcttacatatgtgccctgtgtgtttctttactgatacttgtcagcctgctgatcgacttatttgcacaaacatttaataaatcactggaccgtctgctgtaggcgggcagagatcrgatctgttttgtcttgctcagtactgtgcaataacacctagaacaggcctggcttggtagatagctattgaataagtgagtgaatggatgaatgtcattgaatcagagatgattatgattcacaaaggcttatatgtatgagtgaatttgaaaaaatagaaacaacttgaatattcaataatagccaattaaaaatatagtaacctacaatggaatttgcatggcaattaaaatcataatttaaaagcatatccatgaccaacagcattagtcgttaggcaaatgcaaatcaaaaccatgatgaattgccactttacactcactaggatggctgtaacttttaaaaaagggaaaataactgtttttggtgaggatgtggagaaattggaagtggaatgtggaatctggcagttcctcaaaaaactaaacatagatttaccataggggccgggcacggtggctc

SEQ ID NO: 758276 - DNA, 677 bp, Homo sapiens
cagctttgcatatgctgttccctctatttggaatgctcttccccatctcccacccctggctggcttttcctggccacccactctgaatgatgcgctcctcttacatatgtgccctgtgtgtttctttactgatacttgtcagcctgctgatcgacttatttgcacaaacatttaataaatcactggaccgtctgctgtaggcgggcagagatcagatctgttttgtcttgctcagtactgtgcaataacacctagaacaggcctggcttggtagatagctattgaataagtgagtgaatggatgaaygtcattgaatcagagatgattatgattcacaaaggcttatatgtatgagtgaatttgaaaaaatagaaacaacttgaatattcaataatagccaattaaaaatatagtaacctacaatggaatttgcatggcaattaaaatcataatttaaaagcatatccatgaccaacagcattagtcgttaggcaaatgcaaatcaaaaccatgatgaattgccactttacactcactaggatggctgtaacttttaaaaaagggaaaataactgtttttggtgaggatgtggagaaattggaagtggaatgtggaatctggcagttcctcaaaaaactaaacatagatttaccataggggccgggcacggtggctc

SEQ ID NO: 758277 - DNA, 645 bp, Homo sapiens
acatttgagatttcccatttcccctcaaccctaacaatatagatcatatcaatatttttttaaccaggtgggtaaaaatagctgtattagtccgttttcatgacactgtaaagaactgcctgagactaacttataaaggaaagagaattaatggactcacagttagcatggctgaggaggcctcaggaagcttacaatcatggcaggaagccaaagcaagacaccttcttcccaaggcagcaggaagccgaaaggctgagagaaaggggaagagccccttataaaaccatcagatctcgtgagaactcattcaccatcawgagaacaacctgggggaaactgcccccatgattcaattacctccacctggtctctcccttaacaagcggggattacagagactacaattcaagatgagatttcagtggggacacaaagcctaaccatattaatagttatatctaatttatgtttatatgattattaatgaagttgaacatctttttatatatttactgacatatcaatctataattttctgtatgtatttcttcttctgataattacctcttttatcatttgcccatttttaataggttgttgtctttttcttattaatttgtaagcacagttaataccttatgg

SEQ ID NO: 758278 - DNA, 645 bp, Homo sapiens
acatttgagatttcccatttcccctcaaccctaacaatatagatcatatcaatatttttttaaccaggtgggtaaaaatagctgtattagtccgttttcatgacactgtaaagaactgcctgagactaacttataaaggaaagagaattaatggactcacagttagcatggctgaggaggcctcaggaagcttacaatcatggcaggaagccaaagcaagacaccttcttcccaaggcagcaggaagccgaaaggctgagagaaaggggaagagccccttataaaaccatcagatctcgtgagaactcattcaccatcaagagaacaacctgggggaaactgcccccatgattcaattacctccacctggtctctcccttaacaagcggggattacagagactacaattcaagatgagatttcagtggggacacaaagcctaaccatattaatagttatatstaatttatgtttatatgattattaatgaagttgaacatctttttatatatttactgacatatcaatctataattttctgtatgtatttcttcttctgataattacctcttttatcatttgcccatttttaataggttgttgtctttttcttattaatttgtaagcacagttaataccttatgg

SEQ ID NO: 758279 - DNA, 466 bp, Homo sapiens
gaaaaaagatagggttaaaatcaataatgtaagctcccacctgaagaagcttaaaaaagaagagtaaataaacccaaaagaaggagaagggaggaattattagtgaatagaaatcaatgaactagaaggagagaaaacaaatggagtaaatctataaaaccaaaagatggaaaaaaataataaatctctaaccagactgatcaaggcaaaaaaaaaaaagwataaagacacaattaccaatatcaggaactcaaaaggtacatcaacatagatcccagcaggataataaggggattttacaaatagctttttcccaaaaaatttgacaactcagtgaaatggaaaagtttcttgaaagacagaaattaccaaaacttaacttaaaaagaaatagaaaatctgaaaacttctatatctattatggaattggatttgtaattaaaagttgcaaacaaaacaaattcca

SEQ ID NO: 758280 - DNA, 466 bp, Homo sapiens
gaaaaaagatagggttaaaatcaataatgtaagctcccacctgaagaagcttaaaaaagaagagtaaataaacccaaaagaaggagaagggaggaattattagtgaatagaaatcaatgaactagaaggagagaaaacaaatggagtaaatctataaaaccaaaagatggaaaaaaataataaatctctaaccagactgatcaaggcaaaaaaaaaaaagtataaagacacaattaccaatatcaggaactcaaaaggtacatcaacatagatccyagcaggataataaggggattttacaaatagctttttcccaaaaaatttgacaactcagtgaaatggaaaagtttcttgaaagacagaaattaccaaaacttaacttaaaaagaaatagaaaatctgaaaacttctatatctattatggaattggatttgtaattaaaagttgcaaacaaaacaaattcca

SEQ ID NO: 758281 - DNA, 478 bp, Homo sapiens
tgtgagacgaaaatacaccttcctaggaagtttctcagaattcttctttctagttttttatgtgaagatatttccttttccactataggcctcaaagcgttccaaatatccacttgcagatactacaaatagagcgtttcaaaactgctcaatcaaaagaaaggttcaactctgtgagatgaatgcagacatcaaaaaaactttctcagaatgcttccgccttgtttttatgtgaagatatttcctttytcaccataggcctcaaagcactggtaatatccatttgcagatactacaaaaagactgttcccaaactgctcaataaaaagaaattttcaactctatgagataaaagctaatatcacaaagaagtttctcagaaactttctatctagtttttatgtgaacatatttcttatcaccccatagacctcaatcggctcacaagtatccttctgcagattgtaaaaaactactg

SEQ ID NO: 758282 - DNA, 537 bp, Homo sapiens
ccaaactaactttattacaaagtttgttatggtaaaattctttagtccccagatgggagtttcacttgaatgtaaagaatagcattgtttattttaaaaacccaccatttcacacctataagaatgacaaaaatatttcaaagcctgacaatgccaagtattggcaaataagtgtagaagggaacagtcacaccytaatatagaactataaacgattataacaatttggaaaacaatatggcaatatctaataaatgagaaagctaactcatggctgtcagcttaccaattcctctgctgtttacataacttggaaaaacatctgtatacatatttaattgaaacaaaaaagactggcacatcaacaagataaattataattaaattttggtggactcttaaatacaatggttcccagcaatgaaaacaaatgatttagatctatgattatcaacaaccataaatctcataatcattctagggagtaataaaagcaggttgcaaaaatgtatgtatagaatgattctgtttaaaaat

SEQ ID NO: 758283 - DNA, 536 bp, Homo sapiens
gcatataatgtcttttttcttgctagctgctcttaggaatttctctttatacttagttatgtgcaatttgattatgatgtgctttggtgttattttctttatgtatgtcctgtttagggttcatagattttattagatctctgataaatggttttcataattttgcaaatttatgaaatggttttcataaatttgcaaaatttatattttatttatatttttatatttatattttcaaatatctttctgttcctccctctacctcttccccttttatgattcctactatacgttagactgcttgataccacagctcatggaatctcttttatttatcagtaatttatcagtatttataacctctgtatgattcagtatgtasttttacgttgtttgttttcaaatctactgatattatattctgcaatgtctgtcaccatttctcatgaaagatagataagacagatagatacagatagataggtagatagatagataggtaggcagatagatagatttttcttctagttatgggc

SEQ ID NO: 758284 - DNA, 578 bp, Homo sapiens
ttgaaacacgacgctaactgaaataagcctgacatgaaagaacaaatagtttatggtttctgtcagtccatctgtgttgccataagggaatacttgcggctgctgggtaatttataaagaagagatgtatttggctcagagttctgcagagttctgcaagaagcatggcaccagcatctgcatctggtgagggcctcaraaagcttccattcttggtagaagggaaagaggagctggcatataaagatcacacggaggatcggaggaggttctaggctctttctaataatcagctctcacagctgtcacaggaaccattgcagcaagaacttacttatatcaagcgcagcaccaagccattcatgagggatcttcagccatgacccaaacacctcccattaggccccacctccaacactggggggtaaaattttaacatgaagtttggagggtcaagtatgcaaacaatagcagttcccttatgtgaaatatctagaataagaaaatgcatagtggaaaaagtaggttagaggttatcaggggatgggtgaaggggcaatatggggagtcgttgctta

SEQ ID NO: 758285 - DNA, 603 bp, Homo sapiens
ccagcatctattgtttcttgacttcttaattatcaccattctgactggcatgagatggtgtctcattgtggttttgatttgcatttctctaatgattagtaatgatgagctttttttcatatgtttgttgaccacataaatgtcttcttttgagaaatttctgttcatatcctttacccactttatgctggggttgtttgtttttttcttgtaaatttgcttaagttccttgtacattctggatattagacctttgtcagatgggtagattgcaaaaattttctcccattctgtaggttgcctgttcactctgatgctaatttattttgctgtgcagaagctctttagtttaattagatcccatttgtcaattttggcttttgttgcaattgcttttcacgttttattcatgaagtctttgcccatgcctatgtcctgaatggyatggcctaggttttcttctaggatttttatcgttttgggttttacatttaagtctttaatccatcttgagttaatttttgtataaggtgcaaggaaggggtccagtttcagttttctgcatatggctaggcagttttcccagcaccatttattaaatag

SEQ ID NO: 758286 - DNA, 639 bp, Homo sapiens
ctttagatttgatggagcaaggctctataagcattccctgagggctataatgatgtctcattcattattatgtccacggagcctgacatagatgattgaatgcttggtgactcaaccaaactggaataatattataattctttctgtggcctttcacattttttattttctttctttaaagtttgcccttcttttattattattattattttgcgacagtatctcactctgtcatccaggctggagtgttatggggcaatcacagatcactgcagccttgaactcctcagtctcgctctgtcacccaggctggagttcagtggcgctatctctgctcactgcaacctccgcctcctgggttcaaacaattctcccaccccagcctcctgagtagctggaactaaggcaagcaccaccacacctggataattaaaaaaattttttttgtagagatgsggtctcattatgttgcccaggcaggtctcgaactcctgggttcaagtgatcctcccaccttggccttccaaagtattgaaattacaggcatgagccaccatatgcagccacatatttttatctactaagaaagatgactgtcctacaaaatagcttgcatatgtcacatgtatgcttgtagaa

SEQ ID NO: 758287 - DNA, 639 bp, Homo sapiens
ctttagatttgatggagcaaggctctataagcattccctgagggctataatgatgtctcattcattattatgtccacggagcctgacatagatgattgaatgcttggtgactcaaccaaactggaataatattataattctttctgtggcctttcacattttttattttctttctttaaagtttgcccttcttttattattattattattttgcgacagtatctcactctgtcatccaggctggagtgttatggggcaatcacagatcactgcagccttgaactcctcagtctcgctctgtcacccaggctggagttcagtggcgctatctctgctcactgcaacctccgcctcctgggttcaaacaattctcccaccccagcctcctgagtagctggaactaaggcaagcaccaccacacctggataattaaaaaaattttttttgtagagatgcggtctcattatgttgcccaggcaggtctygaactcctgggttcaagtgatcctcccaccttggccttccaaagtattgaaattacaggcatgagccaccatatgcagccacatatttttatctactaagaaagatgactgtcctacaaaatagcttgcatatgtcacatgtatgcttgtagaa

SEQ ID NO: 758288 - DNA, 621 bp, Homo sapiens
aatggatgttactcatgttccttcttttagaaaattagcttatgtgcatttcacagttgacaccttttccaatttcatctgggctacctgtcaaactggagaagccacttctcatgttaaaaaacatatgttttcatgttttgcggttatgggaattcttagtgagcgcaaaacagacaatgatccagcctattgcagtaaagctattaaaaatttttttcatcagtggcatattaaacatattactcatattccttataacccacaaggccaagstattgtagaaaaaagtaacagaaccttaaaattacaattacttaaacaaaaacagggggataaggagttgtctacccctcacatacaattaaactttgcattgctcacattaaattttcttaatattcctaaatctagttctgttactgctgccgaaaaacatttctctggtaactgtcccacagtaaaccaaggaagggaagtatggtggaaagatgttcaatctaatatacggtcaaaaggctctattttaacgtggggtagaggctatgcttgtgtttccccaggtgaatatcaatctcctgtttggattcctgctagacacctgaaattttgtcctgaaga

SEQ ID NO: 758289 - DNA, 601 bp, Homo sapiens
tgctgaaaaaacaccacagcaaaaaacaactaacacatccaaccgtcaaaaaaaaaaaaagaaaaagaaaaaaagaaaagaaaaaaaataaccatgctaactcctttacaacagacaatccagtcagccatcctgaacaacttgcctccagcgatccaggtctggctcaacctctgcctcctcctgattacactgatccttttaccctctgtcaccccacagactgttaaaaactacgaatattgggcctatattccttttcttcttcttattcgagccatgacgtggatggacgctcctatcgaggtctatgttaatgatagtatttggatgcctggttctgtagacgatcgttgtcctgcccaaccttcagaagaaggaactcctttcaatatcactttaggttttaggtatccacctttgtgyctgggacccacaaatggatgtctctcattagatattcaaatttgggcagtcacactaccatctggtcactctttaggacacttggtatcagggatctcattaaaacctctaagacagatcaaaacatgaatctctgattatattcacacatcccaatataagcctttaggacctg

SEQ ID NO: 758290 - DNA, 700 bp, Homo sapiens
ctaccatctggtcactctttaggacacttggtatcagggatctcattaaaacctctaagacagatcaaaacatgaatctctgattatattcacacatcccaatataagcctttaggacctgtgtgtcctatcaacttgtcttcaaatgctgacaaattaatgtggaaggattgtgttagttcagaaggagtgtgttatttaattcttctcactataccattgttgattgggctcctaaaggtcatattactaatgattgctctcaaggtcacagagattgtcaacactttctctatgatattacttatcaaaaaagtagtgacaaccctcccctattatatcatakatttaactccttttttccttttaagtggaaaggggcaggggttgcccctccaaagccaaggctcattgttccccacttaggacctgaacattcagaattatggagattaaccatagatatgactggtatgagagtttgggctggagaaagtgttataagtaaatccaccttgtcacctcgaaaactaagacaacagattgatttacactactattttcacacagccaaaaatatcactatggcaatcgtcaaaaggtcaattcaaagatgggacagtaaagatgatgaggacttatatccccccctttgctaatgtccccacaccacctctcatacaacctattccccccacca

SEQ ID NO: 758291 - DNA, 603 bp, Homo sapiens
tttttcagtttctaactctgtctttaggattggtctaacataaatgaaagactgaatatatatatatatatatatatatatatatatatatatatatatatatatggacaatgaccagatcatatatggtaaaatatgaaaaaagacagaaaagagtcttagtaaaaaccactggtttggatttgattgttttgtgtgtgctgtatgtcttctgctctttgtcattaaagactaaagcctaattagattgaagagtaaactgaaggctgggcatggtggctcatgcctgtaatcccaccactttgggaggccgaggcaggtggatcacgagttcaggagatcgagmccatcctggctaacacagtgaaaccccgtctctactaaaaatacaaaaaattagccaggcatggtggcgggcacctgtagtcccagctactcgggaggctgaggcaggagaatcacgtggacccaggaggcggagcttgcagtgagccaagatcgtgccactgcactccagcctgggcaacagagcaagactccatcccgcaccccccccaaaaaaaatacgaaaagtaaactgaacacactaccactaccactaat

SEQ ID NO: 758292 - DNA, 626 bp, Homo sapiens
cagcctgaggccctttgagctggtgccgctggggtgtggggagcagtatcacctgccccatcaaaaagccattctttcattctaaacttcttaatctgtgatgggaggggtggcaaagatttctgaaatagctttgagacattttttccatagtcttattagcacctggccctttttagtcatgctcatctctttagcaaactattgctgctgcttggtcatactcttagattcctctcctaaaaacactcttctttccttctctaacacaaggcaaggctgcacattttccaattttcctctggtctctactgtaagcagttagaagtaaccatgcagcagcctgagcactttgctggttagaaatttcttttcccagataccctaggccatctcttaaatgaagccttccataaagccctagagcatggacacaatgcagacaagttctttgctayggtgtaacaagtgtgacttttgcttcagtaacttataagttcatcatttccatctaaggcttcctcagtatgacctttgctgtctctttttctataagcattttggtacacaactacttaaccaatctctaagaagttctacactttcccttgtcttccctgttttct

SEQ ID NO: 758293 - DNA, 634 bp, Homo sapiens
agttaactatcagttatctgttaaacagatgccctgagagaaatggcatacataattcctcccccaccaccaaaagctactataacattagtgttaaaaatcactgagttagggctctactactcattctaaaaacatgaagctttaagtttccaagtgaagggtttttaagacattttgtaataatctttacttttagtcactttgccaggtttttctttgagattttattttcctccaaaatctattaataggccttctttaccattattcctatgaggatattgcttgtgacccttttcttgagctgccccagggtcctcatgtgtgatctcctcactacactgaaaacccaacttgtttaactacaggtttgttsccagtggtctctgcctgaagggtgttaacagaattatggcatctcccaaattaactgatattataggtcacataaaaaagtaattgcagtcattttattttacagactaaaaaaaaaaaaaaaaacccaagacagtatactgtagtttgttagaaataattttttatacactaggttataacttattcacatatataagcttattatcataataagaaaaggtttatatattttgggttttcttgttttaataaa

SEQ ID NO: 758294 - DNA, 584 bp, Homo sapiens
aaattataaaagtaaggaaattcaggcatagcacatgtacgtgtatgcacgtgtgaacacacacacacagatttgctggacctacaaaaatggaccatgatttacaacaatgaaacaaacaaaaataaattgaagaaatagatgaatggaaccaatgaaataaagatcgggaagatcttggataagagaccgagcagactttccatatgaataacaagagtgccagaaaaagaaaaaattaacagttgaagaagacaaagttactaaatagtaraaaaaaatgtaactgaacagaagactcaagtattacaattaaaatgcttcactaaattccaggcaagatagataaaaaacatattattctactgtgaaaagaagaccactatctcagaatttgaaaaataaggctttattacttacaagaactgccttgcaggaaggcaggagagagtgtttacaagccagggagtgatgatgatcatgagccagttccctggcacatcaaaatgatagacttacttatattcctgagtatacccaagaccctccaagatttgctttatgatcagcagggaggggagggg

SEQ ID NO: 758295 - DNA, 470 bp, Homo sapiens
ttattcatgtacattacacagcatacaaatgaaaacagaatacatttggcaattttctacttatgagtcagggctgttttggaacttctgttcaactcagttctgaactgattctgtaattttcctcctcacagctcaaatactattaatgaattcattcaatcgtctacttgctaataccttaatttaaaaaaattcgagggaactttatgatagtgataacatttgcaaagggattcaaaattcaatagatgaaagactgagataattatttgcaaaccttagataataatacaattggacataaaatttgcytcctaatttcctggaaacaaggcaacaagggaaaattttctattttaagaaattttaaagataattttgcttctgaagaacaaacaaaataaaagtatctctgctcataggtctttgcttgaatttctcagccagtgattcaacacttaagttct

SEQ ID NO: 758296 - DNA, 627 bp, Homo sapiens
aagcatctaaagcaggtgatagggatagggtttggacgttttgtcccctctgaatctcatcttgaaatgtgacctccaatgttggaggtgaggcctggtggaaggtgtttgggtcatgggggtggatccctcatgaatggcttcatgcccttttagcagtaatgagtgagttatcactgctttgagttcttgaraaatctggttgtttaaaagagtcgggagcacctctctccatcagctcttgctttggctcttgccatgtgatgaacctgctccactttcaccttttgccatgagtggaagcttcctgaggccctcaccaggagcagatgctggcaccatgcttcctgtacagcctgcagaactgtgagccaaaataatccccttttctttatatattacccagtctcaggtattcctttatagcaatgcaaacagactagtatagcagggatcagcaaactgtagttcatgggacaaatttggcccattgcctgactttggaaatatagtgttattctacacaggcacactcattcatttacatgttgtttatgctgcttttgtgacatcacagcaaagatgagtagttgtgaccgagactgttgggtctgcaaagcttgaaat

SEQ ID NO: 758297 - DNA, 602 bp, Homo sapiens
atctcatttggtatacatataaaatatattagaatatttttatctaataaaataccaaatataatattttagatatggactatttctcactaatatagaattatttaactcactagttgtacaaaaaggagcccagagcctttatttgtgcttttttgactcagcatttttagtgagctgctaatgatctgatcaacagctctgctgcttttcaaaacatggggaarcaagtacttcacctttcagggcatcacgctaattccaggacttttatggagatatcttaccaaggttagaaaaacagctcttttatatttgttacaggtctgataaaatagtaaaacatgaagtttttttcaacccttgttgccaaattgttggagtatctatgacgttttacacaacttttaaattttttgtttaagcacaataaaattcccagtgaaactggaaatgcgcaatgtgtagttttcatgtggtatctgggcttaatggcaagatatgcaattttggtttcctttgccgcaacatctcttgtaataaaactgtattttaagagaaatttctttatcgaatctttgagatcaaaagagctgaaagtg

SEQ ID NO: 758298 - DNA, 602 bp, Homo sapiens
atctcatttggtatacatataaaatatattagaatatttttatctaataaaataccaaatataatattttagatatggactatttctcactaatatagaattatttaactcactagttgtacaaaaaggagcccagagcctttatttgtgcttttttgactcagcatttttagtgagctgctaatgatctgatcaacagctctgctgcttttcaaaacatggggaagcaagtacttcacctttcagggcatcacgctaattccaggacttttatggagatatcttaccaaggttagaaaaacagctcttttatatttgttacaggtctgataaaatagtaaaacatgaagtttttttcaaccyttgttgccaaattgttggagtatctatgacgttttacacaacttttaaattttttgtttaagcacaataaaattcccagtgaaactggaaatgcgcaatgtgtagttttcatgtggtatctgggcttaatggcaagatatgcaattttggtttcctttgccgcaacatctcttgtaataaaactgtattttaagagaaatttctttatcgaatctttgagatcaaaagagctgaaagtg

SEQ ID NO: 758299 - DNA, 494 bp, Homo sapiens
aactgccacacagccactcctagctggggctaggcaagcaactctctaccacaacaacaagaaaactgtaggaaacctgggctttgctgaaagtgaagagcttggcaaaatgggtggggctgagtccattccagtggtgacctcmactccctggctgttgcacacagtctgaaaggtccagggaaacatgtaaatttccatatcacattagtatgtgggagaagagggacaaaatatctgttgcaaacttatgtttcatttctattatccaagaaactctacctatggcattcctcacaaaaaacaacaacaaaaaaaggtcagactatgtggtgagaaaacatgaattttggttgctacaaaacacaagcaagttcaaaaagaatgtttattttaagctctatgtacagaagaacagagtataaacgtaaaaaggaacaaaggaaacaaaaatgacaggcatacatatttacatagcaagtgtaggcaaaatg

SEQ ID NO: 758300 - DNA, 494 bp, Homo sapiens
aactgccacacagccactcctagctggggctaggcaagcaactctctaccacaacaacaagaaaactgtaggaaacctgggctttgctgaaagtgaagagcttggcaaaatgggtggggctgagtccattccagtggtgacctccrctccctggctgttgcacacagtctgaaaggtccagggaaacatgtaaatttccatatcacattagtatgtgggagaagagggacaaaatatctgttgcaaacttatgtttcatttctattatccaagaaactctacctatggcattcctcacaaaaaacaacaacaaaaaaaggtcagactatgtggtgagaaaacatgaattttggttgctacaaaacacaagcaagttcaaaaagaatgtttattttaagctctatgtacagaagaacagagtataaacgtaaaaaggaacaaaggaaacaaaaatgacaggcatacatatttacatagcaagtgtaggcaaaatg

SEQ ID NO: 758301 - DNA, 537 bp, Homo sapiens
ccaatgtgtttttggtgcctttgtcaaacattagttggctgcagaagcatgaatttatttctgggttctctattctgttccattggcctcattgtctgtgcttttaaaattcaaaatcattattcctaaataaacagtatttcttgaatgcttacaagtcattacagcttcaattttgcatctctgctgacttgaattctaaaatagctcatagtcagatctcctcttgagtgattttccataggaagaagaataggctgtgactatcaagcaatatggtggtttagatacacctgtaaatggaatagtcaattggaagtgacttaaggaacatttcaagtggccataagctctgtctttaaaaaaatacacatatacacatgtgtgtgtgtgtgtrtgtgtatgtatccctgacacctcagtaggcagattctttctaactcttaatgtcttcattgtctttggtgaagggagaaggtctgagctaattttacttgtacaataagaaaaaacctaggatcagatcatagtaataat

SEQ ID NO: 758302 - DNA, 600 bp, Homo sapiens
agaaaacaatattgagtcatttccagaacttacagtacggactttgacgaggtgctaaggatgtcattctctggatgagaccagtgctcccttcaatgtattaaacacttcgattcactttcacgtgcttttagcaaatttaataacttagacttggttgtaatgacttcagtattcaaatcatccctttcacagtttagcatctctagacattaaagtttcatttattcataaaatagctgccagaaaaccttttaaaataaaatactatgactcccccagtctttcagaaatcaccagtggtcataagaggccatatttgtttatttcttactgtgtctattctcagtggtcagaaaatgatgggtagaaactgatgacaaccaaatatattatttggcccttaacatcatcaagtgtggagatttcctcacatgggtggacatayttttaagacaaagtcattataaatgactttgaaattctgagcaatttaagataaaaacaaatttcttaacatttagggcatttgctaggcttagtttttaatagaaaagaagatgagttgtaactattagaaaacaaaaacacatacaacaa

SEQ ID NO: 758303 - DNA, 624 bp, Homo sapiens
gctgctgctttatcaactacgtttatgtaatattctaaatcctttgttgtcatttcaacaatgcttcaccaggagtagattcaatctcaaaccactttcttttctcacccataagaagtaacttatctgttcaagttttgtcatgagattgtagcaattcagtcacatcttcaggttccacttctaatactagtcctttccaccacatctgcagctacactatccactgaagtcctaaacctctcaaagacaatgatgagtgttggaaccaatttcttccaaactcctgttaatgttggtattttcacctcctcccttgaatcacaaatgttaatggcatctagaatgatgaatcctttccagaaggtttttaatttactttgcccagatcyatcactatctatggaatcactatctatggcagctatagccttacaaaatgtatttctcaaataataagacttgaaagtcaaaattactccttgatccatgggctacagaatgtgtattgtattggcaggcttgaaaacattaatttccttgtacctctccttcagagctcttgtgtgactaggtgctctgtgaataagcagtaatattttcaaagaaatctttttttctttt

SEQ ID NO: 758304 - DNA, 624 bp, Homo sapiens
gctgctgctttatcaactacgtttatgtaatattctaaatcctttgttgtcatttcaacaatgcttcaccaggagtagattcaatctcaaaccactttcttttctcacccataagaagtaacttatctgttcaagttttgtcatgagattgtagcaattcagtcacatcttcaggttccacttctaatactagtcctttccaccacatctgcagctacactatccactgaagtcctaaacctctcaaagacaatgatgagtgttggaaccaatttcttccaaactcctgttaatgttggtattttcacctcctcccttgaatcacaaatgttaatggcatctagaatgatgaatcctttccagaaggtttttaatttactttgcccagatctatcactatctatggaatcactatctatggcagctatagccttamaaaatgtatttctcaaataataagacttgaaagtcaaaattactccttgatccatgggctacagaatgtgtattgtattggcaggcttgaaaacattaatttccttgtacctctccttcagagctcttgtgtgactaggtgctctgtgaataagcagtaatattttcaaagaaatctttttttctttt

SEQ ID NO: 758305 - DNA, 598 bp, Homo sapiens
aaattacccagtctcaggaattctgttattagcaacacaaaatggactaagacagagcctgtttccaaatcaggtcacattcacaggtacgtggggttaggattttcatatatcttttggagggacataattcaatttacaacatctaagccttacttcaattaagggccccactttctctgtctagtcttgtattatctgactcaatactagtttcatttcactgtccacctataccattgctctttgattttcttgggcttctggtcttcttattcctccttaatttgaacttactaattatatttcagtgcaaacacctgactacgttgttatttccctagttataatcacatcaagcacttgcattytgaaacactacttttaaaataaataacttttttgtttctacattataccattaaattacatttaagggaattatgttgattttcagaatgtgcatgagtaggttttattttctagatacttcttatcaggaagtatttgttaataacaggaggcactgggtctgatagaattaaaaattaattagaagccatagaagaggactgagcaagtgtcttgaggaaactga

SEQ ID NO: 758306 - DNA, 574 bp, Homo sapiens
gggacataggaatgacgataacgcttcctatttttaaattgcatcctgaaaactcaaaaatcaggataatctcaacaaactcaggaaagctggcagcccaagttggagaaaaagaccctgagctaaataaaggctgccccagaggccgcttgtgtcctcatggttaaaggacaaaccatgcggcaacacaacccacatcacagtccagctgtcatgggccattatattaactgayggtatgagtgagccaccaggactcctgcactccttgggttttcttccttacaaagcaaaccacattcactggactggagaacaaccacaagaaagctactatattctgaacaattagggcctctgctttgcttccctgaaaatgactctttaagccagggtcatccagttgccaccagagcaccattctggacaaggccccattgacctctttgccaaatccagtggcctattttcagtcattgcccttcttgacctttctgggacaattccaatggttaactgctgcctttctgaacgctcccctccaccggctccagcaacttgtgatacactcttt

SEQ ID NO: 758307 - DNA, 624 bp, Homo sapiens
ccacctcttgcatcagcatgacccggatgtgagaaatggagtcaaattagatcattttggagctttaagatttgactgccctgctagattttggacttgcatgggacatgtagcccctttgtattggccagtttcttccattgggaagagctgtatttacccaatgcctgtatccccattgtatctaggaagtgactaacttgcttttgattttacaggctcataggtagaaaggacttgccttgtcttatatgatattttggactgtggacttttgagttaatgctgaaatgagttaagactttgagggactgttggtaaggcataattggttttgaaatgtgaggacataagattggggcatggccaggagcagaatgatatggtttggctctgtccccatccaaatctcatctcgaattgtagttcccataattctctcatgttgggagggacccaatgggagaaccagtcycatggttctgttttccccaatattgttcttgtggtggtcaataagtctcatgagagctgatgatttataaggggaaacccatttcgtttggctctcattctcttctcttgtctgctgccatgtgagacatgcttttcaccttccaccat

SEQ ID NO: 758308 - DNA, 638 bp, Homo sapiens
taattttttttcactttaacacagcttttatttatatatatatattagtgtcaatatgtcaatggaactttttcctgcactacaccataaactcaatgagagctgcaaccctgttcttctttttactattgtatacccattgytaaccactgagattggcacatactaggaactgtaataaaatctgctgaataaatgaatgaataaacataaaaatatgtttaactacatatttttccataatgttttattacatggatgattatttaatttatttattttcagacagaatctcgctccgtcgcccaggctggagtgcagtggcatgatctcagctcactgcaaccttcacttcccaggttcaagtgattctccttcctcaacctcccaagtagctgggattacaggcacatgccaccacacccagatagtttttgtatttttaatagagacaacgtttcaccacattgctcaggtgggcctcaaatgccttacctcgtatgatctgccctccttggcctcctaaaatgtgattacaggtgtgagccactacacccagcctggttttatatagtgataatcgattatgttattctagaatttacctaatgatcacataggaaattaatgaaaagaaa

SEQ ID NO: 758309 - DNA, 619 bp, Homo sapiens
aatattactctgaaatacagaatacttaaaactttgaaaaatttagtgtttattctatgaccaagtcactttctcacatccaatgaacctattctctctctctcttccataaaaatttctctggtactttcattagtccttttcggaacttttaaaaatttagtgtagctagtattytagttctcaatcaaatgcatgttacacatcaagctaccataatgtactggtttttttttttttattgtgttttgtttgtctaaggcaggtcttcaaaagcatgataattttcatcaaggataattatgatcctaaatgaaaacctcgtggttttcttgggtcctttatcaatagcagggcggttttgacggaaacacagaaaatagcttctctcaggccaattgtctttatgcaaatgtgctttagaggaatctacagttcaatttttccagcttaatctactcagtagttgtgcatgtcctccaaaagtttcttttatcaatagagcagcaccatgaggtaccacacaacagtgaaatcgaagtacatagagcacatgcaaggatgcacgcccctcatccccacatattcacacccgctttcctctgatgtctgaagtaat

SEQ ID NO: 758310 - DNA, 619 bp, Homo sapiens
tgttctagagatgttgagttcttattggtaatagcttagtgccagtttatttatatggagagggaaccatagaaagagagagaataagaccatgaagcaaggattctagccagaaggctaggcatggcacttgctattagtttagttatgtgatattggtctagccacctaactttcatgaatctcatttcattatcctaaaatggaaataacaattatatttacctttgaaattataaaaagataaatatgtaaaatggctctaaatactgggtcagatctaacaactggatatacttgtaggcagaggttagtgatatttctctaatatttaaccaaaatgaggaagggactcccagtaggtcatgaaatacaggtttaacactcttcacaactaggacagcaacatgccaggcatgtttgaacacytgagcatggggtggggttagtggagagacaaagttgctgatgaaagctacattgcaagaagacaatgggaccccagaagaagaatcatcatggttatcatgtgtctgatacagcaagaaggaagaaaccgtggttatgagaataatttagcctataataaaacttactttttccaagttgtctgtggtta

SEQ ID NO: 758311 - DNA, 605 bp, Homo sapiens
tatcctatgccccagccctgcacacatacatgcacatgctcttttacaccagggcgtaccaaccattaatctaagaataaggcacagatccatagacaatcccatctgcctacatggtatttaaaatgtattttttcaataaattcaatgcatcataatattctgcagcacagaagaagaccataagggacacagaaacatttttgccagattgtggtaggataaaattctaatttatacaatataaaaaagggtggtgaaattcataaagtcttcaaattacaatcacytatattccgaagttacatacattgtggcttctttgcaatataaaatactctttataataattaatttaactcagtatctccacttccttttaatatttctcaaaattaatattctgtggaatatatactatcatcattgcactagatatttttcgtaggatgctggaaattcttaatcatttaattttttaattgtcatattgtattagtagagaaagtaaggtttagctggttagtgctctgtaaagacaacaatgttcacgtttgagcttgttgtgttcagaaaacatctcataaagcagcaaaaataaaaaa

SEQ ID NO: 758312 - DNA, 515 bp, Homo sapiens
tgtcttttggatcctgtattataattgttaatttttaagtttcacgtacttctaaatatatccttttttactgactgactttccccactcgtttttttttttttttttcttggagttattttctatattccttccacccaaatgaggcttgtgctgttaggaacacatagttcacaagcaggaatcaaaaccccatattgtcaagctgcccaactggcaatacacatggcagtctctgtttccaccaaattgctgacttctascatttctgcctaactaggaagaaacatcatgtgtgcatcaatcactgtaagactgtgtctatgctaatgaaaatcacgtttctatgagtgtacccttacgcacatgtgtgctttcttcctacttacggctctctaaaaaagtcaagttggtggatttagtttaattttaggattctgtgtacagtaaacttgcaaatgtaatttaatttgaaaagaaggaatgtttgtagcctctagggttcccctgacatg

SEQ ID NO: 758313 - DNA, 610 bp, Homo sapiens
gaaataaaggtgtattttaataagcagttgcctagtaaacatttatttagtacctactatgtgcttgctaagtatatttgcactggctaaaattcgttttcttagaagtgctgcaatttgatacagtgattgagtatattttaatacctaatctgattcaatatattgttttgaaaatgcaagatggaaaaatmtttgcttatgcccgttgctcatactttaaggttagtaattgaagtcacatatcattaaaaaaaaaatcctctctttaaatttccaagggggtatgtgataaatggagtatgggttacagaaacaaattgagtttgaatccaaatttagacaagttgcttgatttccaaagtccttgtttcctcagctgtaaaactgaaatgaaagtaactatattagtcatagtattgctgtatatattcagtgagacaattgaagtgtaaactttccagcataaagttatggcccaaataaaagtcacgtgaaaagaaacagatgaacacagaaaatgaatattcattaactcttcaacttttcttcccaggaaagcattttttaaaaatttcctaacctcgctcaggaatatacatgatagtaa

SEQ ID NO: 758314 - DNA, 536 bp, Homo sapiens
gcagaagtttcattgcctctcaagttagccagggatctaaagtttgaaggattacaatgtatagggagcagcatctgtgcaaattattgtttggcacgtcgtgtttcttagcccaagtgtcccattgtcaccatgggtgacaaggaccttgagaggagatccagaaggtatctggcgttcttctgatacgcttttctaaccatacctagaatgtgagaaaatgccagaatgataccaagcctctatatcacattagttctgactttcttcatctggcttcctgtactgacagtacaygaaccatcatcaggctgttaaaagaactttcattccagtcaaccctcatgtggttgtggccattgtctaagcgcatgattagggacacatgctttttgataattttttaagtggattttgtcttaatcagaagtttgaactttaatttaaatcacttctcagaaatgaccaccaacataaaagtaaataaataaatgctgctggcttcttaaaaagctagggtatagataaaatgaaaa

SEQ ID NO: 758315 - DNA, 595 bp, Homo sapiens
tatatatatatatatatatataacataaagtcctttatgattaaaaaagacagactgtacagaaatatgctaaatttctaacagatcaatctaggtattaagggtgaattttattctgcttctttatgtattttcatgttcttcccaaattctcttctgtgagttgcacttctttttataatcaraaaaatataacatcatcaacaacaaaacccctcaaagattctgcaattatttttaaaagactgattaaaacaaacaaaataaccctgacatttgcttggcctttttaaaatcatgcatcacttgagtcctacaattactgggccttttctgtgtgccaggcactgtggggaatataaagatgaaagtccctttcctgactttaagatgtcagttaagagagcaaggacaccttccctcagtgaaaagggatcataatgccggctgtgaaagaagttcaagcaagtgtcagaggaccagctgagctactgagaataagatcattcctcttgttttgagaatttttcaatcaaagaaggatccaacccaattaattacatgttttgcatagcagcatgtattgatgtatcat

SEQ ID NO: 758316 - DNA, 595 bp, Homo sapiens
tatatatatatatatatatataacataaagtcctttatgattaaaaaagacagactgtacagaaatatgctaaatttctaacagatcaatctaggtattaagggtgaattttattctgcttctttatgtattttcatgttcttcccaaattctcttctgtgagttgcacttctttttataatcagaaaaatataacatcatcaacaacaaaacccctcaaarattctgcaattatttttaaaagactgattaaaacaaacaaaataaccctgacatttgcttggcctttttaaaatcatgcatcacttgagtcctacaattactgggccttttctgtgtgccaggcactgtggggaatataaagatgaaagtccctttcctgactttaagatgtcagttaagagagcaaggacaccttccctcagtgaaaagggatcataatgccggctgtgaaagaagttcaagcaagtgtcagaggaccagctgagctactgagaataagatcattcctcttgttttgagaatttttcaatcaaagaaggatccaacccaattaattacatgttttgcatagcagcatgtattgatgtatcat

SEQ ID NO: 758317 - DNA, 703 bp, Homo sapiens
attttgacagtagagctgacaagatctcctaaagaattgggtattgaatgtgtgagaaagaggagtcatggatgactccaaggtttttgggccaaggagctggcaaaatggagttgccgttttcagaagggaaagaccaagggggcaaacacatgaaaagaacattagcccctgaattttagatactttctttgctccatatgaaaggaacttgaaatttgaaaggatgcacatctctgattatataagtaaatattacagttgcctagttcttgagattacagttgatccgtgaacaaygcaggttggggtgcccaacctgtgcagtcagaaatccacgtataccttttgactccccaaaaacttaactactaatagcctactgttaatcagaagccttaccaataacatagtcaattaacatgttttgtatgttgtatgtattatatactgagattcctacagtaaagtaagctagagtcaaggaaaatgttattaagaaaatcataaggaagagagaatacatttacgatttgtttaatggaagtggatcatccgaaaggccttcctcctcatcgtcttcatgttgagtgggctgaggaggaggaggaggatgagtggctggtcatgctgtctctgggacggcagaggcagaagaaaatccacatgtaaatggatcctcacagttcaaatccatgtcgtt

SEQ ID NO: 758318 - DNA, 416 bp, Homo sapiens
tttagtgttttgtttgtttaattaatagatttaatatttgtattgcagttttaagttgacaacaaaattgagccagaagtacagaggttcctatatactgttcccgctctgtccgtacttacagtgtcccccgttactgacactgtgccttcgtgtggcatgtgtgtcctcgctgatgggccagtgtcaayccattatcattcattcactgcggtccaaacttgacattaggcttcactcttgctgttgaacattctgtgggttttgacacatgtttctggacttgcatctaccacaacagtattacacagagttgtgttaccgccctgatccttccctgtgctcctccagttcctccctctctcctcgtgagcacctggcaacccctgatcttttccctctgtactttttaattt

SEQ ID NO: 758319 - DNA, 635 bp, Homo sapiens
agggcaggagtttatattgtttaatctatagcttcctcttccatctctttcttttcctcactgttgacttgtagggtttcctggagtttggattttgctgactgcacactcacagtactattcaacatgatcatcttccctgyagtttctacaatttggcagctggatccacctgaatcctttggcaaggccaaacgtggtgtctcaggaagaacacattgaagtctctgttttttaaatatcattatgaccttgatacatttttgttactcatttttatgtgaaaattgtttcctaacctgtttaaagtcatggttcagagtagcttttcaaagctcccagagcttccttgtctattgtttctgtacagtgttgaaggatatggaagcgtgctttctcaagttccctggctcgattgccctccccttctctgtcatttctctctgttgtcccaactcagttccatatgggctcccctctcagtagtctctcttgagtgatggcccgtctcaaggggcagttactggtcactggagcacagctgctccagccctgttaggccttacccatttcagctgctcttctcaaaccatttccctgtgatttccagtggcaatttgagggttctcttctgc

SEQ ID NO: 758320 - DNA, 583 bp, Homo sapiens
agggagagggagaatatactcccaacctatagaaggaatggtgtctttattcttttagaaaagaaaacaaaacatactcctgcttaaaactttgttatagaaataacctgaagacatagaaatgttgtttctgttgttgtttttgttcgtttgtttgtttgttttgagacagggagtcttactctgtcgcccgggctggagtgcagttgcgtgatcttggctctctgcaacctctgcggagaggttgattgaacccgggagggttcaagcaattctcctgcttcatcctcccaagtagctgggactacaggcacgcgccaccacgcccagataatttttttgtatttttagtagagrtggggttttgccgtgttggccagactggtctcgaactcctgacctcaggtgattcacccgccttggcctcccaaagtgctgggattacaggtgtgagccactgtgcccggcctagaaatgttttaaagtcacaataaactggagcaactttgagtcataatttgtaatagcttgaagcgctgtgtgaacatgcatgctatttagtattcagtgcgtacttgccagg

SEQ ID NO: 758321 - DNA, 671 bp, Homo sapiens
gaaaacaattctggtaaaatatatttttgtatcactttattaataattctttttaaaattctgtattttctttatagcaagacaagtagaacactaaaccatgaaaattctctatgtgattatgaccatagtgggttttaggccttaaaatattcagatcaggagttaccaattgtttaatataggacatatataaacaatcaaacttattgtaacttaaccttccccaagacacacttgacataaaatgtgccctatgtagcagagcatattgagtttgggtacatgagagcagtggagatatggaaactaaaaaattaagtctttccagtgaaaagtgatagtctcaaatgttcatrtataaatgccttagaaactatctctggcaagtcctcatgtatgacctggccactgggaaataaaataaattttaaactaaaagctttcattcagctcaggttgaatgtttaaaaatgtatacacaacacagtggcatttgatgggtccaagggtccccaaggtgtccatggatagaattgagtggatctctgatagttgtattagataatcaatatttgttgtaatcctctgtgttttgttttttaaaaaaatgggtctgtaggcttcactagactgccagaggcgtccatggtacaaaaaaggctaagaat

SEQ ID NO: 758322 - DNA, 642 bp, Homo sapiens
taataaaggcatggataaatgtttattacataccggagacagatcatttctgtacagaaattgaggatgacctttactgataactcttatctgcctaatatcctgagagggaggaaaagagaggggtaagagagaagcatatttactgatatttgtgaaaggagaaattatcatttgcaaataaaacattttaacagtgattatctcaagtcaccctcttgccctcacttccaccccracagacatacctcatgaaggtatagtagcgattcctctctaggggaccaaatgtgcctgaaagtggttttggtaaattcagggaaattctaactaaactcactgtcttaaaaagtaaagaataggagcacatagatatgaataattgtattgttaactttgacttttattctgtgatattacaaagatattgcaattatataacactctttcaataaaatggtctcaattataactatgggtttcaaaggaattaataataataaactcatgtcccttctgccatgatagacaaattagctgatatccataacatgtttagaactttcaaaatatgttgttatttaaataccactaatttttggtaggattagttttgttcttgctgtgaaattgttagtggtg

SEQ ID NO: 758323 - DNA, 538 bp, Homo sapiens
atgaaggtatagtagcgattcctctctaggggaccaaatgtgcctgaaagtggttttggtaaattcagggaaattctaactaaactcactgtcttaaaaagtaaagaataggagcacatagatatgaataattgtattgttaactttgacttttattctrtgatattacaaagatattgcaattatataacactctttcaataaaatggtctcaattataactatgggtttcaaaggaattaataataataaactcatgtcccttctgccatgatagacaaattagctgatatccataacatgtttagaactttcaaaatatgttgttatttaaataccactaatttttggtaggattagttttgttcttgctgtgaaattgttagtggtggtgatggcagaagggttttattttgctttatattttttctttttcattcaaagaggagattttttgataacttattcaaactgtttataatttaagttgaattgttatcaaaactgtaagtgaacatttgatgcaataatttgggta

SEQ ID NO: 758324 - DNA, 587 bp, Homo sapiens
tcacttaaaaatatattttgaacatctactaatagcaagtccctctgctaagtgctatgagacagtacaaaaagacccagacaattattgtggactaatggacttcacagtaaaagaggaatcataccatatgtatayaactaatcatggtacaattcaaaatagaaaaggaggcatcttacagactgagagatcatggcagtgatcagggaaaaaaagtgttatgatggtgtgcacttgtagtcctagctacttgggatatttgagtggcaggattgcttcagcccaggaattcaaggatgcagtaagctatgattgtgccactgcactccaaagtgagattctgtctcttaaagagaaagtgttatggaaaagatggcacttgaatggatgtgtgctgcaagctggctgctggtaccataaactgtttactggtcagttatgagtgaaggccataaaatcactttttgtcattatgtacacacactatttatttcagcttctttttaactattgattcattcatttactcattcacttattcagtagcaagactttcttgttgacaaaggcaatgtgttctggtg

SEQ ID NO: 758325 - DNA, 587 bp, Homo sapiens
tcacttaaaaatatattttgaacatctactaatagcaagtccctctgctaagtgctatgagacagtacaaaaagacccagacaattattgtggactaatggacttcacagtaaaagaggaatcataccatatgtatacaactaatcatggtacaattcaaaatagaaaaggaggcrtcttacagactgagagatcatggcagtgatcagggaaaaaaagtgttatgatggtgtgcacttgtagtcctagctacttgggatatttgagtggcaggattgcttcagcccaggaattcaaggatgcagtaagctatgattgtgccactgcactccaaagtgagattctgtctcttaaagagaaagtgttatggaaaagatggcacttgaatggatgtgtgctgcaagctggctgctggtaccataaactgtttactggtcagttatgagtgaaggccataaaatcactttttgtcattatgtacacacactatttatttcagcttctttttaactattgattcattcatttactcattcacttattcagtagcaagactttcttgttgacaaaggcaatgtgttctggtg

SEQ ID NO: 758326 - DNA, 587 bp, Homo sapiens
tcacttaaaaatatattttgaacatctactaatagcaagtccctctgctaagtgctatgagacagtacaaaaagacccagacaattattgtggactaatggacttcacagtaaaagaggaatcataccatatgtatacaactaatcatggtacaattcaaaatagaaaaggaggcatcttacagactgagagatcatggcagtgatcagggaaaaaaagtgttatgatggtgtgcacttgtagtcctagctacttggkatatttgagtggcaggattgcttcagcccaggaattcaaggatgcagtaagctatgattgtgccactgcactccaaagtgagattctgtctcttaaagagaaagtgttatggaaaagatggcacttgaatggatgtgtgctgcaagctggctgctggtaccataaactgtttactggtcagttatgagtgaaggccataaaatcactttttgtcattatgtacacacactatttatttcagcttctttttaactattgattcattcatttactcattcacttattcagtagcaagactttcttgttgacaaaggcaatgtgttctggtg

SEQ ID NO: 758327 - DNA, 659 bp, Homo sapiens
gagagaatgactgtccctgtggcattctttactggcccaggaactgatggtatttctgtttagaaacatatttttatagagaattatgatatatctgcaaccaggctaatcgtctaagacagaaagctgaaaactttgargttgagtccatatttaataaataataactatttgtccttgagatggaacccactattcaggctgatgttgctgccctttctcagatttagttgtgtctgagtatgaaaattcaatttcttctaacaacactggaaaaagactcattctagcattaacactaaactgcaatctgctttcatctaattagctaaaccttaaggttgataacacaaggatgtttgatacaattaacgttattattaaaaatactccctctgaaattgagaatataattcttaaaaataatgcagttatccacatcttgattcttgtttctgggtgaattttgacacatgacaccagctccctgccactgacaaccctccctgtcttctgggttaaaataacagcctgcagaaaaaacattcctaaaacaattttaacctacaaaacttgagactctcactattactcaagtaaattcaagaagaagtaagaaatacaatgaaaaagagaacactaaagacccaaacaggagc

SEQ ID NO: 758328 - DNA, 641 bp, Homo sapiens
ttaatccatttatttttattctttgtttattaatatatgtatttaagtttacaaatttttctagcttcctctgtggcagggataataataactaacatttattaggtgctcatcatgtcttaggggatgctctaaaagttttcaacagcactacgaggtggctgtgattattattactgtggtaacaataataatctstgaaaaaacttaagccttgaggttgcaaacaataacaacaatgacaacaacaaaacaataaaacaaagaactttctttcctaaggccaggcagtcaataaaggtctctaggaagacagaaatcagaaagtgtaccaggattttgttagattttctgatctctgactctgatttggcagtagccaagcttagtttttatatacaagcaaaaaaccaatagtatctctctctgctggcttgtgaagagcagaatttgcctttgtttaataccaggagttgtttaataggcaaggataagtatgcaagaaaagtttagagacagtaagatggcaaatagaaggagaatagaaggaggggttgtttataagttctgtgtgtgcctcaccattgatagctgtgtcaccagtgtagagaggaaggtaaggacaaccaagatgaacatca

SEQ ID NO: 758329 - DNA, 623 bp, Homo sapiens
attatccaggagaacttccccaacctagcaagacaggacaacattaaaattcaggaaatacagagaacaccactgagatactccacgagaagatcaaccctaaggcacataatcatcagattctccaaggtcaaaatgaaggaaaaaatgcccagagagaaaggacaggttacctacaaagggaagcccatcagactaacagcrgacctctcagcagaaatcctacaagccagaagagcgtgagggccaatattcaacattcttaaagaaaagaattttcaacccagaatttcataaccagccaaactaagcttcataagtgaaggagaaataggatcctttccagacaagcaaatgctgagggattgtgtcaccaccaggcctgtcttttgagagctcctgaaggaagcactaagaatggaaaggaaaaaccagtaccagccactgcaaaaacaaaccaaaatataaagaccaatgagactacaaagaaactgcatcaactggtgtgcaaaataaccagctagtatcatgatgacaggatcaaatttacatgtaacaatattaaccataaatgtaaatggactaaatgccccaattaaaagacacagactggcaaatgggat

SEQ ID NO: 758330 - DNA, 623 bp, Homo sapiens
attatccaggagaacttccccaacctagcaagacaggacaacattaaaattcaggaaatacagagaacaccactgagatactccacgagaagatcaaccctaaggcacataatcatcagattctccaaggtcaaaatgaaggaaaaaatgcccagagagaaaggacaggttacctacaaagggaagcccatcagactaacagcagacctctcagcagaaatcctacaagccagaagagcgtgagggccaataktcaacattcttaaagaaaagaattttcaacccagaatttcataaccagccaaactaagcttcataagtgaaggagaaataggatcctttccagacaagcaaatgctgagggattgtgtcaccaccaggcctgtcttttgagagctcctgaaggaagcactaagaatggaaaggaaaaaccagtaccagccactgcaaaaacaaaccaaaatataaagaccaatgagactacaaagaaactgcatcaactggtgtgcaaaataaccagctagtatcatgatgacaggatcaaatttacatgtaacaatattaaccataaatgtaaatggactaaatgccccaattaaaagacacagactggcaaatgggat

SEQ ID NO: 758331 - DNA, 623 bp, Homo sapiens
attatccaggagaacttccccaacctagcaagacaggacaacattaaaattcaggaaatacagagaacaccactgagatactccacgagaagatcaaccctaaggcacataatcatcagattctccaaggtcaaaatgaaggaaaaaatgcccagagagaaaggacaggttacctacaaagggaagcccatcagactaacagcagacctctcagcagaaatcctacaagccagaagagcgtgagggccaatattcaacattcttaaagaaaagaattttcaacccagawtttcataaccagccaaactaagcttcataagtgaaggagaaataggatcctttccagacaagcaaatgctgagggattgtgtcaccaccaggcctgtcttttgagagctcctgaaggaagcactaagaatggaaaggaaaaaccagtaccagccactgcaaaaacaaaccaaaatataaagaccaatgagactacaaagaaactgcatcaactggtgtgcaaaataaccagctagtatcatgatgacaggatcaaatttacatgtaacaatattaaccataaatgtaaatggactaaatgccccaattaaaagacacagactggcaaatgggat

SEQ ID NO: 758332 - DNA, 646 bp, Homo sapiens
ttactggaccacctccagccagtctcagtttgcccatctctgaggggatttgtgggtgcatcacagccatcctgtgggctgtttggtacccggttgtccagatgttgcgtctgtctcccttcatggcctgaacgggagcaagctmctcatgctctgctcccaaaagatggtggccggtctagcaagtcccagttgctaaacattttttaaaaatagaactaaaggccgggcacggtggctcactcctgtaatcccagcactttgtgaggccgaggcgagtggattgcctgaggtagggagtttgaaaccagcctgaccgacatgctgaaacctcgtctcttctaaaaatacaaaaattagccgggcgtggtggcaggtggctgctactcgggaggctgaggcaggagaatcgcttgaactgggaggcggaggttgcagttagccgagacggggccttggcactccatccagcctaagcaacaagagcgaaaatctgtctcaaaataaaaataaaaataaaaatagaactaaaaatagcagggagtgggccgggagcagtggctcatgcctgtaatcccagcattttgagacgctgaggtgggggtatcacctgagatctggagtttgagaccggcctgggtaacag

SEQ ID NO: 758333 - DNA, 612 bp, Homo sapiens
gcaatggggggcctgatggggagggaccatagcagggactcgatgtcctgcaggtctgcatgtaattgtgtacggccgactccacgttggtcatggctgacttgctttgtcctgcgtccccaaggggcaacgattggctgattttatttctgaacaattttgacaaagttgttttcaggagcccaggaagcaaatcagttgtagatttgaattttgtaggggctcagaattgttgaatatatatatagtcttttacatgctgataattatttccataccacaaagaaggccggctattaggaggctgctgttcaattcctttgccccgtgaactcgtgagctgtgtctttgtggggggggcactcacttgttagaggygtttcccttcataataacgtcagccaacattctaaatagatgcaagaaattaaatagtcttccccagacaggtactttggccttctaaagtgaattacacattgtaaaataaaacacagtcacattaaaaaaacaaaaggtctttgtgtcaggttggtctggcttcagcaaagataatatttgcctccagagtagaagatccttggaatccacagtattgcatacggcagcccc

SEQ ID NO: 758334 - DNA, 625 bp, Homo sapiens
agactggggcccagccgcttaggcaaaaacaggacccggtccccagagaagctcttcaaggtatccaggtccatcttaagcacctaagaacttttggtatgatagttccttgtcagtctccacggtatactcccctcctgcctgttcccaagccatggaccaaggactacaggccgggacaggattcgcgcttgcttagtcaagctatcctgacattccatccaacagtacctagcccatccacattgttggggttgctgccagctgacgacagctggttcacctgcttggacctgagagacgctttctttcctatcagattagcccctgagagccagaagctgtttgcctttcagtggaaagatccggagtcaggtgtcactactcagtacacttggaccrggcttcccaaagggttcaagaactcccccaccatcttcggtgaggcgttggctcgagacctccagaagtttcccaccagagacataggctgcgagttgctccgctaggtggatgagcttttgctgggacatcccacggaagtcgggtgcgccaagggaacggattaccctacgtcgacacctggaggactgtgggtgtaaggtgtccaagaagaaagctcaga

SEQ ID NO: 758335 - DNA, 625 bp, Homo sapiens
agactggggcccagccgcttaggcaaaaacaggacccggtccccagagaagctcttcaaggtatccaggtccatcttaagcacctaagaacttttggtatgatagttccttgtcagtctccacggtatactcccctcctgcctgttcccaagccatggaccaaggactacaggccgggacaggattcgcgcttgcttagtcaagctatcctgacattccatccaacagtacctagcccatccacattgttggggttgctgccagctgacgacagctggttcacctgcttggacctgagagacgctttctttcctatcagattagcccctgagagccagaagctgtttgcctttcagtggaaagatccggagtcaggtgtcactactcagtacacttggaccgggcttcccaaagggttcaagaactcccccaccatcttcggtgaggcgttggctcgagacctccagaagtttcccaccagagacataggctgcgmgttgctccgctaggtggatgagcttttgctgggacatcccacggaagtcgggtgcgccaagggaacggattaccctacgtcgacacctggaggactgtgggtgtaaggtgtccaagaagaaagctcaga

SEQ ID NO: 758336 - DNA, 625 bp, Homo sapiens
agactggggcccagccgcttaggcaaaaacaggacccggtccccagagaagctcttcaaggtatccaggtccatcttaagcacctaagaacttttggtatgatagttccttgtcagtctccacggtatactcccctcctgcctgttcccaagccatggaccaaggactacaggccgggacaggattcgcgcttgcttagtcaagctatcctgacattccatccaacagtacctagcccatccacattgttggggttgctgccagctgacgacagctggttcacctgcttggacctgagagacgctttctttcctatcagattagcccctgagagccagaagctgtttgcctttcagtggaaagatccggagtcaggtgtcactactcagtacacttggaccgggcttcccaaagggttcaagaactcccccaccatcttcggtgaggcgttggctcgagacctccagaagtttcccaccagagacataggctgcgagttgctccgctaggtggatgagcttttgctgggacatcccacggaagtcgggtgcgccaagggaayggattaccctacgtcgacacctggaggactgtgggtgtaaggtgtccaagaagaaagctcaga

SEQ ID NO: 758337 - DNA, 534 bp, Homo sapiens
acccttttgtgtttttgtgcccaatatccaggaaaatagagtatgatatgatattactcccaatgtcgaagtaattgtacagcacccctgtgatattcttgctaatatccagaaaggaaaagaatgatattactcccaacagcatagaaaacgtatacccgtgctgtggtatccttcccagtatccaggtggggagaggatcatattacttccaatgtcgcagggtgtgtacaccccctctgtgatctcgttgttaacatccaggtttggggaggacgacatgactcccaatatcgcagggggagtacgcccccccttgaccttgttagtcatttcytgggtgaagaggatgatcttactcccaatatcgcagggtgtgtacacatccctgtgaaaatcctcctattttcagagggagagacgatggtattactcccagtaccgcaaggggtttccacagccctctgatattcttactgatatccatagggagagaggatggtatgactcccaatatcgcaagggggggggtac

SEQ ID NO: 758338 - DNA, 610 bp, Homo sapiens
taaaccatgatcctgtcactgcactccatccagggcaacagagaaagactctgtctctaaagaagaatatgatatactgttaagaactctttagtttacatctataaaatggaggcaacagtagtgtgtacttcatagggttgttaygagcattaaatgagttaatataaagtgttaacagcagttcctagtacataaaagagctcagtaagcattaattagttaatattactattgcccactgcactgccactgtaaggcaaaaaataataattagaaaaaaactgccaggccaggtgcagtggctcacacctgtaatcccagcatgtctggaggtccaggcgggaggatggcttaagcccaggactttgagaccagcttgggcaacatagagaaagagaccccatctctacaaaaaattaaaaatgagtcaggcatgctggtgcacacctgtatccccagctactgggcacagcctgaggtaggaggattccttgagcccagtagttcaagactgcagtgagctatgatcatgccactgcattccagcctagatgacagactgagaccctgtctaaaaaaaataccaactccccagttggggtgtcca

SEQ ID NO: 758339 - DNA, 635 bp, Homo sapiens
aatttatgctcattcatgtaaaggtatattcacacaccactccatgcagctgtgcctttacagataatccctgactgattaatggtcaacaaatgctgaaatgtgtgctgctattgatggtcattataaactacctccgactcatgaatcttttcaactatctaacctaagatgatttagttaatttgarccagtatttaattcaaatagaagggtttataatccatgtgttgacatcaagatatagcttattatgcatataattataataacattgtgtttaaatgtcactgcacaaaaagaatgagtataattaaggtcttctaggagagcttgttattctaggttctgctagaggaagaaactcttctataaatacttctctaaattttccagctttcattgaaaagaaaatatgattatattcaaatatgtaattttattataatgtgatattagtgggaataacacagaagataaataaaaaagggtaaaactgatagtcttctgacaatattccattatgccagtcacagtgcactgtttcttataatccattctgtactattgctgcactccaagaaaccaaagtaaagctgtattattatctaggcaacaaaaatcgacttagacaa

SEQ ID NO: 758340 - DNA, 631 bp, Homo sapiens
catcttttaacacgcttatttgaaaataaaaaaatctttggtgaggtgtatggacaccaaaggttttggccccttttttcatttgattttttgtgttcttacggttcaattttttttgtaacggagtcttgctctgtcgcccaggctcacctcccgggttcacgccattctcctatctcagcctcccgagtagctgggactacaggcagccgccaccacgcccagctaatttttttgtatttttaatagagacagagtttcaccatgttaaccaggatggtctcgatctcctgatctcgtgatccrcctgcatcagcctcccaaagtgctgggattacaggtgtgagccaccgtgctcagcccatatggttgaattttaagagttctttgtatattttggataacaaatctttatctgctatttgctttgcagatgttttctcatagcctgtgacttatctttttattctcttgacaatgtatttcacagagcagacatttttaattttaatgaagtccattttatcaattattttcacgggtcatacttttggtgttgcgtctaaaaagttatcaccaaacccaaggtcatctagattttctccaatgttatcttccaggagttttatag

SEQ ID NO: 758341 - DNA, 628 bp, Homo sapiens
aaagagaatgggagttgtaaagcagatgggagaatggttattaaactagaaagctctacaaagctgaattctaatctagcaatggttaaagtcatacagcatccttagcaataccccagaacccagaatccataaacatctgtggaattgaaagcaaaattgaaaggctcctggaattctgctttaggatttgtctaggttttagatccccatggtgactgtccctcatccatcctgacaaaagaccagagctttataaggtctggactgggagacagttgatgacaggggtaacttactgagaagagaggttcaggagatgtggggatactgaatgctcctagactgaagcagtcaggcctgaaggctcaggaccaaggtcaaaaatatctggrtaatgtaaccagctcgagcagaaacattaagtattgacattacagttttccccaaggaagtagtcttagtcatataaccccatgctagaccccagtgtccacaagccccacccatgggctccaaactttctcttggttctttggttccctttctattaatgagtggatggctaggaggtcaccagatacttatttgggaaaattttctaacacagaagataataatcagaact

SEQ ID NO: 758342 - DNA, 595 bp, Homo sapiens
agattctgagtcaaaaattacaaagcatataagattcttgagaactatttgatctttgccttattggttttattttcaagtgggtccccttgtggatactttaaaaaatattagtaaatgttcttctaactggatggtatgaaataattcattcagaaagatatagttggctctatagacatacacacacacacacacacacacacacacrctgctaactgtaattctttttcattgagcaaacggtaaaatttctagtcaaacgtgaacaaaaaatgtatctctactctaattctgccagaacctgttctttagttgttattcttctgccttgaatattaatgtccttgatccagtttgcctcacgttccaggacagccagtgtgtgcttagaaggtcttgccttgctgggttttatactgttttcagagaattgtttctatctgcggagagggcagacttcccagccactatccctagctacgtcccttcttaacttgctcctgcacccatatgtgcagtgatggaacataaggaggcctgctaccttcagggagggctctgcagaatgtttgattctattgacggtgactgt

SEQ ID NO: 758343 - DNA, 612 bp, Homo sapiens
acccagtccaaattgcagaattatagacaaataaatgatagttatttcaaaccaatgagtttggggagtactgatacacagcaatagagaactgaaatacccagttacctgggttcacctctaccagagtactgaccacggaagttgagtttctagtaacacctgactttgaatccctaattttgccatactcagtggctgtatgaccttcgatcagttactctttcttttttctyttttttgagatggagtttcactcttgttgcccaggctggagtgcaatggcactatctcggctcactgcaacctccacctcctgggttcaagcgattctcctgcctcagcctcctgagtagctgggattacaggcatgtgccaccacgcccagctaattttgtatttttagtagagatggggtttctccatgttggtcaggctggtctcgaactgccaacctcaggtgatctgcccgcctcggcctcccaaagtgctgggattacaggcgtgagccaccgtgcctggcctgatcagttactcttgaagccttaggctcatcatctgtaaaacaggcacaatgctgcttacatcagaaggctttatgaaggtaaaaat

SEQ ID NO: 758344 - DNA, 564 bp, Homo sapiens
attaatgatgtcttcgaaatcaggtaaagaaaaaactactgtacattcatcaaaggtgtgttgtacctagctgaggactttctgggaaagaaacgaaggtgtgccaacccacatcacccgccactttaagcttgcattattctactttctgaatcaaaaactataattatagacttgtcttgcaagcagccagagattttctcctgagaagttckaaaacactgctattccagggacatcagctcatgaggaacagtatcacccgggtccccagccactcagtgaatggacccccatctaccattgcaaacacaaaaaacaaggcacaaaagacactgggtgtggcctgaccccctcatccagcacctgacatgaagacagcttattcctcaccgtgatttaccctacacaaaaccatcttgtagattttatctcctgtgaaaatcccagcaattctgagggcaaggctgagggaagaaaggaacatcatgcccccttgacaattaagaaatcacaaagccaaagacagaaccagaacccagtcctgtggtttctgcaccacct

SEQ ID NO: 758345 - DNA, 636 bp, Homo sapiens
aattcctattaggggattagtgttatacatactttgctcactggatcctcaccacaatgacccataaggtagatattattattagtctcattttatagataaggaaaatcaagagtcatataaccagtaagaagctgagatggaactcaaacccaggtttgtctgacaatgatgtacaaaatctttttaaatttaattttatttttccataagttattggggtacaggtggtatttggttacatgagtaagttctttagtggtgatttgtgagaycctggtgcatccatcaccctagcagtatacactgcaccatatttgttgtcttttatctcttgtccccctcccactcttccccccaagtgcccaaagtccactgtatcattcttatgcctttacatcctcatagcttagctcccacatatcagtgagatcatacgatgttcggtttccatttctgagttacttcacttagaataatagtctccaatctcatctaggtcattgcaaatgctgttaattcattcctttttgtggctgagtagtattcatatatatacacacacacatatatatatacacacatatatataatcaatagaaacatatatatatatatatatatacacacacacat

SEQ ID NO: 758346 - DNA, 459 bp, Homo sapiens
actttccaccagatctcattcttgctcatgggactcagcaagtggctggcagatggacttgtgtctggttataccatcttcgttacatatggaaatttttatagtactgatgtttcctacaaaatgggacatttagatatagtttctcaattaagtatatgyacaggattgtctgtatggagaaatatattactaagtgacaaactaagacaattgaataggcctgagtttggaaaatacatttttatcaggtgctttcctttttaaaattatctgtggaggacatggtggctaaaaagtagtgctgagggcaggtgatattacatgatgaaagacagaagttttattcttctcattgtgttctgagaaatcactttcagaccaatgacagggtatgcaccattgttaacagagtaaacagattttctgaactgtgattcctatatctattgaaaaagc

SEQ ID NO: 758347 - DNA, 459 bp, Homo sapiens
actttccaccagatctcattcttgctcatgggactcagcaagtggctggcagatggacttgtgtctggttataccatcttcgttacatatggaaatttttatagtactgatgtttcctacaaaatgggacatttagatatagtttctcaattaagtatatgtacaggattgtctgtatggagaaatatattactaagtgacaaactaakacaattgaataggcctgagtttggaaaatacatttttatcaggtgctttcctttttaaaattatctgtggaggacatggtggctaaaaagtagtgctgagggcaggtgatattacatgatgaaagacagaagttttattcttctcattgtgttctgagaaatcactttcagaccaatgacagggtatgcaccattgttaacagagtaaacagattttctgaactgtgattcctatatctattgaaaaagc

SEQ ID NO: 758348 - DNA, 459 bp, Homo sapiens
actttccaccagatctcattcttgctcatgggactcagcaagtggctggcagatggacttgtgtctggttataccatcttcgttacatatggaaatttttatagtactgatgtttcctacaaaatgggacatttagatatagtttctcaattaagtatatgtacaggattgtctgtatggagaaatatattactaagtgacaaactaagacaattgaataggcctgagtttggaaaatacatttttatcaggtgctttcctttttaaaattatctgtggaggacatggtggctaaaaagtagtgctgagggcaggtkatattacatgatgaaagacagaagttttattcttctcattgtgttctgagaaatcactttcagaccaatgacagggtatgcaccattgttaacagagtaaacagattttctgaactgtgattcctatatctattgaaaaagc

SEQ ID NO: 758349 - DNA, 616 bp, Homo sapiens
ttacctgaaaaggggaataaaattgagaagcatttgtgaagtgtacagcccagcagcacaggctcaataaaagactgtgacctaatcataggactgcagaatgtttcttctcccctacactcaacaaccacatcttgaacagtctatttattacagagtctattgcctaaatccatataatgtgcaacacccagagtaaactctactgtaaattatggactttacatggtaatgatgtgtccgtgtaggttcataaattataacaaatattacaatcccctttgccaggggatgttgataatgggaaggttatgtatatgtgggaagagaggacatcatgtgtgacttttgtgaaaggaaattaaatttggggaccacaaactcattaagccaaagggaaatgccaaactgcraactcggtcacacatacctgcctccaccttttggttcctgaataaaatgatgaaaagcgacctgccttccccatattttgcccacaaggaaattcctggtgagctgttgaaacttcaccatggccatgctaattgatagcttatctttgcaggtgcagtggcctcagctgccagaaacaaacgcatatcggattgttccccta

SEQ ID NO: 758350 - DNA, 657 bp, Homo sapiens
acaataataatttttaattcaaactatggaagagactaggccataacttcatttcactagacctacatagcctcactccctctaaatctgacccaaggacaatggtagaactgtgggtctctgtgatttagtgtcaatttagaaccagtatctaataacatctggaatattgaggtattctccctgattcagaacacgtttatcccagtatatgacggtaagtttcttgggaaagatttagaagaaaatgtataaaatacattgcaatatgagaagtttcttctaattataagtagaagtttcttcttcataagaacctaaatcckcactcagtaaagggacaacagctctgtaaagggacctaagtctatgaaccaggtaaatatccatgaatacctatgatattgacaatattcaggtttctgacctctggacaaagaattgttttaatcttatagttcaagcaattgttctgtaggacacctatttgttatggatagaaccctgtgatcaactggcttggacaacagatccctgtgggtcaaaaacatcatttcaaattgctcccatgcttattatgataattacaacccttctatcttggaaggttaaacattactattacaggatccaatatttccattgaaatcagaagcc

SEQ ID NO: 758351 - DNA, 579 bp, Homo sapiens
tgtttcttatctcttgtgttagtccattttgctgttgctgtaacagaatacctaagattgtgtaatatatacagaaaagaatttatttggctgatgattctggagtctgggatgaccaacgtcatggtgatggtgtctggcaaggaccttgtgttgcttcacagcatcacagaaaagtggaaggggaagcaagcacatgtgaaaaggaagggaaggggccgggcgcggtggytcacgcctgtaatcccagcaatttgggaggccgaggcgggcggatcacgaggtcaggagatcgagaccatcctggctaacacggtgaaaccccgtctctactaaaaatacaaaaaattagccgggcgtggtagcgggcgcctgtagtcccagctactcgggaggctgaggcaggagaatggcgtgaacccgggaggcggagcttgcagtgagccgagatcgcgccactgcactccagcctgggcgacagagcgagactccgtctcaaaaaaaaaaaaaaaaaaaaaaaaagaaaaggaagggaagggagaagggaggctgacctactttaaacaacccactcttgtg

SEQ ID NO: 758352 - DNA, 579 bp, Homo sapiens
tgtttcttatctcttgtgttagtccattttgctgttgctgtaacagaatacctaagattgtgtaatatatacagaaaagaatttatttggctgatgattctggagtctgggatgaccaacgtcatggtgatggtgtctggcaaggaccttgtgttgcttcacagcatcacagaaaagtggaaggggaagcaagcacatgtgaaaaggaagggaaggggccgggcgcggtggttcacgcctgtaatcccagcamtttgggaggccgaggcgggcggatcacgaggtcaggagatcgagaccatcctggctaacacggtgaaaccccgtctctactaaaaatacaaaaaattagccgggcgtggtagcgggcgcctgtagtcccagctactcgggaggctgaggcaggagaatggcgtgaacccgggaggcggagcttgcagtgagccgagatcgcgccactgcactccagcctgggcgacagagcgagactccgtctcaaaaaaaaaaaaaaaaaaaaaaaaagaaaaggaagggaagggagaagggaggctgacctactttaaacaacccactcttgtg

SEQ ID NO: 758353 - DNA, 579 bp, Homo sapiens
tgtttcttatctcttgtgttagtccattttgctgttgctgtaacagaatacctaagattgtgtaatatatacagaaaagaatttatttggctgatgattctggagtctgggatgaccaacgtcatggtgatggtgtctggcaaggaccttgtgttgcttcacagcatcacagaaaagtggaaggggaagcaagcacatgtgaaaaggaagggaaggggccgggcgcggtggttcacgcctgtaatcccagcaatttgggaggccgaggcgggyggatcacgaggtcaggagatcgagaccatcctggctaacacggtgaaaccccgtctctactaaaaatacaaaaaattagccgggcgtggtagcgggcgcctgtagtcccagctactcgggaggctgaggcaggagaatggcgtgaacccgggaggcggagcttgcagtgagccgagatcgcgccactgcactccagcctgggcgacagagcgagactccgtctcaaaaaaaaaaaaaaaaaaaaaaaaagaaaaggaagggaagggagaagggaggctgacctactttaaacaacccactcttgtg

SEQ ID NO: 758354 - DNA, 541 bp, Homo sapiens
acagagaggggtcccagaaaaatgagttaccaatctgtggtgaaatgcaggggtttttatagatgacgtagtgggaaggccgtgtctgatttacataggacacgaaaaacttgttaggacctgttgtgccatctggatagggtgtgactctctgccagcccccaccccagtcttttattatgcatgtgggttccctgyctgagcttctccatgttgtccatttgttacggtacacatgctaacaacaaagggaaggtcgagccccatggtggacatgcgtggctcccagggagccctgttctattggtgtagctgccagcatccccccatgcacacttccagcttccttatttatgtttgcagctcgatcttttaggctgctctttgttagaaaataaatgatttcttgggctgatttttgttagaagggaagttctgccaaaggactcttgctctcattatctacctaaataatgtctatctcctccatcagttttatggacaaaaaattccttttcattctataaaaacattgttagca

SEQ ID NO: 758355 - DNA, 763 bp, Homo sapiens
ctgccagattatgattcagatttaaatggatcctcaagcagtgtctgtcctagcaccttgaccatctgtgatgaatataaaacttcctgagaaaccctcttaattaattacacttgtacctaacccattccatatcattcacctgggattcactaccactttgccttttctctgccatttcttctattatgtaatctttctgcatcttccatgaagcaaatagggtgttcattttatatctgtttttctatttcttgactagctgtatatatcccattaactgacttttgccttctatgattgaattccctatattaagtctttttagataagaaatcttccaatcgtacacaaaaacctttaaaaaatattaaagccatttgtccaaataaaaaaattttagtagtatatacactgtgacttttttttaagcccacacttattttcttattttgcttcacaggaataacttgaatcacctttctattatgatggtgcaccttgactgtgtcaattaattattcatattttcatttactcttgtttaattgygctggtctaaactttatttaaaagatagagccaagtctgtcagtcactctttagaggccagtgtgtagaacactacccaccgtgtactctatgttagagtcttccaagcaggctcgtctatatttgatgctatgtcaacaggtaaaactttcaaccactgtttttgtcatgctctctatctcaaaaaatacagaagacaaggttacttcat

SEQ ID NO: 758356 - DNA, 636 bp, Homo sapiens
tgttccatatattacagacattcatctttaatagagtcttatgcaactaagatattggtcagcctgacaaaataatacatttttaaagtctaaccttcaaatgtccttcgcctgtgaggaattcagagtaaccagcatcagtagccagcaaacctacaaattgcatgcttggacgttgttgtataaaggcttcaacggctttatctgtcacgtgctttctcccagaaacatccagagaaacaaggttaggtaggatgtctttttgttctagtaagcgaagagckatgtctgatgtaaactgtttatcatctgagatatcaagatgattcagatgtttgagttcccgaactacatccagtatctgggtagttgtcatttttaaacatttcaagtggtgcatggttagagacttgagtcggtctttgcaggccagtagagcagtgatgtctgtgattgaggtgttagaaatatccaagctctctaatcttggcaatgaggcaacttcagccaggtcttcattgtaaaagagaacattcgtgatgcttaaagctcgaaggccagaaagccggctgaagcagcgctcgtaaggatcctcgagggagagagttaatgaattcagcaccaggcactggagat

SEQ ID NO: 758357 - DNA, 636 bp, Homo sapiens
tgttccatatattacagacattcatctttaatagagtcttatgcaactaagatattggtcagcctgacaaaataatacatttttaaagtctaaccttcaaatgtccttcgcctgtgaggaattcagagtaaccagcatcagtagccagcaaacctacaaattgcatgcttggacgttgttgtataaaggcttcaacggctttatctgtcacgtgctttctcccagaaacatccagagaaacaaggttaggtaggatgtctttttgttctagtaagcgaagagctatgtctgatktaaactgtttatcatctgagatatcaagatgattcagatgtttgagttcccgaactacatccagtatctgggtagttgtcatttttaaacatttcaagtggtgcatggttagagacttgagtcggtctttgcaggccagtagagcagtgatgtctgtgattgaggtgttagaaatatccaagctctctaatcttggcaatgaggcaacttcagccaggtcttcattgtaaaagagaacattcgtgatgcttaaagctcgaaggccagaaagccggctgaagcagcgctcgtaaggatcctcgagggagagagttaatgaattcagcaccaggcactggagat

SEQ ID NO: 758358 - DNA, 571 bp, Homo sapiens
aatgatgccaactatatgacactgggatgtattctggaaaaggcaaaactatggagacagtaaaaagcagtgggtgggggaggggagggaggaataattggagcacagaagatttttagggcagcgaaactactctgtatgatactataattataaatacctgtcattgtacatatgtccaaccccctaaaatgtacaacaccaagagtgaaccctaatgtaaactgtggactttgagtgataatgatgtgtcagtgtaggttcatcaattactgcaaatgtacctctttggtgggagatgttgaaaatggtggagactatgcatgtgtggggacaacaactatatrggaaatctctgtaccctctcaattttgctgtaaacctaaaattgctctaaaatataaagtctattaaaaccacaatgatattgcctcatatcccattaggatggctactattaaacaccaaaacaaagtaagtgttgtcaaggatacagagaaattagaaccctgtgaactggtgcagctcccccaaaatgaaaaacagaattgccgtttgatccagccattcc

SEQ ID NO: 758359 - DNA, 647 bp, Homo sapiens
atgaaatatccagagttttttttttaagttggaataaatttgctcctttttaacaaaaaaattaagggacatggctggcaccaaaggatagattgatgacagtggaaatgaaggctattgtgtattgaggactagctgaggaaatttggtagaaaatgagaatcaaggcaaaggaggaataaaacaaggayggataaatgatcctgagaaagtcaaaatgaagaatacaaggaactgggatctcagtaaagttcaagtgaatttagtaggagtgaaacaacagaaagaatgacagattttgttatgagtagaatatcgacatataagatttcacaggaggaactgggtgatgacaaggaccagtctacagccaagacagtgtgttgcgtccattcacattctctcacatacatatggacaagatcaggaaggagaagatttacattacctgcttccttaaaggcatcctgatacagcacactggagaaggactggagagacttgcatggtctctgggcttttgtgacacaatttggtcttttcttgataaagtgagcgtgaaaatatctgttacatttctatttcaggtatgctatgaagaataaattatgtatgtgcaagtcctttgaaagctgaaaagtactata

SEQ ID NO: 758360 - DNA, 481 bp, Homo sapiens
ataagaaggggtgaaataagatccttaatccctgaagaagctgtgggctctaaacatctttgtaaatagggtttctccctacagtgaccattgaatatctttttaggctttaaagtgtgccaaaatttaagcttttctattggaaagaaatctaaaatcaagaaattgagtgagaaatgtaaatctcctggaagataccactgagcttcctaacattttctcattgctatttaaattaaagaaaacaccatttwaaaaaaaatactttcccaatgtcctaactttatgatgatagaggcaaagtgtctctaattattattaatctcaacaaagattaatttaagacctaaaacatattcaacttactagagatggtgcagtgatctaaacagtatcatttggtttaattttcccatgtcatcagagagcatgtggtacacattcttaagaaagttttgataactgttaataaacaatgtat

SEQ ID NO: 758361 - DNA, 481 bp, Homo sapiens
ataagaaggggtgaaataagatccttaatccctgaagaagctgtgggctctaaacatctttgtaaatagggtttctccctacagtgaccattgaatatctttttaggctttaaagtgtgccaaaatttaagcttttctattggaaagaaatctaaaatcaagaaattgagtgagaaatgtaaatctcctggaagataccactgagcttcctaacattttctcattgctatttaaattaaagaaaacaccattttaaaaaaaatactttcccaatgtcctaamtttatgatgatagaggcaaagtgtctctaattattattaatctcaacaaagattaatttaagacctaaaacatattcaacttactagagatggtgcagtgatctaaacagtatcatttggtttaattttcccatgtcatcagagagcatgtggtacacattcttaagaaagttttgataactgttaataaacaatgtat

SEQ ID NO: 758362 - DNA, 544 bp, Homo sapiens
cttcagcccgccgctgcactatgggagcccctctctgggctggccgaggccggagccagctccctctgcttgcggggtgtggagggagaggcgcgggcgggaaccagggctgcgcgaggcactcgcgggccagcgcgagttccgggtgggcatgggctcggcgggccccacactcggagcagccagctggctggcaccaccagccccaggcagtgaggggctcagcacctgggccagaagctgtggagggtgygccgggtcacccagcagtgccagcctgctggcactacgctcgaattctcactgggcctcagctgcctccccacagagcagggctcctgacctacagcccaccatgcccgagcctcctccccactctgtgggctcctgcactgcctgagcctccccgacgagcgctgctccctgcttcacggcgcctggtcccaccaaccgcccaagcgctgaggagtgtgggtgcacggcactggactggtgggcagctccgcctgtggccccagtgcaggatccattaggtgaagccagc

SEQ ID NO: 758363 - DNA, 611 bp, Homo sapiens
catcatcactgttccttcacagtacatttatttttccactgaaataatcctcacaaaattctctcaattaccataatcttacatatctatgttgtgggtattagaacttaatatcagtcaccatccttgaaatttaggctctctggtccaacrtttcactttgaaatgtattttgtatattgttgtatcagtcaaaatttccaatttaaattatagttatccatccatccatccatccatccatccatctgtccatttatttattgggtttgtgtatgaaggagaaaaaatagaatcttcaaatgctaatgattaatccattttaacgactataaaatggaaatgtgtacagttacaaaggcatactaagttggtctgcctcatcaaataggcctgggcaaaaattggtaggtaaaattaaagggaatcacagtgcattttactctcatgatctctgttagaaatgtcccactaaacatgttacgttaccaactcttctattatgccctcatctctacctctatagatttagcctttgtgagctattctgaaacagcttattccacagcttctggtcaatttttagacaatgtaaatagagatccaccttc

SEQ ID NO: 758364 - DNA, 611 bp, Homo sapiens
catcatcactgttccttcacagtacatttatttttccactgaaataatcctcacaaaattctctcaattaccataatcttacatatctatgttgtgggtattagaacttaatatcagtcaccatccttgaaatttaggctctctggtccaacgyttcactttgaaatgtattttgtatattgttgtatcagtcaaaatttccaatttaaattatagttatccatccatccatccatccatccatccatctgtccatttatttattgggtttgtgtatgaaggagaaaaaatagaatcttcaaatgctaatgattaatccattttaacgactataaaatggaaatgtgtacagttacaaaggcatactaagttggtctgcctcatcaaataggcctgggcaaaaattggtaggtaaaattaaagggaatcacagtgcattttactctcatgatctctgttagaaatgtcccactaaacatgttacgttaccaactcttctattatgccctcatctctacctctatagatttagcctttgtgagctattctgaaacagcttattccacagcttctggtcaatttttagacaatgtaaatagagatccaccttc

SEQ ID NO: 758365 - DNA, 622 bp, Homo sapiens
gtaactctgctattaaggtgggcattgaaagaagagcaagctaccaagaggctacagcagtccaaagcgagggagagagcctcaggtgcaagtgctcatttttaatattcctaagatagaatggaaagggctgtatatgcacgagccaaagggagggctttttcctttattgctgaaggtcagaattcaacttctataattctggcacctcttaccccagagaagtcgtgtatgaaatgatagaacgtctrtagtatactgataccattcttctacctcccaatcacacatgatataattcacattaaacagtcacatgttgtagaaaaacaatctgtactagaccatatacagattttataaggaggttgccaaaacaggctatataactcttaattcctccccgacactgaggtgttgagggaggcgtgagagtgtgttcccctctacctcaggtaagagagaggggtgtggagttcctgtgtatgtctcctatcatttagtgggtggaggtggggctagagtagacttgtgtctgactcttgtctggaaagtctaaaagcaaggcactcatatcagtaccagtctgttaagaatgttttgatgtttcttacctattctc

SEQ ID NO: 758366 - DNA, 608 bp, Homo sapiens
agacacatagacaaaaatagatataaataataatataaaaatacaaaatatgtattatatgccatgttatatatttatattgtagataataaatatagctacaaaagagctaagaataaggacaacatggatgctagttagaagacaaagcactacttctaaattctgagaaactgatttttcagtttagaattttatacccagccaaagtggcaggatgctacaatacatattttcatacatgcaaggactcagaaagtttactttaccaatgccctttcttaagtagttaattgagaatgtgctgcaacaaaataaggaagtgagaaagaagtaggggatccaaaagatagtggaatctaagaaagcaatgaagaaaagttctatgatgacactagtgtagcaggcatagggctaaatagtktagcttggaagaagaaaggttggagaacctcagtttggacctctgcaaacagaagcagaaggggaactcaacaggatgcctaatataatggagtttggggagaggaggaaacaagaacatgaggctatactagagcaaagagttcaaggaaaaaaattcagaaacatcaggaaaaatgaaaagt

SEQ ID NO: 758367 - DNA, 469 bp, Homo sapiens
ctaggtgacagaatgagactgtctcaaaaaataaaataaaataaaatacaaattaaccctttatgacattcccagtaactttccctcctaagtgttccccacaagtctttgaattctgtttaattttcacataacatttaagacatktaagaacttatgtctgtctgtgtcatccctttatgtcaaaagatgtctttttgtcacttccagctggatctaccatgaaagacttctgaatccaggaagagagactgactgggcaacatgttattcaggtacaaaaagatttggactaacttaaaaatgatcaaataatagtgcatgcatcaagtgcaatgggaagctcttctggagagtgagagaagcttccagttaaggtgacattgaagccaagtcctgaaagatgaggaagagttgtatgagagtggggagggaagggggaggtggagggatggggaatgggctggga

SEQ ID NO: 758368 - DNA, 632 bp, Homo sapiens
aaatgaaaaaattggccaggcgtggtagctcacgcctataattccagcactttgggaggccgaagcgggcagattacctgaggtcaggagttcgagaccagcctggccaacattgtgaaaccccggctctactaaaaatacaaaaaattagctgggcgtggtggcacgcacctgtaatcccagctacttggaaggctgaggcaggagaatcacttgaatctgggaggtggaggttgcagtgagccgggatcgcaccgttacactacagcctgggcaagaagagtgaaactctgtctcaaaataaaataaaataaaataaaataaaatactaaaaaatttagccaggcatggtggcatgaacctggagtcccagrtactcgggaggctgaggtgggaggatcgcttgagcctggaaatttgaggttgcagtgagctgtgatttcgccactgcactccagccttggtgacagtgagatcttgaaaaaaagaaagaagaaagtaaagaaagaagaaatgagcatggtgggcatggggacagatggcagtgttgactagaatggtcaggggtggcctcctaagtgaaaattgagtaaagacttgaaggaggggaaggagctggccaaggtgctgag

SEQ ID NO: 758369 - DNA, 532 bp, Homo sapiens
ctcagcctttcacactgaaatgaaaactgtgctaatgtagatgctctctttcttaatatatcttacaaatattatgtgcaaatgcatcttctaaaaagaaaagcctttgtatgtccaattatctgtttttaatactacttaaaaattccaaaaaaaattccatacttacttcagaagctacctttaagagtaaaaacttacttaaaaaaattttttttattttagatttagggggtatatgtgcatgtctggtatatatgtatattgtgtattggtggggactgggcttctagtatacccattacccaaacagtgaacrttgtacccagtaggttgttcttcaccccttgttcttttcccacctttcccccttttggagtccccagtgtctattatttccatctttatgtccgtgtgtacctactgtttggctcccacttatgagtgagaatgtgcagtgtttgattttctgtttctgagttagttcattaaggataattggcctccagctccaatcatgttgctgcaaagg

SEQ ID NO: 758370 - DNA, 532 bp, Homo sapiens
ctcagcctttcacactgaaatgaaaactgtgctaatgtagatgctctctttcttaatatatcttacaaatattatgtgcaaatgcatcttctaaaaagaaaagcctttgtatgtccaattatctgtttttaatactacttaaaaattccaaaaaaaattccatacttacttcagaagctacctttaagagtaaaaacttacttaaaaaaattttttttattttagatttagggggtatatgtgcatgtctggtatatatgtatattgtgtattggtggggactgggcttctagtatacccattacccaaacagtgaacattgtacccrgtaggttgttcttcaccccttgttcttttcccacctttcccccttttggagtccccagtgtctattatttccatctttatgtccgtgtgtacctactgtttggctcccacttatgagtgagaatgtgcagtgtttgattttctgtttctgagttagttcattaaggataattggcctccagctccaatcatgttgctgcaaagg

SEQ ID NO: 758371 - DNA, 647 bp, Homo sapiens
ctgccaggaccttctgtgacaatgagaacattcaggggacagccgtgggccgtgcactggatgtggtgcacatgtgactgagaaactgaattctaattctgacttatttatttaacagctccccgtggctggtggctcctgacctggccagtactgctctagacagcgtgggggcctccaggccttcaaggagagtccggtggatacaggaggacagaccggaggggaggaacctgcacaggaggcttcttcccacaagaagatggggcaatcccagcgggttccaaatgagggccctgctcatggcggggctgggggagggcccctgagacactgaggacggacaggggctggctgggggagtgagagagcatgggaggtggcaggttaagaacaaggcaatgactacaacaatgatgccaacacctgcaggggcacatgagtgyacagcccacttaaccctcatcaggctcacgggggcggaccgcttagtatccccacttcctagatgggaaaacaaggcacacagagcataagcggcttcccagggtcatggagcaggagaaagctgggacagaggcggctgtgtggctgcactacgctgcacacgtgacactggctccgaggctccctgccagggggtttgc

SEQ ID NO: 758372 - DNA, 615 bp, Homo sapiens
ccatctcgggtcactataacctctgccttccaatttcaagcaattctcctgcctcagcctcccaagtagctgggattacaggtgtgcgccaccacgcccagctaatttttgtatttttagtagagacggggtttcaccatgttagtcaggctggtcttgaactcctgacctcacgtgatccgcctgcctcggcctcccaaactgctgggattacaggtgtcagtcaccgtgtccggccggtgtgccctcatttctgaagtgacactttcacattgctgttgctatgtaatttcataaggacgttcccattttcctctaaattgtatttytctaaatgtaaccactcccccagacagtgcacatttgtaaaagttcgctaacacaaactgaccacaagagtcggttctgggcttccagcgctggctcagcttggtccagacagaaacccaaatcgcaagagccggtggcctctcccaaaaggtgagaaaggggaagtgacttctgtttccactccatctacctgactctgggagtgaggcatggattttcactgcagtcacggtggctacatcacgtgatggggatgtgtgtttgggaactgtgggggtgggacag

SEQ ID NO: 758373 - DNA, 648 bp, Homo sapiens
agcaggtgccttcatccttctgccagaagcaattctgatggagacacaggctggctcctccaacttaaacatcctgagagtcagctgcaggtgaagcggctctcagagccggaacgctttaactcttaggggccgggtttacagaggggacaggcgtgcacctggcaccagtgtggagggcggtttctttgtgggcctgatgcaatgtccagcrgccagcgaggaaagaacccattgatgtagcatcagagaatgcacgcaatatcgccgtgggacagggcgggcaggcagaactgcagagagaaggaggcacctgcttccagctgctctgccctgaaatcctaaagtgacaccaaaggaaatattaaagaggataaagacaagaggacaaaaactaaagtgcagaaggaaggggctggagaaaaagttgagaattgtcagaagggggaataaaaggataaaaagatgaaaaatgggagtgcaaaggtcgtacaacaaattactggaaacgccaggagaagagagaatcagcagggtggagaaatcatgagcagcaattccaggcctacttgtccagctgaagaggagctggacacggaggccaagaatcccccacctgcgggatcccaaactgcttcagagctctgg

SEQ ID NO: 758374 - DNA, 517 bp, Homo sapiens
cttagattttagatcttgattttttctagtgttcatcaaattttcttcaaaaatgttttagttgtttcagacaggagagtagcctagtccctagtactttattctgactggaagtgaaagtctcatgaatgtagttttgaaaatcatagttccttagacacagtaaggaaaccaatggcctcagcctctcccacttctgcttgccaggagcctcttgtctctcgggctttttcttctggcacgtgtttctgtatttctaaacagcatgcttattttctcctttctccctcccaccccctctcattttagatattgtcttagtcaatttsggctgctgtaacaaaataccatggactgggtggcttttaaacaacaaaaatttattgcacacaattttggtggctgggaagtccaaggtgctgagagatttggtatctggagagggccctcatagatggtgccttctcactgggtcctcgcatggtagcgggggtgtatatgctcccttggacctctt

SEQ ID NO: 758375 - DNA, 458 bp, Homo sapiens
ccttcaagcatctgtttaacaaagcacatcttgcaccgcccttaatccatttaaccctgagtggacacagcacatgccccagagagcacagggctgggggcaaggtcacagatcaacagcatcccaaggcagaagaacccttcccagtacagaacaaaatgaagtctcccatgtctacttctttctacacagacacagcaacaatctgatttctctatcttttccccacctttcccccttttctattccrcaaaaccaccaccgtcatcatggcccgttctcaatgagctgttgggtacacctcccagacggggtggtggccgggcagaggggctcctcacttcccagaaggggcggccgggcagcggtgccccccacctcccggacggggcagcggccgggcgggggctgaccccccacctccctcccagacggggcagcttgcccggcgggggctg

SEQ ID NO: 758376 - DNA, 631 bp, Homo sapiens
gtgtttctaccatatacatcttaggattgttttttctatttctgtgaagtatatcattgatattttgatagggattgcattgatgctgtagattgctttgggttgtacacatataaactatggattcttccaatccatgaacatggaatatctttcctgttttggtatctttaatttctttcatcagtgttttacagttttcatagtagaactctttcacttctttggttaagttaattcttgggtgtttaattttatttgtagcttttgtaagtaaaattactttatttattttttakactgtttactattggcgtataggaatgctattaattttgtgtattgattttgtgtcctgcaattttactgaatttatcagttctagtagtattttggtggagtctttaggtgtttccaaatataagataatatcatttgtgaacaaggataattcaactctttaatttccaatttggatgccctttatttctttctcttgtctgattgttctagctggtacttccagtacaatgttgaataaacagtagttattcaaaagtggacattcttgttatattctagattttggaagaaaggctttccatttttccctttttggtataatactagc

SEQ ID NO: 758377 - DNA, 636 bp, Homo sapiens
gtgtctttgtttgtttggtaaggttatattttcttggacagtcttgatgctagtaaatgttcactgttgtctggcattgaagagttaggtatttattacaatcgtcacaatctggtctcgtttgtatctgtccttgttgcgagtctttccaggtttgtgaagggacttgagtgttgtgatctaagtttttggtcactgcagccatatcttcatgggttgggggggatatctcaagcccagtaatgctgtagttcttcctgaatcatagaggtgtcaccttggtggtcytggataagatccaaaagaattctccaggttactatgcagagacagttgttcttttccctcactttctcccaaacaaatggagtctctctctctgtggtgagctgcctggagctggggaaagggtgacacaagcacctctgtggccaccactgctgggactgcactagatcagccctgaagacagcacaggactgggcctttcccaagtctctctgtaaccactacctggctactgtccatgtttgcttaaggccctaggactctacactcagcaggtggttaagccagccaggcttttgcccttcccttagggacagtgtgtccccttgggcccctgatgagtccaga

SEQ ID NO: 758378 - DNA, 636 bp, Homo sapiens
gtgtctttgtttgtttggtaaggttatattttcttggacagtcttgatgctagtaaatgttcactgttgtctggcattgaagagttaggtatttattacaatcgtcacaatctggtctcgtttgtatctgtccttgttgcgagtctttccaggtttgtgaagggacttgagtgttgtgatctaagtttttggtcactgcagccatatcttcatgggttgggggggatatctcaagcccagtaatgctgtagttcttcctgaatcatagaggtgtcaccttggtggtcttggataagatccaaaagaattctccaggttactatgcagagacagttgttcttttccctcactttctcccaaacaaatggagtctctctctctgtggtgagctgcctggagctggggaaagggtgacacaagcacctctgtggccaccactrctgggactgcactagatcagccctgaagacagcacaggactgggcctttcccaagtctctctgtaaccactacctggctactgtccatgtttgcttaaggccctaggactctacactcagcaggtggttaagccagccaggcttttgcccttcccttagggacagtgtgtccccttgggcccctgatgagtccaga

SEQ ID NO: 758379 - DNA, 597 bp, Homo sapiens
actgacaaatatttgaaataatgattttaaggaagcacagcaaacttcaagaaaatatagataaacaattcaatgctatcaggaaataataaatggccaaaataagaaatgtaagagagacttaaattataaagagaaaccaaacagaaattctacagctgaaaaataccataaattaaataaaaagtacaatagggagtataaatagcagaaytgatgaagcagaagaaagtatctgtgaacttgaagacaggttatttgaaaatatacatccagaggagaaaaagatgtaaaaaagaatgaagaaagctcacagaatttatgagacagcagtaagagggcaaatatttattataggaattagtgaaggagaagagaaagacaaagggcctagaaagcttatttaaagaaataatagtgaaaacctttccaaatttggagaaagatgtaactttccagatacaggaaggttaaaggtctccaatcagtttcaatccaaacaagacttcaccaagatatattataatcagactgtgaaaaatcaaggacaaagaaaggatcctgaaagtagcaagagaaaagaagcaaataacatat

SEQ ID NO: 758380 - DNA, 546 bp, Homo sapiens
acagcaaacttcaagaaaatatagataaacaattcaatgctatcaggaaataataaatggccaaaataagaaatgtaagagagacttaaattataaagagaaaccaaacagaaattctacagctgaaaaataccataaattaaataaaaagtacaatagggagtataaatagcagaattgatgaagcagaagaaagtatctgtgaacttgaagacaggttatttgaaaatatasatccagaggagaaaaagatgtaaaaaagaatgaagaaagctcacagaatttatgagacagcagtaagagggcaaatatttattataggaattagtgaaggagaagagaaagacaaagggcctagaaagcttatttaaagaaataatagtgaaaacctttccaaatttggagaaagatgtaactttccagatacaggaaggttaaaggtctccaatcagtttcaatccaaacaagacttcaccaagatatattataatcagactgtgaaaaatcaaggacaaagaaaggatcctgaaagtagcaagagaaaag

SEQ ID NO: 758381 - DNA, 546 bp, Homo sapiens
acagcaaacttcaagaaaatatagataaacaattcaatgctatcaggaaataataaatggccaaaataagaaatgtaagagagacttaaattataaagagaaaccaaacagaaattctacagctgaaaaataccataaattaaataaaaagtacaatagggagtataaatagcagaattgatgaagcagaagaaagtatctgtgaacttgaagacaggttatttgaaaatatacatccagaggagaaaaagatgtaaaaaagaatgaagaaagctcacagaatttatgagacagcagtaagagggcaaatatttattataggaattagtgaaggagaagagaaagacaaagggmctagaaagcttatttaaagaaataatagtgaaaacctttccaaatttggagaaagatgtaactttccagatacaggaaggttaaaggtctccaatcagtttcaatccaaacaagacttcaccaagatatattataatcagactgtgaaaaatcaaggacaaagaaaggatcctgaaagtagcaagagaaaag

SEQ ID NO: 758382 - DNA, 613 bp, Homo sapiens
caggcacaaggtgcaggactggcgggatccactaggcaaagccagctgggctcctgagtcgggtggggacttggagaacttttatgtctagctggaggattgtaaatgtaccaatcagcactctgtgtctagctcaagttttgtaaaggcaccaatcagtaccctgtgtctagctcaaggttkgtaaatgcatcaatcagtgctctgtgtctagctaatctaatggggacttggagaactcttatgtctagctagaggattgtgaatgcaccaatcagcactctgtgtctagctcagggattgtaaacacactaatcagcaccctgtcaaaacggaccaatcagctctctgtaaaatggaataatcaactctctgtaaaatggaccaatcagcaggatgtgggtagggccagataagcgaataaaagcaggttgcccgagccagcagtggcaacctgctcgggtccccttccacactgtatcagctttgttcttttggtctttgcaataaatcttgctgctgctcactctttgggtctgcacaaactttatgagctgtagcactcaccgtgaaggtctgcagcttcactcctgaggccagcgagaccacgaac

SEQ ID NO: 758383 - DNA, 613 bp, Homo sapiens
caggcacaaggtgcaggactggcgggatccactaggcaaagccagctgggctcctgagtcgggtggggacttggagaacttttatgtctagctggaggattgtaaatgtaccaatcagcactctgtgtctagctcaagttttgtaaaggcaccaatcagtaccctgtgtctagctcaaggttggtaaatgcatcaatcagtgctctgtgtctagctaatctaatggggasttggagaactcttatgtctagctagaggattgtgaatgcaccaatcagcactctgtgtctagctcagggattgtaaacacactaatcagcaccctgtcaaaacggaccaatcagctctctgtaaaatggaataatcaactctctgtaaaatggaccaatcagcaggatgtgggtagggccagataagcgaataaaagcaggttgcccgagccagcagtggcaacctgctcgggtccccttccacactgtatcagctttgttcttttggtctttgcaataaatcttgctgctgctcactctttgggtctgcacaaactttatgagctgtagcactcaccgtgaaggtctgcagcttcactcctgaggccagcgagaccacgaac

SEQ ID NO: 758384 - DNA, 613 bp, Homo sapiens
caggcacaaggtgcaggactggcgggatccactaggcaaagccagctgggctcctgagtcgggtggggacttggagaacttttatgtctagctggaggattgtaaatgtaccaatcagcactctgtgtctagctcaagttttgtaaaggcaccaatcagtaccctgtgtctagctcaaggttggtaaatgcatcaatcagtgctctgtgtctagctaatctaatggggacttggagaactcttatgtctagctagaggattgtgaatgcaccaatcagcactctgtgtctagctcagggattgtaaacacactaatcagcaccctgtcaaaacggaccaatcagctctctgtaaaatggaayaatcaactctctgtaaaatggaccaatcagcaggatgtgggtagggccagataagcgaataaaagcaggttgcccgagccagcagtggcaacctgctcgggtccccttccacactgtatcagctttgttcttttggtctttgcaataaatcttgctgctgctcactctttgggtctgcacaaactttatgagctgtagcactcaccgtgaaggtctgcagcttcactcctgaggccagcgagaccacgaac

SEQ ID NO: 758385 - DNA, 613 bp, Homo sapiens
caggcacaaggtgcaggactggcgggatccactaggcaaagccagctgggctcctgagtcgggtggggacttggagaacttttatgtctagctggaggattgtaaatgtaccaatcagcactctgtgtctagctcaagttttgtaaaggcaccaatcagtaccctgtgtctagctcaaggttggtaaatgcatcaatcagtgctctgtgtctagctaatctaatggggacttggagaactcttatgtctagctagaggattgtgaatgcaccaatcagcactctgtgtctagctcagggattgtaaacacactaatcagcaccctgtcaaaacggaccaatcagctctctgtaaaatggaataatcaactctctgtaaaatggaccaatcagcaggatgtgggtagggccagataagcgaataaaagcaggttgcccgagccagcagtggcaaccygctcgggtccccttccacactgtatcagctttgttcttttggtctttgcaataaatcttgctgctgctcactctttgggtctgcacaaactttatgagctgtagcactcaccgtgaaggtctgcagcttcactcctgaggccagcgagaccacgaac

SEQ ID NO: 758386 - DNA, 594 bp, Homo sapiens
ctattgccagctagcagaaggtaaataatcttacctgacaaaaaagcccatcccgtgttctgcatgcccaagctcatctcttgccctctatcccacacatcctaccttcagggacactaaatgtgtcaccaccaccygcaatacaactttgacttggtaactcctgctctccctaatttccatttctactccactcacctctgtctcaggaatccttgaatctgcccatcagataacctctcaacctttccaggaagacttagccactgaacacctgtattcccacgggactctgctcatccctttaccttggtaagtttcataatctgtcctaatttgtctgtttacacatttgtctcactcaaatagtaattctttaaagtgagagaaattgaacttactcattcttttatcatccaacatctactagagtgtgagggacattactaggttctcagtcaatgtttgttgaataaataaatgaatgaattaacaaaaaatttaatgcagaaattatcatatagcctaactatataaatccaaagctaatcaatattttgggggaagagattactgaggggacatggggaaaat

SEQ ID NO: 758387 - DNA, 570 bp, Homo sapiens
ggacagaagttctgatggatcccgaagaataaacaccaagatccacactcactggcatgaatttcagccactgaaacaggtcacccacaacattagcctgtgtgcacctttctcctgggcactcagactccaatatttgtttccttctccaccaagacaaagtaatttggggaagccaatggttaaaagtgtgtggtgatggccattttttttttttttttttttttttttgccatgagatgttactaatggtctcctacacaatgccttccagtgaaggttgtatttccatcaragtcctggcttagtagctggaaatttggtaatttgagcaagcggaaatctttcatcaacaataacggaacacagcatagagcagtactgtggcattaactgcatatcactccccaccactgatggtgctgccgccccaaactctggtgggtccaagctacaaaacccagctttttaccgtgactggcaggggtgcaagttgcaccttcggacctggggctctgggcggcttgcttgagggcagtcactgtcgttcaccaaagttggggtcttgtt

SEQ ID NO: 758388 - DNA, 563 bp, Homo sapiens
cgccccaaactctggtgggtccaagctacaaaacccagctttttaccgtgactggcaggggtgcaagttgcaccttcggacctggggctctgggcggcttgcttgagggcagtcactgtcgttcaccaaagttggggtcttgttgacaatccgtgtacacgaracgatggttctgcgctcccctggaaaccaaaccacagggagctgaaagactgtggctgcacccacgtggaaaggctgggcttgcatgcccatgaaagcatgtttgggtgctgctgatggtcacttggtcatttaaagtgactgctgtaaatgtcatgtgggtttttagagaggaagaactataatcgtagggaggagagtacaagacacagaaggcagagtggggccctggaagattctagaacaagataagaaagcagcaacacctcagatcagcggtgtccttggacagcttggggttcgttgatttgggcctttgatttccaaagattgctcatctttttatctgcttgtttgatgtttaaagtctatggagatctgatctcaattaaagacctgca

SEQ ID NO: 758389 - DNA, 711 bp, Homo sapiens
ccgtcggatcctgttggttgatgtttggttctatatccttgctaattttctgtctaatatttttatcaattgctgagagggaggttttgaaaatagccttttaaaattgtggattcatctagctataattgtggattcatctactttttctctcaggttagtttttgtttcatgtattttgaatctctttattttggtacatatacgttaaaggttgttgtatcttttctggtgggttgacctttttatcattatacaatgtccctctttgccccagtcatcartcttctttcctctgaagtctactttttctgatattaatatagcgattcctgtttttttcccacaatgaatgttttcatgatgtattttttcaatttttaaaattttacattcaatctacctatgtcattatgtttgaaatgagtttctttcagggagcagatagttaggtcacatttttaaatccattctgccagtgtttgtcttttagctgaagtatttttttagatcattgaaagcaattactgacatgttagggattaagtgtgccattttattatttgttttgtttcttttgtttcttttttctagacatcctgtgggttacttgaacatcaattagagtttgattttgatttattcatgattttaaaaatatcactctgtatagttctcttagtggttcttctaggtattgccatatacaca

SEQ ID NO: 758390 - DNA, 565 bp, Homo sapiens
agtaaggttatccaactgttacaaactcctttaactgcagcagtatccagctcacagttctccatatttccccatcaggagggctgagagttttgcagaaacctgagcaaaattttccatcccctatctctgcacgatccttggctgacttctaggattgtcgcttttatttctgagagctcacaaattatgtttgatgagccattctggaatgtttcctataagcaatattaatatcgtaagttgaaatgtatgccatttgtctcatttcccttttgcaagatggcatctgcctatttttagtctttggcattccttcccttccttcattgctcttccacaattatcaatgtggtctgccactcccatttgcaaataagttcttttcatctggaccragagagccagactcatgtgaagcaactattgacctctcctcacctcctccatcacccaggacctcagctcccaccggtacaaggtgcactgcacatccctggtgtgtaaggtgagacttgctgggccattgagacggagataagcatgcccagtgataacgttagag

SEQ ID NO: 758391 - DNA, 570 bp, Homo sapiens
agtctactgtaaactttcaaacacttctggaaaattaggaccatctgctgccaaagtccaacggctctgagaggctgcagatgctgggcaggaagcggagactgagacaggcaggacagctttcagcctggcatgcaagtccacgcactaccgtrcagccctgagaggggcaaggccaggctccgggaccccgccagccacccattctggccaggtccaccagcattaaagggacagactcatttagatgagcagtttcctaagtaagctggatggaagaatttccagggaagctgtacggaaagacagatacttaaaacccatcttcctgaagacttttaagacagaaaatctggagtaagacacagaaacttctaacagtctctggaggactctagcaatccaccaggtttaaaaataactggcatcagaggaacaaactttgttgtcccaaggtagaattttgtcaccccaagcatctctctagccatcagatgcccatgtaaatctgcaggacgtgagaaaggagaaaagcctggagactgggattttgcccaggtagaggtactg

SEQ ID NO: 758392 - DNA, 628 bp, Homo sapiens
gctgtccctctgtcgagctgcacctgctctcccccatgggctgtccctctgtcgaactgcacctgctctccatgggctgtccctctgtcgagctgcacctgctctcccccatggctgtccctctgtcgagctgcacattgctcctttccaagggctccttccatgaacttgcctgaggtgtctcaggagggaaggagttggcagagggcaggagagaatgggacaggggaaccatttcattaaaaatgacccctccttcctgcccccaaagagctaaaccaacatcctctttgctgatgtccaaatcaaactggtgcagagttcagccatacacagggtggtccctctgatgtggtgtggctctgtgtccccacccaaatctcatctcaaattgtaatccccatgtgtcagggagggaccgggtgggaagtgattggatcatgggaacagtttcccccacgccgttcttgggayagtgagttagttctcatgagagctgatggttttaggagtgtttggtagttcttcccctcccccctctctcctgctgcactgtgaagaaggtgtctgcttccctttccccttcagccatgattataagtttcctgaggcctccccagccatgcag

SEQ ID NO: 758393 - DNA, 555 bp, Homo sapiens
ggctccagtggtctgtaatgatccacctgggcacggcacatctgtgaaatctctagtcacgcgctgagcctgaaatccaatcttcgggtttgaatgatgcggagaccctcccatgatcctttttccttccctagtcttacccccatcctgctgatgatactatctaaagttcacaagtagagagctcagaagcattcaagaggttagaaatgaaccactcaagacttttctgctgttgcaatttactctgaaataygtataaattatatgatcttgttctgacaagaaggggaatgttagtatactctgggacctgcccgcaatcttttactatctggaaaataccagcatgggtttagattatgtagttataactgtattaaaaatgtgtgtgtgcacgctcacatgtgtatgtgtgaggagtgtcttacgaaataatggataacccacaaaatgttggggtccaacagctggctgatgttcatcatcgatatagttttgtagttgagcagtgatgatagttttggctggcgttcacggagtgctgactcgggg

SEQ ID NO: 758394 - DNA, 622 bp, Homo sapiens
attgccttaacacacggtgcaccgtttcttgcttccaccacctttggccatttcacttgtatagttttgtccatttccttgcatgtttttaagcagagtagggggccaggacggcaggtaggaagtgaagactcagggaaaacatgacggaagctgccagggcagaagctggcaactggctaatgcctggttaatagggtgattgccagtaagtgagcctaacatgacggtgagattctgaaacgtaggctggtaataattttggtttgatttttatttgggatttakacaagcgtattaggcgtttgtttctgcgattcagatgaggatctcaacttagattacaaatcctagccctgttgttcccaatgtgatcaccagaatcatgagcggagctgtaaaaaattagagatttctaggttcaactatgtggaaatcatggaaatacctattttgaggggtttatttattcattcattttctcacaataaaatggatttatttttataataaaaatagtatacaaaagttcaaacaacatacagcagaaaaccagaattgacctataccacatcacaatgagaaaattaccccaagaaagtaatattttggtgaccagcct

SEQ ID NO: 758395 - DNA, 622 bp, Homo sapiens
attgccttaacacacggtgcaccgtttcttgcttccaccacctttggccatttcacttgtatagttttgtccatttccttgcatgtttttaagcagagtagggggccaggacggcaggtaggaagtgaagactcagggaaaacatgacggaagctgccagggcagaagctggcaactggctaatgcctggttaatagggtgattgccagtaagtgagcctaacatgacggtgagattctgaaacgtaggctggtaataattttggtttgatttttatttgggatttagacaagcrtattaggcgtttgtttctgcgattcagatgaggatctcaacttagattacaaatcctagccctgttgttcccaatgtgatcaccagaatcatgagcggagctgtaaaaaattagagatttctaggttcaactatgtggaaatcatggaaatacctattttgaggggtttatttattcattcattttctcacaataaaatggatttatttttataataaaaatagtatacaaaagttcaaacaacatacagcagaaaaccagaattgacctataccacatcacaatgagaaaattaccccaagaaagtaatattttggtgaccagcct

SEQ ID NO: 758396 - DNA, 471 bp, Homo sapiens
aaaagttgaatgacagagaaaaagagtagaaaatgaaaaataaacttcgctctcttttgcaataatgactctccaacacttcacctttatataaagctctccagcaagtattttagaattccccttttcctatgcaaytacatttgattatcagtgtaaatgcatttgcacaaatacatcagggtaaatacatttatcctttaaatgctttcttttccaaggtatataatttcatgtttcaactgagatctctgatcttatgatgtgaaaatgaatttaaataagctggtttgttataaagagggagtgttttgaaaatcctaaaatcactgaatgctaggatttattgttcttctgccttatatttaacattgatttccagaataaatggcacagggctttttcatcagatgaattcttcccagtcttggatagattgtctgccaggaatttgtctcattttctgtcctt

SEQ ID NO: 758397 - DNA, 638 bp, Homo sapiens
cacagtaaagaattgagggttataaaactattttctattatactgaattggtgaatacatgacatttagcatttattaaaacccatagaaatttaaaacaattaatgttaatgtatgaaaggttttaaaaaatgtaaatcaggatatctgttaattccaagatcattaatgcaagatgtgaggaaagaagctacatgtattacaaatgtatgaaacaacctccctgaagcaggtgggagaataaggtactgacctaagtaattttggaaatgaatcatatccctaaaactgaaggaaaaagaactgtacttaagcactgtactctagtcgatatattagctccccatggargtacaggttgataattttgaaggcactaatatcctgtgaatgaaaaaatacacaaatggatggcagatggtagaaaccagggattttacttttaaagtgagagtttacagataagtcatagaatgtggctaagatgattcatgtcagagagctggtaacatcaatatgaatctaggttttgcttaaaatagacacatacaattacatataggaatatttgtagatatgagcatacgatacaggttagcttacatacgtgtatcaccctgcttgattagactagaggg

SEQ ID NO: 758398 - DNA, 523 bp, Homo sapiens
cctggctcctcttatgaagattcttgtcattatattggacacactggggtgatccaggataatcccctcatctcaaagtccttaccttaaccacatctgtaatgtcccttttgccatgtaagataccatattcacaggtgatggggattaaggcatgagcattttggaggagcattattctgtttatcttactgataatattttttgtcgggaagaggcctccccaaatctggccataaactggcccctaaactggccataaacaaaatctctgcagcaatgtgacatgttcatgatggccataacacccaccctggaaggctgtggatttaccggaaagagggsaaggaacacctggcgcacccagggtggaaaaccacttaaagatcttcttaaaccacaaacaatagcatgagtgatttgtgccttaggaacatgctcctgctgcagataactagcccaacccatccctttatttcagccaatccctttgtttcccataagggatacttttagttaatct

SEQ ID NO: 758399 - DNA, 530 bp, Homo sapiens
agaggttcatccctacccttctagacgccctcattattattttgaagaaaaagaccctccagatctttcttttctggaggacactgggcgaaaactagttaccccggtgactgttcaagcagtgccttgagcgaccactcttaggtttattcaggcaggaattcagcaagctagatgagagggtgatttagaggctcagcagttccctattagaatacaccccccagatcaacagggaaatattatagytacatttcagtcttttattttaaattactcaaaaaatttaaataagctataaatcagtatggaccaggttctccttttctaatgggactgttaaagaatgttgccatttccagtcggatgattcctactgactgggatgctcttactcaagcttgtctaactcctgctcagttcttacaatttaaaacttgatgggcagatgaagcttccattcaagctgctctcaatgcccaggcccaacctcaaattaatataactgcagactaacttttagggggttg

SEQ ID NO: 758400 - DNA, 525 bp, Homo sapiens
tccagcctgagaaagctgcaggcattggactccaacttgtgagagctacttggtggactaagcctgacaaagccatagtggtagagcttccagaggttttgggggcctaataccacctcagtgtgctgagaatgggtgacataaaataagaggaaattactctccagcatgaagatttaatgttgtttcccctgttgcgttttaaacttagttggagcctacactctttttttttttggcctattttcygcctttagaatggcaatgtttatgctatgcctgtctcgttgtggcattttgggaacagataatttgtttaattttacaggttcacagctggagaggtatttgcctcaggatgaatcacatcttgagtttcacccatatctgattcagataagactttagacttttgggttagtgttgggatgagtgaagactttgtggctcttgggatggaatgaatgtattttgcatgtgagaagggcgtgaattttgggggtcctaggcaaaatgttataattt

SEQ ID NO: 758401 - DNA, 632 bp, Homo sapiens
gcattgccaaataaacccaaggaggcacctagacaggatccagcacatcctcatcaacaaattttcccactatcatccttttaatttcctatccttaagcctgcgctggttgcagtatgtttatttattctgatcacatttatatttagatatttgtattaattatgcaagtgtttcagtatttcttggggtgctctgtcattttgctttagatagcaatgaaaacattattcgagtggtcaatttcacatggcaacaccaaacaaaagtctcgtctttatgcagttgaccttatttacctccaccttaagataactcacacttcygaaataattctcacattaaataaaaatgagatgaaaatcctttaaaagacaatgaactcaatataatgtccttttatgttgcttatagcctaagccagatttagaaccctttaaacctgttgttctctatgtacattcttatgagttttcatttttggttattgtagttgcactaggatctctggctctgtgctgcctaatatcgatacatgcggtctccaatatttgatgttatctcccagtgtatttatgattttcacgatactaaaattcatggttctggcctggtctttgcttgtctctgct

SEQ ID NO: 758402 - DNA, 564 bp, Homo sapiens
tagatttatttcagtgctctctattttattacattggtctatgggtctgattttatgctaatacgttactgttttgattactttagttttttttttttcttttttttagacggagtctcgctctgtcgcccaggctggagtgcagtggcgcgatcttggctcactgcaagctccgcctcctgggttcaygccattctcctgcatcagcctcccgagtagctgggaatacaggcgcccgccaccacgcctggctaattttgtttttgtatttttagtagagacagggttttgccatgttagccaagaaggtctcaatctcctgatctcgtgatctgcccgcttcggcttcccaaagtgctgggattacaggtgtgagccaccgtacttcagcttttgaatatactgtgaaatcaggaagtgtgataatttcagctttgttctttctccagattgattggctatttgtattttttacagttcttgtggattttaaattcttttctactttcttttttttttttttttttttgagatggagtttcgctcttattgcctaggctagag

SEQ ID NO: 758403 - DNA, 514 bp, Homo sapiens
accctctgaagcaatgacctgagctgtatcttggcccattttagccatggttgggatgcagagcaccaagtgccaagactgcacaaagcagccgggccctgggttgggcccacaaaaccattttttcttcctctgcctccagggcagagatgtgatcttggctcactgcaagctctgcctcctgggttgatgtcattctcctgcctcagcctcaaagtagctgggactacagrcacctgccaccacgcctggctaatttttttgtatttttagtagagacggggtttcactatgttagacaggatggtctcgatctcctgacctcatgatgtacctgcctcagcctccccaagtgctgggattacaggtgtgagccaccttgcctggccataactgaacatttttaagagcacccagatcaactcttgaacactttgctgcttagagatttcttctgccagagactctaaacaatctctctcaagttcaagttttgcaaatctctagggcaggg

SEQ ID NO: 758404 - DNA, 514 bp, Homo sapiens
accctctgaagcaatgacctgagctgtatcttggcccattttagccatggttgggatgcagagcaccaagtgccaagactgcacaaagcagccgggccctgggttgggcccacaaaaccattttttcttcctctgcctccagggcagagatgtgatcttggctcactgcaagctctgcctcctgggttgatgtcattctcctgcctcagcctcaaagtagctgggactacaggcacctgccaccacgcctggctaatttttttgtatttttagtagagacggggtttcactatgttagacaggatggtctcgatctcctgacctcatgatgtacctgcctcagcctcccmaagtgctgggattacaggtgtgagccaccttgcctggccataactgaacatttttaagagcacccagatcaactcttgaacactttgctgcttagagatttcttctgccagagactctaaacaatctctctcaagttcaagttttgcaaatctctagggcaggg

SEQ ID NO: 758405 - DNA, 375 bp, Homo sapiens
tggaaatgtcaaatggtagcatcaccctggaaaatagcttgccggtttcttataaaagtaagcatgcacttaccatttgcacatttgtgcatttatctcagagaaatgaaaacttaagtccacacgaaaacctgtacgtgagtgttcatagaagctttactggaaatatctaaaacytagattagagactctttaaatcctcctataacctgtaaggtatagtaagcccctgcttcaagatatcctgccttttaaggccacagcaatgtctaacctctatgtattaatttacaattttgcttgtaacttctgctttcctgaaatttgcccctgcctttaaaaacacttgcttgtaagccatcggggaggttgagt

SEQ ID NO: 758406 - DNA, 635 bp, Homo sapiens
catagaagctttactggaaatatctaaaacttagattagagactctttaaatcctcctataacctgtaaggtatagtaagcccctgcttcaagatatcctgccttttaaggccacagcaatgtctaacctctatgtattaatttacaattttgcttgtaacttctgctttcctgaaatttgcccctgcctttaaaaacacttgcttgtaagccatcggggaggttgagtcttacatgtgacatgcctggctgggtacggtggctcacgcctgtaatctcagcagtttgggaggctgaggcacaaggatttcttgagcccaggaactggagtttgtagtaagctatgattgcaccactgcactccagcctgggtgacagagtgcaatgctgtctcaaaaaaaataaaaaataaagaaaaayaaaaaagtaagcagcccgattctccttgctcggcaccctgcaaataagtgctctcctttctctggctacgaaaactcagtgtaaatatttggctttaatatgctaggtgagcagacccaggttttatctggtaacaagtccaacaagaaggccccctactttagacaccaatagtagatccaggtgacctgcacttttgaccaactggctataaa

SEQ ID NO: 758407 - DNA, 564 bp, Homo sapiens
cccttgcctgctttaaggattgtctctttaccactggttttaatgaatttgattatgatgtgctttgctgtagctttcttcatatttctgatgctaggatttcattgagcttcttggatctatgggtttatagttttcatcaaatttggggattttttggctatcattgcttcaattttgtttgtcttttccctcccactcctattttcctttatggactacaattacatgtatattagayagcttaaaattgtcccacagctcactgaaatgaaacttttttttcagtttttttctcgtgtgtttcattttgatatcttcaggttcataaattttttattctgtaatgcccattctgttatttgtatctggggtgctgttcatattagacattatagtctttatctctagaacttcaatttggaactctttttatcttgcatgtctctaatgaacattctgaaattttcttctaccttgttgaatacgtagataaaatatgctaagtgtattaatgtctctatctattaatgctaacacctgtgttgttcaggagtcaattta

SEQ ID NO: 758408 - DNA, 594 bp, Homo sapiens
agccctgcttcctgggatccatgttttcctcttttttggatttcttctccacatcttctgccacatatctaggggcttcctgaaatgctgaatataccttagaggtctaaaaatgtctttagtctatccttatactgaatttgtggtttagttggaaaatcaattctagatggaaaatacatttccctcagaattttgtcttctgacttctcctgtggttattgaaaagtcagttgtcattcttaattcacatcttttgatgttatgtttttcttttctgcaagaatttaagatattatctttagccctgtttttctaaaatttcatgatgaggaaccttgatgagaagtctttatttaatatgttgggcaatcagaatcatttcaaacaggggactcatgtcagttcattggaaaatgtttctgtagcacatattagatkattttcttctatttttgtctgttctctgtttctgcaatgtccactagataattgttgaacttcttggattgtcctctaaatttattttctacttttcatctttgtctcttatttccttcattatgggtgatctctttgactttgtctttcaat

SEQ ID NO: 758409 - DNA, 629 bp, Homo sapiens
gctacatattctggataaaattttgcactgtgtccaagcgcagtggttcacacctgtaattccagcactttgggaggccgaggagggcagatcacctgaggtcaggagttcaagaccagcctgaccaaaatggcgaaacccccctctctactaaaaatacaaaaattagctgggcgtggtggtgggcacctgtaatcccagctactcgggaggctgaggcaggagaatcacttgaacccgggaggtggaggttgcagtgagccaagatcatgccactgcactctagcctgggtgacagagcaagactccgtctcaaaaaaaaaaaaaattttttttttacattttattccctgcctgcagagcttctactaataccactgttatgaagttacagaatgccttatctgttgccttagtattccatataatatcgtcyatgatcatgggcatatattatggtaaaagaagtctcatattctcaaaattcagtatatacctagatcttacagagcagctggcttgatagaacagtgaattggcctgcctaaggcttaattatagtgtgagcagggataccctgcaaggttgggatgttgtcctacaggaaggggaagataccttaaaccagc

SEQ ID NO: 758410 - DNA, 565 bp, Homo sapiens
cgtttacattttcttcagtctctttccgcaatgttttgaagtttgcagtacacaaatcttgcagctccttggttaaatttatttataagtattttactctttttgatgatattatgacttgagttgttctcttagtttcctttttggattgattattcattgctagagtataaaatgcaactaggccaggtgcaatgactcatgcccaggccaagaagggaggatcaagagcttgagaccagtctgggcaaaatagtaacacaccttctccacaaaaaattaaaaaatgagctgagcatggtggcacatgcttstattcctagccactcaggaggctgaggcaggagaatcacttgagccaaggagttcaaggctgcagtgagttatgatcatgccactgtactctagcctgggcaacagagtgagaccctgcatctaaaaatataaataaataaataaataaataaataaataaataagaaataaaatgcaactgatttttctgtgttgattttgtatgcctctattttgctgaatttatttagtggctctaattttcgtgtgt

SEQ ID NO: 758411 - DNA, 565 bp, Homo sapiens
cgtttacattttcttcagtctctttccgcaatgttttgaagtttgcagtacacaaatcttgcagctccttggttaaatttatttataagtattttactctttttgatgatattatgacttgagttgttctcttagtttcctttttggattgattattcattgctagagtataaaatgcaactaggccaggtgcaatgactcatgcccaggccaagaagggaggatcaagagcttgagaccagtctgggcaaaatagtaacacaccttctccacaaaaaattaaaaaatgagctgagcatggtggcacatgcttctattcctagccactcaggaggctgaggcaggagaatcacttgagccaaggagttcaaggctgcagtgagttatgatcatgccacygtactctagcctgggcaacagagtgagaccctgcatctaaaaatataaataaataaataaataaataaataaataaataagaaataaaatgcaactgatttttctgtgttgattttgtatgcctctattttgctgaatttatttagtggctctaattttcgtgtgt

SEQ ID NO: 758412 - DNA, 603 bp, Homo sapiens
tgcaaagaaggcatggggtgatttgaggtaaatatgcaaagtcaccccttatatactgaacacaattcctttaactacaagagttgttgtttgttgggtttcttttttctttttaaaacagtctttgaggtagatttctattattaaagcctgtttttatagagttcagagttcttccttccttctctttgatgcctaatctcctttatcttcagccagcaaataaatctctagtgctatcaggaaatactgattttctcactttatayccctgttctatctgaactcatcagtccctaatctccgtttgacctcaaatccaagccgtgggccttcagaaatgctctataaaacctgttgtacaggaattgtaattaagtcattcaactatccaggagtctatttacaaaattaggagggcatctggttaattgcaaagtcccttccaattccaccagtgcacaattcccttgaagatgagttactcagcttgctgaatttaaaggttgctaaacacttgcagtagatttcaaactgtgttctgataagccaaggttactaagtagaggatttagggactccaagacttttgtggaaatattg

SEQ ID NO: 758413 - DNA, 594 bp, Homo sapiens
aactttcccaggatctcatagcttgcacatgtgatagcattaatattcaaaccaaggaattctggcatgataatctattattcagtaccctgacatgttccttttagcagcaaatatactaaaattggaatgatacaaagattagcttggcccctgggcaaggatgacacgcaaattcgtgaagcattttatatttaaaaagaaaagccrtggctcaagcctgtaatcccagcactctgggagactgaggtgggagaatcatttgagcccaggagtttgaggccagcttgggcaacgtaccaagacccagcctccacaaaaaatttaaaaattcgctgtgtgtggtggtgcgtgcctgtggtcccagctactcgggaggttgatatggaagccttgaggtagaggctgtagtgagccttgttcatgccactgcactcccgcctgggtgatacagcaataccctgtctaaaaaaaactaaaaaataaaaacaaatatcacttctgtaatctcagcactttgggaggatgaggcagatggatcacctgaggtcagcagttcgagaccagcctgcctgaccaacatggtgaaaccct

SEQ ID NO: 758414 - DNA, 629 bp, Homo sapiens
aattacgtgtgtccaattatgttacgaatgtagcatggtgcctgatatactttaagtgttcaaaatatgtcaatttattatgtttgaaatacctttcttaataattatataaaaccattgtatggggggaaataggggacagatcaacatgggagaagtgtgctcattttgaycccttgaaataaaacatcacacacctagaaagaggaagtggctatgctaggaaactccctctagagttccagagccttcagattcaggtggtgtgtaaggacccacattattttgtgattaaagaggattagataaaatgtggatcctaccatctctggggttagtgttctaatgcactaagaattaaatgacccccttcttatttacaagaatataagaaaaaggtttctaattagagacgacacatggtaatactaaagatatacatttattccgtgaaaacaaaaataaactttcatttcagataaaaagaatgctctctggactctttaggaaatactgagagaaagtgcaaaattggaggcagcataaacataatgaacctagacaaactatggcagcttctgtagcggaaggatttggttgggccctggggacattctttgcagaaactc

SEQ ID NO: 758415 - DNA, 627 bp, Homo sapiens
agtagctgggacttcaggcatgcaccaccacaactgcctaatttttatattttttgtagagactgggtctcaccacgtggcccaggctagtctcaaactcctgagctcaaatgatctgcccgactcatcctcccaagggaattacaggcatgagccactgcacccagcctcttacagttcttttcttttcttttttctttttttttttgagacagagtctcactctgtcacccaggctggagtgcagtggcatgatctcggctcaccacaacctccgcttcccaagttaaagcgattctcctgcctcagcctcccaagtagctgggactacaggcatgtgccaccgcgcctggctaattttttgtatttttagtagagacggggtttcaccatattagtcaggatggtctcgatctcctgacctcgtgatcctcccgccttggcctcccaaagtgctgggattacaggygtgagctaccgtgcccggcgatagttccttattcatagaattaagtatgtatatgttaatttagaagtgtttttacatttaaaagtttagttggccttttagatatgcctgcttgcgaaaaggtacattctggcttactcttatgatggggaaaattt

SEQ ID NO: 758416 - DNA, 416 bp, Homo sapiens
gcagaaacacaacccaaaggacacagtttcaaagggcagggaatttggcaaccagccatatgcacagacagaccagcatccccctcctttgcctggtcctgttattatataagtcaaggtaggtttaaggcctccaggaagtcaccactgaagataaatcaaaattgaaaaaagaaagtgaactagaatagggakagccaaggataatactgtgacatccaggattagaaaagcccaacagacaaatgcagtctggcccagggactgtgagggacactggaaaggaagactttgaggcctgaggggaatacagaacgaaacagaccatctctctcctgaaaattctgcccaattgcttaatacctcaaatatctatccagacaggcaatcaaagcaaaaatggacaaatgggatcc

SEQ ID NO: 758417 - DNA, 616 bp, Homo sapiens
aacctaacctaaccttgggctggttacttaggtgggctccctgagagcagcattatgttggtgagggtggtcttggggcgaggactggtcctcagccttgcagatgtaggatctccattttattagtatacctggcagtgggcaggctctggtagggttgacagaaaaatacagggtgcccagtaaaatttgaatcttagataaacaatgaataatttttagtataagtgtatcccatgtgatatttgttttgttttagagacagagtctctctttgtcacccaggctggagtgcagttctgcgattgccgctcactgcaacccttagaactcctgggattaggagatcctcctgcctcagcctcccaaacagctaagactgcatgtgtgtgccaccrtgcccagctgctaatttttaaaattttttgtagagacagggtctcactatgttgtccaggctggtccagaactcctggcctcaagtgattcttccaattcagacttccaaagtgctagtattacaggcatgaaccactgcacttggccccaatatttgtatttttatttgctacatctgacaaccctatctaggaggcatccattaattaactcacca

SEQ ID NO: 758418 - DNA, 616 bp, Homo sapiens
aacctaacctaaccttgggctggttacttaggtgggctccctgagagcagcattatgttggtgagggtggtcttggggcgaggactggtcctcagccttgcagatgtaggatctccattttattagtatacctggcagtgggcaggctctggtagggttgacagaaaaatacagggtgcccagtaaaatttgaatcttagataaacaatgaataatttttagtataagtgtatcccatgtgatatttgttttgttttagagacagagtctctctttgtcacccaggctggagtgcagttctgcgattgccgctcactgcaacccttagaactcctgggattaggagatcctcctgcctcagcctcccaaacagctaagactgcatgtgtgtgccaccgtgcccagctgctaatttttaaaatyttttgtagagacagggtctcactatgttgtccaggctggtccagaactcctggcctcaagtgattcttccaattcagacttccaaagtgctagtattacaggcatgaaccactgcacttggccccaatatttgtatttttatttgctacatctgacaaccctatctaggaggcatccattaattaactcacca

SEQ ID NO: 758419 - DNA, 573 bp, Homo sapiens
ttctccatggcatgaccactttgagctgccaactctccctctcagctcacctctgagcacttctcggcatgacagtggggcagtccagctactttcccacagctaccacagccagaaacaaggctgtcactgagctctctcccccatcacccgaacaaccatctgtgctctgttgaccccatatcactgtagcataagcaaatstgtggggtcagctgccctccctagataggaagtagacacaaatttcctctattcttagtttcctcaaggcttatcttgtgttctacttgccagccagagttccctctctgctaaaataattcaccctgggaagatgataggggccttccttggagaccacacatctctccagtctagataaccctacgaaagtatctaggggctggtaatcttgcatggaggagtggggagagttctttcagaccgttcttatttggttcaaaataacgatttagggccaaagagttcctgaatgctcaaaaagtattttctctcaaatctaggtcttgtgttcagcaatctcatttgaatctcaaaagttaaccactg

SEQ ID NO: 758420 - DNA, 627 bp, Homo sapiens
caaagtgctgggattacaggtgtgagccactgcgcctggcccctttcatttatttatttttctgagacagggtgtcactccgattgcccaggctggagtgcagtggcatgattttggtttaggtttactgcagcctcgacttccccaggctcaggtgattctcccatctcagcctcctgagtagctgggatgacaggcacacaccaccacacccggctaattttttttgtattttcagtaragacagggtttcaccatgttgcccagctggactcaaaactcctggcctcaagcaatccacccaccttgacctcccaaaatgctggaattacaggtgtgagctgctgcaccctgccacagaggaggattttaataatcaaatagataggatgactaattctatggacaccagtcagcctctttccacaatcatcccatcatcacccaatgggctcatggataaaatggccatggtggcagagatgaaggttatgcataggctcaacaacatggactgcacttaccaaggctgatttggctacagccaccactgagtgttcaatttgccagcatcagagaccgacactgagtccctgatatgccactgttcctccagctaaacaaaca

SEQ ID NO: 758421 - DNA, 648 bp, Homo sapiens
catctccaaatattatcacattagaggttggagcttctgcgtatgaattttggtgggacacaaacattcagtttatataagcaatataaacatcaggtggctccttcaggcctctgctcaagtgtcaactaatccaagagctgcccacgactacatgatatagaacagcataactttataccccccagcataactttatctacctcaccttgccttatttttctttatagcactataccacctgacaaattatatattttgtttgtttattatctgtgatctccaaataaaatataagatctstcagatccaagagagtagggactttctcatttgttcactactgtatctccagtgtttaggacattccttaaaaacaataaatgttcaataaatgtttattttaattgaatcagtgaatgaataaatgaacggatctgataaaacagactttacagccaaaagcaatttttttttttttttgagacagaatcttgttctgccgcccagctggagtgcagtggcatgatctccgcttactgcaacctccgcctcccgggctcaagtaattcttgtgcctcagcctctcgagtagctgggactacaggcatgtgccaccaggctcaactggttttttgtatttttagt

SEQ ID NO: 758422 - DNA, 561 bp, Homo sapiens
ataaactgagtccaacacttctacacagttatgttcaactgggctctctgataccgggagcaaggtggtagggtttagggtgttgcaaacttcagtggttatgcggggattttcacatagcaagctttggtacttggttaatctagcatttgttaaccaatgatgccctttggtagtcattaaagttaccacagcatggggggcctttatattcaggttttgcccaagggttagtttatctgcttcttgtgctaacagggccattgytgccagggcccttagacatgggggccagccttgggaaacactgtctagttgttttcagagatagaccactggccttggccagggacctacagtctgggttaaaactccaactgccattttttctctttctgacacacagggtgtaaggggttttgtcaggtcgggtatccccagggctggggccaacatgagtttttcttttaactcatgaaaagctcgttgctgttggttgtaatagatgtagttcatctactttacatttttgttaactgtcacccaccaaaatattgactc

SEQ ID NO: 758423 - DNA, 545 bp, Homo sapiens
aacagagatgataaagacagagaaagcagaggcattaacctcagcagtggccaaagcaaacaaaaccatgatgagaaaacccgggatacatctggagcatgtgtaggcgcttgcaggtggaacgaagagagtatggtggaaacataccgggcagtcrgaatcagaggacatggggacagtggggagggcgcatccagtttccactttggatattttgagactatctatctatctatctatctttttttttttttgagacggagtcttactctgtcgcccaggatgtagtgcagtggcgcaatctcggttcactgcaacctccgcctcccgggttcggtcaattttcctgcctcagccaatatttacattttataacaagcatgtgttacttttgaaagcataaaagttgatggcttgagtggtgaagtacagttgctccaaagcctaaccggaaacactgatgtggctgctgctgtgaacggggaaggtgggagggtgtaatgactaaactctgtttactgtttgttttgtgccatgtgctgctt

SEQ ID NO: 758424 - DNA, 554 bp, Homo sapiens
tccaagagagtcttggaagttatttcttctctattttcatggcacactttccaaagtcatcagagatctacattcaaaggcacttgtcagagtcctataactgattatacaccaccattttttttttttttttttgagacagagtcttgctctctcaccccggctggagtgcagtggcatgatcttgactcactgcaagctccacctcctgagtccatgccatgctcctgcctcagcctcccaagtagctggactacaggcacccaccaccatgcctggctaatttttttgtatttttagtagagacagggtttcaccatgttagccaggaaggtctcaatctcctgaccttgtgatcagcccacctcagccttccaaagtgctgggattatargtgtgagccaccatgcccggcctacacctccttttaaagaggatcaaaacaagacaaatattgtctgtggatgacaaaaagacttaggacagccatactcaaagacacaattgacaaggaaatttggttacctctgtggcacacaataatcaacaaaaca

SEQ ID NO: 758425 - DNA, 665 bp, Homo sapiens
catactcttttttgtctggtttctttcacttagcatggttttgagattcattgatgctgttttgtgtattagtaatttgttccttgttattactgagcagcatcacattatacgaatatactgcagtttgtatatctgttttcctattgatagatacctgggagtttcttagttttggatattataaatctgagctcttttaataaatatatatttcatttcacttggataaatgcctagcatagaacttctgggccgtagggtaggtgtatgcttagtcttacaagaaactgccagataccactatacctccaccaacaacatatgagttccagtcactccacttcctcaccaacatttgttgttgtcagtgtttttaattttagacattctcgtggctatgtaatggtatgwcttttggttttaattatttgccgctccctgatgactaatggcattgaacaactttttacgtccttattggccatatgtataccttccttgtaaagtatctgatcatattaattgactactttatagttgtctttttattattgaattatagtagttctttatcatcctagataatagtttctagttgtgtgaatgttttatccaagtcagcagcttgcctgtttttcttaactgtcatttgatgagcaaaa

SEQ ID NO: 758426 - DNA, 539 bp, Homo sapiens
aagaggcaaacagttgcattcctttgagtcttttgatcagtgaagccacttttttcacgtgaaaggagggaggagaggaatagtcaattatgcatttatcttgtgctcagttaatctccatttttacataaggtaaaataaacataggaagtagaggaagcagttagatatgcattcctctcagttgaacagagggatgatggcttttagttcttggtttttgttctctttctgtagaagattagcttctaatttattaatacattgtagggtgaaattcaacagaactgtcttagggtaaagatattggggctcacaagagatttccttgtgaggaaattgtgagggaagaatgtagccttytatcttgtagctatctatttaggaacaaagtggaaggcaggtttgcctgaccgagttcccagcttaatgtttccctttggcttagcgagtttggggtccagagattttattttcctttcagatgccataggaaatgtaacaactgtagaaacgagatttcagagctgggcctctca

SEQ ID NO: 758427 - DNA, 520 bp, Homo sapiens
catgcataaatgattcccatgctttacctttggttaagtgcacatgtgcacatactgttctatccattttgctctctccattttctttttgagacagggtcttgctctgttgcccaggcttgagtgcagtggtgcaatcacagcttaccgtagcgttgaactcctgggctcaagcaatcctgtcacctcagcctcctgagtagctgggactagagttgtgcaccactatgcctggctaattttttctttcttttctttttttttgtagagatggggtcttactatattgcccgggctggtcttcaattcctgggctcaaamgatctgcccacctcggcctcccaaagtgttgagattacagtatgagccaccgcacccagcctgctcgctccgtttcttaagtgtgttatagaggatgagtctagcctcatcctgctcattctgtttcttaagtgtattgtagaggatgagtctaggtaggcaagtcaaagtttaggtatcatgagccactgaagcctga

SEQ ID NO: 758428 - DNA, 520 bp, Homo sapiens
catgcataaatgattcccatgctttacctttggttaagtgcacatgtgcacatactgttctatccattttgctctctccattttctttttgagacagggtcttgctctgttgcccaggcttgagtgcagtggtgcaatcacagcttaccgtagcgttgaactcctgggctcaagcaatcctgtcacctcagcctcctgagtagctgggactagagttgtgcaccactatgcctggctaattttttctttcttttctttttttttgtagagatggggtcttactatattgcccgggctggtcttcaattcctgggctcaaaagatctgcccacctcggcctcccaaagtgttgagattacagtatgagccaycgcacccagcctgctcgctccgtttcttaagtgtgttatagaggatgagtctagcctcatcctgctcattctgtttcttaagtgtattgtagaggatgagtctaggtaggcaagtcaaagtttaggtatcatgagccactgaagcctga

SEQ ID NO: 758429 - DNA, 479 bp, Homo sapiens
aaataatatcaaatattgtcaaaaagtggattgcattaagctcttatagcctagtgtagtactctttttccataatggaaatttttctgtacaggtaactggcattgttgttggaatcacagaactcttcactggacagtgatggagaagcagatgaattatccataatctaggcctctgttttcaaatatttgttattagtcatttaaagtttctcttgatatggtaatagctaccagttattgagtattatgttttaggatattytaaatccttagctttataaatatttttaatcttgtaaagtggtattattatccattttacacatcaagaaaccgagactcagatcaagtaacttatccaagatcacacagtttgaaaagcaacagagctaggattcagacttaacttctgttgactccagagcttgtgtccttttctccatgccaaactgcctcctaggatatggattattt

SEQ ID NO: 758430 - DNA, 634 bp, Homo sapiens
gtgcagtggtacaatcacagctcactgcagccttgacttcccttattcaatgtttagcctttaatgcaaatatcacaagtgggtcattgattatttttaaggggaaaggtaactttttggcaagcgactcatgtccacacacaccccatatttgaatttcatttgtcagtgattcttacctggacttgagctgctcaagagctgggagcccacccactgcatgccacgtagtaggtcttcgcccgtgtgccaatcattagagacactggagccctgaaagctgccgatgttgccctgttgccattggctttcactctttcttgtgctcttgccacatgccaggcattgttgcaggtgctgaggaggcagcagggaacaaatcctacaaaacacgagcccacccctcccaccaaacaacacttacaaactyttaccagaagctgggccccatagactcacccattttaaagaagagaaagagagaaaggaaggaaagcctgcactgcaggactctggaacaagtgtggattaggacccagaagtcttcagtttattttgagctttctggctgtgtgactttgggaaatctacttgacctgtcactacctcaatttccttattcataaaataggaa

SEQ ID NO: 758431 - DNA, 635 bp, Homo sapiens
acacaatattaatcatagttacatgctgacaatttgatgttcctctaatattaaaattgttatgttcatagtagtagagacacttctgtttacctaaaataggattcacattttcagctcatgctttagtcccttgtcagtcattacaacaagtttaacattttgtattctcatttatactattccttaattgtatattctttttcctcaattactttgcaagcccaagtacctagattttatttttacttctttttttctcccacagttatctagttgagctggttatctcagaaacagtatttttagaaaacacaagtcaagacccactagtggggccaggtgtgatggttcatgcctataatcccagcactctgggaggccgaggtgggaggatcatttgaggccaggagttygagatcaacctgggcaacacagcaagaccctgtctctacaaaaactacaattagctaggcgtggtggtatgcaactgtagtcccagctactcaggaggcagacacaggaggagcatcacttgaacacaagagttcgaggttacagtaagctatgatcatgccactgtactccagcttgggtgacagagcaagactctgtcttttaaaaaaaagacctac

SEQ ID NO: 758432 - DNA, 610 bp, Homo sapiens
ctgactatatctcacagggaccctcagggaaggcagccagtggaattacagaggggtcacagggtgaaagaagcttccaactgaaatttgtaataattttgactggacatgaattttcttgagcagaatccaaggagtgaatgggaactgctacagatacgagtgaaggagctgcctctgacattggggcagatggggaggggcaagacctgaaagctgcgcttcctttctcagcagggaagtttacagcatgggacaaggtctgacaggggtaatgtgggagcgagactggcctagccaactgcctgggagttaggtggggccttttgctacctgctatcccccactttcctggtgagctatatggtacagcagaggcagccataatcccctctggaacataaccccattggcctgagaaccactacccatccccaacagtggccgtgggaagcccctccyaaggacagtctgagctcagactcacctattcttgcccccatctgatggtatttctctacctgccctggtagccaaacacaaaagatataaactcttgggagctttttatggccctggacatcacctgagaaaccagaatacttaccca

SEQ ID NO: 758433 - DNA, 588 bp, Homo sapiens
gataccagagaaaagtgaaaactaaaagaaatataaaaaacaatgcagaatatggatgaaaaagtctccagagaaatagatttcataaagaaagtacaatcacagcctcaggaaatgaaagccacatttcattatatgagaaatataaaatgcactggaaagtttcaacaatagactagaacaagtagaagaaagaatttcagagcttgaagacaaggctttcaaattaactcaatcagacaaagaaaaagaaaaaaawttttaaaaaaatgaatcaagcctccaagatatttcggattatgttaaatggccaaacctaagaataattggtgttcctgaggaagaagagaaatctaaaagtttggaaagcttatttgaggcaataattgtggaaaactttcctgaccttgctagagatctagacatccaaatgcaagaagttcaaagaacacctgagaagttcatcacaaaaagttcatcacctaggcacatagtcatcaggttatctaaagccaagacgaaggcaaaaatcttaaaagctgtgagacaaacatatcaggtaatctataaagttaaaggaaaacttta

SEQ ID NO: 758434 - DNA, 535 bp, Homo sapiens
aattcgacaagagatttggctgaggacacatacccaaaacatattatttcacccctgggacctcccaaatttcatgtccttctcacatttcaaaatacaattatcccttcccaacagtcccccaaagtcttaactcatctcagcattaactgaaatgtatcatctgagataaggtatgcctcttccacccatgagcccataaaatcaaaaccagttagttacttccaagatatagtggggatacaggcactggctaaatatgaccattccaaaatggagaaatcagccaaaacaaagagactacaggccccatgcaagtccaaaacccagcagggcagtcattaaatcttaaagctccaaaataatctcctttgactccatgtctcatatmgaggcaacactgatgcaaggggtgggctcccaagaccgtgtgcttctccacccctgtgtctctgcaatgtacagcccccttgcctgctttcacaggctggcactgagtgcctgcagcttttcctagcacacggtgcaagctgtc

SEQ ID NO: 758435 - DNA, 641 bp, Homo sapiens
caaagaacactttttttgctaggtgtcttctttttcatgcctaagtgaaaattgtgtgtgtgctacagttttcttctgtgggcagtagtagaccctattggcaccccacctccatattccacaacccaccttcacattcacctgtgaccatgtaggcagtttccagaagtttgagaacttctcaccccaagcacctacatttcttttcctcctctgcctgaggttttcttcagtaccattttcttcaggaactygctttctacctagtggtacagcccaaaagtgtatagtgagggggctaacgccctagggagaaatccccaattaatggggatgagaattgccaggttaaataaggcagcctccacaccctctgctgggacaattcagaggtgtgcttcttccttcaggtttcctggagggtctacactgggattgaaacccaggggcctgcagagctcaacccacacaataatactccctttcatggcttttctcctgccctgaatcattgccatcactgtcttatttatgcttccagggactatttcacaaataaactacctgcatgcaagccttatcttgaggtcttcttttggaaaataaacaaactaaccaatctgcaataagtaagaaggaca

SEQ ID NO: 758436 - DNA, 641 bp, Homo sapiens
caaagaacactttttttgctaggtgtcttctttttcatgcctaagtgaaaattgtgtgtgtgctacagttttcttctgtgggcagtagtagaccctattggcaccccacctccatattccacaacccaccttcacattcacctgtgaccatgtaggcagtttccagaagtttgagaacttctcaccccaagcacctacatttcttttcctcctctgcctgaggttttcttcagtaccattttcttcaggaactcgctttctacctagtggtacagcccaaaagtgtatagkgagggggctaacgccctagggagaaatccccaattaatggggatgagaattgccaggttaaataaggcagcctccacaccctctgctgggacaattcagaggtgtgcttcttccttcaggtttcctggagggtctacactgggattgaaacccaggggcctgcagagctcaacccacacaataatactccctttcatggcttttctcctgccctgaatcattgccatcactgtcttatttatgcttccagggactatttcacaaataaactacctgcatgcaagccttatcttgaggtcttcttttggaaaataaacaaactaaccaatctgcaataagtaagaaggaca

SEQ ID NO: 758437 - DNA, 635 bp, Homo sapiens
ctaattcttacaactccagtaaggcaattaagtagatatcactacttttccaatgaagccattgtcacacgtttatacagctaagaagtagtgaaatcacaattcgaccaaactcagttcatcactgatatctatgcctttaatcattttctatgtccaagctatatgtttccattacattttaaaaaaatctccagacataaaagaggtaactaaggaatagaagaagcatgcaagttgtatgtgcataaaagcaagagttatcratggctatttatattggaatatcacagcatcattatgtcagcaactatgtctcctctaaaagttgcttgcactttctgcactcaccacatagttcttctgagttaacttctttacagatagtgactattaatgcttcggctttccttatgcctatcctccactatcagctctgcaaagtgttggaaaaatgtgccttccttatccactggagaggtcacaggctttggctctacattgcaaactgtgttttcagcttaagaattatacaatttgaattctaaaaacgcaataaggttaacattttgctatcaatcttcgaattgattattacaaatacatggacaccaaaggtctacaaagttcccctc

SEQ ID NO: 758438 - DNA, 640 bp, Homo sapiens
atagtctagagattcaatctctattcaaaatacctatgacatgtttcacagaaatacaaatacaatcctaaaatttatatggaaatgcaaaagacccaggatagtcaaagttatcctaagcaaaaagaacaaaactagaggaatcatgtgacctggctttaaattatgctacagagctacagtaaccaaaactgtcataaaaacagacatatagaccaatgaaacagaaatgaatcatttttttgcttttattttacctactaacaaaaaccctggtacaaagtgcagatgagaatggagttttctggaaagaatagcaaaagagctacaataaatgtctatacgtcatttctgcaaacagctaasaagttgacttcatcaaggggtcaggtttttcagcacactctcagtccagtagccaataactatgtagaaaaagactatataacttaaaatccaaaaaacaagatcaattcccaaaaataatgaactaatttaattataactttttaatgtcttaaattaacatagttaaaattggtttccaacttcaacagacaccttaaaactcagaaaaaatgacatccctgaaaaggtctaaatatgtatataaagctaaacactttttataaagcctaga

SEQ ID NO: 758439 - DNA, 638 bp, Homo sapiens
tcattttgagttaatttttgcttaagggatccagtttcattcttctacatgtggctagccagttttgctagcatcatttattaaatggggtgtccttccccagtttacatttttgtgtgcttgatcgaagaccaattggttgtatttgtctttacttccaagttttctgttctgttttactggtctatgtgactacttttatgacagtaccaaactgttttaataactattgccttgtagtataacttgaagtccagtaaggtagtgtgcctccaggtttgttctttttgcttagaattrttttggctatgtgggctcctttttggtcccatatggattttagaattgtttttctagttctgtgaaaagtgatgttgttattttgataggaagtacattgtatctatagattgctttggggagtataccttccacaagaatgattcttccaatccatgagtgtgggatgtatttccatttgtttgtgtcatttataatttcattcagcagtgttttgtacttctccttttacagatccttcacttccattgtcaagtatattcctaggttgttttttgttttgttttgttttttctgcagctgtttttaaaggaattgagtttttgatttgattctca

SEQ ID NO: 758440 - DNA, 600 bp, Homo sapiens
gtggggtatgggtttttttttaataagaaaagagaatggaaacattgaaggccttccccttaacgaaaggtatatagatgatctttctgattttatcagaacatgctttgcataattactgaaatgcacacatgctaaaagaaatcaaatttgcaaccaattatgcccaaattatagtctgtgttggtaggcagtctaccttctgaagtatttcaggtgacagtttaacggatgttttgccatagaattgcatgtgtcattacctttcaaacctcctctattgttacccttgctgtattataaaactgctatgaatgtargtcatttttatgacattccttcactctcttgtaccacttttctgtaatagttaggatgtaatctaacatggttgtgtcagcaaagttttgcttcatagcaaactgctctgaaactcagcaacttaaaatgcacttattctatttagttcattgtttacagttcttgcagtctggactggttctgcccatctcaatttcagttctctcatttggatgcattattttcaagttctgattatcgctccacattccattgttctccttgaatattgtcttgctt

SEQ ID NO: 758441 - DNA, 589 bp, Homo sapiens
accatatgtaggtcacaaagcaaggttaaataattcaagaaagttgaaaacatatcaagtaacttcttgtaccacactggaataaaattagaaattagtaacaaagaattttggaaattatgcaaacacatggatattaatcattatgttcttgaatgaccagtgagtcaatgaaaaaagtaagaataaaatttaaattcttcttgatagtatgaaaatagaaacacaacatatcaaaatttacaggatacagcaaaagcacaactaagagcaaagtttccagctataaagtgcctccaatttaaaaagtatataaacttcaaataaacaacctaacaatgcattttaaagaattagaaaagcaagagcacacagaacccaaaattagtagagagaaaaaataataaagagcagaacagaaataaatgaaattgaaatgaagaaaacaacccaaaagatcaacaaaatgaaaagttggctttttgaaaagataaaatygacaaattgttagtcaaactaataaaaaaaagagaagtcccaaataaataaaatcagcaatgaaaaagagacattaaaaccggtgcttcag

SEQ ID NO: 758442 - DNA, 659 bp, Homo sapiens
agaattagaaaagcaagagcacacagaacccaaaattagtagagagaaaaaataataaagagcagaacagaaataaatgaaattgaaatgaagaaaacaacccaaaagatcaacaaaatgaaaagttggctttttgaaaagataaaatcgacaaattgttagtcaaactaataaaaaaaagagaagtcccaaataaataaaatcagcaatgaaaaagagacattaaaaccggtgcttcagaaattcaagggattgttagaggctgttatgggcagctatataccaataaattggaaaacctaaaggaaatggataaatgcctagacacatattacctaccaagattaaaccatgaagaaatccaaaaccttaacagaccaataacaagtaacaaaatggaagccataataacaaatctcccagcaaataaaagcctggggccctatggcttcactgctgaattttaagaaacatttaacgaagatacaataccaattctactcaaactaatctgaraaatagaagaggagggagtactttcaaattcattctacaaggtcagtattactctgataccaaaacttagcaaagacacatcaaaaaagaaaactatttcacattgcagtatccctgataaactctgatgcaaaaatcctgaa

SEQ ID NO: 758443 - DNA, 620 bp, Homo sapiens
gattgtcagttctaaacacagaagtgcagaccaagagactttggctattatctttgtacctccctcactgttgcaagcccctcctccttgggctgaattgacttccaagaaatttaaagaacgggtgacctttcttccctcttcacatccccttcatctttttctttttccactttggggtgcaggatattaatgattaggacattcaaaagaaagtaaatatatggggaaaattagaaagtgactaaaatgtatggtcaggtaaaggtacaagcatagawaagacctgaaaaaaaaacttaagtttagaatgtaggctgattcttggcacagagattacctacaaaaatctttaaaaaccgaaaagaataaaaacaatttaaaaaagcaaaccatgggaaagaagaagaacgtgattttgttttagcacattattatatataaatgtccagttttcaacaacaacaaaaaatcaacaaggcatacaaagaaatgggaaagtatgggcaattcaaagggtaaaaatatcaacagaaactcttcttgaaaaagacctgatagcagttccactggacagaaaaacaactaaaagatattcaaaaaggctgggcgcagtggct

SEQ ID NO: 758444 - DNA, 620 bp, Homo sapiens
gattgtcagttctaaacacagaagtgcagaccaagagactttggctattatctttgtacctccctcactgttgcaagcccctcctccttgggctgaattgacttccaagaaatttaaagaacgggtgacctttcttccctcttcacatccccttcatctttttctttttccactttggggtgcaggatattaatgattaggacattcaaaagaaagtaaatatatggggaaaattagaaagtgactaaaatgtatggtcaggtaaaggtacaagcatagataagacctgaaaaaaaaacttaagtttagaatgtaggctgattcttggcacagagattacctacaaaaatctttaaaraccgaaaagaataaaaacaatttaaaaaagcaaaccatgggaaagaagaagaacgtgattttgttttagcacattattatatataaatgtccagttttcaacaacaacaaaaaatcaacaaggcatacaaagaaatgggaaagtatgggcaattcaaagggtaaaaatatcaacagaaactcttcttgaaaaagacctgatagcagttccactggacagaaaaacaactaaaagatattcaaaaaggctgggcgcagtggct

SEQ ID NO: 758445 - DNA, 599 bp, Homo sapiens
ttctacaatggacctctatcaacctcacctgcatttagatgctcatgtcctcagtgttccctcacatatatgaggtgagtgtagcgggtaactgtgggtgtattatttctttgatccttcctatgatcaattatgcttmagtccagaacctaaatatttcaaaaggcatggaatcatgaatgtcagcaccacaaatgtatgtcttgcaaagcattttcttttctttccattatttttcatgaatgcttttcctcattcagttataaataacaacgactatttagttttctgtaagttagatatttattaagggagacattcttaggggatatagatgccttatcccaattagtgcatacatttagtgagccatttacatgtagcaaattatggtttggctttctaatacaccaaagagtgatgtaagatttgaatccatattcttacaaaattatcttatatcgagttagagaacatcaaggcaatgagggaatattatccaagaaaatatgctatccaaacaccaataaactatatacagtatttaaacaaaatatattttatatgagagaatgcatataccaaacacttcaacaatt

SEQ ID NO: 758446 - DNA, 563 bp, Homo sapiens
gtatcacgtgggtagtatttatgttctccagagtagagagacagatgtccacattaaaaaatacttgccatgctgtcatgcttgtttcctaagtgcagaaaacatgctttctgttcaaagagactcacatatgagtttgtccctagaataattttctttacattccaattaaaaatagattaaatgaatttcaggaaattttataccaagttaaaattaatttaaaaacttttgtggcatattgccatcatttttcactgtttaacaaatagtttgaaacttgaattgatcatgcctgcctgtgttcaataagtgaaacttgcttctcagcagcattaaaaaggaaaataatttgcagatttctaataatttttttcttattctatcttcttagtcrttggataaagcttaatttcacttatatacaatagctttctattgtatattttacacaatagcagaatattactttgtgtgttttatgaatgctttgcttcacattaaaaagaatgaacctcatttttattcatttagataataagagagaaataggaaaaaaagaa

SEQ ID NO: 758447 - DNA, 683 bp, Homo sapiens
ttgtgatatttcatagattttgatatgatgctttttattttaatatgtttcaagtaattttttaattttaaaatattttttcattgattttttggctgtttgagagcatgttgtttaatgtccatgtatttgtataatttccaagttttcctggtattgaattccagttttaatgcaatgtagtcagaaaaaacacttgacatkattttaaatttttaaaaaaattttggagttgttttgtggcctattatatgatctaccttggagaatgttttatgtgccactgagaagaatatgtactgtgcagttgttgcgtagaatgttctgtacatgtctgataggtccctttggtctaggttgtagactaacttcactgtttcttagttgattttttttttttgtctagacgatatcttttgctgaaagtgggatgttaaagttccctgttcttattgtattggagtttatctcacctttatggcttgctaatatttgctttatatatttaggtgttctgatattggctgcatatgtatttacaattgttacgtcctcttgtttaattgaccttgttatgattatataatagccttatgtgcctctttttagagctgtagatttgaagtctattttatctgacataagtctagctactcctgctatcctttggtttccatttgcaa

SEQ ID NO: 758448 - DNA, 603 bp, Homo sapiens
tcgttcattcaactttcacaaagaggattctgtttttctcctctagtcattctcccggaatactgttttttattctccttatatcagtaacagaataagaaggggtaggaagaaaacatagcaaaggcagagattataaaaaaacgaaaggaaaatgttggctgtgacagatatgttaatacctttattattgtgatggttctgtagttgtacacatatgttaaaacatatcagattgtgcaccttaaatattgctgtacattttatgaaaagtgtacctttataaagctgttaaaatattatttgtaataacacaggaagtcaaaaatctaatttggtaattttagtagaagttactctactaaaatttagttactctatctagaagtgcttagtctttatgaatatttcacattattaaaacaaayagatagctttttcagatttatttattcctctacttttaactcttgtgtaatattataagagacatcttctctgaccctatcttctattatccagacttaacacattatttgcagattcttcaaatatcctacttgctgtccatgtctccaacatgtctctatgctttgaaatatg

SEQ ID NO: 758449 - DNA, 597 bp, Homo sapiens
acaaaagcatacgtgtgataaaatggactttgaagtaggggaaggttgcgagggaagtgagggataaaagagcacatatctggtacaatctacaattctcaggtgacagacacactaaaatctcagaaatcaccactaaagattggcatttggattgatttcatatcytagctattgtgaatagtgttgcaataagcacagaagtgcagacatggctttgacatactgattttatttgctgtggatatatgcccaagagtaagtttgtagatcttatggtacttttgtctttaatgttttgagaaatcttcctaatatttttcacaatggctgtactaacatattgtctcaccaacagtgtgtaagggttctcttttctctacatactccccaaccgtgttatgttataattgttgatagtagttattctgactggagtgatttgatatctcattgtagttttgatcttcattttcatgatgattactaatggcaagcatttttttccacatatcttttggccatatttgtgtctcattttgagaaaggtctattcagtttttttgcctactttttaaataggttattttgttgttg

SEQ ID NO: 758450 - DNA, 597 bp, Homo sapiens
acaaaagcatacgtgtgataaaatggactttgaagtaggggaaggttgcgagggaagtgagggataaaagagcacatatctggtacaatctacaattctcaggtgacagacacactaaaatctcagaaatcaccactaaagattggcatttggattgatttcatatcttagctattgtgaatagtgttgcaataagcacagaagtgcagacatggctttgacatactgattttatttgctgtggatatatgcccaagagtaagtttgtagatcttatggtacttttrtctttaatgttttgagaaatcttcctaatatttttcacaatggctgtactaacatattgtctcaccaacagtgtgtaagggttctcttttctctacatactccccaaccgtgttatgttataattgttgatagtagttattctgactggagtgatttgatatctcattgtagttttgatcttcattttcatgatgattactaatggcaagcatttttttccacatatcttttggccatatttgtgtctcattttgagaaaggtctattcagtttttttgcctactttttaaataggttattttgttgttg

SEQ ID NO: 758451 - DNA, 575 bp, Homo sapiens
ccagttgtttagcgttaggcagcctcttcctgaatgcagaccctcaggagaacaagacagtctgtacttcacaccacagtgagatattaatactttgtgggtcagctcagaagtgggaccaacaataccagcaacccaactcactgccagctaatggagggactgtgccctccataaccccatagatccattacctaraaaaatctgaaaagctatggtatttgacaggctccatacagttgaattgcctggcttctagaagccagctcagaagaatgagaaatgtaccctgatgaattaaactaaacactagggtgaaagccaggcctcaaccaacactcttaggaactgcccaggaactaaagttgatgcctacctctaattgcccataatttgcttgaggttacacttccataagacaaggtggaaatggcagaaagagttaaaaaaaaaaaaaatccaggcttagtttaaaaacttggagttaggtccataggaaacaaaatcagagtgcaagcatactctctcttacccttccaccccacctagggttcattcagcatttctactgattc

SEQ ID NO: 758452 - DNA, 628 bp, Homo sapiens
ggaggctgaggcaggagaatggtgtgaacccgggaggcggagcttgcagtgagccgagattgtgccactgcactccagcctgggagacagagcgagactctgtctcgaataaaaaaaaaaaaaaaaaaaaaacccagaagaaaatctaggcaataccattcaggacataggcataggcaaagatttcatgacraagatgccaaaaccaattgcaacaaatgcaaaaattgacaattgggatctaattaaactaaagagcttctacacagcaaaacaaactattatcagagtgaacagacaacctacagaacgggagaaaaatttttcaatctatctatctgacaaagttctaacttccagcatctacaaggtacttaaatttacaagaaaaaaaaaccattaaaaagtacataaaggacatgaacagacaattctcaaaagaagacatacatgcagccaacaaacatgaaagaaatctcaacatcactgatcattagagaaatgcaaatcaaaaccacaatgagatgctctctcacaccaatcagaatggctattattaaaaagtaaaaaacaaaacaaaacacgctggtgaggttgtggagaaaaatgaatgcatatacactattgg

SEQ ID NO: 758453 - DNA, 628 bp, Homo sapiens
ggaggctgaggcaggagaatggtgtgaacccgggaggcggagcttgcagtgagccgagattgtgccactgcactccagcctgggagacagagcgagactctgtctcgaataaaaaaaaaaaaaaaaaaaaaacccagaagaaaatctaggcaataccattcaggacataggcataggcaaagatttcatgacaaagatgccaaaaccaattgcaacaaatgcaaaaattgacaattgggatctaattaaactaaagagcttctacacagcaaaacaaactattatcagagtgaacagacaacctacagaacgggagaaaaatttttcaatctatctatctgacaaagttctaacttccagcatctacaaggtacttaaatttacaagaaaaaaaaaccattaaaaagtacataaaggacatgaacagacaattctcaaaagaagacatacatgcagccaacaaacatgaaagaaakctcaacatcactgatcattagagaaatgcaaatcaaaaccacaatgagatgctctctcacaccaatcagaatggctattattaaaaagtaaaaaacaaaacaaaacacgctggtgaggttgtggagaaaaatgaatgcatatacactattgg

SEQ ID NO: 758454 - DNA, 665 bp, Homo sapiens
ttagaaagcagggaagagtgccatcagcagtgtgagtttttggaacgtataaaagaaataggataaggtggatggccaattacaacaaagttgaccctgcaactccacgaagaaggaaaagattctgcaaaacgaaaggaaccatgaaaataagccaaagattaacaactgcagggaactaraaggaataggctgtgtctgggaagccagctatttaattatagggtagtaaaacaattgcaccagcactctccttgcaaagcagttggctttcttacatacgggataaagccacaaatatagaaatctaaatctgatgtgggagattcccaaaggagcctttgattgcgtagagtctcccctgacttatgggccccaaaagagaaggaagtgtatacactcaaaagatatccaaccatataagccagctgacagtgtgtccagagcccatgtaatcatctacacccttggagccaggtgaacattttcacttgaaatatattccagctaacaatataagaaccagagagagaggcatcaaacttagcaaacaaaataatatatcctttgggaaaacaaaattaagttgggaaataaatgaaatttcagaattattttacttaatatttttagtgacattcaagcagataatatatctgaaaaaa

SEQ ID NO: 758455 - DNA, 570 bp, Homo sapiens; identical to SEQ ID NO: 748232

SEQ ID NO: 758456 - DNA, 599 bp, Homo sapiens
ctgcattttagtttcaaattttcaatggtactctaaaaatctttttagccctatgtacatgttatgtggtagcatgatttatctgtttcgggaagatgatagatttatgtatacctgaaatgtacatttaaatgcttcaagtctatattttaatgtaaaaactcttgaactttgagatcatttaaacagcatttgttactgtatgtttaccttctctaactatgcataattcacttattaaaacccagtgataaaggaagggacgtatttccttaacttgacatttcattctacaggatgttattttttccaggaattctgttttatgggactatattaggaaagtgtttatttgacatctgtcattataggtctcatttactgttttctttattttatcttactcttcaaggtcaaaaaccaatrtattcaaggaaacctcccaccgcttaccagtggactagcagcatctgagccacgtttctctcattcagtggagaaagcatgttacatgcagctgcttaagccttttcttttctccaaggtgctaatttagttagtatttagtgagtaagaaaattgctttttaaaacagaaaa

SEQ ID NO: 758457 - DNA, 522 bp, Homo sapiens
aggctccaggaaatggagcaactaaaagtggtttccttatgatgtcaaggtcttattattttctttcttttttttttttggaaatgcaacttatgagatcaacccaaaggaaattgtgcatcagtgtccataggggtggttcacagagtggcaggagtctctgagcaacartctaagctgtatatgaatttcttaagaattaatcccattgcacatgtcggtagatgtggcagggacctgacagatgggggaaattgagtatttcctttaggactcaaaagagactcctaagctagagattctcaacctgggatgaagatccaagtcacctgcgaggttttcagtcttcatgccttggtcccattcagctggctgcttctggtacccagctgtgtggagaacaactctcctaagccacttggaatcaaagctcccaagttattgggggaaaagattacccaaggcaaagagccagaatgtgcagtcttaattcagaagatgggaagcagtgggacgcaacag

SEQ ID NO: 758458 - DNA, 615 bp, Homo sapiens
gagggtatctcaaagtagaaagattgtggggtgaagaatagacattactgagaacaaaatataagaggcttttcaaaaatattatccccaaagcaattcaggaaagaactatggagccgctgttatgtgttatatgctgggaatatggtagtgagcaaaatagctgaggctcctgtctttaatgagcttacagtcttgaaaattttgtaggraagatttctatgcaagggcatagaggtatatacaaaaggatgattattgaaacattattatgaaatcaacagaaatgcccatcaataaggaagtaattcagtagactatggaacagccatactatggaacagccatactatggaatattcaataatgtattgaaacattattataatgttttcattcttattaaaagaattatgtaagtcttatacatgctcacatgggagaaaagtctatacgtactcatctgaacatgtattctatatacataccagacatgtctacatgagtagacaaaatattaaaaactatatacagccaactattaacaatgatttcctctaggagatgagatttgacatctattaggggatatctctcctcctcagaaaagggaag

SEQ ID NO: 758459 - DNA, 621 bp, Homo sapiens
tagttaccactgtttgggaataaaggttaaattccttaacctggccttaaagaccacatgcaatgtgttggcatctacttctgtagcctcatctcctgtcaaacataatgttctctctacaattttgtcttgcgaatactttccatagttgttatttttactatttgattgattagtcaattaaatatatatttttctcattggagactttgagtttcctgatggtagggagaggtgatcttttttatatctcacataacaagcactgtgctttgcagacctcaagtacttaataaatatttgttaaatgaataaacagtttagtaggtaggcctgttttttaactgtgtattgagattgactttttaagaggtgcaataaaggcacaaaaaccataaatattaatgggcatgatttkaccttcaaggaaatcaagatctattagtaaatatgcttaaaaacagttaagattgaggggaaattttgcactaaggaagcagcaaatcttctcccggaacgtggtttgatatatagggcttgacagaagaagcttccgcttctgatctctgattttctggaggactcatatgtaaaatttctcaaacctttcagtattttctg

SEQ ID NO: 758460 - DNA, 621 bp, Homo sapiens
tagttaccactgtttgggaataaaggttaaattccttaacctggccttaaagaccacatgcaatgtgttggcatctacttctgtagcctcatctcctgtcaaacataatgttctctctacaattttgtcttgcgaatactttccatagttgttatttttactatttgattgattagtcaattaaatatatatttttctcattggagactttgagtttcctgatggtagggagaggtgatcttttttatatctcacataacaagcactgtgctttgcagacctcaagtacttaataaatatttgttaaatgaataaacagtttagtaggtaggcctgttttttaactgtgtattgagattgactttttaagaggtgcaataaaggcacaaaaaccataaatattaatgggcatgattttaccttcaaggaaatcaagatctattrgtaaatatgcttaaaaacagttaagattgaggggaaattttgcactaaggaagcagcaaatcttctcccggaacgtggtttgatatatagggcttgacagaagaagcttccgcttctgatctctgattttctggaggactcatatgtaaaatttctcaaacctttcagtattttctg

SEQ ID NO: 758461 - DNA, 605 bp, Homo sapiens
tttgaagcccacatattcacttttgtcctcccatatgtataactggccttgtctccttctgtagccactattttagttctcaattattctcagaaaaaaatccctgactaatttgattatactcactgccatacctactgaccttcagttttcttcttctcatcattttctttcttcttttttttcttttttgagatggagtctccctttgttgcccaggctggggtgcagtggtatgatctcggctcactgcaacctccacctcctgtgttcaagcaattctcctgcctcaggctcccgagcagctgggattacaggtgtgcgccaccatgcccagctaatttttatatttttagtagagacaggatttsgccatgttggccagactggtcttgaactcctgaccttaggtgatccgcctgccttggcctcccaaagtgctgggattacaggagtgagcaacagtgcccggcctcttctcatcattttcaactggactttcatactcaccactccaataaaagggctcttatcaaagtcaccagagacagtatttcacaaagcaaagggtcacttacctgttcttatcttttttctaagcataa

SEQ ID NO: 758462 - DNA, 558 bp, Homo sapiens
cagaaagtaagaacatgcaggggtctaaaaaaaaatttctgagggccatgggaagagaaattgtatataagtaagacccaggaatggagaaagaggcaagaggctacagctagaatctagacatctttgctagatgtaggaaataattgtaaaagataaaaaatattcaataaactaatgtattcaaagagattagcataatrgtagtattacctattttgtggctatagtatctataagcaccagtagtgtggatgagaaatttttttaaaataaccattaacaatagagatatttaaatatttgttttaggttcatcttagcagtgcttaacatttaaatgttaccatttaaatgatttttgagaaatccttgtacttttctccaataattacaaaacttgttatggcaacaatgcctttctggattagagaacacaaaaaacttattaccatgatattctttatattatttattgttccatattaaaactggataggctagacaggggctaccatgaatttgtgcagaaatgatatagtctgagttttcttatat

SEQ ID NO: 758463 - DNA, 630 bp, Homo sapiens
gctgaataatacatataaagtactcaaaaaagttatcagtcaatacacattagtcagcattttttaaatagaaaatatcatcttcaaataagagacaattttagcttccacaaggttaacaattgcaatgtattaaaatgcatcaaataagtaagtttaaatccatgtgttcatactgccatgttaaaaaaaatgatcacctttcaaagatgataggaaaaaaatcattatcttgaaaactggtaaatatctggcttttatcctgcctttcctatatgaacaatatcaytgggtaactaaataggagatgagagcaagtgattcctacagaattatttcaactaatatgtaaaaaaaaatatggattttgaatatcaccattttcaaccctcaattatttagtggatttatgcattttgcacctgttgaagaaaagcaactccacctacagtcctgctaaagtcatgaaggcctggctggattcagagagactgcaatctcgaattccaggctgtgggaaactacagttcgaatgggcccagtccctcaacaatgaattgtgtttttaaattaaaaaaaagaagagaatggtggatgaacatgtagactaaaaaagacacaaaagacata

SEQ ID NO: 758464 - DNA, 409 bp, Homo sapiens
ccttggcctggaccgtgtcccctgccaccccctggttcctgactgaccctctctcaggtcccaggtcctctgcaggaggttcctacaggagggatggtcaggctggaagctcgactggtgcctgcgggcctcccacttccctgctgggcctctgtctcctgccttcgtatgggggagaattgggcctgaccttcttggaactcaggggaggcatgagcagtcactctctctgcccccaggaggacctaaagatcaygcaccatgcagacaacaccctgaagagcttctgcaagtggcagaaaagcatcaacatgaagggggatgcccatcccctgcaccatgacactgccatcctgctcaccaggtactgcagccgcaggagggtgggagcctgcatctcaggaggtgc

SEQ ID NO: 758465 - DNA, 668 bp, Homo sapiens
aatatatcccttttccccacttgtgactgacccagggacctgctagggtttctgaggctggagcccagtcatgtgtcctcctcatgccgtatggcacatgtgaactctgtgtgcatgtgtttctgtgcatactagaactcacagaggagggcattcacatactaccccccaccctgccagttatttttcctccttggcatgagctgtgggtcatttgaagggctggattgtaactcaggttcttgatarggaggtgagggtaaacaccatcttggcatttctttggtagaagctccaaagtgacagttctgtcacccaggggagatattaaaagtatttaacacccaatgtggcaggagcttggtccaatcagaacagacctcctgacttggcagaatagatttggccatgaatctctggcagtcctcttgaatggtgcctgttgccatcccactgtcacttgaactctgcaggctcagctttgttgcaagcacataaccggtcgagactggaacctgcaattactccttgctggcactgggtggtgctagtttcagccaccaacatctctactgagtgaggtcaactaggctacagtgaaagttacttatttttaaacttacccctgcactttttaaaaatattttaatggcaaaacaatacaagtt

SEQ ID NO: 758466 - DNA, 580 bp, Homo sapiens
ccaggaggcggaggttgcagtgagctgagattgtgccattgcactccagcctgggcgacagtgtgagactccgtctcaaaaaaacaaacaaaaaaattccagaagaaagtttctgcttggtctggtctgggttggctgggtagctgggacgctaaaactgccaagccctctagtgtcatgtggttgaagyagggccgggagatgtattagtcagttcagggtgccatgccaaaataccacagatgggtggcttaaactgcaaacatttatttgtcacggttctggaggctgggaaatccaagaccaaagtgccagcaaggtaggtttcattctgaggcctcttctcttggcctgtaggtggctgccatattgtgcactcatgtgacctcttctttgtatttgtgcagagagagagtgagtgcaccctctggtgtcttgtcttataaggacactaatcctactgaatcagggccccacccttaggacctcattcaaacttaatgacttcctgagaggcctcatctgcaaatacagccatgcagagggttagggcttcaacatatgaatttggaggagacag

SEQ ID NO: 758467 - DNA, 570 bp, Homo sapiens
cttgctgtgtgactgaagtcactgccttttgtggcctctgattcctcatctgcacactggggtaacagtagtgccacctcctagggtgtgggattactcgtgttcccacacataagcgctgagaagagctcctggcacttgcatggtgatggtgggtatgtctgcatccttgggcaggcacgaggcctggcaccgggcacgagtccaggacgtctgtgtcccaggattcattgactgggaatgaacacaggcccaggcagtcctggtgatgactgtcagacctagtcggcaatgtgacaagtgtccagatgcagtctacagagaaatgtgcagctcgtgggtttcacatccccaggtcarggctccaattttcaataaaatgttaaggttatgatccacttgctcctaaccactggtcagtggcttaataaaaacaaaaccaaaagctgtcctgaggcctggctatggatttgtagcactaatgggtcagtcacactggtctctggggatcacaaaataggccagttcctccaacactggggccaccatcttcccctctctggattctgc

SEQ ID NO: 758468 - DNA, 619 bp, Homo sapiens
ataaaaatggattttacatttttaattttttttatgagatggagtttcactcttgttgcccaggctggagtgcaatggcacaatctcggctcactgcaacctccacctcccaggttcaagcaattcttctgcctcagcctcccgagtagctgggattacaggcatgcrccaccatgcccagctaattttgtaattttaatagagccagggtttctccatgttggtcaggccggtctcgaactcctgacctcaggtgatccgcctgcctcggcctcccaaagtgctgggattacaggcgtgagccactgcgcctggcctggattttacattttttaattgttgaaaaacttgaaagaagaataatattccatgacatgtaacataaagttcaaatttcaatgtggataaaataagttttattattacacagccccgagagcttatttattgtctatggttgttttcacactacaatggcagagatgaatagctgcaagagagaccatatggctggcaaagcctaaaaatatctacaatcctgcctttgatacaagaagtttgtcaacccctggttgacatacatacatacatgtatacatacataacatacatatacatg

SEQ ID NO: 758469 - DNA, 620 bp, Homo sapiens
caacagggtgaaaccctgtctctactaaaaatacaaaaattagccaggcatgttggcacatgcctgtaatcccagctactagggaggctgaggcatgagaatcacttgaacctaagaggtggagaggttgcagtgagccgagatcatgccactgcrctccagcctgggtgacacagactctgtctccaaaacaaaaacaaaagccgtatgtctaaataagtattaaaaattattttgataagcatacaataaaaattcagtcatgggctgggcacagtggctcatgcctataattccagcagtttgggaggccaaggtgggcatatcacttgagcccaggagtttgagactagcctgggcaagatggcaaaaacccatctctacaaaacatacaaaaattagctgggcttggtggccacgcctgtagtcccagctacttgggaggactgcttgagcccaggaggccgaggctgcagtgaaccatgatcgtgccactgaactccagtctgggtgacagagcaagactctgtcttaaaaaataaataaataaataaataaataagtaaataaaattctaagatatgagaaagcattgaagcatagtgtaattaatgatattt

SEQ ID NO: 758470 - DNA, 628 bp, Homo sapiens
cttacaatcatggtggaaggtgaaggggaagcaaggcacgtcttacatgttcacaggcaagagagagtgaaggaagaacttccaaacacttataaaatcatcagatcttgtgagaactcactatcatgagaacagcatggggaaactgcccacatgatccaaacacctacctccctcaacacatgggaattacaatttgagatgagttttgggtggggacatagagccaaaccatatcattcctccactcaccctttccaaatctgatgtctttttacatttcaaaaacattcatcccttcccaacagtttcccaaactccatttcagcattaattcaaaaatacacagtctgaagtctcatctgagacaaggcragtcccttccacttatgagcctctaaaatcaaaagcaagttagttacttcctagatagaatggcagtacaagcattgggtaaatgctcccattccaaatagcagcaatttgccaaaacaaagggcctacaggtcccatgcaagtccagaatccactggggtggtcattacatcttaaagctctgaaataatctcctttgattccatgtctcacatctggggcacactgttgagtaggctcccactgccttggg

SEQ ID NO: 758471 - DNA, 518 bp, Homo sapiens
caaatcaaattgcttcattctctttttgtggggatagtaaaatatgctatcatggaaaataggattcgtcctttgagaggcatgaaaaacaaattgcgtaacaattataaggcatggtatagaaatgctgcaaaatgcttttttaaatgactatcagttagaagaggtgcttacctgtggttaaatatagacttggcaattgatagactagagcaatagagatgacagatcaggggtgagagaggcaataaagagtagagttagcgggagaaaacagctggcaaaggtaaaaggggggatgttttcatggcgcaatcaagggggtggccaaggtccctggaggcaccttgactgagggacacagttygaatgaaattgaagaatttaaggacttgcaaaaacgtgcaaacattctgtcagggcagaaactgagaatgaatgcacacgccaacccaactatgcccttttccacaacacggactcccccagcttctcatcttagctccttctctggactc

SEQ ID NO: 758472 - DNA, 495 bp, Homo sapiens
gcacctgtaatccccagctactcgggaggctgaggcaagagaatcagttgaacttgggaggcagagattgaggtgaagtcgtgccactgcactccagcctgggccacagagtgagactccgtctcaaaaaaaaaaaagtaaagcaattttcagtgagctgtggcatataaaacaggcaatcatttatgaagytggagtaccagcatgaaaggttaagaaaatatagttttaaaaataatggtcccaaatttaccaaggttaataaaaactgtaaaaccacagattcaagaagctcagaaactctatatagaaaaataacaacaaattcaggagaatcacaatcaaatttctaaaaactagcaataaagagaaaagtcttacatgtagctcaaggaaaaggacatattacagaaagggaacagagttatgaatgagagcagacttatcaggaactaagcaagccaacagaaaattgggtgacactttcacagtatt

SEQ ID NO: 758473 - DNA, 619 bp, Homo sapiens
gaattccctttttctgctaatcaaaaattaacagctatctttctgtttcttcttgttgaaatccccctatcttttaaggcttaactgggaagaagttgtccctgactcccagctcctgtactcaagggatatgatttttctccactttgaacctccattgtacttaaaatgtaatagatgctacaagagacaatatagttagtttcatgttctagttgttggtacatttatcctttctaccctcataatgtgcaagggtgcctgttaaggtaccctgcagatagcttatgcagtaacaacgtgtggatagacagacagaagaaagcctttcctttccttgtattaatgtcaaaatacattccctctgtgaaagcagcagagctgaaggtgaattcaaggatcagtttctgatttgrtgctaatgattggatgattatttaatcaacagacaagtttctagaaactactatgtataagccactatcatagacaccttgagcatctctgttgtagtttgtgtggtttctgttagcttgctcttcaatatgtttcacatatataacttccttggaagctttaccagctattgcctaactttcttcatatatttatttgtcac

SEQ ID NO: 758474 - DNA, 602 bp, Homo sapiens
acatcatattcagctggctaaagagcaaagcaaaggaaacaatcttgaaggcattcagagaacataagacagaatacatacgaagaagaaacagaagaaacacggcagacttattttcagaatctatgtaaactgaatgaccatagagtgacacccttgaagtgytacaaataaaagccatcaacccacaatgatatgaacagtgaaactatcttttaaaattaaagataaaatgatatattttcaatacaatataaacaaattggagataatttactaatagcaggtaagcactgcaagaaatattttcaaaagtatttcaggcagaaggaatctttttttgataaaacttgagtttatacaaaaaatgatgtcttgaaatggctaaatcaaaagtaaaattgagggattatttttaatcactttaaaagatgattgcattttttaaagcagggattacaaactttttctgttaagggatagccagtaaattttatagcctttgtggaccatatggtttctgttgcaactacttacttctgctgtttcagtatgcaaccagctgcaaacaataggtgaacaaatggatatggctctattgt

SEQ ID NO: 758475 - DNA, 602 bp, Homo sapiens
acatcatattcagctggctaaagagcaaagcaaaggaaacaatcttgaaggcattcagagaacataagacagaatacatacgaagaagaaacagaagaaacacggcagacttattttcagaatctatgtaaactgaatgaccatagagtgacacccttgaagtgttacaaataaaagccatcaacccacaatgatatgaacagtgaaactatcttttaaaattaaagataaaatgatatattttcaatacaatataaacaaattggagataatttactaatagcagrtaagcactgcaagaaatattttcaaaagtatttcaggcagaaggaatctttttttgataaaacttgagtttatacaaaaaatgatgtcttgaaatggctaaatcaaaagtaaaattgagggattatttttaatcactttaaaagatgattgcattttttaaagcagggattacaaactttttctgttaagggatagccagtaaattttatagcctttgtggaccatatggtttctgttgcaactacttacttctgctgtttcagtatgcaaccagctgcaaacaataggtgaacaaatggatatggctctattgt

SEQ ID NO: 758476 - DNA, 667 bp, Homo sapiens
ttatagggtggcttttttggagatttctttattatggttatatatatatataacaaaatttaccattttgttataagtgtacaatttattgacattaagtacattcccaatgctgtgctaccatcactactatctattttcacaatttttaaattattaaacagaagttctgtacccattaaagaataactctcacataamccctagtccccagtaacttatatactacttcctgcctatgaattttcccttttaccttatagtctaccttatataagtagaatcatacaatatttggcctttgcatctggcttattttagttagaataatatattcaagtttcattcatgttgtagcatgtatcagaatcttcattttttatgcctgaatactagtatatatgatacattttatttatccttctatctgttgttgcatatttaggttttttctaccttttgactattgtgcataatgctgttctgaatcttggtatataagaatgtgtttgagtccctgctttcaattatttatgacatataaccaaaagtggaattagtggatcatatgataattatatgtttaactcctggaaaaactgccaagctgttttccacagaagctttatcatttttcattaacactagcaatgcataagtgttccag

SEQ ID NO: 758477 - DNA, 540 bp, Homo sapiens
tagaatctacttgcatttgatcaccctccagtgtcaatgattttttttttttttttttttgagacacagtcttgctcttgtcccccaggctggagtgcaatggcatgatctcggctcactgcaacatccacctcctgagttcaagctattctcctgcctcagcctcctgagcagctgggattacaggtgcctgccccgatgcttgcctaatttttgtagttttagtagagayggggtttcaccatgttggccagtctggtctcaaactcctgacctcaggtgatctgcctgccttggcctcccaaaatgctgggattacaggtgagagccacggtgcatggcctgtcaacgatgtttttctagtttgtctggaggttttagctgctatgtacaggagggttgggtccagtaggagctgcttggctataggagtgataactcttgtcctcattttttattctttcttcttccataactctgtgcagggaggaagaagagaagccagcagcagggctaggattggcctgggtctctggctcc

SEQ ID NO: 758478 - DNA, 540 bp, Homo sapiens
tagaatctacttgcatttgatcaccctccagtgtcaatgattttttttttttttttttttgagacacagtcttgctcttgtcccccaggctggagtgcaatggcatgatctcggctcactgcaacatccacctcctgagttcaagctattctcctgcctcagcctcctgagcagctgggattacaggtgcctgccccgatgcttgcctaatttttgtagttttagtagagatggggtttcaccatgttggccagtctggtctcaaactcctgacctcaggtgatcygcctgccttggcctcccaaaatgctgggattacaggtgagagccacggtgcatggcctgtcaacgatgtttttctagtttgtctggaggttttagctgctatgtacaggagggttgggtccagtaggagctgcttggctataggagtgataactcttgtcctcattttttattctttcttcttccataactctgtgcagggaggaagaagagaagccagcagcagggctaggattggcctgggtctctggctcc

SEQ ID NO: 758479 - DNA, 682 bp, Homo sapiens
atattcagatgtaaaacaatttgcccgcgcagctgcctcaaactccaagcccactaatcagctaaggattgtatgagggcctcagaagaacactagctcttgttcaggtatgggcgcttttcaaaatgcaggagcagcgtaacattcagagtttctttaagacaattatattctgatgctaattaaagtgtagtgttgttgaattttctctcattgctccacaggtataaggcatgtgccaagaatgaatgaacactaaaacataattgttctgaatttcatttttgtctttgaaacattttatagtacatatatagtttttactttttattcacgtatttattgaataatcattgaatatctattatgaactatgtatgataatrgaataaacagacagttcctgtactcaaatagtttgtgattttggtaatgaggaaaaagcccatactcttcagaatcattagagagtggtaaatgatactgcataactatttattttgttcaattaatatttaatgacttccgtttagttttcatgtccaactgatgaactgttgctacattgtcatagttttggaatccatattgatttcaagatagtttctatattttaggttctcttcatctaacatttacattatttcaaagtcctttttgatatcttccttctattgattcc

SEQ ID NO: 758480 - DNA, 592 bp, Homo sapiens
gccttccacctgtttctgctgtgttctttcctcagggatcccaacggcttcaatgactggaccttctccactgtgcgatgctggggggagagagcccgagggacctacaggcttgtcatcagggatgtcggtgagtctcgtgccctcacaccaggccctacctttcctgcttgttatctggtccctctgcatctcagagtccccacagaaagtgtcccgtgtgcaatatatagggttgccattggaccaagagagttgatgccaagagtgtgcccatccgtgaaatgggcattgctctctgaaactgttcatttatactacctctcatattccctggaggagtgacccatccatctttcctcaggatagcaacaaaaagtccttgtcgaaaccacatttcaagtccttttacgtataaccatccttcggcmagccccggtaggcaggtaagggcaggactcatttcaccattttttttaaactggcccagaggtttgaggtgacttgtggaaggtcaccatatcagtgaaggccacaatatccatgaattgtgaatatctttagtatcagcctatagactggaaattgagct

SEQ ID NO: 758481 - DNA, 617 bp, Homo sapiens
tcccaggacagcatggacaggcatggaccctcctgccctgtggctcctgccaggacccctcccctgagctgcccagtgggtgaaagtgggcagtggagaaagaaagtccagggtcaaacgggaaggtggcaccccctaccagcagaagcccagaaacacgagcagagccaggggcccctgcagggctgctgtgccccttctctcttcccaaataggagtgagcacacctggacctctgagagggcaggagggtggctcctctccactccacggacaaacaggagtggcctggctacataaatktgtgccatcctcactgctacctttggaatagcaacttcgaaagggaaccaccctttgggaaagaccaagggtcccaggcctgccccgcctatcactccaaagctcctccttggcagtacccgccccccacccctctgctacagtgggggtgacctcccactgtcagacagtggaaggggctgcttgtcagaaggacaggccttccgtctccactctttgcccctgactggaatacaagagttctgtggcccttcacattgtcacagggctatcgctgctgctcaggccctggggacccgccagagtgggacacc

SEQ ID NO: 758482 - DNA, 553 bp, Homo sapiens
atgagggtctatgttgccgaggctggtcttgaactcctgtgcttaagcaatcctcttgcctcagcctcccaggtcacactcttcttcctgtggacagacttgccagtggcctctttttgtgaatctagtaagtgtgataaagggatatatatatatataatttttcctacactggaaattcttagtcaaaakaaatcagtatttttatggattttggacatatttccaaattctcaacaaaagggctatatgctaatctgtaaggactccagcaatatattagaactggttttactgtacttgaacctgaattagatattaacgtttctctttctttctcttcctaatgttttaatttacactttttggaaacaaagttacacttcctatcatgtctactgaaatacttatatattagttcctttaggatatttttattgataatataaggtatctatgcttcatctataatatttactgcgtttattttccttagtctgctgctgagccttatttttctggttaatatgttttgatacgatttctattctat

SEQ ID NO: 758483 - DNA, 664 bp, Homo sapiens
cccggggagaattgaagtgcagcgccggcgggccggcactgctgggggacctggcgcaccctcctccgctgctggcccgagtgctaagcccctcactgcccggggcgggaggcgccggccggctgctctgagtgcgggcccaccaagcccacgcccaccagaactcaagctggcccacaagtacggcaggcagccccggttyccgctagtacctctccatccacacctccctgcaagctgagggagccagctccggcctcggcctgcccagaaaggggctcccacagtgcggtggcgggctgaagggctcctcaagtgtggccagagtgggcgctgaggccaaggaggctcggagagcgagcgagggctgtcagaacactgtcacctctcaatagcatttgagccatgtggtgtgggcctcccacccaattctaaatcccctacacagtagagccaatttctaccaaagctggatgtggaaaccagagtagttatagatattcttcccttacagttcataccaactttagaaacagttttgagttccctaagattttttttctgataacttccaagcacgggctgggcatggtggttcacgcctgtattcccagcactttgggaggtctaggcggacagatcacttgagttcaggagttcaaga

SEQ ID NO: 758484 - DNA, 664 bp, Homo sapiens
cccggggagaattgaagtgcagcgccggcgggccggcactgctgggggacctggcgcaccctcctccgctgctggcccgagtgctaagcccctcactgcccggggcgggaggcgccggccggctgctctgagtgcgggcccaccaagcccacgcccaccagaactcaagctggcccacaagtacggcaggcagccccggttcccgctagtacctctccatccacacctccctgcaagctgagggagccrgctccggcctcggcctgcccagaaaggggctcccacagtgcggtggcgggctgaagggctcctcaagtgtggccagagtgggcgctgaggccaaggaggctcggagagcgagcgagggctgtcagaacactgtcacctctcaatagcatttgagccatgtggtgtgggcctcccacccaattctaaatcccctacacagtagagccaatttctaccaaagctggatgtggaaaccagagtagttatagatattcttcccttacagttcataccaactttagaaacagttttgagttccctaagattttttttctgataacttccaagcacgggctgggcatggtggttcacgcctgtattcccagcactttgggaggtctaggcggacagatcacttgagttcaggagttcaaga

SEQ ID NO: 758485 - DNA, 619 bp, Homo sapiens
tctgtgttgtggcatgtaacagaatttccttcattttatggccgaatgatattccattgtatggatggaccacatttgtttatccatgcatttgttgatgcacactttctggctgctgtgagcattgatacataagtatctcagtcccggcttttagttgttctgagtatggatctaggagcagaattgctggatctgtagttatctcatgctcctgggctcctccagggcttgggatgagtctggggttaacctgaaataatgcccttgcttggcctcttcctctcccttctcctgggagcatttccttaacaaatcacttgcacttgaatccttggctcagggtctgctttgtggagcacccaacccaagacaatccagagaggcggtgaggcctcccgtgaagacaggagtgcggtctgtttgccccagtggaatgatggatgatgacccccattgaactygccctcgtcttccctgtctagtcgctaagacttgtactttgaaaaatagacaaaactacgggtgttttgcagaatgcttgagatcaggagaccctttgaaagggagcatccaggagcacatgttttcgctgattagttttgaattgtaaacattt

SEQ ID NO: 758486 - DNA, 667 bp, Homo sapiens
ccctgctggtcttgaactcctgagctcaagagatctgcctgccttagcctcctgaagtgctgggattacaggtgtgagccaccatacccggtctgttttaattgatcttttaaattatttttctactgtaatttatctctgctctactatttattatttccttctgcttgctttgacttactgtgctgtttttttctcgtttctttaggtggaaggttgggttattgatttgagatctctttttatttagtgtaagtatccacagctgtacatttccctgtaagcactgtttagcttcatctgtattttagtatattgtgttttcatttccatttatctcaaactatcttctaaattctcttgtgaatgcttctttgccctattggatactaaggagttcagtgttttattaacatattttttaattacccaaatttctttctgttattgatttgtaatttcattcaattgtggtaagagaacatactttgcatgatttcaatcattttaaatttrttgagatttattttatgacaacatcgggtttattctgtcagacattccacgtgcacttgagaataatgggcacaacaacctttgcagttgttggtggagtattctacagacgtctgccaagtctaggtgggttagagcctgttgacgtctt

SEQ ID NO: 758487 - DNA, 628 bp, Homo sapiens
ttgacaatattgacaatgcagctggtcacccaagagctctgatgaaaatgtataaggagattactgttgttttcatgcctgctaacacaacatccattctgcagcccatggatcaaggagaaatttcaattatcaagtcttactatttgagaaatacatcttgtaaagctatagctgccacagatagggattcctctcatraatctggacgagtaaattgaaaaccttctggaaaggattcactattccagatgccattcaaaacactgatgattcatgggaggacatacaaatatcaacatgaacaggagtttgggagaagctgatcttaaccctcaaggatgactttgaggagttgaagacttcattgcaggaagtctctacagatgtggtggaaacagcaagagaaatagaattagaagtggagcctgcagatgggaccaaattattgcaatctcaggctgaaacctgaactgatgaggagtgcttcttatggatgagcaaagaaagtagtttactgagatggaatctagtcctggtgaagattctatgaacactgaaatgaaaccaagggtttagaatattccataaacttagttgataaagcagcagcagaattggagaggac

SEQ ID NO: 758488 - DNA, 590 bp, Homo sapiens
aacaggagtttgggagaagctgatcttaaccctcaaggatgactttgaggagttgaagacttcattgcaggaagtctctacagatgtggtggaaacagcaagagaaatagaattagaagtggagcctgcagatgggaccaaattattgcaatctcaggctgaaacctgaactgatgaggagtgcttcttatggatgagcaaagaaagtagtttactgagatggaatctagtcctggtgaagattctatgaacactgaaatgaaaccaagggtttagaatattccataaacttagttgataaagcagcagcagarttggagaggactggctccaattttgaaagactttctactgtgggtaaaatgctatcaaagtgtcacatgctacagaggaatcttttgtgaaagcatcaattgatatgacaaacttcactgatgtctaattttaagacattgccacagccaccacaaccttcagcagccaccaccctgatcagttagcagccgtctacatcaaggcaagaccctccaccagcaaaaaggttaccactccatgaaggctcagataatcattagcattttttagcaata

SEQ ID NO: 758489 - DNA, 518 bp, Homo sapiens
ggtaattttctcttgtgatataatttagttttagggttttttttttgcttttcatcatatatatgatatatatatataataaacatatacatatatcatatatatgtatgttttccaattgaggttaccatgaagcttgcaaattctcttataacttattattttaatctgataaataaccacttattgtgtgcgtaaacaaacaaaaaaagaaaactgataaaaactcgatgccttaacatgtccttttgctttttaactttttgttgtttctgtttatatcttattgtactgtytatgccttgaaaagttattttttattagttcgtcatttagtctttctacttaagagtagtttatatctcacagttacagtgttataataatctgtgattttgtatgtagttactatttccagtgagtttttttttattattatacttaaagttttagggtacatgtgcacaatgtgcaggttagttacatatgtatacatgtgccaggctggtgtgctgcac

SEQ ID NO: 758490 - DNA, 587 bp, Homo sapiens
taggtcctctcattagcatacaaacgaaactcatcactcctgagatcctaagagttttaggaactgtatatcaggaaacttgaataaatactaaatatatgtttcacaatattacagtctacccccagtcctcaaacataaatctcttacarcaaaggaatcatgtaagtcaaaagataccaacatgatactagaattttatttattcattgataattagtccagtccatcttcatattttatgaaaatgtctcccaggggaggccactcaagtttacaggtttccatttgattttgtcaagttttgaagacaggagtggtcttggcgaacacattacttcaccctttcaggcatctggtattattgagctaagaggtaatattattctgttgctctgagcctcgttacataatcaatttattcattcctttactctcagctactattcctactacccattaatacccaaactttttcacaattggaagggacattaagatctgccaatatcctgatttagatagattacagacagcaatactagtctagcaagtaacttcctatcagtccactttcatttacatag

SEQ ID NO: 758491 - DNA, 638 bp, Homo sapiens
caagtaaatcaaattctctgatatttttactaaacatttctttggaaacttaacatttgaagcaatttttaagatatatgtacatcttccctgttattatcacatgatttgtttaatttttttatcattagttacctcaattctatgtttacactcaacttttccatttgtagtgtgctttactattctcagctctgtttactgcttctaaygctgttttggcacctaaaacctaaaaatctctactttcagccacttttaaagcatagtgctctttatctctgtcatttcatcagagagaacgtattaattttcagctgttaatttcttatccagttaacttaaaggagagaaactcatctttggtttcctctacgctggctgtacttataacatgcttctttatttgagatatttttcattcttcccagctatactgagggatattccagagccttcacacttgtgttttctgcttttgatgtagatattctatagaagcctactcttttttattcctactgaaatttttaaaatatatcttttatctgacagaagaaagttctttaatggaaatttacatggtgttttcatatctttttcctttaatgtgatattcatactctaaatttatatta

SEQ ID NO: 758492 - DNA, 602 bp, Homo sapiens
ttccattccattcccttccattggactcctttccattcgagtgcattccattccgttccatttctttccgttctgtacaattcctaccgttcgatttcattttgttccagtccattcctttcgcgtccattccattccatttcactccattcgattccattccattcgattccattccactcgattccacttcgttccatttcattgcattccattctattcacctctattgccttccattccattccattcgattacattccatgcgattccattcgaaattgaatcaattacattgcaatccattactattgagtccgttttattccagtccactgcattctggtccattccatttgattccattccattctattccattccatacagttgcattccattggattccatkctatatctataaattcaattcgagaccattgcttttgagtccattctatatgattccattccattcaagtccattacatttggttcaattccattccattccattcccttccattccattccatttgatatctatccattcgattccattccattcgagcacattccattcgagtccattccattcgatg

SEQ ID NO: 758493 - DNA, 521 bp, Homo sapiens
tctatccattcgattccattccattcgagcacattccattcgagtccattccattcgatgccattccatttgattctattccattagtctcctttcagttccattaatctccgttccattccattctactccaactgattccattccattctattcctttccattccatttcattccattccattccatttcattccattccattccattcgcttccattccgttcgtgtccattccactccagtccattccattcgtgtccattccattccagtccattccatttgtgtccactgcattccattccactccattccatattattccattacactccattccattctatyactttcatttccattcaattccattccatttgattccattccactcggtttcattccatttgagtccattccattccattccattccattccattccattccattccattccattcagttccattccattctgttccattccattccattcagtaccattccatattgttc

SEQ ID NO: 758494 - DNA, 593 bp, Homo sapiens
tggaatggaatggaaggcaatagagttgaatagaacggaatgcaatgaaatggaacgatgtggaatcgagtggaatggaatcgaatggagtgaaatggaatggaatggacgcgaaaggaatggactggaacaaaatgtaatcgaacggtaggaatcgtacagaacggaaagaaacggaacggaatggaatgcactcgaatggaaaggagtccaatggaagggaatcgaatggaatgaaatagaatggaatggaatcgaaaggaatagaatggaatggatcgttatggaaagacatcgaatggaatggaattgactcgaatggaatggactggaagggaatggactcgaatggaatggactggaatggaatgrattgaacggaatggactggagaggaatggactcgaatggaaaggaaacgagtggaatggaatggaatggaatggcttgaaatggataagaaatgaaaagaatgtaatggaatcggatggaatggaattgaatgtattggagtcgagtagaacagaattgaatggaatggcatcaaatggaatggaaacgaaaggaatggaattgaatggactcaaatgtta

SEQ ID NO: 758495 - DNA, 380 bp, Homo sapiens
atcgaatggaatggaatggaaggcaatagagttgaatagaacggaatgcaatgaagtggaacgatgtggaatcgagtggaatggaatcgaatggagtgaaatggaatggaatggacgcgaaaggaatggactggaacaaaatgaaatcgaacggtaggaatcgtacagaacggaaagaaacggaacggaatggaatgcmctcgaatggaaaggagtccaatggaagggaatcgaatggaatgaaatagaatggaatggaatcgaaaggaatagaatggaatggatcgttatggaaagacatcgaatggaatggaattgactcgaatggaatggactggaagggaatggactcgaatggaatggactggaatggaatggat

SEQ ID NO: 758496 - DNA, 619 bp, Homo sapiens
atggaatcgaatggattggaacgaaatcgaatggaacggaatagaatagactcgaatgtaatggattgctatgtaattgattcgaatggaatggaattgaatggaatgcaatccaatggaatggaatgcaatgcaatggaatggaatcgaatggaatgcagtggaagggaatggagtggaatcaagtggaatggaatggaatggaatggaattgaaaggaatggaatggaatcgaatggaatggactggaatggamtggattcgaatggaatcgaatggaacaatatggaatggtaccgaatggaatggaatggaatggaatggaatggaatggaatggaacagaatggaatggaactgaatggaatggaacggaatgaaatggacacaaatggaatggactcaaatggaatgaaaccgagtggaatggaatcaaatggaatggaattgaatggaaatgaaagtaatagaatggaatggagtgtaatggaataatatggaatggagtggaatggaatgcagtggacacaaatgaaatggactggaatggaatggacacgaatggaaaggactggagtggaatggacacgaatggaatggaatggaatgaaatggaatgg

SEQ ID NO: 758497 - DNA, 518 bp, Homo sapiens
atggaatcatatagaatggactcaaaagcaatggtctcgaattagtttatagatatagaatggaatccaatggaatgcaactgtatggaatggaatcaaatggaatggaccagaatgcagtggactggaataaaacggactcaatagtaatggattgcaatgtaattgattcgatttcgaatggaatcgcatggaatgtaatcgaatgcaatggaatggaatgcaatagaattgaatagmatggaatgcaatgaaatggaacgaagtggaatcgagtggaatggaatggaatggaatcgagtcgaatggagtgaaatggaatggaatggacgcgaaaggaatggactggaaaaaaatgaaatggaacggtaggaatcgtacagaacggaaagaaatggaacggaatggaatgcactcgaatggaaaggagtccaatggaagggtatcgaatggaatgaaatagaatggaatggaattgaatggaatcgaaaggaatagaatggaatggatcgttatgg

SEQ ID NO: 758498 - DNA, 526 bp, Homo sapiens
caatggaatgcaactgtatggaatggaatcaaatggaatggaccagaatgcagtggactggaataaaacggactcaatagtaatggattgcaatgtaattgattcgatttcgaatggaatcgcatggaatgtaatcgaatgcaatggaatggaatgcaatagaattgaatagcatggaatgcaatgaaatggaacgaagtggaatcgagtggaatggaatggaatggaatcgagtcgaatggagtgaaatggaatggaatggacgcgamaggaatggactggaaaaaaatgaaatggaacggtaggaatcgtacagaacggaaagaaatggaacggaatggaatgcactcgaatggaaaggagtccaatggaagggtatcgaatggaatgaaatagaatggaatggaattgaatggaatcgaaaggaatagaatggaatggatcgttatggaaagatatcgagtggaatggaattgactcgaatggaatggattggaatggaacggactcgaatggaatggactgg

SEQ ID NO: 758499 - DNA, 529 bp, Homo sapiens
aatccaatggaatgcaactgtatggaatggaatcaaatggaatggaccagaatgcagtggactggaataaaacggactcaatagtaatggattgcaatgtaattgattcgatttcgaatggaatcgcatggaatgtaatcgaatgcaatggaatggaatgcaatagaattgaatagcatggaatgcaatgaaatggaacgaagtggaatcgagtggaatggaatggaatggaatcgagtcgaatggagtgaaatggaatggaatggacgcgaaaggaatggactggaamaaaatgaaatggaacggtaggaatcgtacagaacggaaagaaatggaacggaatggaatgcactcgaatggaaaggagtccaatggaagggtatcgaatggaatgaaatagaatggaatggaattgaatggaatcgaaaggaatagaatggaatggatcgttatggaaagatatcgagtggaatggaattgactcgaatggaatggattggaatggaacggactcgaatggaatggactg

SEQ ID NO: 758500 - DNA, 529 bp, Homo sapiens
aatccaatggaatgcaactgtatggaatggaatcaaatggaatggaccagaatgcagtggactggaataaaacggactcaatagtaatggattgcaatgtaattgattcgatttcgaatggaatcgcatggaatgtaatcgaatgcaatggaatggaatgcaatagaattgaatagcatggaatgcaatgaaatggaacgaagtggaatcgagtggaatggaatggaatggaatcgagtcgaatggagtgaaatggaatggaatggacgcgaaaggaatggactggaaaaaaatgaaatsgaacggtaggaatcgtacagaacggaaagaaatggaacggaatggaatgcactcgaatggaaaggagtccaatggaagggtatcgaatggaatgaaatagaatggaatggaattgaatggaatcgaaaggaatagaatggaatggatcgttatggaaagatatcgagtggaatggaattgactcgaatggaatggattggaatggaacggactcgaatggaatggactg

SEQ ID NO: 758501 - DNA, 529 bp, Homo sapiens
aatccaatggaatgcaactgtatggaatggaatcaaatggaatggaccagaatgcagtggactggaataaaacggactcaatagtaatggattgcaatgtaattgattcgatttcgaatggaatcgcatggaatgtaatcgaatgcaatggaatggaatgcaatagaattgaatagcatggaatgcaatgaaatggaacgaagtggaatcgagtggaatggaatggaatggaatcgagtcgaatggagtgaaatggaatggaatggacgcgaaaggaatggactggaaaaaaatgaaatggaacggtaggaatcgtacagaacggaaagaaatggaacggaatggaatgcactcgaatggaaaggagtccaatggaagggwatcgaatggaatgaaatagaatggaatggaattgaatggaatcgaaaggaatagaatggaatggatcgttatggaaagatatcgagtggaatggaattgactcgaatggaatggattggaatggaacggactcgaatggaatggactg

SEQ ID NO: 758502 - DNA, 565 bp, Homo sapiens
accagttagaatggcaatcattaaaattcaggaaacaacaggtgttggagaggatgtggagaaataggaaaacttttacactttttgtggggctgtaaactagttcaaccattgtggaagtcagtgtggtcattcctcagggatgtagaactagaaatacaatttgacccagccatctcattactgggtatatacccaaggactataaatcatgctgctataaagacacatgcacacataagtttattgcagcactattcacaataagaaagacttggaaccaacccaaatgtccaacaataacagagtggattaagaaaatgtggcacatatacaccatggaatactatggagccataaaatgatgagttcgtgtcctttgtagggacatggatgaaattggcaatcaccattctcagtaaactrtcgcaaggacaaaaaacccaacgctacatggtctcactcataggtgggaattgagcaatgagaacacatggacacaggaaggggaacatcacactcttgggagagatgtggggtgcgggaggggggagggatagcattc

SEQ ID NO: 758503 - DNA, 554 bp, Homo sapiens
aatgtaattgattcgatttcgaatggaatcgcatggaatgtaatcgaatggaatggaatggaaggcaatagagtgaatagaatggaatgcaatgaaatggaacgaagtggaatcgagtggaatggaatcgaatggagtgaaatggaatggaatggacgcgaaaggaatggactggaacaaaatgaaatcgaacggtaggaatcgtacagaacggaaataaacggaacggaatggaatgcactcgaatggaaaggagtccaatggaagggaatcgaatggaatgaaatagaatggaatggaatcgaaaggaatagaatggaatggatcgttatggaaagacatcgaatggratggaattgactcgaatggaatggactggaagggaatggactcgaatggaatggactggaatggaatggattgaacggaatggactggagaggaatggactcgaatggaaaggaaacgagtggaatggaatggaatggaatggcttgaaatggataagaaatgaaaagaatgtaatggaatcggatggaatggaattgaatgta

SEQ ID NO: 758504 - DNA, 466 bp, Homo sapiens
  misc_feature 297: n = A,T,C or G
tcgaatggaatgcaatccaatggaatggaatgcaatgcaatggaatggaatcgaatggaatgcagtggaagggaatggagtggaatcaagtggaatggaatggaatggaatggaattgaaaggaatggaatggaatcgaatggaatggactggaatggaatggattcgaatggaatcgaatggaacaatatggaatggtaccgaatggaatggaatggaatagaatggaayggaatggaatggaacagaatggaatggaactgaaaggaatggaacggaatggaatggaatggaacngaatggaatggaatggaatggaatggactcaaatggaatgaaaccgagtggaatggaatcaaatggaatggaattgaatggaaatgaaagtaatagaatggaatggagtgtaatggaataatatggaatggagtggaatggaatgcagtggacacaaatggaatggact

SEQ ID NO: 758505 - DNA, 466 bp, Homo sapiens
  misc_feature 297: n = A,T,C or G
tcgaatggaatgcaatccaatggaatggaatgcaatgcaatggaatggaatcgaatggaatgcagtggaagggaatggagtggaatcaagtggaatggaatggaatggaatggaattgaaaggaatggaatggaatcgaatggaatggactggaatggaatggattcgaatggaatcgaatggaacaatatggaatggtaccgaatggaatggaatggaatagaatggaatggaatggaatggaacagaatggaatggaactgaawggaatggaacggaatggaatggaatggaacngaatggaatggaatggaatggaatggactcaaatggaatgaaaccgagtggaatggaatcaaatggaatggaattgaatggaaatgaaagtaatagaatggaatggagtgtaatggaataatatggaatggagtggaatggaatgcagtggacacaaatggaatggact

SEQ ID NO: 758506 - DNA, 519 bp, Homo sapiens
ccttcactacaattagtttctagagataaagctcacatttactgtgaaaacataagatggagttcaagtggaaatagaataagggaaggtgaattagcagcattattcccagcaatttttgctgtttctattaaaggcttttctatatacacgagtttatttttaagtgaaaataaactcttttcattatcatttaaagctataatttcctgaatgcttctggtttgtttggaaatgtctgacttgcggccctaactgacttcagactgttcacatccagtcagcagaccacccaaccagtagttracagtccttgccagggtattaacacggtctctacttgttcttggctgtgaatttagtttgctcaaacacatgtggattgtcaccaggtcagcctgtccatctgctctgtggcccaaaacaaaaattccaaagaagccagaccagatcacaggctagatccaaggttcttgaacatataatctcatagcccttggagattacatctaaatttcc

SEQ ID NO: 758507 - DNA, 598 bp, Homo sapiens
ttcaccaaatactttttaagcgcctaccatgtgcctgacaagggatatgtaacggtgagaaaaactaggtgtggtccaggcccttcagggactcaggggctcgtggaagaagtggatattgaagtacttatcacacaaakgaggataaaagtacgatagcgatatctaccacgaaggtgagcagacagagctagcggggcttgcaggaggagttttgatcttgcagggacaggaaggaggagttagctcctgcggggtgggattgggggtggtagtgatatagacgtggggacagagtggaaaacaacaaaaatataattattttagttcaaagttattgtgtcttgagttgaaaggcagggcagttagcaacacagtttagatttcagtactgcccctgaaatctgaactgtgttcaaagtctaaaacgtttaccttagcaaattcctcataaaactccatttggaagagtcccgagagcgaatttgttaagtatacttgcaaaaggtagatgaggagacagataaaatcttattacctctttcagatgagaggcacttaagccctgctcagctatgagaataagagaggggaatta

SEQ ID NO: 758508 - DNA, 634 bp, Homo sapiens
tttaatacctgtttttctccttctcttattccgtttagtttttcagttcatagaaaactgtatccaggccatcaccaataattctaaatgacaaatgtttcttctaacaaccctacaatatcaccccttaccacaaaatcttccttcagcttaatctctcccactctaggttcccatgccacccctaatccccctcgaagcagccctgagaaacatcgcccgttmtctctccataccacccccaaaaaattttcaccatcccaatactttaccactatttcattttatttttcttattactataagaagacaggaacgtcaggcctctgagcccaagataagccatcatatcccctgtgacctgcatgtacacatccagatggccggttcctgacttaactgatgacattccaccacaaaataaatgaaaatggcctgttcctgccttaactgatgacattatcttgtgaaattccttctccttgctcagcctggctcaaaagctcccctactgagcaccttgtgaccccgactcctgcctgccagagaacccccctttttcctttacctacccaaatcctgtaaaatggccccacccctatctcccttcgctgactctctttttggactcagc

SEQ ID NO: 758509 - DNA, 620 bp, Homo sapiens
acctttgtgtcccctgggtgttctagcccagtatatctcaaactttgctgcactgaggaccttgttgaaatgcaggttctcatctgcgaggctcagtgggccagcaaatcggcattggtttaggaagctcaccctgagtatcaagcttcagtgaggaccaggcaggcccctgcctgccaacgccctctcagctgggcttaactctggctctctcctgccagggttcctcccctcaaaataggagctattttcaaaaaatctctaggaaaaaaraccctgttttaaaattggggtgttcaggattggccatctgctcaccatggggttttaagacctttgcccagacccctgcaaccaacttagaactgacatctttactcttgaaggccccactccacaccatattaaattcattaaaatccacccccattacaggcatatctcaggcattacaccctcagaacggagttgcagctgaccacttgacagtgttgtaaagcattaaacatgcattcatttcagccttgcagtttgcacatttagcagccaattgtcttaggtctaaagcattcatgccgaagcatttttatgggccccagacactatgcttcccagcctta

SEQ ID NO: 758510 - DNA, 620 bp, Homo sapiens
acctttgtgtcccctgggtgttctagcccagtatatctcaaactttgctgcactgaggaccttgttgaaatgcaggttctcatctgcgaggctcagtgggccagcaaatcggcattggtttaggaagctcaccctgagtatcaagcttcagtgaggaccaggcaggcccctgcctgccaacgccctctcagctgggcttaactctggctctctcctgccagggttcctcccctcaaaataggagctattttcaaaaaatctctaggaaaaaagrccctgttttaaaattggggtgttcaggattggccatctgctcaccatggggttttaagacctttgcccagacccctgcaaccaacttagaactgacatctttactcttgaaggccccactccacaccatattaaattcattaaaatccacccccattacaggcatatctcaggcattacaccctcagaacggagttgcagctgaccacttgacagtgttgtaaagcattaaacatgcattcatttcagccttgcagtttgcacatttagcagccaattgtcttaggtctaaagcattcatgccgaagcatttttatgggccccagacactatgcttcccagcctta

SEQ ID NO: 758511 - DNA, 547 bp, Homo sapiens
atattcccattgcaatgctctattccaaaataaattcgttatttattttagagagcctctttctctttgtcatttaggttgacaatagtaaagtgttttctgagttgggcacggtggctcacacctgtaaacccagcactttgggaggccaaagcaggtggatcacctgaggtcaggagtttgagatcagcctggccaacatttagtttctacttaaaaaaaaaatatatatatatatatatatacacacaaaaattagccagccatggtggtgggtgcctgtaatcccagctgctcaggaacctgaggtaggagaattacttgaacctgggaggcggaggttgcagtgagccgagatcgcgccactgcactccakcctgggtgacggaacaagactctgcctctaaataagtaaataaataaatgtgttttctggtatgaaatgtaaggaatttggaagtcatcactcccatcctcaaaacaagaaaaaaagatggacatactgaaaatcaacaactcttcttagatctgtcagagaattaaggtt

SEQ ID NO: 758512 - DNA, 637 bp, Homo sapiens
ctttctttcttttttttttttttttttttttgagacagagtcttgttctgttgcataggctggagtgcagtggcaagatctcagctcactgcaacctccaccttctggttcaagtgattcccgtgcttcagcctcctgagtagctgggattacaggcatccagcaccacacccagctaatttttttcctatttttttgtagaaacgggatttcaccatgttgcccaggccagtcttgaactcctggcctcagatgatctgcccrcctcagcctcccaaagtgctgggattagaggcataagccaccgcacccagtcctattcatatatatatattctaaacagagccagagttttatggcatcctaaggaaacctagcagataacatgtagaattctctactcttcctctacttcaaaactgttgtgttactgccaaataaatcctgaaagtttacaaaatttcctactttctatgagacctgaaacacttaaaacacaactgagtaaatttcagagtaagtaatgcaaagacgactgctggaaataatgggatacaattagtaaaaatttaacttaagtaaaattctaagtaaaattttaacttatagcagaaatgatatcctagtgtcagatatc

SEQ ID NO: 758513 - DNA, 637 bp, Homo sapiens
ctttctttcttttttttttttttttttttttgagacagagtcttgttctgttgcataggctggagtgcagtggcaagatctcagctcactgcaacctccaccttctggttcaagtgattcccgtgcttcagcctcctgagtagctgggattacaggcatccagcaccacacccagctaatttttttcctatttttttgtagaaacgggatttcaccatgttgcccaggccagtcttgaactcctggcctcagatgatctgcccacctcrgcctcccaaagtgctgggattagaggcataagccaccgcacccagtcctattcatatatatatattctaaacagagccagagttttatggcatcctaaggaaacctagcagataacatgtagaattctctactcttcctctacttcaaaactgttgtgttactgccaaataaatcctgaaagtttacaaaatttcctactttctatgagacctgaaacacttaaaacacaactgagtaaatttcagagtaagtaatgcaaagacgactgctggaaataatgggatacaattagtaaaaatttaacttaagtaaaattctaagtaaaattttaacttatagcagaaatgatatcctagtgtcagatatc

SEQ ID NO: 758514 - DNA, 587 bp, Homo sapiens
ttggaatctttgtcatgaagtctttgcaagggctgatgtccagaatagtattccctaagttctcttctaaggtttttatagttttaggttttatatttaagcatttaatccatcttaaattgatttttgcatgtggtaaaaggtaggggtccagcttcaatcttctgcatatggctagccagttatcccagcaccatctactgaatagggtaaactttccccattgcttgttattatcggctttgtcaaaggtcagatagctgtagttgtgtggctttatttctcggttctctaacctgtttcattggtctgtgtaactgtttttgtaccagtacaatatygttttagttactgtagccttgtagtatagtttgaagtcaggtacttgtgatgcctccagctctattcttcttgcttaggattactttggctacttgggctcttttttgattccataagaattttagaatggcttttgctaatgctgtgaaaaacgttcttggtaatctgataggactggcattgagtctttaaattgcttttgagaagtatggccattttaccaatattgattcttcctatccatg

SEQ ID NO: 758515 - DNA, 536 bp, Homo sapiens
gtctctgtagactgtttttgccttttaccttgccttataattttttttgaaagccagacatgatgtaaatgtaaatgaaaccaaggtgaataggcctttaatgtgatatttgatattatctggctgggggttaggctgtgtttactggttgttgtagctatggtgtctcargctaaaatgtcctctaatgtcattgttttttactcccctgttttatttagcctttctgagggactctttaaatagggtttgtggcacagttcctttagctataatctgttattgcacaggaaccccactgatttgattgtaaggtatgagtgtaggaagggcattctatagttctacaattaggtctcagtcttttagtgagtctgaattggatattacccttcttccacatcaaaggccagagggggctggagtggaatatttctcttcctccagctgaaggctagagggaggtgaaattaggttttcctttcccaaaggtcagttagtctttggtaaaacaccagtttattctctgataaata

SEQ ID NO: 758516 - DNA, 544 bp, Homo sapiens
tcttattcaaacttacggtgatcctgttttccacttacagaaatgtactagttgtcttttttgtatttaacctgcatgatttgtaaataaatttactcgctaactatttggggattttgctatttatttttatttattttcttgaataaaaatctggttagtgaaaaaactagagttcttttagrgtattatgtggaagagggattcggagcctcaggatatcataaaatttgttgcactggaaagatttacctataaatgcatattccaatcatgaacaactagaagagacctagaaagcatcacaaatctcatttctaacaaaatgaattgaaaatgacctgagagaatagaacatagtgagataaaatgaacaaactggtatgaatagccaccaactttgatattattaaggctaatgtgatccctttttaaactgcttttatttcataaaaaatgaatcagttttatttcgtaaaatgaatgctccttcgatgtttttttgaaatcccaatttgccatcaatattgatcccatttactgg

SEQ ID NO: 758517 - DNA, 643 bp, Homo sapiens
cactgactgtttggcacctatcccagccagggtgagcttctactgctgcagaatcagaaaggaaaggggacattttacagcatggagactatgatgattaatattgactatcaacttgattggattgaaggatgcaaattattgttcctgggtgtgtcggtggaggtgttagcaaaggagattaacctttgagtcagtggactgggagaggcagacccacctgcaatctgggtaggcaccatctagtcagctgccagtgtagctagaataaaacaggcagaagaacatggaaggactagactgggtgagtcttctgaccttcatctttctcccgtgctggatgcttcctgccctcgaacatcggacttcaagttctttagcctttgggctcttgggcttacaccagtggtttgccagggsctcttgggccttcagccatagactaaaggctgcactgtaggcttccttacttttgaggttttgggactcagattggcttccttgcacctcaccttgcctatggtctattgtgggacttcattttgtgatcacgtaagtcaatactgcttaataaactccccttcatatatacatctatcctattagttctgtccctttagagaaccctgactaatacagagac

SEQ ID NO: 758518 - DNA, 560 bp, Homo sapiens
aggtgctgatggttctgaatgggcagaagaaataatatttgactgggtaccagaaaaattagaatcttcttccatctctggcaccgtctcatcgtgtagctttaatcaaattactcagcccttttgggtttattattgaagttggaaaaataaaagcattgcattagattttctttataaagttcctttcacactgtgatttgggtgttacctcttccagtggtatttgcattttgccttccaaaagatccctagaattgctaaatagtagaaaggagagctttattggcggtatcagtttgcaaactgtgaagagatagtcttcagcatggagcaaaggtgctctctcttcaaagagggaaagggcagttgggttttatgtctctcaggtccagcatcatgcaatagagtcctacacattgagsaggtttggggataaagttatacatatttatgaaggaagttgagcgcatgtgcgatgggtaaacatacatgtaatatacatcccacgttcactttgaggtggggtttcagcattaaaatgaggtggaatttggatc

SEQ ID NO: 758519 - DNA, 656 bp, Homo sapiens
tttttattgaagatatacatagatattcatactattttgaaatgccaattataaattagtacaattttcccaataatatatgggcattattgtgaaatgaaataccttttacctttaatatatggatttatggacactattgtgcccatatattatttagaaaaaatatagtaagtaaattttacatctactattacatccaaatgtggctaacaattcagaatgacttagataagcatcgttattttccagcaatattgacattgyttggctgttccaattgttaattttaaaacccaactgttatcagactaactatgatttaataaaactttggtaaatgtctaaaggagcctttcagtaaatatgatctaaggaaaaagaaatatacagaaatgaaataacttttacatttgattaattgaagtaagttgcaacatttttctgaattgcagttagctttcattttcagactttggaagaacaagtcatttgtaccaggaagtacatggtaaagaactatgtttggcaacttagagaacatttttagcatttgaatttccctatttatagtacagcatcaggcatagtaaaatgtttggcatttctataagggatgcaaatgccttaacattcactgttgtgatctaacaatt

SEQ ID NO: 758520 - DNA, 615 bp, Homo sapiens; identical to SEQ ID NO: 748590

SEQ ID NO: 758521 - DNA, 615 bp, Homo sapiens; identical to SEQ ID NO: 748591

SEQ ID NO: 758522 - DNA, 615 bp, Homo sapiens; identical to SEQ ID NO: 748592

SEQ ID NO: 758523 - DNA, 553 bp, Homo sapiens
tctgtttctgtttaagtgattattgtatacattcctccaaaataaagacttttctcaaaagaagacatacatgcagtcaacaaacatatgaaaaaaagctcaaaatcactgatcattagagaaatgcaaatcaaaaccacaatgagataccatctcacatcagtcagaatggctgttattaaaaagtcaaaaaacagatgctggcraagttatagagaaaaaggaatgcttttccactgttggtgggatggtaaattagttcaaccattgtagaagacaatgtgttgatccctcaaagaccctagaggcagaaatacatttaacccagcaaccccattactgggtatatacccaaagaaaagtaaattgttctattataaaaatacatgcacacatatgttcattgcggtactattcgcaatagcaaagacatggaatcaacctaaatgcccatcagtgatagactgggtacagaaaatatggtacatatgcaccatagaatactgtgcagccataaaaatgaatgaaaacatgtcttttgcagggacaggga

SEQ ID NO: 758524 - DNA, 509 bp, Homo sapiens
atgaataatccatatgtaaatgagttattggccttcttaacagcacttagtggaatccactgaagttgcaagaccagcctggataaaagacagctgcagctctcctcacactattttaattaacctttcctccatctaattatttttgtgaccagggggtccagtaaaaaggtaaaaacctgcagactataccatgatgccgctttaagtgacaataacaaaattcacggttttctaaaactgctagggtattttgaatgaccctggttcttatgctaagttsatgtttaattcttcagctttaaaaacattattattaatcatttgcacaacagaaaaatatgcctcttgtttcaaccagataggtcagtcagtaatcaacttaagccaagtcagtgacattaaaattctgttttaattccgaccacctgagggtcctctccatgagatgctttggcctggtcaaacttgtgtagttatgttaaatactggatcctgcgaagagaggg

SEQ ID NO: 758525 - DNA, 609 bp, Homo sapiens
  misc_feature 602, 603, 604, 605, 606, 607, 608, 609: n = A,T,C or G
cctaatgtggatctctgaactcattttactcacatcattgtgattgtgtaagaggtttaaatttgggaagtctgaataaaagatatacagtaatgttttcgtattttttaaagctggaaatgatttcaaaatgaaaagttaaaaaaaaaaatccaagcactactcttttgtggatagacartatgtccatctggttttgaacttggtaatttcatttgaatgtgatagtcctgtattttacagcacacttctaaccatgtttttacccacccagaagctgagagttcagactaggtgattaaattccatgatacactccacggatgcagtcatagtcatagggcaattaaaggcactcagaagcactggtgggccgggtgcagtggctcaagcctgtaatcccagcactttgggaagccaaggcaggtggatcacttgaggtcagaagttcaagaccagcctggtcaacatggtgaaaccctgtctatactaaatatacaaaaattagctgggtgtggtggcaagcgcctgtaatcccagctactcgggaggctgaggcaggcgaatgggttgaacctcggaggcgaggttgcagtgagccnnnnnnnn

SEQ ID NO: 758526 - DNA, 575 bp, Homo sapiens
gaatggatcccaacctagttgtccattccgagtggctggtctatgtcttgcttctaatcataccagcctctgtgagtaccactaaggtgggttcttccctgatagaggcctctattcccctcacaaatgaggtggctaaacctccaaaactgatgttcaggcccasgctgtggcaaaaccacccaatacagccactccatggacatgtgtttgtcagccgctggcttccccctgggctgttgcacgtccctcactggttatgcactgcatactctgggggtcatcacctagcaccccctgcacaaatgcactggcaacctatgcagcctcttcactgagttcccatttaagcatcaatgaatatattccaaaggtcctcagccattcctagtgctagggagcaaggagagttaaatcagggtctacttttggcccctcctgggctccagcagctgcaagagtgtagcccctggcctcaggaaccacacatagagggggagtgattccccttcactaccatcatggggcggcatagttggcattcccacgctatctttcacacagctccaggttct

SEQ ID NO: 758527 - DNA, 612 bp, Homo sapiens
attggccctgttcatcttcggtgtggctcagcaatggttccatgatttttttctccatccacatgggactgaaaactggcagatctagatattaacttggattgttcctatcaactctgaccttgacggctattgcaaccattaaatgcacagttggaaggtcaccttgtccaatctcctacccctgaaaaattccctcaacaatccctttagatagtaacttacatagcttctgtcctccacaaactcctttagtaactgccctactgaatcctgaatttttttgagaccatcatctcaattagctagatgctttgtggcaggattatgtttaatttaatcttaagcttcacyggtgccttactcattcttttaaaatgcctgtgatattaaaaaaatctttctaaagtatgtgagctctatatgtgtattaaaagaagtttaggctctccctgctgagaatggcagtcggattaatctgagatgggactaggctaatgagatgaggttgaatattcagatgatggtgggggttgcagccggaagccagatccagaacatggaagaacaggtccagcttgctaagccatgggaaagaagagaagatgtcag

SEQ ID NO: 758528 - DNA, 545 bp, Homo sapiens
gatcccatccacctctcctagctgaagtgcttcccaggccagctccatcctgttcttgggctcccaacgcccaagaaggcattgtggcatggtagaaagaacctgagaattagaatcggacaggcctgggtttaaagcccaactcaccacttacagccgtgtgatcttgggcaaatcacatggtctctttagccgtccatttcttcatctataaaatacctacttcttttctatagcagattcacatattttttccctggggcaagttctgaagtaaccaagtaagcaaaaaacaaagataagtaagcgtgtccttaataaatccatttgaggggtacacttggaacccccatatatgtcaggcaactttctctactggggtggcagatgtgatygaggcaggcaaggtccctgctcttatagagcctggcatctggtgcagggttccagtcagcacacatcagtgggtattaagcactattcaaagacctacatggtaataggaaatgacaaggaaagtcttctcccaggaggtgacatttcag

SEQ ID NO: 758529 - DNA, 704 bp, Homo sapiens
cgggtcttatttcttctaagtgtgtatttatagccattaatcaacctctttctccctttctccctgccacccttctcagctcctggtaaccaccaatttactctccatcttcatgagatccaccttttcagctctcagatataattgagaacatgggttatttgtctttctgtgcctggcttatttcacttaacayaatgacctccagttccattcatgttgctgtgaatgataggctttcgttcttttctttctgcccacctccttcttacaacctcgttcgttgtaatactgggcccacctgggtaatctggattcaccatctcatttcaagatccttaatttaatcacctttgccaagtcccttttgccatttgaggtagcatattcacaggtacaatggattaagctgtgggcatctttggtggggctggggttgggggtgttattctgtctaccccaagtgttatccattcaaggaagatttgttaacagaagacctagtcaggattcacatacgcatctgtccatgctaaaccagtatctaaaaccaacgtactagagtttcctgtaagtgatcaaagtgacaaacacagtgtttagtactctgggacccacccattaccagtctacattccagaccataggtcctggtttgagtttggaaaccttagtctttggatccaagttgtattttcatgtca

SEQ ID NO: 758530 - DNA, 568 bp, Homo sapiens
tggcctgatcacccacggcgtgcctctaccagcactttggttcttgtttttgacttgacttgaattgcttgatactttggttttggttttgacctggcttggatttctggatactccgattttagttttgattctggtctggtgtaaaatgaaaaagagtgtgtgtgccctttttacccgttctttgttctgtggtgtgcgtgtggtgtgagcgtggtgttttgtctccaggaaacatgggtcagatayaaagtaagcctactccgctaggagctatgttgaaaaatttcaaggaaggatttagtggagactatggggttactatgacagcagggaaacttagagctttgtgtgaaatcgattggccaacattagaagtgggttggccatcagaaggaagcctggacaggccccttacttctaaggagtggcacaaggtaactggtaaaggatacttagactagttcccatacatagactcttcgttacagctggtgctagaccccccacagtggctaagagggcagggagcagcaatgctagtagcaaagggacagatagctaagga

SEQ ID NO: 758531 - DNA, 668 bp, Homo sapiens
ctagaagtctggacgtctgaaacttggtaagactggtgtttggaacttgcccactccatctgagtggaagcgtggcctgatcacccacggcgtgcctctaccagcactttggttcttgtttttgacttgacttgaattgcttgatactttggttttggttttgacctggcttggatttctggatactccgattttagttttgattctggtctggtgtaaaatgaaaaagagtgtgtgtgccctttttacccgttctttgttctgtggtgtgcgtgtggtgtgagcgtggtgttttgtctccaggaaacatgggtcagatacaaagtaagcctactccgctaggagctatgttgaaaaatttcaaggaaggatttagtggagactatggggttactatgacagcagggaaacttagagctttgtgtgaaatcgattggccaacattagaagtgggttggccatcagaaggaagcctggacaggccccttacttctaaggagtggcacaaggtaactggtaaaggatasttagactagttcccatacatagactcttcgttacagctggtgctagaccccccacagtggctaagagggcagggagcagcaatgctagtagcaaagggacagatagctaaggaaggatcctgctccactcgcccagggaaa

SEQ ID NO: 758532 - DNA, 528 bp, Homo sapiens
tttacagactcagtgccactcctattaaacaaccattgacttttttttcacaaaactagaaaaatctattttaaaattcatacggaaccaaaaaaaaaagcatgaatatccaaggtaattctaagcaaaatgaacaaaactagaggcatcacactacctgacttcaaactatactatagggttatagtaaccaaaacagcatagtactggtacagaaacagacacatataccaatggaacagaatagagaacccagaaataagtcwgcattcctacaactatctgatctttgacaaacctgacaaaaacaagaaatggggaatgtattccctattcaataaatggtgctgggctaactggctagccatatgcaggagactgaaactagaccccttccttacaccatatacaaaaattaactcaagatgggttaaagacttacatttaaaacctaaaactataaaaattcttgttgataacctaggcaatatcattctggacataggcgtggacaaagatttcatggtg

SEQ ID NO: 758533 - DNA, 661 bp, Homo sapiens
tcacaaactaactatctgctgccttcaagagactcatctaacacatacggactcacataaacttaaagtaaaagagtgtaaaaggcatttcatgcaaatgtacaccaaaagtgagcaggagtagctattcttacatcagacaaaacaaactttcaagcaacagcagtgaaaaaagacaaagagggacattatataatggtaaaaggccttgtccaacaggaaaatatcagaatcctaaacatatatgcacctaacactggagctcccaaatttataaaacaagtactaacagacctaacaaatcttaacaaattttaamaaatgagatagacagcaatataataatagtggaggacttcaatactacactgacagcactagacaggtcatcaagacagaaagtcaacaaagaaacagtggatttaaattatacctcggaacaaatgaacttagatatatacagaacatttcattcaacaaccacagaatacacttctattcaacagtgcatggaacttcctccaagatagatgatatgataggccacaaaatgagcctgaataaatttaagaaaattgaaattatatcaagcactctctcagaccacagtggaataaaactggaaatcaactctaaaaggaaccttcaataccatgcaaat

SEQ ID NO: 758534 - DNA, 661 bp, Homo sapiens
tcacaaactaactatctgctgccttcaagagactcatctaacacatacggactcacataaacttaaagtaaaagagtgtaaaaggcatttcatgcaaatgtacaccaaaagtgagcaggagtagctattcttacatcagacaaaacaaactttcaagcaacagcagtgaaaaaagacaaagagggacattatataatggtaaaaggccttgtccaacaggaaaatatcagaatcctaaacatatatgcacctaacactggagctcccaaatttataaaacaagtactaacagacctaacaaatcttaacaaattttaaaaaatgagatagacagcaatataataatagtggaggacttcaatactacactgacagcactagacaggtcatcaagacagaaagtcaacaaagaaacagtggatttaaattatacctcggaacaaatgaacttagatatatacagaacattycattcaacaaccacagaatacacttctattcaacagtgcatggaacttcctccaagatagatgatatgataggccacaaaatgagcctgaataaatttaagaaaattgaaattatatcaagcactctctcagaccacagtggaataaaactggaaatcaactctaaaaggaaccttcaataccatgcaaat

SEQ ID NO: 758535 - DNA, 647 bp, Homo sapiens
gtcaccatttggttaagtttatgataatccactgtcattctccaggatccatctgtcttctgcacaggccaaatgggagagttgaacagggatgtggtgggaatcaccaccccgcgtttttcaagtccttcatggtggcaggcagtaatctccacaatccctccagggatacagtattgtttttgatttattattcttctaggtagaggcagctctaatggcttccatttgtcctttcctgccataatagccctcaccctaccagtcagggagccaatgtgggggttctgccagctactaagtatgtctcagccaattatgcattctggcaccggggaaattaccacagatgagtccaaggtgataaatactttgcatggttggggcaaagttctctagaaagccacgtwtgctttaaatcatcgtccaatacatggtgttgtttctcccgtaggtaggattcacgggtccatgagtcaaggggtagaagttgaaatggcaccactcaccgccacttccatttccactccaacatattgaaaatatgtgatgggcttgttgaagtactaaagctgtgttcattcataacataataagaaatgactgcagtttataaaatcaaagagagacttttgagaccagaaaac

SEQ ID NO: 758536 - DNA, 552 bp, Homo sapiens
ctaatttttttgcatttttagtagagacagggtttctccatgttggtcaggctggtcttgaactcctggcctcaggtgatccgcctgccttggcctcccaaagtgctgggattacaggcgtgagccactgctcctggcctatgtcttcacctcttgttcctgcttcccttggtatgcwaactgaaggctttctccacatggccggaaggatggctgctggccattggtgatccaaaaggaagagaggcctggtctgttaaagcaactgtccccagtctttttggcaccagggaccagtttcgtggaagacaatttttccacaggtcaggacggggtggggggtctgatagtttcgggatgattcaagtgcattacatttaatgtggacttcatttctattagtattacattgtaatatataatgaaataattatataactcaccatcatgtagaatcagtgggagccgtgagcatgttttcctgcaactagacggtcccatgtgggggtaatgggagacagtgacagatcttcaggcattagattctcataa

SEQ ID NO: 758537 - DNA, 631 bp, Homo sapiens
tctctgtagttcatgcgagattcagttccaccgaatccctcaagtactttccctaggcttctgttacttactgtgtcactcccaactcccttgcaacatgtgcttttggaattggctttttggaggcaagattagttaggcggatgtcaccccaaattggtagaagttgaaatcttctgatgactgggcttyggtgcagtaactggtgtttgccaagtttttgctgtgtttgaaactttgaaataggtaccttacagtggactgggtgagatcttaaggatagggagtctgccctggaggagttttttcagtctgtttttgaggaaataaagacctgaaatgagttaccaaaccctgtgtcaggatgtaagatgaagcggaggcactgtcagcttgtataggtcagaaggaaaaaagcagtgaatgagactgctcgggagagggctgagagaggatactgttggtgggagaaacgacagagagtgtaaaacagtgtttcccaaactttagtcatttgcacacgtccttcatggtttttaccatgttacgtatctcctgtgctaataactacctaatatttttcttcaaattgacctgcttaaaaaaaaaaaaaagaaaaggctaggtatga

SEQ ID NO: 758538 - DNA, 631 bp, Homo sapiens
tctctgtagttcatgcgagattcagttccaccgaatccctcaagtactttccctaggcttctgttacttactgtgtcactcccaactcccttgcaacatgtgcttttggaattggctttttggaggcaagattagttaggcggatgtcaccccaaattggtagaagttgaaatcttctgatgactgggcttcggtgcagtaactggtgtttgccaagtttttgctgtgtttgaaactttgaaataggtaccttacagtggactgggtgagatcttaaggatagggagtctgccctggaggagttttttcagtctgtttttgaggaaataaagacctgaaatgagttaccaaaccctgtgtcaggatgtaagatgaagcggaggcactgtcagcttgtataggtcagaaggaaaaaagcagtgaatgagactgctcgggagagggctgagagaggatactgttggtgggagaaaygacagagagtgtaaaacagtgtttcccaaactttagtcatttgcacacgtccttcatggtttttaccatgttacgtatctcctgtgctaataactacctaatatttttcttcaaattgacctgcttaaaaaaaaaaaaaagaaaaggctaggtatga

SEQ ID NO: 758539 - DNA, 542 bp, Homo sapiens
cttatattcagatctttacaaagtcatttccacctgctactgagggtctaatggacacacttctctgtccagtctcagaaattggcatgtccgtccttccggttgctcagccagactccttggagcttttctaatgcccctgtcgaagcatcagcaggccctgcggctgtgccatcagaaggcgtggaggcctgcygcgcctccctctgttgctgctccaaggtcggctcagcactcttcactgcctagattttcacagtggccttctaacccatcaccatggccactttcaccctcgtaccctagtctctaccccgctgccaggatcgtccttcaaaaataggaatgagatcctgccaggcccctgctcagaatcgtccagcggctccccacggcaggtccctcgtgtggggtgcagagccctgcgcagcctgggccctcacttcacccggccttacctcctgctgctcactcctttctctccagctaagccacactgggccccttgctggtgaccgtgcccacccccctcggggactttg

SEQ ID NO: 758540 - DNA, 603 bp, Homo sapiens
gatcattagcatttaggatcttttatttatcatttaaagaactttatactcaaaacagttctggaagtattattactattgttaaacctcttatatttgcaactccacatctctgaattgcctcagccaagaattttcttgtcctttcttttcttctttctcatstctctctgatgttccttaacccctgccccttagactaataaattaagttcccagtatgtggaggtgctgtctattcctgagctgtaatgaatgtctcctcattaatcaaagagcaaagatcctgatggagatgtccccttttctccatgaaccaggtgtcacaatgctatgtcagaggcttgtactaggtcttcaatttctatttcttgtccatagcacccaagtaaaatccacaagaaaagcacaaacattatataaacaataaccaaaatgaaatcagtgagaataagagtctattctggtttcataaatttaaaaacgttaaactatgttctttagagcaatgggagtcctttagtaattactctttatctatgtatttcacctattacacataaggttatgaaatttctttgaaacgctgaaaaatacaattag

SEQ ID NO: 758541 - DNA, 601 bp, Homo sapiens
aagatccaaataagcataatcagaaatgacaaagggcacattaccaccaactgcaaagaaatacacaaaaccatcagagactacaatgaacacctctatgcacacaaactgacacaaactggaaaacctacagaaaatgaataaatttctgtacayattcaacctcccaagattgaactaggaagaaactgaatctctgaacaggccaataatgagttccaaaactgaatcagtattaaaaagcttaccaatcccaaaaatcccaggaccagacagattcacagctgaattccaccagatgtataaagaagagctggtactatttttactgaaactattttaaaaaattgaggaggagggattcctccctaactcattctctaaggccaacatcatcctgatacaaaacctagcagacacacacaaaaaaacctcaggctaatgttcttgataaatatagatgaaaaaatcctcaacaaaatattggcaaactgaatccagcagcacatcaaaaatcaaattcaccatgatcaagtaggcttcatctctgggatgcaaggttggttcaatatatactagttgataaatgtgattcatcata

SEQ ID NO: 758542 - DNA, 591 bp, Homo sapiens
atagactctcttttatgtattaaatagaatttactaaagactaaattcatacactattatagttctcctgaactggtgaacaaattggaggatcctattagatttttgctgagaggtcctcaggtatttcctaacactatttgaaaagtaaatgggataaaatgggttcatttaatatttcaattccaaagaaattaaattaatgttagcaatgttagttcaactatttttctgctacagggaccatttgttttaaaatcattaaaggattttaaatgacactgtcctgacatttggtgtgattaaattaagggaattagtataaagacattttgtctstccttagctttctaaatgaatagtacatcttcctaagtagtaaaaaggaattactgacctatttctgtatttatattgacttgcatatgtgtttgttgactttctaaacatttaggcatatcactgcttcaattcacaattgtcccttcatagattccaacaagcttgcttaattccttggaaaggcagcattgtatggtgctaaggatataggatttagagcttaagacatgtatgtgagatttgatagta

SEQ ID NO: 758543 - DNA, 533 bp, Homo sapiens
tgtatagtgatgtgttaattgaagaggtagcagcaaactttgttctttgcagtcactcacagttaatgtaccctggtaactgaaatttgaaccatattgtcgggagtctagtgttatttaactaaaccatggtaactgaaataacagtacaaaataagaactgcctttactaagttgaacaaaktggtttcaggcttttgtacttaatttatttcttcatgaaaatgtgcccagtggctcattttttaaataatagtgacaggtgacaatgtgctggcagccctcgcttgctctcgctgcctccttggcctgagcgcccactctggctgcgcttgaggagcccttcagcccgctgctgcactgtgggagcccctctctgggttggccgaggccggagctggctccctctgcttgtggggaggtgtggagggagaggcgtgggcgggaactggggctgcgccctggtgcttgtggaccagtgcaagttcccagtgggtgtgggctctgcgggccccacacttgagcagctggct

SEQ ID NO: 758544 - DNA, 632 bp, Homo sapiens
agtattcacattcaactaaaatttaccgaaccttcatattagttctaggaatatagttgttatctctactttataagtgaaggaaagaatttcggcaaatttaaggagcttgactgaggaacatgactggtacattttagaactgggatatgatctgtcattttctaacccacatcacattgagatagaaggttctgtatccaatgataattcataaactaagaatagataatatttattgaggtcttatataagccaagtactattctaagttctttacatgtggtatttcatttggtccttataagaactctatgaggcaaatgctattatttccagtagtgcatagatgaggaaattgaggtwcagtgaaggcaggcatcctgacaatgatcataaaaacgataggtggcataattgggaccctggttccagagttcaccattgtgtttgcttcacattatctctgttagtatccactgtctaccaagggaggcagcaaagactgggatccttcttagaactttccttctagaatacaagggaacaatagaaagaataggaagaaaaagttttcataactttctggggagatttttctatgtatcttgtcaatcacattataagaatga

SEQ ID NO: 758545 - DNA, 627 bp, Homo sapiens
tttatcattgctcatttattttatcaaatactgcacattcaatagtctcagagtagcagtgctaatacaaccaccaatttgatttctgaaactgttagcattgtagtgcttttgttctctctattctctgttttttagagttgttctatacctacattgcctgaggatatagtcatttcacactattttctctcccccttggcctttatttagtctcagtgccacaagtaactatatatttatgtaccmgcagtccttatgtcaatgtctctctagtcactttgcttgtctaaaggttgttttcttatagattccttagtaagggctcatgggaacaacatttctatagttcttgcatactaataagagtttgcctatgtcctttgaacttgaaaatctctttggttggataaaaaaaaaatccttggcacacaattgcattatcttgaatatcttaatatgttactgcattttcttctggcacaaagtattacagttgaaaagtctgatgataatataattttcttttctttgtaagtcatatgctctttattttctaggtgcccaaagattttttccttctttctttcttttataagaaacatcatgtaactttactggaatatg

SEQ ID NO: 758546 - DNA, 617 bp, Homo sapiens; identical to SEQ ID NO: 743884

SEQ ID NO: 758547 - DNA, 617 bp, Homo sapiens; identical to SEQ ID NO: 743885

SEQ ID NO: 758548 - DNA, 679 bp, Homo sapiens
atgtggagtcaccactgtaaggaatctttaagttctccaccatggtccgcttctgacattttataatacagaataatacagaatacagttcaagtacttaatgtctagctattcaaaaatgtttggcttatttgaaaatactctgttaagaggtgtgtgttgatatggttagaactgaaaaacagcagtggaattaataatacrtatagttctggtaattaactgagcatagttatttattcaaatgagatctacttagtttttgccttattatagctaagagataaccttcttcagtattatagatgtgaattgaatagttttcaatttcttagcttgttaaaggcagaggaacttttagcaaatttcaaacagaatcttgcatgtttctaattagtcttaaaactataagtataagcagaatctcagttatatttaggacattcattgaaatttgcactttatctaaaacagtaggatttttaaaaatcaaacatttcattagaaacctagaattcagaatggctgtttttttaatttaaaagttttagtgcttttaaataaaagaaaatttatataaaatagtttataatgaaaatgctaagggaatgatgttgtaaaccatttttataaatttgagaataatattcattaaatgttttaaatctataaaacctta

SEQ ID NO: 758549 - DNA, 575 bp, Homo sapiens
ctctggttgaaaaattattcaactttgtaggcaggaaaagctataataggctattgtttatattcaatattctttcttcttttccccttccccttcctcttcccctttcccttccccttcccttttccctttccctttccctttccgtttccctttccctttccctctcctctcctctcccctcccctcctctcctctcctctyctctttttttcctcactctgttgcccaggctagagtgtagtggtgtgatctcggctcactgcaacctccgcctcccgggttcaagcaattctccctgcctcagcctctcaagtagctgaaattacaggcacctgctcccacacctggctaatttttgtatttttcagtagagacagggtttctccatgttggccaggctggtcttgaactcctgacctcaagtgatctgcccgccttggcctcccaaagtgctgggattacaggtgtgagccaccgcacctggcctcaatataacttttttatgaagaatctaaaaagactaaaaaaataaaaacttcttcaaattgataaactgtggcatatgggcaagt

SEQ ID NO: 758550 - DNA, 535 bp, Homo sapiens
gatactgaaatttttagaaacctattctgaatccgtatttgtggaaattagtgtttggggcattgggcttcagtcttcattttagcagataattaaatttatgagacataaaaatagaacatgttgatatcaagtaagaggaaaatgtgaatttcagcagtaggagctcgaggttttgtttgatatacctggagggagggttgagggtatttkacatgtatataccctaaacctaatgagtcaaataattatctttaatttgtaattaatacattccctgattaaggtgagtagtatgaatgaaagtggaaaactgaacgcagccgtaagtatcacacatgtctcagaaatgcagtagaattttgcttttggaaggaataatagacaaaattaaatttctttattttagagaggagcaaagtgaggcccaggaaggcataagggtaacatctcagtcattggtggaattgggaatataccccaacatttaatccattagctcttatagctttctctcaataatagcatgtacttt

SEQ ID NO: 758551 - DNA, 632 bp, Homo sapiens
tggcagttttgtccagtgcaatggttcacacctgtaatccgagcacttagggaggctgaggtgggtggatcacttcagatcaggagttcaaaaccagctggccaacatggcaaaaccccatctctataaaaagacaaaaaaaaaaaaatagctgggtatagtggcacacgcctgtaatctcagctactcaggaggctgagacaggggaatcacttgaacctgggaggtggaggttgcagtgagccaagatcacaccattgcactycagtctgggctacacagcaagactctgtctcaaaaaaaagaaaatggcagtttttcctgctctctctcctgctgccatgtaagatgtgccttgcttctcctttaccttttgtcatggttgtatgtttcctgaggcctccccagccatgcagaactgtgaatcaagtaaatcatttttatttataaattacccagtctcaggtagtatctttatagtaatttgaaaactgactaatacagcagacatataagagaaaaatcaacaataaaaaaagttttgcctggaaaaaataatgaatctctttataattgcataattatagtacagatgttcctcaacttatgatagggttacatcctgataagcc

SEQ ID NO: 758552 - DNA, 589 bp, Homo sapiens
tcagagataaaacattttttgattcagcaggttggaaaaactctttgtagaatctataaagggatatttcagagcccattgaggcctactgtggaaaattgaatattctgcaataaaaactagaaacaagctatctgtgtgaatgctttgccatgtgtgggttcatcttacagaattaaacctttgtttggtttcagcaggttgaaaacattctcttaatagaatctacaaagggatgtttcaaagtacattgaaggctatactgaaaaacctaatagcagtgattaaaactagcagcaagctatctgtgaaaatgctttytgatatgtggatttgtctcacaaacttaaatctttgttttgattcagcaggttggcaacactctttttgtacaacctaggaggggaccttttggagctcactgaggcctatagtgaaaaaatgaatatttcaagataaaaactagaaacaagcaatatttgaaaatgcttggcagtgggtggattcatctcacagaggcaaacctttatattgattcagcacgttggaaacactctttttaaagagtctacaagaggacattttggag

SEQ ID NO: 758553 - DNA, 517 bp, Homo sapiens
ctccccactcaagcaggctccagtgtctattgatcccatctctgtgtccatgtgtactcaatgtttagctcccacttataagtgagaccatgggctatttggttacctgatgctgcatcaatttgtttaggataatggcctccagctgcatccatgttgcttcaagggccatggtttctttttctacggctatgtagtattccatggtgtataattaccacatttttgttatccaatccactgctgatgggcatcatatatgccacttcaaactatactaccaggctacagtaaccaaaatagcatagtagtggtacaaatacagacacatakaccaatggaataggttagagaacccagaaataaattcacacacatacaaccatgtgatctttgacaaagtcaacaaaagcgagcaatgaggaaaggactccctattcaacaaatgattctgggataactggctacccacgtgcagaagactgagtctgggccccctacctttcaccatatacaa

SEQ ID NO: 758554 - DNA, 471 bp, Homo sapiens
ataatacacagataaatcccctttgtaacaagtacagaggtgaatttaaagactctggattccctggtaggcttcaagccaggcacatctaaaccaacaggtaaatttgttgcactcactcatcatccctcagcagtacaacacaatagagagaaagctccaaactcccagctcatctctaggaagagaaataaaagtctagaccatatgtccarcattttgactttttgggagggcactagcacctatctatgctgaatctaagtgctaaaaggaaaggatgccagattgcatgcctgctgataaagccaccgtttggactgtcactcaatccaccatcattcctcctgtgactcagtataacaagattgggagaatactctacagttcctgattcccccacagaagtgaaagagaatgctgaaacacacattcagtgttcagacttcaggggagtttccaagtgattgt

SEQ ID NO: 758555 - DNA, 516 bp, Homo sapiens
cacaggccgcaaatcgctctaaatgaacactgcagattctacaaaaaggatgtttcaaaactgctctatgaaaagaaaggtttaactctgtgagttgaatgcacacaacacaaagccatttctgtgaattcttctgtctagttcttatgagatgataatcccttttttaaggamggcctcaaaatgttacaaatgaacacttgcagattctacaaaaagactgtttcaaaactccaccagcaaaagaaaggttcaactctgtcagttgaatgcacacatcacagagaagtttctgggaaagcttctgtctagtttttatgtgaagatatttcttttccaatgtaggcctcaaagccctccaaatgaacacttgcgtattctacaaaaagagtgtttcaaaactgctctatcaaaagaaaggttcaactctgtgacttgaatgcttacatcacaaagaagtttctgagaatgcttctgtctagattttatgtgaagatatcccgattccaacaaatt

SEQ ID NO: 758556 - DNA, 598 bp, Homo sapiens
cttttatattcatttatttatttatttacttttttttttttgagatggagtttcaatcctcttgcccaagctggagtgcaatgtggcagtctcggctcactgcaacttccgcctcctgggttgaaacggttctcctstctcagcctcccaagtagctagaattacaggcatgctccaccatgcccggctaatttttgcatttttagtagagatggggtttcaccatgtaggccaggatggtcttgaactcctgagctcaggcaatccacccgcctcggcgtccaaagtgctgtgattacaggcatgagcaccctcggctgtcctattttattttaagatggagtctcgctctgtcgcccaggctggagcgcagtggcacgagctcggctcactgcaacctctgtctctgggattcaagcgattcttgtgcctgctcctcacaaatagctgggattacaggcgccagccaccatgcctggttaattgtttatttttagtagagacggggtttcaccacgttggccagactggtctcgaacttctgacctccagtgatcctccgcctcggccaccaaaagtgctggaattacaggcgtga

SEQ ID NO: 758557 - DNA, 598 bp, Homo sapiens
cttttatattcatttatttatttatttacttttttttttttgagatggagtttcaatcctcttgcccaagctggagtgcaatgtggcagtctcggctcactgcaacttccgcctcctgggttgaaacggttctcctctctcagcctcccaagtagctagaattacaggcatgctccaccatgcccggctaatttttgcatttttagtagagatggggtttcaccatgtaggccaggatggtcttgaactcctgagctcaggcaatccacccgcctcrgcgtccaaagtgctgtgattacaggcatgagcaccctcggctgtcctattttattttaagatggagtctcgctctgtcgcccaggctggagcgcagtggcacgagctcggctcactgcaacctctgtctctgggattcaagcgattcttgtgcctgctcctcacaaatagctgggattacaggcgccagccaccatgcctggttaattgtttatttttagtagagacggggtttcaccacgttggccagactggtctcgaacttctgacctccagtgatcctccgcctcggccaccaaaagtgctggaattacaggcgtga

SEQ ID NO: 758558 - DNA, 479 bp, Homo sapiens
agcagtgtccaggcactcccattcctcctgagagaagtctataaacagatcctggaacatgcccaacccctgaaatgacaaacccaggcagcactgttgaaattaaaggaaaggtttttaagatgaaggaagagacggaagggtgctgaaggatggagagaatatagtgagcagactggctaggctgagagtggggaagagtaaaaaaattagtgtaacttcaacagagtacctccacgttcatgaatattcctgttgtagccrgcaaacttccttcatagaatgggacattcccagtattccatggttacagctgggaatgaataaagtatattgatatattatttcctaaataagtgaaatagagtagaaaagcacacagaaagctgtaggcctggcaaagcttcaagaatattacagtaaacatctgatatgcaagttactatttacaacaaaagcttaataaataggcacttccc

SEQ ID NO: 758559 - DNA, 631 bp, Homo sapiens
tttctaatcaggttttttgttgttgctgagttgtaggagttccttacattaatatgttctagctttcagtcccttatcagatgctcattgatttttaagagtgaattgtagataaactagtatagatcacctcttaagatggattaatttggggaagattgctgtctttctgtatgctatctacataataattttttattttcttgttaggcttttggaatattctctttttgggtttactcacagtgtgtatgctttactgtgccttattttttcttttttccctcctgggtgctgagtaatacttagccctattctacttttatttcttactcttcctcacattaattgmaatgtaactcttccctaactacactcacgactgtcgcttctgcagtccattcactgggtgcttcctgtatacacacactttcataggaaataaaaatggcctcagtttttatttttcctgttttcggctatgtatgattcttctctgtgtgtaattttatcatctgaagttagtgcttatctgtctgagaaaatctgttatgtcggattactgctgttagtactcattttcccagtgaaccaatttctgtcttcactgataactttagtacctgattct

SEQ ID NO: 758560 - DNA, 578 bp, Homo sapiens
ataactgtaatgttgtctctggagccagccagtaaagcagcatttacaagttcatggctaacatactcagctgcgccttcatagaaactcttagtgtctgattctttttcatttgttgccacatcatttacactagttgggtctgtcagttactttttcactgcaaggtttacgatgagtcgtttctgctggaaatgtttctacatttctcagggttataaatacagtatttagaatagtttgaatcggataaattttctttggaatttgtagttgacacacgtacttcagatacagatttatactgaaacaatacgtgkatattactctgtgatttagtaaggtttggttcactggttgaaaaaagcagaggccctttggatggtgatttgttaggtatgataggacagtatgtttctttatacatgtgaaatgttgtcattgccagggcagtaacttcctctttatccaaaacttcccaaagtccattagtagctacaataaggaattgacataggtcatctatagggacagaaatagtttgaggtgctgggataatggattttttcagcttgaga

SEQ ID NO: 758561 - DNA, 643 bp, Homo sapiens
ttctttgctactaatagttgaacaagggtagtagaccagttgtagcagttacattttaaaagaaggtagttacataagagaagtattttcacatatacacacaaaggcaggcataatcaattaaaagtataacattttacagtgatctctaaagtaaaaacacttcacatttcctgagaagcactgatatggcagggggagcagggggaagaggaggtagaggtccattgtgttatgccacaacagagttcaagtgaaagcagaagcaaaagaaaattattcaacactactacaaactttagttttctggataaatctgaattaacaaatatgagtcaggtgtaaaacatcatttaggattaaatccattaaaagtaacacattataaggtatgagaatttaatggcactaggaaaggacagttacactattataagaaacattcatttttaggtaaattttcaaaacctaaatggttattattytaaacctaacagacatatttttggagaaacaccaccccaccctcaaaatccattgaaaactatggcagcaaaactggggcttctgaaaatcaaactacttctaaaatgggctgaccactggtactaaagactgctgaccaactttggtaagagaggat

SEQ ID NO: 758562 - DNA, 597 bp, Homo sapiens
ggaggaacaaactccggacatgccgcctttaagaactgtaacactcaccaggagggtctgcggcttcattcttgaagtcagtgagagcaagaatccaccaattccggacataagatggcggcaggcgcctgtagtcccaggtactgyggaggctgaggcaggagaatggcgtgaacccgggaagcggagcttgcagtgagcctagattgctgcactgcactccagcctgcgtgacagagcgagactgtctcagggaaaaaaaaaaaaaagaactggtcacatttttctggttttttgttgagtaagtttgaattgtattctggacttttcgaatatcaaattgtgtggatataagtcctatcaaaattctctaggggatgttattattactttatcattttagcaggcaatcactccagtaagcttcagacggcatgttttaaaaatcactttctgtgggcagtgttccaatctcagttcagttttcaaagtgtagtgaatgctgctttgggtctgttcaacacacatacttctaagaagttagtctgagacttgggtggtggtttacatattagttcaattctcaaacctttgcta

SEQ ID NO: 758563 - DNA, 616 bp, Homo sapiens
ttaaaagacagaaacttgttttatataatatacattagagccagaatttgaactaaagccctctggtcaaagagctggtgatcttaactacctcctcattataaaacttgatgcaaggtggttgaccgttttagccccttaatgattacagaattgaatccaatgagtgaagtgccatattcaaggcatacagattggaaaaagacagcaaaaagaactccagagtcttgactctcagaacaagtttgtttttctcctgtcgttagtttgactcatattattggccttccattgctttcctcaaattatctacatggcagtgtttacaaaactaaggttcctatgattattgaagagcaaatgggtgcttaggaagaaayccaagggactgttcagtgacattgttcattataagactgagaaatcagaagaagctcagcaaaatacagtcgtattactgactctttgagctaataattgttagactgtgagagtctttagaatgtagaaagaaaactttctacagtttttttataattctgatattttaaatggtattcaaggcaagactataccttgacagtgaaatcaaagaagagaaggcaagaaatgcata

SEQ ID NO: 758564 - DNA, 563 bp, Homo sapiens
aaaggagagtagatgtctgcagaagatggcagggccttgcttcataatcctagaggcctccactgagactcacgtatcacgacctgccaaaggcttcaaacagcatctgtatctgtcactgatacctccagcaccattggatctgctgggtcatatggcccaagtgtcagaaaaacttgcacagcagcctgggcctgttacagagccttctcctgttccggacccctctcaaaactggcagcattttggttcacttgataaataggccrgagtaacacacccaaatgaggaatgtgttgcctccaaaatccaaataggcccactagacgttgtaactctttcttggttgtaggaggggccaaatgcagcaacttatctttcaccttagatggaatacctcgacaggccccacaccactggacctctagaaattttactgagatagagggttcctgaattttagtcggatttatttcccatcctctgtcaagcaaatatctcaccattaagcccagtttgttttctgcttcttgctcactggatccaatcagcattatgccatc

SEQ ID NO: 758565 - DNA, 525 bp, Homo sapiens
acctatattttggaatttttggaaggtcctggatctttatgtatttaacaatcttctaggaagatttgaaaattattgttccagaccaatttaattctattaaaacacctgttaaatgttctataatgtggtggatttcaacttggctgaaaatttgaatctccttggaaagttttcaaaattgggttttgaatatatatatatacatatatatatatatatatatatatatatatayatatatatatatatatatatatatgtatatatatatattcttgggttcacctctagaaatcccgatttaattgattttcagtaggactctggcactagtaatttgtctaggtggttttaatgtgaagcctgttctgagaaccactggtctaggaactgttaccactcacattgctaaatatttcctgtcatccctatccccaaaattggccacaagcctgtttaatgacaattgccttttgcctcggattaggatacacccaggtgtatcgtgccgtagagtctagt

SEQ ID NO: 758566 - DNA, 633 bp, Homo sapiens
tatacactagaattaggagaaggaaaaaaggttaaatatatatacagactctaagtatgcttacttagtcctccatgcccacgcagcaatatggagagaaaaggaattcctaacttctgaggaaacacctatcaaacatcaggaagccattaggagaatattattgggtgtagagaaactaaagaggtggcagtcttacacttccggggtcatcagaaaggaaaagaaagctaaatagaagggaacctctaagcggatattgaagccaaaagagccacaaggtgggaccctccattagaaatgcttatagaaggaaccctagtatgggrtaatcccctccaggaaaccaagccccagtactcagcagaagaaatagaatggggaacctcaagaggacatagtttcctcccctcaggatggctagccaccaaagaaggaaaaatacttttgcctgcagctaaccattggaaattacttaaaatccttcaccacacctttcacttaggcatttgatagcacccatcagatggccaaatcattatttactggatgaggacttttcaaaactatcaagtagatagtcagggcctgtgaaatgtggcaaagaaatattcaccgtcacttcaggccata

SEQ ID NO: 758567 - DNA, 649 bp, Homo sapiens
aatatatataattagcattttttcaattttggggaatattgattatgagtagttagggtactctagaaagcagatacttaaaacaattttttctcaggacaggtctttgaactataattttgatgaataattttattaggatagatacagaaacaaataatagttttactgaggtttctgttgttcaccctagtactgtagtatgtactcctttgaaatttatttgaattcacatgaaattaatttgagtgaattaactgaaataaaacttgtcttttaccgtaatagccaataagaaatatartattaacaatagacccagccgggtgcagtggctcacacctgtaatcccagcactttgggaggctgaggagggcagatcacctgaggtcgggagtttaagaccagcctggccaatatggtgaaaccccatctttactaaaaatacaaaaattagccgggcatggtgatgggcacctgtaatcccagctactcgggaggctgaggcaagagaattgcttgaacgtggaggcagaggttgcagtgagccgagatcatgccattgcactccaggctgggcaacaagagcaaaacttgtgtagtcaatatttatttatgtctacccatatatttaccattttacttgttc

SEQ ID NO: 758568 - DNA, 623 bp, Homo sapiens
cttctaccattaacagaatgttggtgcctcctgaaacttcatatgttgaaacctaatccctgatgtgatggtattaggatgtagggtcttcaggaggtagttaggtcacaagggtaaaaccctcatgaatgggattagtgcccttctaaaaaacggccccagaaagctcccctgttccttctgctgtatgaaaacacagcaagaaggtactgtctatgaaccaagaggagaggcctcaccaaaaaatgaatctgatcgcacgttgatcttagacttggcaacctctagaactttgggacataaattcctaytgtttataaaccaacgagtatggcactctcttttaggatcctaaagggactaaggcaatttcctttgagggtcttgtaggttctcttgcaataaatgtcactcttgcaaagtctgtggacagcctgaattttctcaacacatagatgcttgatgttttttgcctgcctgtccaaacaatttgttctctacatttgatgtccaatatatttactagttcaagcctcgatatcaattttggaggttaaatttgcagtatatggtgcaaagtgcattcttatatttagattcaagttttttgaattgttaaactc

SEQ ID NO: 758569 - DNA, 614 bp, Homo sapiens
tcccaacattatacattataaattcattccataaaatattctttattatttatttattaaagatattaaatatatactgaagatcaaaatatgctaagaaaattcaggtgatgattttttaaattgtaacatatggaaagacttccayagcatggcaccaaagcaagaagtgagaaagcagaaaacacacttatgtgtttaaatacaaagatttacccttcataataaaaaataaatcaataaagaaataaatacctcaaaaaatagcacaagaattgcatgagtacttcttaattagaaaatacccattttcatatatgatcagaaaaacacaaattaaaagaattaatgagattccattgttactcttatgtaacagatatagaagatttttatctccagtattgataaggctatgaaagacaatcgatttaatatattgtttttgagtttatagataggtattacttttacaaagggtcatctgggaatatagctcttaagtacgtgtgtcatgtacttaagtttcattaaacatgaaacttctgtgtaatttgtttagtatgagctcatggagatctaatactcataaacaatagagttaactgtattag

SEQ ID NO: 758570 - DNA, 641 bp, Homo sapiens
atatatccttttattcataacttaatgaataaatgaattatatgaataaattatatgaatatatgattttaccccaaaaacatgtctttaacctaggcacgtatgatggatagattttcagttctaaagaaagctctctattgcctgtacaaatcgtagctgagtgatatccacagggcactaaatgttgtaactaaccttcatttccctacatccgctagattttagcaatggtgcctaataagagttagttgtgtttgttccccaacttggtgttgcctcttttcttgatgttataatttataattatgcattaattatgtatcataaaaacctatgatatatggctttgaacgatttttttttttggtgaagggttgaatgccttgtgaaggtttgatgaaagcaagtcacttagaaatgctrtcagattaagtacaggtaaggaaaccataagaaagagcattgccctttaaagtaattattttgttcaacctatttcacaatatgctgaaagagcctactatattgctcaatatttactttatagatgcattcaacttttacccaagttcaataccagatcctcaaaggatttataggtagcatttaaggaatgaatcagctacttggataccaga

SEQ ID NO: 758571 - DNA, 566 bp, Homo sapiens
ccacagtgcccttttagatttttatagattgacacaaatgacatgactagggcttagggaccagccagaaacttgctgcaaaggtgacttgaaacttaacccaagattgttggctaagaaggtttatatgttctctgtttctgatcaaggttgatcctgagatcaggagtttgggctgcgactgctgggaactagcctgagtcatacactgggccaacattccagygttatcttcagttagtttccttagtcatactccaaccacattgagacatactctccttgtcctttaattgtttataatttaattttcttctgcttgaaattttgtccattataagctattttcatatttgtgagaaaatgaaatcacagaatttcaaaattttggggacgaagatatacaaccttccaccaaatccagttttctggtaagcatttactgctcttatcctttaagatctaaacttaaaactgtattttctcggaagcctttcctcattctttcagctgctgtcattcttgcctctattcaaatctatgatgcttcatttgcactttttgtt

SEQ ID NO: 758572 - DNA, 522 bp, Homo sapiens
agggctgctgcttgcccatttttatggttatttcttgattacatgctaaacaagggattgatgatttatgcctcccccttttagaccatatagagtaaatttttgatgttaccatggcatttgtaaactgtcatgttgcggagtgtaacagtgagaacaacaagaggtcactcttgtcggcatcttggttttggttggttttagcctgcttctttacrgccaactgttttatcagcaaggtctttatgacctgtagcttgtgctgacctcctatctcatcggtgacttcagaatgccttaactgtctgggaatgcagcccaacaggccttattttacctagcccctattcaagatggagttgctgtggttcaaatgcctctgacaaaactatgtgcgacaaacggtgctgtcaagttctcttacctgagaactaattgtttatcttaggaccacatatataatgggttgaaactgcatggctctataaatgttggtgagactcctttctgtctgcaatctct

SEQ ID NO: 758573 - DNA, 646 bp, Homo sapiens
tttgctgcttagaaatttcttctgccagataccctaaatcatctctctcaagttcaaagttccacagatctctagagcagggcaaaatgctaccagtctctttgctaaagcatagcaagaatcacctttgctccagtactcagtaagttcctcatctccatctgagaccacctcaagctggacttcattgtccatatcactatcagcattttggtcaaaaccattcaacaagtctctaggaagcttcaaactttcccacatcttcctgtcttcttctgaggcctccaaactgttcccatctctgcctgttacccagttccaaagttgcttccacattttcaggtatcttaatagagtaccctagtctactggyaccaatttactgtattagtccattttcatactgctatgaagaaatactcgaaactggttaatttataaagaaaaagaggtttaatggactcacagttccacatggctggggaggcttcacaatcatggtgaaaggtgaaggaagagcaaaggcacatcttacatagtggcagcaagacagtgtgtgcatgggaactgccctttataaaaccataagatcttgtgagacttattcactatcatgagaatagcatgggaaaacccacccaaacaa

SEQ ID NO: 758574 - DNA, 646 bp, Homo sapiens
tttgctgcttagaaatttcttctgccagataccctaaatcatctctctcaagttcaaagttccacagatctctagagcagggcaaaatgctaccagtctctttgctaaagcatagcaagaatcacctttgctccagtactcagtaagttcctcatctccatctgagaccacctcaagctggacttcattgtccatatcactatcagcattttggtcaaaaccattcaacaagtctctaggaagcttcaaactttcccacatcttcctgtcttcttctgaggcctccaaactgttcccatctctgcctgttacccagttccaaagttgcttccacattttcaggtatcttaatagagtaccctagtctactggtaccaatttactgtattagtccattttcatactgctatgaakaaatactcgaaactggttaatttataaagaaaaagaggtttaatggactcacagttccacatggctggggaggcttcacaatcatggtgaaaggtgaaggaagagcaaaggcacatcttacatagtggcagcaagacagtgtgtgcatgggaactgccctttataaaaccataagatcttgtgagacttattcactatcatgagaatagcatgggaaaacccacccaaacaa

SEQ ID NO: 758575 - DNA, 512 bp, Homo sapiens
acacccgagtaatttttgtatttttagtagagacggggttttgccatgttgacaaggctggtcttgaactcctgacttcagatgatctgcctgccttggcctcccagagtgctgggattacaggcatgagccaccgcgcccagtctaactaaaactttttaccctgtaatcaacatctcttaatcctgactccacttgagcscctcacattctctttgattctgtaagtttgactttaaattctacatatcagtgagatcatacagtaattctctctgtctggcttatttcattaagcataatgtactccggatttatctatgacgtagcaaatgacagaattttattctcttttaaggctaaaatttctttgtgtgtgtttgtgcatatatctctttgaaatactgatttaatttcctttggagacatacacagtagtgaaatttctaggtcatatgatagttctatttttaattttctgaggaacatccataatagcttttccataatag

SEQ ID NO: 758576 - DNA, 512 bp, Homo sapiens
acacccgagtaatttttgtatttttagtagagacggggttttgccatgttgacaaggctggtcttgaactcctgacttcagatgatctgcctgccttggcctcccagagtgctgggattacaggcatgagccaccgcgcccagtctaactaaaactttttaccctgtaatcaacatctcttaatcctgactccacttgagcccctcacattctctttgattctgtaagtttgactttaaattctacatatcagtgagatcatacagtaattstctctgtctggcttatttcattaagcataatgtactccggatttatctatgacgtagcaaatgacagaattttattctcttttaaggctaaaatttctttgtgtgtgtttgtgcatatatctctttgaaatactgatttaatttcctttggagacatacacagtagtgaaatttctaggtcatatgatagttctatttttaattttctgaggaacatccataatagcttttccataatag

SEQ ID NO: 758577 - DNA, 646 bp, Homo sapiens
atgagttacagctgcagcgacaatattttccaaaactagccatcacagtattttcagtctcatatgcgcaacctcaaccttaccacactcccatttagagtttgagtctatttttcttccccttgaacccaggcaagactttgtgactccctcaatgaatagactataatgaaagtgacgtagggtgattttaaagttcatcaaaaaaggcaacatgacttccacttggctctctctttwttggggtatttctcctttgaaacccagctaccatgtttaagaaggcccaggtgatgtggcaaggtcacaaggaagtgttgtaacagacatccctagcttaggttcctgctaatagctagcatctgctagtaatacgagagatttcagatgatttcagcctccattctatttttttttaaaagtttttaaggctacaagagaagcactagggttccactagagaaaagggaagatggggagtatgttgccactgtagatttcacaactgattcaagcctccactctttaagccactacagctagtttaatagaacagagacaagttgctgagtctgcaaaattgcagaattatgagcaaaataaatgttgttaagtcactatattttgtagtggtttattacacagc

SEQ ID NO: 758578 - DNA, 646 bp, Homo sapiens
acagagtcttgctctgtcacccaggctggagagcagtggcatgatctgggctccctgcaacctctgcctctgggttcaagtgattctcctgcttcagcctctcgagtagctggaactacaggtgcatgccaccctgcccagctcatttttgtatttttagtagagacggggtttcactatgttggccaggctggtcttgaactcctgacttcaagtaatcccccacctaggcctcataagtgctaggattacaggcatgagccacttaatccattctctctgacaacaaagcttctggtttttgcacgcagtgccactctggtaacaaactacagatcttatcgaccaagcatgtgggtacatgtgtattggcaagaaggccacagacttccgctgcttttacctgaagctctatcaatttttcaggaaaaaatatttcccaatgtgtgttttttttttaatctttggtgaatttccagagccctgatgtaatgttyttgacaatacattccagttttatacttgctttttgcagaaagatctgcctacctcttcaaaccaacagagccaggagtctctccatctatgattatctgaactcatctttaatataaatacctgtattactagtcccatattacagata

SEQ ID NO: 758579 - DNA, 601 bp, Homo sapiens
aaccttcacctgtcaggagaatccaagagtggttagaactggctctctgtcctttactttgtaaattctgcatggcataatctggcactggaatccacctttaatttaccttggtggctcactggaaacagcttgaaaattttacagataatatatggcctagagaggtcaaggatcctatggagagatcctatttgagaagacagaccaaacagttcagagacagaaacaaagacttgcctctatctgacatcttctggggccctagatctagcacttacttggaactgtaagtgcctctatgacctctcatataataaccctatttagcctctgttgatttgcattargtttctattacttttgactggaaggaatccttcttaatgcccccattcttttccacatagcctatgagccaggtcaaccagacccatctctgacttctgaatttaccccatgctttcctctctccacttttttgtttcaatatttccttttcagggaatactcactcccttcactccactgcatatagccccttatgcagcagagaggaataattactactttcatgcttgtacatgagtggggaactcat

SEQ ID NO: 758580 - DNA, 714 bp, Homo sapiens
caggcaccatgctgatgtttctgaggtcaggttgatgaaatagaatggaacttcagatttagtgttaaaagccatgagggccaaacttgcactctttaaatctgtcacgtttagcaactatcagcaggaaaatgaactttccattgtctcgttgagacaattaacttgttttcattgtcccagagtactttcctccctccttccagccaaaccctatctacattttagtctcttccccctagaaaacttccccagaacactgcagcccagagaaatcttcccctcttctacacttccatcatttgttttctacaatacttaatagaaattaatcttcagtgctttgtttcrgttcttacattattattattatattcttattattatcatttaggttgcttgatacttttaactgtttaacttttaatgtagtcatgctttgtctcctcaatcaaattattagttcctcaaaggaattaaagagctctaccacagtacttcaataacttatccttttgtcatattaatgtattttatatttatttgtttatttctaactctccttactagaatgtaatctctaagaaggcaataactttgtatctatctctgtaactttagaagcatgtcaggtccagcaagtgtgtgagactcatggagggcagagcctcccagacagtagtgtggggctatactcccaactccagtctccct

SEQ ID NO: 758581 - DNA, 593 bp, Homo sapiens
ttaagatgttatttgccttcttcactgagttcaaatttgcactggtggtgcaaaatcaagggtaggtaaacacctggcaccttaacacaaatcaagacagtggcagtaaatcatgctaatagttatcttctttactgccatggactacagtttttagaaaatccaattttatttcacaacatccttgatgaagcagtaaaaattattaattatattaaattccaacacttgtgcacatgtctttttagtactctgtgtgacaaaatgggaagtgtrcagaagcacttctgtagcacactgaagtgcaatgggagtcttcagggaaaacacatgtgctattccgtcctttgagtggaactagccattttttcatagaacatttttgtgtgcaactcacaaattatgatcattcaggatttgagtatttggatgatatcgtcttgaaattaaacaaagagaaccagtcacttcaaggagaacaactgacattatttgttgtctgataaaatttgagcattcaagcaaaaattagattttgagaaacctgtattcaccactgtaaacttggtagtcatcatgactcaaagactatt

SEQ ID NO: 758582 - DNA, 593 bp, Homo sapiens
ttaagatgttatttgccttcttcactgagttcaaatttgcactggtggtgcaaaatcaagggtaggtaaacacctggcaccttaacacaaatcaagacagtggcagtaaatcatgctaatagttatcttctttactgccatggactacagtttttagaaaatccaattttatttcacaacatccttgatgaagcagtaaaaattattaattatattaaattccaacacttgtgcacatgtctttttagtactctgtgtgacaaaatgggaagtgtacagaagcacttctgtagcacactgaagtgcaatgggagtcttcagggaaaacacatgtgctattccgtcctttgagtggaactagccattttttcatagaacatttttgtgtgcaactcacaaattatgatcattcaggatttgagtatttggatgatatcgtcttgaaattaaacaaagmgaaccagtcacttcaaggagaacaactgacattatttgttgtctgataaaatttgagcattcaagcaaaaattagattttgagaaacctgtattcaccactgtaaacttggtagtcatcatgactcaaagactatt

SEQ ID NO: 758583 - DNA, 322 bp, Homo sapiens
tagtccttctatttcaaagaaaattaaataaattgccacctgcatagccttcccttattcccaccttagcaacatccccataccccaactaaattaattctgtatcatctcctgattagtgtttaccagacaatgcatgtatcttatgttactctttgactgaagaaccygaaaaagatcccaagtttctgccacggaatttccagaaatacattcctggtttggtaatagttacttttactcatgcatcatacatgcaaacacacaaacacgcatatacacagttctatagtaaaaaacacctggaaaagtaggttataaa

SEQ ID NO: 758584 - DNA, 598 bp, Homo sapiens
taattttttaaaagtcattggaatgaaaataataggatgttattatacaaatattacaataaaataatatttactttggttactcataacaggcatttgaacagagagcagtggaatattatatgatgagaaaacagttgatcttaatttttatgtgtgcaacattaaggaacctcttctttttaaattatgtttttacatttaaaaatatgctagtaataggaaataaaaatcttgtcttcaagttcaaattctggttttatattgtcagctagtatatccagagtaaataacttatctgaacactggcttcctaattaatgaataagaaagtaggcctacattttgatgaaacaagcatacattcttatatcaagttgtaattattcctttgtgtgatattattcrtgaggcaaatctactgtatcgggggagtattttattggtttttttcagtaggaaccaaacaagataagaccatgaattcagaaaaatatgtataagtcagtcagagagatagaacaagaatttgggggttggttacagatatataataataatcataatcataatttgtatgaacaaataggttgatttt

SEQ ID NO: 758585 - DNA, 669 bp, Homo sapiens
accaactagaaaaaaacatgtttggccctaagttattcttagtaaactttgatttaactataaattcaaaattgtaattctaatagtggcataatataaatgtatattacagtaattttttaacattgaattttgatctatcaaagcaaaattctttactacattaaaattggtaattaaagtctaatttcaaaacattttaaagataattcctgaataatttatcagtgattatttaatgaacaaaataaaaagattgaaccacagttttgtattagtatatattttaatttttattacatatcatcctcaactttttcaatcttggaaaatatttgttcacagttgaagagggcaggaaatatctgtttatggtgaagtgaaaactaattgacatcactaaatcaataaatacactgaattccacactaaatattattccatactcaaaattctttgcaatctcratttagcaggggtttgattgtctgtattgtgaccatttgagtctattgaatattcagtgggttccatttgtattgctatgggtacaactctagcttcagcttgttaaagttactgtattttatttagtcacatattcttaacttcattcatcatttaccttaatgcaccctaatatattgaatgtacaacaatacagaccta

SEQ ID NO: 758586 - DNA, 635 bp, Homo sapiens
cttctctgggataaatacagctaccgtagaaagcaaaattggaaggatagacaagaggcctttaatttatggaaaatttggatttttacagtaaatttgaaatggctacaaagccatatatctgtgctgtgctgtcttttctgaaaaagaaacaaaaaataaaggacagggcttctaaaaccactttgtccattgacatgaaggtgaggacggtgaagtgaagagagtgttatagaatatgaccataaagtttaaygtgcagtagattattaaccaaatgttttggtgtattttattaaatttgtgaactccagaaaaaccatgtgaattattttgacttttcctttaaacttgatgtgaagattaaagaatatgataaaatcttgacataatgtcatgtattttctgacattctttattggtgtttgaaagtataattactgaggtaatatctgtatatttataataccctctcacaattcaagctctaaaaccgcctataataattataaataattagtagtaagggaaaattttagacctaatttagacaaatgctaagcaagcccctaaaatgtctatctttcatttttgaccattgcttggattttcctttcttgagcgcatttgtgcat

SEQ ID NO: 758587 - DNA, 588 bp, Homo sapiens
gttttaggcatctcatcaatttattgaatttttcttcatgtttctatggtaattactgtgacataattgatcatagagaaaaaaaaatttatcaaatccttttatgtaagtcaaacatttagatgaactgtgaatcttttcagataataccatagtactcaacattcatagctgcagaatcattatggaaatccttaccttaaattgtggttgagctcatctaatataatttcaagttgattagttctagtgattgaggcagcccttctggatcagtgtctgtaaaaccattaagtagataaaccatgctcaactaytgatcataaatcataaagataagaatttaatgttgtatgtagaaaaatgattcttagattccagaacagaattattaacctacatttccctagtattttgttaatttttatttttatgttattgcattttttgctcataatagcattaaaactgatattaatgaataattcctttataaatatataagctgaacattcatcacatctaaaaattactaagaaaaaaaatctctaagaaaataaaagtgattaaaaaatcaaagtatatact

SEQ ID NO: 758588 - DNA, 638 bp, Homo sapiens
actgcaaatgaaacggtagtgacaacaacaaattttaatcaataaagaccacatacattgagaaggcaatatataaagacataagaaaaagaagtaaaaacacttttaacaattacctaagtgctgtgtaaataaggtttaagaatggtggttgagactgagctatataaagttcaatagggtgtgatgacagagctattacaatatgcatgaaaaatgacattttttaaaaaacaaaagacgtcttctataactactacaccattggattttggctaaaagtattgaaaaacagaaggctaaaaragaaaatttgttaagaaaactaatattataaaagaaggtaaataggctacaaataaagaaatatgagattgaaagatgtttgatgagtttttgctgaacctgaatttttgcagaggagtggtgaggtgaaggtgttgggaaggggtggaggaatctctagccctccatatcaaagaaaagccaggattttaagcccagagcctggaactttcttgggactctgtaatgaccagcatctgccactgtaattacgaaacgtgttacctgaccaacttcatgctacaatgttagcttattggtgtgaagcaaaacaaaattttactttcttaaca

SEQ ID NO: 758589 - DNA, 638 bp, Homo sapiens
actgcaaatgaaacggtagtgacaacaacaaattttaatcaataaagaccacatacattgagaaggcaatatataaagacataagaaaaagaagtaaaaacacttttaacaattacctaagtgctgtgtaaataaggtttaagaatggtggttgagactgagctatataaagttcaatagggtgtgatgacagagctattacaatatgcatgaaaaatgacattttttaaaaaacaaaagacgtcttctataactactacaccattggattttggctaaaagtattgaaaaacagaaggctaaaagagaaaatttgttaagaaaactaatattataaaagaaggtaaataggctacaaataaagaaatatgagattgaaagatgtttgatgagtttttgctgaacctgaatttttgcagaggagtggtgaggtgaargtgttgggaaggggtggaggaatctctagccctccatatcaaagaaaagccaggattttaagcccagagcctggaactttcttgggactctgtaatgaccagcatctgccactgtaattacgaaacgtgttacctgaccaacttcatgctacaatgttagcttattggtgtgaagcaaaacaaaattttactttcttaaca

SEQ ID NO: 758590 - DNA, 599 bp, Homo sapiens
gtcagcatgcctgattcaaatcctggctttgtcacctgccagctatgtgaacttgagcaagatatttgacttccctgagcctcagattcctcaactgtaaatggggattggcgatttgacttgcctttcagatttgtgcacattagagataacataagccaaacactttgcccagtgcctggcacagaacagacgtcagctaactagaggtcagcaaagtaactgtttaattaaatagttaagtgaaaattgagcccacccctaaatccaatacatgaacattkctggtggcaaagtaacctgtgagtctttaaactaactttagatagactctatgcaattcggctataagtgtgcaagtttcccgctgcgaagggttctagacttcacaaaatatgaagacattgctgcagaattataaagtcagggcaatgatttagtggctacctacaggaatcagagttcccaccgtgcttcccaaagccatttgctgagaaatattaatagtacgacaaaatcatgttcactgtgatgtctagtgacccatcttaaggtctctcactgaagcttgctgtattttattttttaaaatagaaact

SEQ ID NO: 758591 - DNA, 633 bp, Homo sapiens
cagatgtccctttgatggccgttgttgaaggccattgggaccaataatctatattagattgaatacttaagttagatgtggtttcccccattgtagcagggagctagcgtattagccttgtgggcaacatgatgcatgggaaatgaaagatttttgtaaaaagtcagtatttatttccaggaaaagcctgaccttgctatttgaacacccaagactctttagaggatgtgtttggtgttcacatgtgtttcttctattttggatagtagrgaagtaaagcttacaaagaatgcctagaacaagaacttttcatcattaaaaatttttcccagtgttctgatatgtgactttgaggccaatgagtcataaacaaatataagaaagctgtcaatgagtttcttcaaaggagggaaaactttctacgaatctaagatccatggagctagaattgtagaactaggctcatcagaatcgtgactattattgctccatcaaactgtgaaaagaaatgatgtggaccttgctggaaacaaaggcttagcaaacaatttttgttcaatgcccaccgagacatatagaattgggaactgatacatgtgtcccttataggctcaaaaattatatcttacaatt

SEQ ID NO: 758592 - DNA, 570 bp, Homo sapiens
cgcttgtcttgggctgggcaatctccctgtcagtgtttattgcggtgtgtactaggtcttatgctgcatgctatggtgatactgagaggtagaagacagaatcctgccctccagaagggaatactccaggtaggaagacatgacagacatttatggtgaaacgacaagacaaaacaacagagcaagggcaatcctcagttggaactcactgaactgtcagaggagaggcaggagactttagcaaggaggctgagctttctgtggttggtaggtggcatggggagggaagcaacggtttccacaaagtgggtaaaccatgcagggctttaaagatttgtggaatttggacagctggatgctgctactaataatgatggcagccatgtggtgagcatttgcaaggtataagcactctggtacgcattgtaygaatatttcaatctacatcaactttatggtggatgctattatacctatattacagatgagaaaatgtgttcagagaaattaagaaacatgtccaaaatcatacagctagagagagaggatctggaacttgaacagaagtga

SEQ ID NO: 758593 - DNA, 605 bp, Homo sapiens
tttcttctattgccacctgttttctggagaatcctagaacattatctcttctggagaatcctaggacattacctcttcattgcttctgccacattcttttattttatttatttttattttttatttttgagactccaggtgcacatatctgaaaccttgtcaccgtaacacattggtytctgatggttgtttatgtattttgtctttttgcctcttgatacattggtctggatatctgaatattttcttattacctatcttccagttcatgaattctgttttagtaaaatcaatctattcagttcttacttgtaattattacattttttagttataaaatttccttttaatatagttatattttctggttctctgctgaaattatccatcttttactaaattaaccacagatattttaatatccatgcctgataactccaatatctggatttcctatgtgtttgattttatttgcctgtttcaaatttttttctcttagtttttgtcaaaatgacagactaatttttaatgtaatgtgggacattatatattaaaaaataatttgaagttctcgatggttttgtctcttccacagaggatcaact

SEQ ID NO: 758594 - DNA, 639 bp, Homo sapiens
tcatctgagaaattttaaaaatgtaaattcttgggctaattcccagaactactggatcaaaagttctgggagtggcagtcagtaatctatgttttaacaagccaataagactgtcagacgattatgatgcttgctaaatttgagaacattggtctaatccattggtctcatacttgactgtacattagaatcacctaggaagcatttytacaaaacaaaacaaagaaacaaaaaaaaaaacactgatgcctggttcttttaccaagagattctttaaagtgaacacaagccatgttcactttaagtgttgactatttaccaagatagatcatattctaagccataaaacaagtctcgagaaattcaaaagaatttacatcatacaaaacatgttctctgcccacagtataattgaatgagaaaccactaacagaaaacaaattcagaaaattccctaatgtttagaaaccaaatccacacatatataacccatgaaataaaagagaaactagtttaaagtaaaggaaaacaaagacacaatagatcaaaacttgtaagattcaagaaaagcaatactaaaagggaaatgtatggtactgaacacctatactagaaaagaagaaatgcttcaaatcaaag

SEQ ID NO: 758595 - DNA, 597 bp, Homo sapiens
ccataaaacaagtctcgagaaattcaaaagaatttacatcatacaaaacatgttctctgcccacagtataattgaatgagaaaccactaacagaaaacaaattcagaaaattccctaatgtttagaaaccaaatccacacatatataacccatgaaataaaagagaaactagtttaaagtaaaggaaaacaaagacacaatagatcaaaacttgtaagattcaagaaaagcaatactaaaagggaaatgtatggtactgaacmcctatactagaaaagaagaaatgcttcaaatcaaagttcctggtttccatctgaaaaaaaaaaaaaaaaaaaaaaaactagaaaaagaagaataaattaaatctaaaaatagtcaaaagaaacaaaacgataaagattagagccgaaatcaacaaaatataaaagaagaaaaaaaatagagaaaaatcaataaaaccaaaagctaatttattgagaacagaaacctctgactagattgattagacattgataaacctcacaccagactgatcagggacaaaaaagagaagacacacctcaccaaaaaacagaaatgagaaaggtgatatctcta

SEQ ID NO: 758596 - DNA, 566 bp, Homo sapiens
agcaaattgggtatccaaaattatgtaaaaagaataatgcaacatagccaactaggcattacctcaggaatgtgaggttggcttaacaggaaaattcagtcaatgtaattcattacattattagaaaaataatattatcatctcaatagatgcagagaaagaatttgacaaaattcaacatctatttctgataaaaagtctcagaaaactatgactagaaaggaactttctcaacctaactaaaaagggacaattgaaraaaaaaaagattacttaatacttaaatggtaaaaaacgaaaagctttccctctagggtcagtaacaagggtgtcatcatttctattcaaaattgtactaaagattctttccagcataataaggcaagaaaaagacaaatggcatcaatattggagtgaaggaagttaaagctgtctttattagaaaacaacataatttctatgtagaaaatcctacaaaacctataaaaaaaactggtagaattaataaattattttagcaaggttacagactaaaagatcagaatacaaaaataaattataatttg

SEQ ID NO: 758597 - DNA, 544 bp, Homo sapiens
gagatactctgatggcttatatgaatacaaagagtatttaaacacattccacgattcctagtagcctagcatctaatggagataaaaagtaatatagattatgtagtctagtgtgaagataaaggacctcaagtgggtaacaaaacagcaaaaacaagcaaaaaccacaggaatgtactatggtaagatctatcaaatccgattagtagttataaaatagaaagggacttgaagataaatggacttgccaattataatgattggcaattggttttaagaattagaacaaaatagttgttaatggaactgcttatgtaacaactccggataaaaactgtgtagaattytaaggttgagagacaatatctttctggagcagggtagaggaaggaaagaaggatcacagtaaagtctattttctcatgccaccttattgaagtaggatccagaaaacggagacagttggaaatggagagaggaggaggaaagagtagcctatagctaccaaggaagagtttacaataacttatccttactggtatca

SEQ ID NO: 758598 - DNA, 617 bp, Homo sapiens; identical to SEQ ID NO: 747890

SEQ ID NO: 758599 - DNA, 563 bp, Homo sapiens
acagcatgggggaaatcctcctccatgatctaatcatctcccaccaggtccctcccctgacatatgcggattaaaattccacattgggtgggaacacagagccaaaccgtatcagtacctctgaatgataaaatgcgacaaatttcctatggtataattatactctgcctgttaagtttctatgtcctgcctttcacatagtctcttgtaaggagtagggcatcattcctgccttcaaggggtttatggtctagtgggtacaacagacaaataaatggattgcttcaatttatgaagcagatttaatgaaggggggaaaacagtgatgttcaagcagagaagagagtgatccaaccaaggttagtggtcargaagattcttgaagcagtcttcttacctctacaagacgaatgttcctaaaacagaacctataactgtttcatcttagtgatccacggtgtctgctatgatacctggtttatttacccttaaaaaatattgctttcacttttgcatgacagttttcttacacaatactatagccaaatagttttcagaacttt

SEQ ID NO: 758600 - DNA, 605 bp, Homo sapiens
aagtaatgttgttttatttttcttctgtttatgtgtctgttttccaattttcttatattgtgtgggtatttttattgtaataaagaaaaatacatttacatataaaaagtaagatacattacatgaaaacatgttgtagtaattgttttacaagtgcaaggtactattatgttctggtagcttctgtagactacccttatggcatatctagggatctagatattatatattcatgtaaattatgaaatggcctagcctttgttgtctcaatggtatatttgtcactataaatttgtgattgaaaaattgakaaagcttctcctttttccatggcaagagactactaaacatttaaatactgaaatagtttgtaaagcttcattaaaatgaacattcttttagtaaatttaattgaggttgaaaattatgatatctatgcagagggtgatgaatattgtaaaagagatacatttatctttgtataacaagcttgatagttttcacctacaaatatgtcatacagtgttctcaaatacttactacatttgcaaataagaaactctagctctgttactggttccagcagaaactatctacagtacctc

SEQ ID NO: 758601 - DNA, 599 bp, Homo sapiens
tttgcttcttcatttggtatgcttttaatttttagttagaatctctgttctctgttctccatgtctattacctctgtcacacagtttttattattctgctgcagcttttcctcctgacaaggaaactctttggggaatccactaaaaataatgtaggctacttctgaggttgtctagccttagcaattaccttttcctgccaccactataaaattaacacattgcaatttgtagagtacaagtaatgtacctgatgttctaaacactaggcacaagtccctgtgaaatatcaaaagtgttaaagtagcaattcctcagttctgtggatgccaacaagaaaacacagttctacatgattcagcagcgagaaaattagatgttatctgctrgagcaagctggtcataatgtactgttcctcacagctattatagttaaccctccctcacttactgtaattaagcctgttgcatccatctcattaccactaaatcttcatataagataatgcaatagattgatttgggaaatatcaacaagcagtggagtgccataatcaataacgtttgttctacaccaagctctgtcatcttcagggctt

SEQ ID NO: 758602 - DNA, 501 bp, Homo sapiens
caaaaacaaaacctggtcacagaaggactctgagaagtgcacacatccttacaagagatggacaatttaaaacaagcttcattaaataagtccctttcaagctggcttcttggtataattcagtagctcatacttctctgccttattttaacggggtctttcctgtgggttagtttaaatcaactgttctacaacattttgtaaatttacaagaatttattgattcattaaatacaaaaatcttttcatatttcctctctagagaatggagtatacctctgtatcttcccgtcaattgccaattactactgtgytatgtaacagggaacccaacaatagtgttgaaaagtgaaatctggttattttttatttgtttgctcattctgcttatctgacatctccacttggtcaaaatgcacagaacactgacaggagcttttactggcctctcttccattcactcatcctttgcttatgcaaaacgttatgcatttatccatc

SEQ ID NO: 758603 - DNA, 501 bp, Homo sapiens
caaaaacaaaacctggtcacagaaggactctgagaagtgcacacatccttacaagagatggacaatttaaaacaagcttcattaaataagtccctttcaagctggcttcttggtataattcagtagctcatacttctctgccttattttaacggggtctttcctgtgggttagtttaaatcaactgttctacaacattttgtaaatttacaagaatttattgattcattaaatacaaaaatcttttcatatttcctctctagagaatggagtatacctctgtatcttcccgtcaattgccaattactactgtgcwatgtaacagggaacccaacaatagtgttgaaaagtgaaatctggttattttttatttgtttgctcattctgcttatctgacatctccacttggtcaaaatgcacagaacactgacaggagcttttactggcctctcttccattcactcatcctttgcttatgcaaaacgttatgcatttatccatc

SEQ ID NO: 758604 - DNA, 504 bp, Homo sapiens
tgatcagctcatatttacataaggcaaatactttatcacaccatgtcgaaataaggtatagcacaagctgtaacaaagcaatcaagctgtttctgtatgacacttcctttttctctctacaaatattgcctgctcactggtaggctgtactgccaggtggagctctctgaacctctactggttctgagtgctgcccaattcataaattgttctttgcttgaataaactgtcttgaatttaatttgtctacagtttttcctttaacagttggtcattagaagtgggactggaagtagacctccagcaaactccaggagcacrgagtgaccaagcaaaggtgttcacagggcccattgtgaccactgatttctctcagcaactggggtcatggaagagttgtctatctctccagttggagttccacaaacctaggctttgacctctttcaaaagaatttatttgagcattttaagtgtagactatgtttgaaagttgccatagaaa

SEQ ID NO: 758605 - DNA, 662 bp, Homo sapiens
attactattacagccacctccaccacatcacccccactatcaccaccaactctaccaccatcactgtcatcaccaccaccactaccaccgttatccctagcacacaattacacaattctcattttgttattattgcaaaaccaaatatctgtarttggacagctactattcccataacagcaaaaaccacttctacttttctctactccttttcagactcacctttctccagaatatttgagaacatgagatttttgtcacacttgcattgtgatgttgatcgcgattgccccagcttttccactggtacttattgatctatgctgcactcaacatgctatatgtcacagccagaaacccaagcaattctacatgttcctcaatgctatagtaataggcctatacttgtgtctacttgtcactgcgaatgtcactaactgtcatctagtttcctagcacagcccaatacactagaatacatggcctcaaagtcaggcctagattcaaatcctgaccttgcctctagctttatgaacttaggcaaataaatttacttttctgactcttgggtttatttatcatgaaatggcatttacaatattcatttcatgggaattaggaggaatcataaatgaggttatgtctctcaaatacttaggact

SEQ ID NO: 758606 - DNA, 666 bp, Homo sapiens
agcattacctgagtgtaacaaaggatcctgagagaaacgacagtgctgaagaggcttggcagtgagacgagtttcacttacatccttgggaaggaaggagtttgccctggactctccaaggcccgtgatcctcaggagtgctgacttagattctgctcacctcaaaactcttttgaaccttcctagctgcacccmaaaatcacatgccaaagcctggcaaacacctgtacccaaggaacgatctactggccacccacattggcttgacttatcattttgattgattccaactggctacttggaaagaaggcaggggctgtcccatagctgagttgtgcccactgcccacacctcattcattttagttgccatgaaggaggatttgatactggaggctgacagctgccttcatggtaacagagaatacagattcaaacaccactggaactgatgcattacctgagatggacaattgcatatcaactgcatgactggaacaaagtctcagcctgcactgaatgtgaaagagctgtttcacttctccattgatgcccttgtctaatgcagtagtgagaatgtgttggctgcatctgcctaggtccaaggttaatgtgttatggcccatacatgcctttccacctaccacttccttcactcatgggctca

SEQ ID NO: 758607 - DNA, 625 bp, Homo sapiens
caaagaatcaagagacctgtgtttcagcagctctgacttcatgtcctctccaccacccttcttcccacatctctggacctcggttcctccatctgcaaagtcgaggaggaggctctgggatctccaagggcttttcaagttctaacatcttatcctcttgccctgttcctccaaagagtacacaaatacctgagtggatgaccaggagcatgtgccactctataaccccccggagattcccatatggttggcaccaactagttgatgggctaaagtttacttacagagctgatgaaagcacattcaaggactttcaaatgaaggtaatgttacaggtctgacttatgaaaaggcagcacttgggttgtggctacacagtgctccagctcagcccattcaaactccccagttcaggaaaaaaatctaatgttcttatttaattccaaagaaattccatcagtcaatactgtggtttygtttagtgaattcacatgggctgtgggggatggggaattagtgaacgagtcatttgatgcaatagagatcaagtagctggttggtttgatgcaattgtcttctcttattgtagatattcataatggcatcatgaatattccaaacccag

SEQ ID NO: 758608 - DNA, 397 bp, Homo sapiens
gtagcctgggcaacatggagagatcacgtctctacaaaagcaaaaattagcccagcatggaggtgcatacctgtagtcccagctactccagaggccaaagtgggaggattgcttaagcccaagaatttgaggctgcagtgagccatgatcatgccmctgcactacagtctgagtgtcagagcaagatctagtctcttaaaaaaagtatataaatatatgtgtgtgtgtgtgtatgtgtgtatatatatatgagtgagatatatatatgtatatatatgtgtgtgagatatatatatgtatatatgtatataaatttttagaaagaatatgattgcagtcatataaagttgaaaagcaggcaaaactaatcagtgtttagggatccatatttgaatgg

SEQ ID NO: 758609 - DNA, 659 bp, Homo sapiens
ttgcataccagagtggaatgagaacacctcccaataacaacttaacttaggtgtcaggctgttatgggttgaattgtaacccctagaaagatacaatcaagtgctaacccctagtacctgtgaatgtgggcttatttagaaataggatctttgcagaggtaatcaagttaaaatgaggtcattaggtgtccaatatgattggtgtccttctaagaagagggggatttggacacagcccctgggaggagaatgccatgtgaagacacagacacagagggaagacagccctgtgaccacagaggcagaggctggagttttgctgccaaaagccaaggaatgcctggggctaccagaagctgcctccctaaatgcctatcaccagagttcatcacaagaaaatgagaatcccttagtttactttttttctgcccaaggaagtcacattttacattatttctagtacacttttaacctctctctgtcttrtcctttctcacccaaactatgcccaaagtcttctcatttcagaccccaatgatcttattgtttctaaaccatgagaaaagctctcttagaagcattgtgccctcattaaaagctagctttccaaatatcatttttttccttccctgtaaaactatcttgtcactcatctgttt

SEQ ID NO: 758610 - DNA, 542 bp, Homo sapiens
atccttcctatacttacttcttttctttttattttattttattttattttattttattttattttattttattttattttatttttgagacagagtctctctttgtcacccaggctggagtgcaaaggcgtgagctcagctcactgcaacctctgcctcccaggttcaagccattctcctgcctcagcctcccaagaagctgggtctacaggtgcgtgccaccatgcccggctaatttttttgtatttttaatagagacagggtttcactatgttggctgggctggtctcgatctcctgacctcgtgatccacctgmcttggcctcccaaagtgctgggattacaggcatgagccaccgcgcctggcctacttattttcttccttagggctattcacccagccctcactataccaggatcagtattaccatatcagcattccctacccacagtcaacatcactggattcaaagagtaaaggacttgtccaaagtcaaatggcatcaccctgcaggggacactgagtggaacatcttgccaga

SEQ ID NO: 758611 - DNA, 641 bp, Homo sapiens
gtaaattattttcttattctggatcctatctgaaaaggatcttacacatgactttgagggttgattttgacacaggtctctttacagataaaataactaggctaatctagaaactataacacactttactgttcactctaaaatactgactatacgtggaaaccaaataaatgtatctttttttatgcagtcatttacgaactgaaggaaaaataagaacttggctttttacaggaactactgggtgacagctttggttgaaacggtaatgtaaaggctttcatgccagtgttagggagtcctcctgccatttgtgtgtctaccagcacattcatgtttccagaggagtcttctggtggcagggtgagggagcatactrcccttctgtggtttcctgcaggtatatacattcacaactgcagattgctcacagggtcatggcagttgctagccatgggcaggagataaggccttcttaagagagaagcatttgagcaagaaatgagtctgtaatattcacaagagctgttactgttggattggaaagtaaatcaagtgtagcagcagaaattacccagctggaaagtagggtatagagctgcatctaagaaaaccttatcacataacttttggaagtagtg

SEQ ID NO: 758612 - DNA, 635 bp, Homo sapiens
cttgttgagtgtaatccacacatagcaggcctgagctgtttcttccctgtgtgcactaccttggttcactgccatgtcatctcttttaatttttcaggcacaaaacctaagctgtttagatacatcaggagctttttcaagttattttttgtgacttattttccagatcttaaattcaccagttgtttcatgaattgaaaccacataacttgtcattccctaaagaagtcctgcactttttgcaacagcgtctttctccccagtactcctttgtctgagatgcccatctatgctccttcaatatctctgaggtccttgcaagtcagttaacaccgtgaaactctctgaccckcagttcctctggtcgtgaaatgaagaaggcaacacatattctgcacacctcaggctgtattttgaagactatagactggacttcttaacaactgaagaatccgttaaaaataccagttgtattatttctacctgtgaaaatccatttcaaatgttaagaagttaactcaggtgccatctattccatgagattttctttaacccatgtatttggaatgaatctcttccactttagtgcccccagacttcctgattcctttattgcaacacttgttctctgtggt

SEQ ID NO: 758613 - DNA, 632 bp, Homo sapiens
tgaggcctaagtattgccagggaagaaggctttattcaggtgctatagccaaggagatgagagaccagtgtcaaattcatatccctgaccaactaaaatcaggggcttatatagcaaggaagaaatgtatactatatgcagcaaaacaggaattagagaggtgtaaaaaaggagttggtgaacaggaagcaggtggtccactaggcactcatgatgggttaattgcctggtgtctcattgaccagatgtgatagtctggtaagtttcagttcctttatatcatctaggagkcctgatggttggtttcctgagaaaggaactcagtaagacaaatgtaactttctcacgttttaacactgggagggccaatttctatgtttattcaaaacaaaccatacacattagttctatgggtcattttggctggtttcaaaagaagatgcttttaagaagtgttgctaatttaaaacttctggtaagctggagagcattatctcccaaataagttatttaagactttataggacttagataactattacattttttcaaatatttcacagtacatcattacagagaatttttaccatgaagtttgctaaaataaacagccgtttgttttgtttgcttaa

SEQ ID NO: 758614 - DNA, 624 bp, Homo sapiens
aaaactgtatggaatttcctcaaaaaaagtgaaaatagaactcttgtatgatccagcaatcctacttctgggtatacacatacaaaggagttgaaatcagtatgccaaagagttatctgcactcccatgtttattacagcastattcacattagccaacatataaaagtaacataagtgtccatcaggggatgaatagataaagataatttggtatatatatacaatggaatactacttattgtttaaaagtaaggaaatcttgccatttgtaacaaaatggatgaacctggaggacattatgttaagtgaaataagccaggtgcagaaagacaagcaccacatgatctcacatgtggagtgtaaaagagttaaaatagaaacagagagtaaaatggtggttactagagaccgaccataagttgggaattggggagatgttggtcaaaatacagaaaatttcagttagacacgaggagtaacttcaggagatctattacatgtcatgatgactgcagctagtaacgatgtgttgtatacttgaaaattgctaagataatagattttaagtgctctcaccacaaaataagaataataagtatgtgaggtaatgcatgtgttaaat

SEQ ID NO: 758615 - DNA, 622 bp, Homo sapiens
gcaacactatgattttgaattggatagttcctaaattattgtcccctagattaaaatacttagattcatgattattaaatttatttataaatcattaaactatttccaatacacctaaaatgaagtggttattattattcagtgtatgtgtgaatcatactttatggctaatcttaccttttagtttttcaaacttgtaattgtcctaaccacaggagggttttaaaatatccatttatattttcatgcttcataatattcctcatatttcttaatccataaataagttagacacagttagtcactattttgtgacacctttttccacttaattcacagggaactggactcttctacgaaactatggcctgtcatactctttctaatattcttcctatctygtttttaatcattagaatctcccagattttggctttatcttttcttccttttgctgtctatacctactttcttggcaatctcactcattgtcatgagccttaaataccatttaactgcagacagaacctaaattacttcttccattccagactttgcctgtgtattatgacctaatgtatcacacttttattcaacatatccacctgctttatcttcacaa

SEQ ID NO: 758616 - DNA, 404 bp, Homo sapiens
cctctgtatcttaaaatcagcaaacataataatctcagtttcaggtggtatataatatttttttctaattatagtttaatcttacatatttttacctcataaaaaatctttattaaatagatcatgattttttcaaatcacaatattttaaagcccatatatgcccatcaaaatgtgtatttcctttgggtgtaatttttaaaaccaaaattaatttgaaatgcaccatgcgattttaaatgttttgtgtcctcaaattttgtttcattttttgtttgagacagggtctkaccttgtcaccaaagctggaatgcagtggcacaatctcagctcactgcaacctccaccttcttggttcaagagattcttctgcctcagccacccaagtagttgggactacaggt

SEQ ID NO: 758617 - DNA, 593 bp, Homo sapiens
attgcatacaaatatttagcctttaaaaatttcttttataaagaacagattaagaatgatgtcaccaagatgacagtgtaggagataccagaccacattcctcccacacacacacacaaaatgtagacagctattcataaaacagactagcccagaaaggacttaagtgcaatctaaagaatctacagcaacacagtgaggaaaaaaaaaaaaaacaaacacatacacataagaaaaaagaaagaaaaaggcaaaagcaatggagattatccacatgaaaaggatcattggtgagatcagcatatctgagataccaatagactgctaggagtaaagaagaaaggtagaagctatcagtaaaagccacatggcaggaattaccaccatccctatgaacctgctctgcaraaaacacaagcatctcttgccactgaggtaaccaacaggtattcctgccagagaataccagagaaggtggtacagccatacaaccccctccaaccacaaaagtgactgctgttgagctgttaaaaaaaaggagtacctgcctctcccaaacctgagtgtatcctgaccctggagctatggctaaa

SEQ ID NO: 758618 - DNA, 610 bp, Homo sapiens
aaagagtctttttgaagtatctgcaaatggatatttggaatgctttgaggcatatagtggaaaaggaaatatcttcacataaaaaatagacagaagcattctgagaaactactttgtgatgtgtgcattcatctcacagagttgaaactttcttttgattgaacagttctgaaaccctctttttgtagtatctacaaaagtatatttttagctctttgaggcttacagtgtaaaatgaaatatcttcccatgaaaactagacagaagtattctgagaaacttcgttgtgatgtgtgcattcatctcacagagttgaacctttcttttgattgattagttttgaaacattctttttatagaatyttcaagtgagtattttgaccactttgatgcatatagtgcaaaagcaaatacgttcacataaaaactagacagaaccattctgagagagttctttgtgatgtgtgtattcagctcacacagttgaacctgctttatgattgaatagttttgaagctctccttctttaaatctgcaagtggatatttgtagcactttgtggtgtacagtggaaaagaaaatatcgtcacataatcgctagacagaagca

SEQ ID NO: 758619 - DNA, 433 bp, Homo sapiens
tcaccacagttgaaactggttaacattcaaaaagcaaaaccaacaacaaactttacataaatccttaaaaaatattataggcaaagccaagagcatacaagtagccaaaatttcaaagcactggtgtcagatgcaactgtatttcagctttgcgggtccataacattttcactggcatctcatcagccttyttgtttatctgtcgctattgccaccttccctatacttccagtgaacaccttaccttacaaggccaacctcaaaatgctggggccttccaagtcacttccctgtctggggaatgttgagctgagctctggatcccccttgagctcaagaccctccaattgcacaggttgagaacgtttcatgatagccctttgaacattcccatactctcaggaaaatgacttcatgaaaggattatatgtaa

SEQ ID NO: 758620 - DNA, 433 bp, Homo sapiens
tcaccacagttgaaactggttaacattcaaaaagcaaaaccaacaacaaactttacataaatccttaaaaaatattataggcaaagccaagagcatacaagtagccaaaatttcaaagcactggtgtcagatgcaactgtatttcagctttgcgggtccataacattttcactggcatctcatcagcctttttgtttatctgtcgctattgccaccttccctatacttccagtgaacaccttaccttacaaggccaacctcaraatgctggggccttccaagtcacttccctgtctggggaatgttgagctgagctctggatcccccttgagctcaagaccctccaattgcacaggttgagaacgtttcatgatagccctttgaacattcccatactctcaggaaaatgacttcatgaaaggattatatgtaa

SEQ ID NO: 758621 - DNA, 433 bp, Homo sapiens
tcaccacagttgaaactggttaacattcaaaaagcaaaaccaacaacaaactttacataaatccttaaaaaatattataggcaaagccaagagcatacaagtagccaaaatttcaaagcactggtgtcagatgcaactgtatttcagctttgcgggtccataacattttcactggcatctcatcagcctttttgtttatctgtcgctattgccaccttccctatacttccagtgaacaccttaccttacaaggccaacctcaaaatgctggkgccttccaagtcacttccctgtctggggaatgttgagctgagctctggatcccccttgagctcaagaccctccaattgcacaggttgagaacgtttcatgatagccctttgaacattcccatactctcaggaaaatgacttcatgaaaggattatatgtaa

SEQ ID NO: 758622 - DNA, 465 bp, Homo sapiens
tactcagggcctaatgacatcaataaagattttagggatccagtggtcagtggcatgctagacattccctccaaagtaaaagacaattactgcatctcgtacccctaccacaaagaaggacgcacaatactttgtagatcactttgggttttgggaaaaatacctcccatatcagtaagtattgctctgccccatatactaaatactattatctgaatgtgtgtatccccctcacaaatttatatgttgagatcctaactcgcaaagtgatggtattaagaggtggagtgcttaggttttgagggcagagcccayagagctagctcatactttccaccatgtgagggcacaatgactagacaccatgtatgaaccagaaagcaggcccttgccagacactaaattaccagagccttgatcttggactttctagtctccaaagctgtgagaaatgaatttcttttg

SEQ ID NO: 758623 - DNA, 612 bp, Homo sapiens
ctaggtggaatctatttctctacccccaacaatctgggctggccttgtgatttctctggacaataaaatacagtgacagagatgtgtaacaagcttaggaacctaagtctcaagataccctgcagcttgggtcattaccctattggaaggcggctytgagatgccatcagggaagatgacccttgtgagaaagacctgttgagaaggagagaggcccagctatttgtgctgtctcggctgagcccaaaccccagatctctgaattagctgaatgtgtcatgtgaaagaagcaaggattgactagcaggaaaactgcaagtcaaccctacgtatcctgacagtaacagattgttgttgttttaaggtctagggtggtttataaagcagcaacacatagcggaaacagaggccaataaatgtaactgaccctttttccctgacattttcaaaaatctaaggtcagaattggaagtgacccgaggaggtcatttcatgtctgtctgtttcaacaatttatatgaggttaactggaaattcaccaaacataattattcattttcaaccttgaagttcatttgcttttaattgaaaaaaactttacccatttatatg

SEQ ID NO: 758624 - DNA, 632 bp, Homo sapiens
ggatgacttcaaaatgataagactatgcattcagcaaaacgagacactgatcatgaccaaatagctgtttactatctcagcctaaattttagctttcatttgagaagcctggtagccacagatacatcaaaggtgacctcctcagtgtcccttgtgaatcagttgaatggagcagagctttgcctgagagagtcattgttaaaacagaactcaggcgtttacacaatatgcctggtaaaaaatattggcatattgtaaataygcttagtattttgatatatgtgattatgttagtcaaaaacaatatatattttttatttcctctgtaaattacttattacagggtatatctctcctagcataaatataaaaagtgtgtgcaaagatttatctatcttgatttttttgtcagaacatacatctctggatttaacacttgtgaatcagttaggtggagaagggctttgcctgaaaaggtcattgttaaaacagaactcaggcctttacccagtatgccttgtaaaaatattagcataatgctgtaaatacacttaatattttgatatatgtgaattgtgtttattaaaaataatatacactttttaattttccccgtgaattacttattatag

SEQ ID NO: 758625 - DNA, 525 bp, Homo sapiens
ttacctgcttcctttgcaaactttgatggggtttctactttcaaactcctttaagttctctctcataagcgaaagaagtcaagactctagtacactcatatcataaaacttatgcaaatccaattaatccaatcaaaacttatttgtgtaaaagcctgtcttatgtgctctttgaaggcatttcccatgaatggaaatcttaattagatgactaaatttaraaggatagtgcatcttgcaagaaaaccaagcacatttaatccttaatagtataaactggaaaaacctgagttttacctaccaggaatagtactgttcgacttcacattaattacaatcagtgtttttctgaaagaactgcagtatcatatcctcaaatttatagagcaatatataggggtatatgttacactttaattttcaatttatagtgagaagattgaagacatgtattatacaggtgaacacacctgttatgcaatttagaaaatacaagtcaaggtgaattaattatagaagcaaaac

SEQ ID NO: 758626 - DNA, 625 bp, Homo sapiens
atgttttctaggttcatctgcatcgtagcatgtatctgtacttcatttctttactgctagacaatttatggaatacagactactgcaatttgtttactcattcatccactgatggacatttgggttgtttccaccatttagctattgcaaatagtratgctatgaacatgtgtggtcatatatttgtttgagtacctgctttcaattcttcagggtatatacctaggagtggaattgctgggtcatatgacaagtctatgtgttcctttgaggaattgtcaaactcttttttccacagaggctgaaccatttaacattcccaccagcaacatacgagggttccagtttctccacatcgtcctcaaaaccagttactgcccgtcttttgattctggccatcctagtaggtgagaagtggtatcttactgtggttttcatttgcatctccctgatcactaatgatgttgagtattaatgatgtgtttatcttctcagagtaactgtctattccaagtcctttgcccattttttagttgagcttttttttgctgttgagttgtaagttttcgttcttgtattttggccattggtccattatgagttaatttttatacatggcatgaag

SEQ ID NO: 758627 - DNA, 625 bp, Homo sapiens
atgttttctaggttcatctgcatcgtagcatgtatctgtacttcatttctttactgctagacaatttatggaatacagactactgcaatttgtttactcattcatccactgatggacatttgggttgtttccaccatttagctattgcaaatagtamtgctatgaacatgtgtggtcatatatttgtttgagtacctgctttcaattcttcagggtatatacctaggagtggaattgctgggtcatatgacaagtctatgtgttcctttgaggaattgtcaaactcttttttccacagaggctgaaccatttaacattcccaccagcaacatacgagggttccagtttctccacatcgtcctcaaaaccagttactgcccgtcttttgattctggccatcctagtaggtgagaagtggtatcttactgtggttttcatttgcatctccctgatcactaatgatgttgagtattaatgatgtgtttatcttctcagagtaactgtctattccaagtcctttgcccattttttagttgagcttttttttgctgttgagttgtaagttttcgttcttgtattttggccattggtccattatgagttaatttttatacatggcatgaag

SEQ ID NO: 758628 - DNA, 528 bp, Homo sapiens
  misc_feature 519, 520, 521, 522, 523, 524, 525, 526, 527, 528: n = A,T,C or G
ttaaattgtaaaatatactcacttcccaaatgaagatacaaatattctgattgaatatgaaatcagaaataaagtacttagcaagcacccgagaagtttgtcttaaactaactgtactgaagtactttttttttcaatcatggactgatacttgtataaaacmcaataaaaatgaattaccaggtcaggtgcagtggctcacacatgtaatagcactttgggaggccaaggcgggcaaatcacctaaggtcaggagtttgagaccagcctggccaacatggtgaaaccttgtctctacgtaaaatacaaaaattagccgggcatggtggcgggcacctgtaatcccagctactcaggaggctgagactagagaatcacttaaacacaggaggtggaggttgcagtgagctgagatcgcgccactgcactccagcctcggtgacaagagtgaaactcagtctcaaaaaaaaaaaaaaaaaaaagaattaccagaaaaatgaaaaaaacaaacaaacaaannnnnnnnnn

SEQ ID NO: 758629 - DNA, 528 bp, Homo sapiens
  misc_feature 519, 520, 521, 522, 523, 524, 525, 526, 527, 528: n = A,T,C or G
ttaaattgtaaaatatactcacttcccaaatgaagatacaaatattctgattgaatatgaaatcagaaataaagtacttagcaagcacccgagaagtttgtcttaaactaactgtactgaagtactttttttttcaatcatggactgatacttgtataaaacacaataaaaatgaattaccaggtcaggtgcagtggctcacacatgtaawagcactttgggaggccaaggcgggcaaatcacctaaggtcaggagtttgagaccagcctggccaacatggtgaaaccttgtctctacgtaaaatacaaaaattagccgggcatggtggcgggcacctgtaatcccagctactcaggaggctgagactagagaatcacttaaacacaggaggtggaggttgcagtgagctgagatcgcgccactgcactccagcctcggtgacaagagtgaaactcagtctcaaaaaaaaaaaaaaaaaaaagaattaccagaaaaatgaaaaaaacaaacaaacaaannnnnnnnnn

SEQ ID NO: 758630 - DNA, 611 bp, Homo sapiens
gattaatacctgctcttcctatcgtgaggatcacatgagaagaaaggaaagtgctctgttctgtatctgagatattataagttgctctctgtttggtaaatttgcattttgtgagttaggttcttttagagctgcacacggcttcgctttgcttcttcctctgatactttggggtgaattagctctagctggagcatctggaacactggtgacacacagagcccccagagggtatgaattggatctgaaaaggggagaggcagagggagattyttatccagggagcgtagggaacacgctttgtgcttagggcagaggctgtgtgggatgaaacagagtttgatttatgtaatccaaccttgtcagacaccacagccagctctttagagaaaaaaaaaaaaaaaaaaaaaaaaggaggccttttactagttgggcctctccccagtgtgaggctgatactatcacataaagtacatctttagacctggccagacatcagttgttcctggcctcagacaagtgggttatctttcagggctgactcctctgtagtcggtccagcatgcccttgttgagtgcctactgtatgccttccatgttccccattacac

SEQ ID NO: 758631 - DNA, 611 bp, Homo sapiens
gattaatacctgctcttcctatcgtgaggatcacatgagaagaaaggaaagtgctctgttctgtatctgagatattataagttgctctctgtttggtaaatttgcattttgtgagttaggttcttttagagctgcacacggcttcgctttgcttcttcctctgatactttggggtgaattagctctagctggagcatctggaacactggtgacacacagagcccccagagggtatgaattggatctgaaaaggggagaggcagagggagattcttatccagggagcgtagggaacacgctttgtgcttagggcagaggctgtgtgggatgaaacagagtttgatttatgtaatccaaccttgtcagacaccacagccagctytttagagaaaaaaaaaaaaaaaaaaaaaaaaggaggccttttactagttgggcctctccccagtgtgaggctgatactatcacataaagtacatctttagacctggccagacatcagttgttcctggcctcagacaagtgggttatctttcagggctgactcctctgtagtcggtccagcatgcccttgttgagtgcctactgtatgccttccatgttccccattacac

SEQ ID NO: 758632 - DNA, 496 bp, Homo sapiens
cgggaggaggtcagagagagtggggtcagatagggtggggtcttataggccatggtaaagtctttggagggttctgatttggctggaggtgggtaggaacaacagagtcatgagaccagatgaaagtggatgcaagcctggacaacacagcaagactttgtctctactaaagattaaaaaaattagccaggtgtggtggcgtgcaccragactcccagctacttgggaggcctgaaaccaggagttgatcttcttaccactgcattgcagcctgggcgacaaagcaagatccctgagtcgaggcaaaaaaagatgtaaatatttgttgccagtaaatgttcctagtttgaatttatggttttaatttttttggaggggaggataggtatccatcctatatttaattttttatctactatagtaatagcaatcttctggtttatatcttgcttttatgtcacacaggcaaaagattgcaaaaccatctattacattg

SEQ ID NO: 758633 - DNA, 648 bp, Homo sapiens
gtttggttactatagccgtgtattataatttgattcaggtaatgtgttacctccagctttgttctttttgcttaggattgctttgaatattcaggttcttttagaatgtgtatgtatttaaaaattttttggtaattctgtgaaaaatgatgttggtattttgataggcattgcattaaatctgtatatttaagtagaaagtacagtcatttgaacaatattaattcctctgattcataagcatgggatgtttttccacttgtgtcatttacaatttctttcatcaatgttttgtagtttactttgaaaagatttttcatcatcttggttaaatgtattcctacattttatttgtgtatttatgtatttattatttattgtagccattgtaaatggattgccttctygatttgattttcaggaagatcattattggtatttagaaatgctactgattcttgtatgttgactttgtatcctgcaagttaatgaatttgtttatcaggtctagagtttttggtgtagtctttaggggttttttggatataggatcatagtatcagcaaacagaaacaatttgaccacctcttttccaatttggatatcttttatttctttttcttgcctgattgttctggctaggacttt

SEQ ID NO: 758634 - DNA, 691 bp, Homo sapiens
agctataaatctatcggatgctgggctttttattgggatattttattattactattagttattaaaattattattattttatttattatgtataataaaatatatatttatattttatttattatttattatattattgttattaattattaaaattattattaattttctcactactaatgagtctcactactcattaatggtctgttcaggaatctggttcttccagattcaatcttgggaagctgcaygtttccaggaatttcaccatttcctctaggttttctagtttgtgaatgttagttgttcatggtaatacttaatgatcctttgtatttctatggtatcaggtgtaatagctcatttttcacttcagaccttttttggggggttcttctctcttcttgattagcctagttagtggtttttcaattttgtttattttattaaagaaccattttttaccttttttatcctttctattgttttggggtctctatttcatttacttttgctctgatccttgttacttcttttcttctgctaactttgctttttgtttgttgttattttctagttccctaagttgtgacattaggttgttaatttataatgttttctactttttgatgtagacatttaacgctgtaaatttcccacttagcactgcttttgttggatcccacaggtt

SEQ ID NO: 758635 - DNA, 691 bp, Homo sapiens
agctataaatctatcggatgctgggctttttattgggatattttattattactattagttattaaaattattattattttatttattatgtataataaaatatatatttatattttatttattatttattatattattgttattaattattaaaattattattaattttctcactactaatgagtctcactactcattaatggtctgttcaggaatctggttcttccagattcaatcttgggaagctgcatgtttccaggaatttcaccatttcctctaggttttctagtttgtgaatgttagttgttcatggtaatacttaatgatcctttgtatttctatggtatcaggtgtaatagctcatttttcacttcagacyttttttggggggttcttctctcttcttgattagcctagttagtggtttttcaattttgtttattttattaaagaaccattttttaccttttttatcctttctattgttttggggtctctatttcatttacttttgctctgatccttgttacttcttttcttctgctaactttgctttttgtttgttgttattttctagttccctaagttgtgacattaggttgttaatttataatgttttctactttttgatgtagacatttaacgctgtaaatttcccacttagcactgcttttgttggatcccacaggtt

SEQ ID NO: 758636 - DNA, 691 bp, Homo sapiens
agctataaatctatcggatgctgggctttttattgggatattttattattactattagttattaaaattattattattttatttattatgtataataaaatatatatttatattttatttattatttattatattattgttattaattattaaaattattattaattttctcactactaatgagtctcactactcattaatggtctgttcaggaatctggttcttccagattcaatcttgggaagctgcatgtttccaggaatttcaccatttcctctaggttttctagtttgtgaatgttagttgttcatggtaatacttaatgatcctttgtatttctatggtatcaggtgtaatagctcatttttcacttcagaccttttttggggggttcttctctcttcttgattagcctagttagtggtttttcaattttgtttattttattaaagaaccattttttaccttttttatcctttctattgttttggggtctctatttcatttacttttgctctgatccttgttacttcttttcttctgctaactttgckttttgtttgttgttattttctagttccctaagttgtgacattaggttgttaatttataatgttttctactttttgatgtagacatttaacgctgtaaatttcccacttagcactgcttttgttggatcccacaggtt

SEQ ID NO: 758637 - DNA, 642 bp, Homo sapiens
gtcagtgttttgcctatttatttctccttcctctcaaaccctgacaatcactcatctttttactgtctttatagttttgcctttttcagaatgtcatataattggaattgtacactatacagccctttaatattggcttctttcattcaataatatacacttaagccgggcgcggtggcttacacctgtaatcccagcactttgggaggctgaggcaggcagatcacttgaggtcaagagtttgagaccagcctggccaaacatggtgaaaccccgtctctactaaaaatacaaaaaaaattagccaggtgtgwtggcaggtgcctgtaatcccagctacttgggaggctgaggcaggagaatcgcttgttcccctctttgtgttcatgagttattatttacctcccactcataagtatgaatatgcagtatttggttgtctgttcctgtgttagtttgcttaggataatggcctccagcttcatccatgctgctgcaaagaacatgatatttttcatttttatggttgtgtagaattccatagttgtaaatgtgccacattttctttatccagtctaccgatgaacaggatttagattgattatatgtctttattgtgaatagcgttatgatgaacatatg

SEQ ID NO: 758638 - DNA, 660 bp, Homo sapiens
gtggatgatttgatttactttttaaatcaaaagcaatctttcttaaggcaatattagagtagtttttaatggcagtgaactaagctgtgatgatgattttaaaaaataaatttaattatttttacctttctgttatttgaaaatctagatggaagcagatgaatatgagctaaatgctctgtagtagaggtgagagggaatttaaagtgataatgtcttaattgacaagattgcagtcctaaatacatcagtgamaagtttaagagagaataacatttcaggattaatgctttaaattaacagctcactacttcatacactcggttgcaatctatcatgctgaagataggagaagtttatcttcagggatacctcttacattttctaggatttcttggccttattaattcaaatcttactttcaatgcatgcatgcagccaagataattactagaaggcaagatcaaagccggcatattatagtcctattccattttctgctgatgtgagtgatctgcctctcctttgatgttgtatgcttctacagcgaaagtacagaggataaaaatactacaccatgtaatctggcatttatcccatgagagcagaattccaaattgtgacacatgtcaagaagttaaaaaaaaaaacttaaaagag

SEQ ID NO: 758639 - DNA, 583 bp, Homo sapiens
gaatgtaatgcagggagccttcttcacgagctgcactggagagaagcttggggatgatcttcccccaaaactgaagcaacacaaatcaaaaccaacacacaactttaaagacaccagccccaggatagcagtacttaggatcactgcccctgagattacaaatccaactggcaaaatgatccttgaaagtcacttacatgcaataaatacataagatcatgaaaaaagaaattatgtgtcaactttactgggccacagggtacccagacatttggtcatacattattctgagtgtgtctttgaaggtgtttctgggtgagattaatatttaaaagaatgagtagagtgagtaaagcagataacccttcctaatgtgagtggatctcatttgatcaattgaagacttgaatagaacaaaaaagctragtaaatgagaattccttaaaccctgattgcttggaatattggtttttttccaccttcacctcaaactgaaacccagctcttcttgggtctagagcctgccagtttttgaactggaactacatcattagctctcaggtctccagtttgccaagtgcaa

SEQ ID NO: 758640 - DNA, 312 bp, Homo sapiens
aagacccacaggtgtggaggggcaggccaccaccccttcatcttcattttacatttcttttagcatgctttgtaattggcctttagtgtaagattttaggctaatctggctaggggttgggctgtgtttaatgttttctgtacttgtacataccagaggtcrcaaacccctctatatatattgcttgtctcccctgtgtgttttttttttttttttttttttggtttccctaagaactcctcctcagagagagtctgtgtcttgtgcctctttcagctataattctttgttatactgtgttctgttggtgtg

SEQ ID NO: 758641 - DNA, 641 bp, Homo sapiens
aaaactacagcaaaattcaacatgaaggtcagactgagtcttgccaactgttagaaagttttgtagcatgtgcctgagtaatgtttttatccttccacatcgcctcctctactcatgtattgtgccaagccatagggaaaagttagtcagtgtgttcatagacacaggggaaagtaataagaggaaggggaattaactatcttatctatctgggataaaatccttctgttttgagacatgctttataagttacttcattccaattagtgtcatttataaactgtcatacttaataagcagcaaatgccacagtcagcactgtagtgtagccatccttacrggatacaataattagctcaccttcaaatgaattcttggttttttttccctgccaagctccaagaacaaggagcctgtttccgaagggctgtgtcacattgataaaaggggcaatggctctcaaggaagaagaagaggtacctagaaaagagcaaagcaggggctgaagagccctgcccctccaaatgttgtcctttcttacatgctctttgatgctgggaagtaggaagtgagtgaggaggatggggagaggcagaaactagtgagagattcacatctttacctctttgagacttacattc

SEQ ID NO: 758642 - DNA, 626 bp, Homo sapiens
ccttctgaagagacttagaataattctgattttatactaattttatcatctgcatctggctttgtatcctaagttggataaaatacataactccatggtgtacttatgttcttttttaaaaaaatttagtaatttaaactaattttgagaaatatgcaaatgagtcaatgatgcaataattttatcaatatgaagtctcatatttcacattaatgaagatttgtaaccctggtgatatccctttcctaaaaaccatcaccgtattgtcatccttatcatcatcaggcatgcatttttcgagaggaaaacaatagaataatagcaaaacttgaagagacagtgtctgctttgtaatattttaagttatttgatcttggtgaactstgtccttcctgccatcctgactgtggcctgttttatgctttcctccaaattcctcacctgcttagcaaatgtgtccaatcttttaaggaaagactttgtagtttatccaggcacatgccattctgttgaggttgggggtggggatcctcaacatttatgttttagagatgataggataattttgataaatattttcaaattttttacagtgatacacttctgtggaaaatcctgtcacagct

SEQ ID NO: 758643 - DNA, 546 bp, Homo sapiens
taaaaggaaggggtttcttttggagcctccagccgtgcagtttgtgttagggaggtttgatgccagcactctcttggctaccttagctggtatctcagtagattgtgtgcccccatccccccaagtccactgtctctgttcctagttcagcactaggattcacctaagattcgcagtccttatggcctagactgtctttcaagtttccttggaaacacagaayactcaagccatcagtggcgaggtttgccaaaactcaagcagggactgctggggttggcaattcccctctggctagggctggtttaaatgttccctctgtgttggggatgtcagttgagtttggtcccgattttcctttctgctctaataccactgaggacaccactgtgttcaatgcctcacaattgctgtcctctccctcccccagtgcctggagatgctgtccacatcatgcagctgctcggggtaagggatggagagctggaggggtggcatctgtgtttactatctcttcaatgcctctttcagaaataaatagttaaa

SEQ ID NO: 758644 - DNA, 635 bp, Homo sapiens
gcaaagtggcatttttccttggaattcattgaggtattcaggtcataattggctgtgggacttgggaaaatgtgggagaagaaacttggcttttggaaaacagggaaaaattatctcaatgccccagaagctctctcagactacagatttgcagtgggaaatttagagttagaatttccagtaatgaagacaatatatcaaagccatggmtttcaaacaagggggaaggtcagggaagtggttaaaaaaggaaaagaaaactgaaataaatagtcttggatagtcgaatggtcaaatactctgagtcataggaaacaatgatattgtgtctaaatgttaagttgggggtgggtgtcttgtgcttatatctgattacacattgttaaacaggggtacacaaaaaagatgcaacacccactaaaaagtttcatttatcaagtttaacataataattccttctttatcatattccctctttagaatctgtcttgcttgctttttatacttcttcctcagaaatattaagggttattgttattatcaataataatatcagtaatccatcacttgatcacatatttcagttgtacctcctatgtttctggtactgtgctaagaaatataagatccacaaa

SEQ ID NO: 758645 - DNA, 606 bp, Homo sapiens
tcgtgtaaagaaaagggaatacaaaatttccctatcgagagaaggaaacataactgagtgatttaaggcaacatgtctagtctgtctaaattcctaccactttctttttttctttttcgagacagagtcttgctgtgttgcccaggctggagtgcaaaggtgccatctcggcttactgcaacaccacctccctggttcaaacaattctcctgcttcagcctcacaagtagctgggattacaggtgcccaccaccacgcttggctaattttttgtatttttagtagagacggggtttcgccatgttggccaggctggtcttgaactcctgacctcaggtgatccacccgcctcagcctccaacagtgctgggattacaggcgtgagccacagcgcccaaccatttcctaccactttcaagcagtgtggcactgatggttatrtctgaaaatctcgggacattgaataaattaatctgcatgacttcttcaggaagaaagaagcagtgatgtatacaggcctcccttggctaattgaggcttcagcctcataaaactagcacattcaaacatgattttagtatttcgacataggttgtcagcctccgg

SEQ ID NO: 758646 - DNA, 580 bp, Homo sapiens
ccttggctaattgaggcttcagcctcataaaactagcacattcaaacatgattttagtatttcgacataggttgtcagcctccggatgtgaaggcttcttaaccctttaaagtaactctgttttctttctcaaagaaatggaggattaggccatttttttcaaataacttattccaatgccttctgggcacactcaacctatctgtactctgcttgatttggactctttcattcagcaaccatgaacttccagttgcagggcactgtgctgctctatcattccmaaattatattaccatgtaggagaagatcagctacttgatggtagaaaccagaaatgatagcaaatgcttacacaatgcttatacaaatccttgtatttgaaataatagtgaaaacttacatgatgcttaccagcagggactatactagaaataatatgaagatacttaattttcactgtaatcccatggaaaaatttagaaatataccaccttacaaattaggaaagtgaggcacaaagaggtgaggtaatttgcccaaggtcacatacctaataaagtcaaaacatgagtgcaga

SEQ ID NO: 758647 - DNA, 663 bp, Homo sapiens
gtctcgtttttccaggtgcagtctgccatggcttcccttgactaggaaagagaaatcgcctgaccccttgtgcttcccgggtgaggtgatgccccggcctgctttggcttgcccttcatgggctgcacccactgtccaaccagtcccattgaaatgaamctggtacttcagttggaaatgcagaaatcacccatcttctgcgttgatcacgctgggagctgcagactggagctgttcctattcggccatcttgctatgtaaactcaagatttgatgattttataagggaaaacccctttcacttggctctcattctctcttgcctgccaccatgtaagatgtgacattcaccatcccccatgatgtgatgggggacttttgcctccccaaccacatggagctgagtccattaaacctccttctctttataaattactcagtctcaggtatgtttatttcagtagtacaaaaacggactaacagaaaaaattggtaccagtagggtgggacactgctgtaaagatacctgaaaatgtggaagcagctttggaactgagtaacaaggagatgttggaagagtttggagggctctgaagaagacaggaaaatgtgggaaagtttggaactgcatagagacttgttgaatggctttgaccaaaatgc

SEQ ID NO: 758648 - DNA, 547 bp, Homo sapiens
ttctaacatacaaaattgtaagacaatacatccacactattttaaatcatgaagtgtgtggtaatttgatacaacatcaaaagaaaattagtacaaattttggtactaatagtgggatgctactgtaacaaacacgtaaaaatgtgaacatggctttataattgggtagtggccagagactggaagaattttgaagagcatgagagaaaaggcctggagtgccttaacagaccctacgagaattatggatgataatcactctgctattaaggattcacaaggaagtgaggaacatggttggtaaagagacatatcacttcagagaatactaaactgtcagcagactgctggtggaaatgyagacactgaaggaactgcgggtgaggactcagaggaaatgagcacctagatcggaaatcctcagctctttcatcattctctttattacgttttctttgttttctatagatagaacacaatgtattcctgaatttttgtagacagttaaacatgttgggggttgggggaggttggctgtcggtttaat

SEQ ID NO: 758649 - DNA, 547 bp, Homo sapiens
ttctaacatacaaaattgtaagacaatacatccacactattttaaatcatgaagtgtgtggtaatttgatacaacatcaaaagaaaattagtacaaattttggtactaatagtgggatgctactgtaacaaacacgtaaaaatgtgaacatggctttataattgggtagtggccagagactggaagaattttgaagagcatgagagaaaaggcctggagtgccttaacagaccctacgagaattatggatgataatcactctgctattaaggattcacaaggaagtgaggaacatggttggtaaagagacatatcacttcagagaatactaaactgtcagcagactgctggtggaaatgcagacactgaaggaactgcgggtgaggactcagaggaaatgagcacctagatyggaaatcctcagctctttcatcattctctttattacgttttctttgttttctatagatagaacacaatgtattcctgaatttttgtagacagttaaacatgttgggggttgggggaggttggctgtcggtttaat

SEQ ID NO: 758650 - DNA, 522 bp, Homo sapiens
gatagcatgtgaacagttttatttaacaactggaggaaaatgtggaaaatgtactttgctgaaaggcaacccttgttttgattcattagaactttagtagtcatgtatgattattgtaataatgataacaaacatataaagccagggctcctggagaggtgaaactccaggggaaaaaaatcctataatgagaatcatacaaatcaacttgcagctttgtttctggagaaagtagaaagacactcccgattcttcataatgacaggtcagctgtcacatgascgggaacaaaatgtacgcaattatgatggttcaaataaactctgaagaagaaagcctgaaaaggtagtttaaatttaaagccaactggtagttccagaaggcatctcataaaaacagatgcatgttttctctgtaggaatttttaaatgtaggcttcaaaaaatttccaaagttatgtcttccagaggaaaacgagttcacaatcaaacatctcaaaataaataagaaaataattcacca

SEQ ID NO: 758651 - DNA, 524 bp, Homo sapiens
ttacatgtaattgttaaatatttgtaaaataaatattgcctctgtgcatgaaagtttggagaaagatgggggaaatacactttaagttgttagcatgaagaggtggtggcctgcatggcagagagggagcaatcatagaatgtggaaaaacattgctctatctaagacgtttatatttttaggtttcaggcaagtcgagagtcagctgcagtctcccccttctccacctggcacttgcctattttgagctgtcrttatcctcctcatctcccccttctgtttagcacactgacccctctaaatgtcagctgggaataatgggctgctctagtgccagcaagcttttcattgtccaaagccttgggatctgccttttgctcctaatttctatgtctttgagtttttaagtttcagggcaattattcccaattccctgttagcagttgttttcttcccaagggctagactgtgaattcatagtacgttcaattttcagcaaagatttttttattttcacttctctt

SEQ ID NO: 758652 - DNA, 525 bp, Homo sapiens
atatacaaagaactcttaaaaattaataataaaaacacaaacaacccaatttaaaaatgggccaaaaactttaatagacatgtcaccaaaaaaaatatacaaatggcaaataagaagataagaatgttccacactgtatgtcttcagggaaattaaaacaacaataagaccctactacacacctattagaatggccaacatccaaaacacagacaacaccaaatgctggcaaggatgtggagcaacagaaagtctcattcattgctggtgggaatacaaaatggtacagccattgtggcaaacagtttggtgatttcttgcamaattaaatatgttcttactatatgattcggcaattgcacttcttggtatttaccaaaaggagttgaaaacatgcctgcacaaaaacctgcacgtgaatgtttatgaaacatttataattgctaaaatttggaggcttaaaacaacaaccattataatttctcatgctgtcatatctctatgggtccgctgggcactcctgca

SEQ ID NO: 758653 - DNA, 635 bp, Homo sapiens
tcaagagcaacatgtttattactccgtatatatttattatttctgttgaagccatcctagaggggccctcaacattattgcttctgcgtacaatagaacttgacatgtaaaattaatcccttaaagatatatataaatgaataactaaagctgcatataggtggattgggactggtgattgaaatgtatstgttataatttagttaagatttagtcactatcttaaggataacgtgtttggctgtgagtaaaacaaggtagtgtgaaataaaacagtaggtcagacttgtttcctcctttctttctaccctttctcacatttgtctcatcttatatttaactaattttccagaacaaatataaagggtatgaatgactctaactctgaagagagagaaaagccagagcaatgattacacctgcccttctcacttttagctcttagcacatttatcttgtattggacacattttcaaaaacttatatgttgggctcatgcctgtaatcccagcactttggaaggccaaggtggacagaattgctttagctcaagaatttgaaactagcttgggcagcatggtgaaatcccatctctataaaaaaattttgaaaattagctgagcatggtggtatgc

SEQ ID NO: 758654 - DNA, 635 bp, Homo sapiens
tcaagagcaacatgtttattactccgtatatatttattatttctgttgaagccatcctagaggggccctcaacattattgcttctgcgtacaatagaacttgacatgtaaaattaatcccttaaagatatatataaatgaataactaaagctgcatataggtggattgggactggtgattgaaatgtatgtgttataatttagttaagatttagtcactatcttaaggataacrtgtttggctgtgagtaaaacaaggtagtgtgaaataaaacagtaggtcagacttgtttcctcctttctttctaccctttctcacatttgtctcatcttatatttaactaattttccagaacaaatataaagggtatgaatgactctaactctgaagagagagaaaagccagagcaatgattacacctgcccttctcacttttagctcttagcacatttatcttgtattggacacattttcaaaaacttatatgttgggctcatgcctgtaatcccagcactttggaaggccaaggtggacagaattgctttagctcaagaatttgaaactagcttgggcagcatggtgaaatcccatctctataaaaaaattttgaaaattagctgagcatggtggtatgc

SEQ ID NO: 758655 - DNA, 635 bp, Homo sapiens
tcaagagcaacatgtttattactccgtatatatttattatttctgttgaagccatcctagaggggccctcaacattattgcttctgcgtacaatagaacttgacatgtaaaattaatcccttaaagatatatataaatgaataactaaagctgcatataggtggattgggactggtgattgaaatgtatgtgttataatttagttaagatttagtcactatcttaaggataacgtgtttggcygtgagtaaaacaaggtagtgtgaaataaaacagtaggtcagacttgtttcctcctttctttctaccctttctcacatttgtctcatcttatatttaactaattttccagaacaaatataaagggtatgaatgactctaactctgaagagagagaaaagccagagcaatgattacacctgcccttctcacttttagctcttagcacatttatcttgtattggacacattttcaaaaacttatatgttgggctcatgcctgtaatcccagcactttggaaggccaaggtggacagaattgctttagctcaagaatttgaaactagcttgggcagcatggtgaaatcccatctctataaaaaaattttgaaaattagctgagcatggtggtatgc

SEQ ID NO: 758656 - DNA, 635 bp, Homo sapiens
tcaagagcaacatgtttattactccgtatatatttattatttctgttgaagccatcctagaggggccctcaacattattgcttctgcgtacaatagaacttgacatgtaaaattaatcccttaaagatatatataaatgaataactaaagctgcatataggtggattgggactggtgattgaaatgtatgtgttataatttagttaagatttagtcactatcttaaggataacgtgtttggctgtgagtaaaacaaggtagtgtgaaataaaacagtaggtcagacttgtttcctcctttctttctacccwttctcacatttgtctcatcttatatttaactaattttccagaacaaatataaagggtatgaatgactctaactctgaagagagagaaaagccagagcaatgattacacctgcccttctcacttttagctcttagcacatttatcttgtattggacacattttcaaaaacttatatgttgggctcatgcctgtaatcccagcactttggaaggccaaggtggacagaattgctttagctcaagaatttgaaactagcttgggcagcatggtgaaatcccatctctataaaaaaattttgaaaattagctgagcatggtggtatgc

SEQ ID NO: 758657 - DNA, 636 bp, Homo sapiens
agctgaagttgtgtcctgcccctaggatcctcaggccacccatacaccagagtagttgtgcacctcatactacagtcaagacagtgccctccttcttggggttcccaggcttccagcataccagagtagtaaaacctcttctcccagcaccatggatgaggcagcatcttgtcctctggcggcttcaagcccctggcacactagagtagctgtaccccttagtgccacagctgatgaggtgtaccatattccaagggtctggaggatatgctgacccatgtagccacactctgyggggctgatcagacatagtgccttgcatcccagggaatcagagtcttggttgtgctgtgccaccagatcctccaggctgaatagccacagtatcctgcttatttacaattgggctagccccttgcagtctgagctgctgagatgccttacttccgtggagaaggtagtcattggtgtgctgcttccctcccaccagggatcaagccacagtagtgccttgacattcctgggtccttgctgctactgcacctggccacatagaccctgggccactgccatatcctaccaccccaagatccatagttaccattgtgcaatatgtcatcacctggagcactggct

SEQ ID NO: 758658 - DNA, 572 bp, Homo sapiens
gcacctggccacatagaccctgggccactgccatatcctaccaccccaagatccatagttaccattgtgcaatatgtcatcacctggagcactggctgctatgccctggtttgggttctaaatagcagctgagaacctcctcctcaaagcctgagcatccagaacatcataccttsttcctcagagctgggtcaaggctttgccctgccttccagggtcagaaccacacctacatcttagacccctggggtctaactgcttgggtttgctcagtgcaatagaccacagcttagtgggagaattacatccatttctgtcttggaaagtgaacctgtaccttaagtcctaggtgctacaatagtttcacaagaccctgagcccaggaacccaactctatagctgctcagagcacctatgacctgaatccttttgccaatgcagctgtttgtgggttgtgtcagacatgacaacaagaaaaattccctcagttaagatactttgctatagggaaggcaagaacaggaggatccctaaatcccttgctttgataacctacacagccaataccactg

SEQ ID NO: 758659 - DNA, 660 bp, Homo sapiens
tttgaatacatcatcttatctgtcctaattattgtcaactcatctggatccagtgctgatagccacataatttctcagcatttacttatctttttcagtccatattatataccattgggagatgtgttaaaaatatcttataaggtcatagtgaggataaaatcttcaaataactatattctgaacataaatcctgaggtctttaaagtttacctcttctcctgtgcataaaatcctatggggacgtcctcgtcctcagcaattcttgacgcgtatgcctcttcttccaccgctttctcaaggtaaccctttgtcttacattcaaggccccatgctgtagtcttccactctcgtctttgcctagctctaaggccggatttatggtggtcaaactgaagatgatgaggggagagacggagggagagagagaaggagaagmaattgcagtccaaagctatcctcttcacaatattggccctgctttttgtaccacatgtatttagtcttgtcactcactaaatctaggaagcctaaattcatactcagaagaaatatgaaatacctctttctctagcaggttgagctatgagtagcattcacaactgtagtatacatgttctatagggaccaagaactttcttaagggctccaggcatagcg

SEQ ID NO: 758660 - DNA, 646 bp, Homo sapiens
accagaatgttgacatcaatccagtcaaaatacagaacagttccatcaccacaaggatatatgaagtttgaagtgcctatagatagtattcaagcaagacttgttatagtggcattctctaaggacatgctctttacctagttttgatcattctaaggtaccagaaaccttcaacaactaagtaagacccacctgcatcaggtgcctcaatataataatacatggacattgaggacctttttaaacttagggttttatgcaatacatgtctagtagagagttagaaatatatgtaggtagtgattccacctataaaacaagctccacttgggaaaatagtttacacacacacacacacacacacacacacattcatgcatgcgcctatccacagatggtgrcacatatacaccacaagcctgtacatgcacagatgcacattttattagaatagataaaattttgtgagtggccattagatgaacccctcacatttgaagagagtgattattctgtcttttaaagggtgtgcttttagtgtaaccatagccaagaaaaaaaaaagagagagaaagagattaaaaacagctggaacatatgtctattttcacctcctccatctggaactttgttttaggatatcaca

SEQ ID NO: 758661 - DNA, 635 bp, Homo sapiens
acctgttctcaggaccattttctttataaatctgcacatgcttgcattttcttacactctcttttatgtgctgttttatgtcttcttggcacctcaattaaaattgagactgggaggataacatgcccgtttagattttgtgtataaacagattttttgttttttaatttttttttttgtgacggcggtagctgggaatgttttacaagayggcttcatgagcctcagttctgaggagcaacttggaaagctgtatccattctacatagccatttgacccttctctaggttgttgcttacctattgcttttggaaagggcagagtatttagtggaacataatggtatattgaaccagatgccctggatattagctctctggtgttaacattggcttcattttacttttcataaaattgtgtggtctagctgaactatgaagttccttccaagtttgttttgtaacttcagattaagctaagctataatttatttggctcagaacgtgtttctgagctaaattatccccttaaactagttgagtgatgtttatgtcatagtgtatatagaacactaagttgaaatctatatggtagctaatggagaaaaattagttgtagaaaagagaataacttc

SEQ ID NO: 758662 - DNA, 578 bp, Homo sapiens
ttaacattggcttcattttacttttcataaaattgtgtggtctagctgaactatgaagttccttccaagtttgttttgtaacttcagattaagctaagctataatttatttggctcagaacgtgtttctgagctaaattatccccttaaactagttgagtgatgtttatgtcatagtgtatatagaacactaagttgaaatctatatggtagctaatggagaaaaattagttgtagaaaagagaataacttcagtctgtcaaatttcttttaatgaagattttttgaaaaatttttcccgtttmctcattatataaataaatgtaaccttttataccgaacttagagtttaattgaaaatgtcatagaagataatgcaaccatattcctttgtatagcaattatgtaagccatattagtagtgatagggatatttcaaaaaatgtaagggtataggtttttaagaaaaggttttttaaaacatttgcaaacttatgaagccgtgaaaaaaagtcattttgtggcatgaatagtatgtagattaaagcaccttatgctttattttgctttggattagag

SEQ ID NO: 758663 - DNA, 607 bp, Homo sapiens
tggagaaaataatattcaagatagtgttccaggacttattattatcatttcttactggtccattggctgagttggaataccagctaatttattagatataccctatgcttccattgtgcaaacctcagcctatacttggctacattctcttgtaaacattttcaagcttttwaaaaaaattccaaggttaaatttgagttgtagaaaagaaatatgaataatggccatcataattattccattataaaaacacatacacacactcaataaaatgtgttgttttaaaattattaccctaaggcaagtggtgaatagatccaataaaaataaaagaaatagaatgaataagaagataataagacgaatggaagactacattctttctactgactggtcatcggtttttctaaatcttggtcctttatctccaatgggtctttgaggacaagcacatcttatgtactttgtaaatatttgctgtttatgcacattttgagtatcattgtttagctttgcttttcagatgcatgaaacaagtaaatttgaggcagcaaatgagtaatttgtaaatctagacacaatgagaaggcaattaagaatgctgctt

SEQ ID NO: 758664 - DNA, 562 bp, Homo sapiens
caataatctatactctaattcaaaaagtcaaaaaagaaaaatcaaacccaaaggaaatagaaatgagaaaaagtgaaaaaaaaaaggcacaaatttataaaacagaaaaaagtgtacaatagagaacatcaacaaggccagcaatttgcccttgggaaaatctaatacaattaaaactctcttaacaagccttattgaggaaaaaaactacagcacgaatgaccaatatcaggtataaaaacaaaagggatattgatagagatcctacagatgtcaaaaagataagaacagtaactttatgtcaatgaagttgayaatttgaataaaatggataagcaattttttttttttttgagatggagtctccctgtattgcccaggctggagttcagtggagcaatctcagctcactgcaacctctgcctcctgggttcaagcgacctgcctcagcctcctgagtaactgggactacaggcgtgcaccactacgcccggttagatttttttttttttcagtagagacagggtttcaccatattggtcaggctggtctcgaactcctg

SEQ ID NO: 758665 - DNA, 562 bp, Homo sapiens
caataatctatactctaattcaaaaagtcaaaaaagaaaaatcaaacccaaaggaaatagaaatgagaaaaagtgaaaaaaaaaaggcacaaatttataaaacagaaaaaagtgtacaatagagaacatcaacaaggccagcaatttgcccttgggaaaatctaatacaattaaaactctcttaacaagccttattgaggaaaaaaactacagcacgaatgaccaatatcaggtataaaaacaaaagggatattgatagagatcctacagatgtcaaaaagataagaacagtaactttatgtcaatgaagttgacaatttgaataaaatggataagcaattttttttttttttgagatggagtctccctgtattgcccaggctggagtkcagtggagcaatctcagctcactgcaacctctgcctcctgggttcaagcgacctgcctcagcctcctgagtaactgggactacaggcgtgcaccactacgcccggttagatttttttttttttcagtagagacagggtttcaccatattggtcaggctggtctcgaactcctg

SEQ ID NO: 758666 - DNA, 666 bp, Homo sapiens
cagcatgctcttcctgttgccagatgtaaaataacaaagaactctgtgtgtgtgtgtgtgtgtgtgtatgtgtgtgtatgtgtgtaaatagattgtgaaagcaactgctatcccttgagggttttaccacattgcttgtgtgtgattacgaaaaagaacctccttggcatcctacaggctgtagcgcttcatgawctggctccaatcactgagacagtgcagttgagaacacagtggcccatccacatcacccaggctgacagacattataagctagacaaatttgattggttatctgttatagtgtggcgactttcaggaaataccgagattttcacttaaattaggtatgtctccaaatatttaaaattgatgcatttcacatatgatagaaaagaaatattcagtaatgggtacctcagtaggaaggtattgcatattgtaattttgtaccagaaaattccacacagtttgatttcttagtaactatctaaaaattaacctgtaaatttagtaggaccagcatgtcatctgcttttactatgtataaaagcatagatagtacaatagaagcttttgaaatattatgaaaataatgttttcaggtataggtttttatatctatctatctatctatctatctatctatctatctatctacctatc

SEQ ID NO: 758667 - DNA, 659 bp, Homo sapiens
gattatagccatgataacataaggcttcccaggagccagatggatcctgggcaagtctgaagaaccatttggagttgttcagaacaaaccaggttacatcagagtcacatcacaacttttggcaatgaaaccatgccagacaactcaatgtgttttagattttggtactactgaatgaaatacaccatacatgcattaatgattatttatgtctactaagtatctgccagtatattccttcagaattaaaagatttgagccaaaaagagtttttactatttagaatgtacasatacatcttttttttttaatttaaagcacgaaggtagttccaatcagcgacagtaattcaaaatatttatgtacagtgcaactaacagtacaagtatcacaattctaatctacgctaagcaaataaaacaaaattacagctcaagtggaattccttttttgtgttgactttccatgccacctcaacaatgttccttaaatatttgattactgaaatattcttattaggttagctgtaacaaagccctattttactcaagggaataataactaggcctgtgtatataacaacccaaatagttcttcccattctaccattctaacagaggccataagacaaaaaatctgtgggttgatgcatttagttt

SEQ ID NO: 758668 - DNA, 615 bp, Homo sapiens
tccttttttgtgttgactttccatgccacctcaacaatgttccttaaatatttgattactgaaatattcttattaggttagctgtaacaaagccctattttactcaagggaataataactaggcctgtgtatataacaacccaaatagttcttcccattctaccattctaacagaggccataagacaaaaaatctgtgggttgatgcatttagttttttataagtatcttatataaaatacatatccacacaaacattctcaatttcaaatcacattaaatgtttttttctcttctaccccatgacacttagtacaaattataagatatgacccggacccaccttgtattaataaatgtatgggcacacagacttattgtctttcttctactaaattataagctctttgagagtaagaatcatcttattcaccttcctaattcttgaagtaagcagcagaatgcattgtkccatgaaaatgttcaatgtgttcttcacaacattgtgaactgatgtgttgaatcaggttagctcagtcatccctgtgttatctgaaatatttcgatattactaattaagtttcagtaatatgtcaaattttaacagctgcctcct

SEQ ID NO: 758669 - DNA, 580 bp, Homo sapiens
taagggttctactaaactatggctgctacctgatcattttgttatcctgatcctgatatattagaaggaaaatataaaacagtgagtatgctgacacaaataaatcataatcataatgatgagaaagaagtattgatgcaaaatgataatgaacagtatgtcttagaattcaggggactcactgaggagctcttggtgcccccaagcctagtgataaccatggacaaacaattacagtgacctctgtctgaaaaggtcatagtaaccaggggctcaagcccctcaggatgaaagtctttgttacccataggacaaacctacacctacagaactactggccaaggatgagaggaatcyagaatgagtgatagaggaggggcatgatgattattaattatagttttaggattaattgcagcagtaaggactacaaaatctaccattaagtctcctgtactaagttgttgggtttttaaaagaaattgtaatctcttgccacctagaagaatatgtagcaggaatggggtgaagttaatggaggcaacagtggatattaatagtggtaggctggattttagca

SEQ ID NO: 758670 - DNA, 565 bp, Homo sapiens
cctagaatgagttcagaagtatttacagttgatcaattttctggaaaactatgtataaaatattattacatccttaatttttttattttttatttttatttatttattttttttgagacagatttttcactcttgttgcccaggctggagtgcaatcgtggcgatcttggctcaccacaacctcctcctcctgggttcaagtgattcttctgcctcagcctcctgagtagctgggattacaggcatgcaccaccacacccagctaattttgtatttttagtagagacggagtttctccatgttggccaggctggtctcaaactcccaacctcaggtgatccacccgcttcggcctcccaaaatttaccagagaagtcttctaggcsaggagttttcttatgcaaagggtttttagctacaaatttcatttatttgtttcttcttgatatttgttagtttgtgtcttttaagaaaataattcattttatctaagttattgaatttattggcataatgttgtttatattattttatttgtataataacaatcaacatttttgtctac

SEQ ID NO: 758671 - DNA, 616 bp, Homo sapiens
ttttttctaaatgtgaatttagactgcacagtcttttaacataggggttgatccttagagatgaatgacattaattttgattggcccctatctttattttagtcacagaacttgaggtcctgaactcaggacagcaagacatgtcaaaaggacttctgtagtggaaggtctctgtgacatgggcatcaggcattagaggaygcaccaagatgcttgataagggacctctatgaaagggcttaagttgtagatttttgaaagcatctatcagctgggcgcggtggctcacgcctgtaatcccagcactttggggggccgaggcgggcagatcacgaggtcaggagatcgagaccaccctggctaacacggtgaaaccccatctctagtaaaaagacaaaaaaattagctgggtgtggtggcaggcacctgtagtcccagctacgcgggaggctgaggcaggagaatggcatgaacccgggaggtggagcttgcagtgagccgagattgtgccactgcactccagcctaggcgacagtatgagactccatctcgaaaaaaaaaagaaaagaaaaaaagaaaaaagaaaaaagtaagcatctatcactaatgccttatt

SEQ ID NO: 758672 - DNA, 404 bp, Homo sapiens
acaagagtgtaaggggagataaggaatatatttctttctacacccatgaggccaaaatagtagggatgatgacaactgggaggtaacggtagccaaacagaatagcaaaataagtatcagtgtatatagtgtgtccttcacaaatatttgttgaataaatgaataaaagtataraaaacataggcatagggtctctggttttagggatttttaaaatattcaggtatttgcactagttaggtattagcccagatgaagaataaagtcatttttatttgcttattttgatgcatatgttgtatatgtcaatgtttttagtcacatcctgtttaatgtagaaaaagatatttttcatgtgtaaaaatgtttaaaaaaacaatttaaaaagtattttctgtgatcct

SEQ ID NO: 758673 - DNA, 404 bp, Homo sapiens
acaagagtgtaaggggagataaggaatatatttctttctacacccatgaggccaaaatagtagggatgatgacaactgggaggtaacggtagccaaacagaatagcaaaataagtatcagtgtatatagtgtgtccttcacaaatatttgttgaataaatgaataaaagtataaaaaacataggcatagggtctctggttttagggatttttaaaatattcargtatttgcactagttaggtattagcccagatgaagaataaagtcatttttatttgcttattttgatgcatatgttgtatatgtcaatgtttttagtcacatcctgtttaatgtagaaaaagatatttttcatgtgtaaaaatgtttaaaaaaacaatttaaaaagtattttctgtgatcct

SEQ ID NO: 758674 - DNA, 586 bp, Homo sapiens
ttcctcagggacttttccaaatggaaataatttgaagaatacaagagcccatacttataaatgctaagcaaatgataagcagtttcctcctgtcaccctcctggtagtcagagtaattgagtcatgagcaagtctttacagggggactttggaaccatggataaaatcacacaattccagaacaaaaagggactggagactttatcttccacgtgaaaaaaacaatgattagagactaatcattagtaggakcaaagccaagaaaggagttgctgaactgccaatcaagggctttccaccacatcccacacaaaccccgatccaggtcccctgcttgtgacactaacagaaacattttagttttcactgcagagacaacacagttgtggtttgagaaagcactttcctccattctcagttcttaagcgtatgacttaaatagagttgaccacctatctttctcatgggatgcttgacgactgaccttgtatattcaactcccctggacacaatgactggttgagggataaatatgttacctaactagagccaatgaaacataaggatatgcttatcggatcctatg

SEQ ID NO: 758675 - DNA, 481 bp, Homo sapiens
taaatgcagtaaggaaatgattcacacaaatatctgagtacaagattctaagtagagtgaatagcaagtacacaggccctgagacaaaagcaagcttggcagctttgcatccagcaaggctagtgtcactggagcaaaatgaataaaggggaactggttaaaaggtgaggttggagacttagcttgagatgacttatgtggagctttatgaataaggcattgtggtctgacttaaactttaaaagaggcattctggctgtagagggaagaagagactgacaggggtcaggagcaagasggggaggccagttagcaggctgcacaggaggccaggcaagagatgatggcagcttggcctctggctcattcgttacaggtgggaatacaaaatggtacagcaagaaagtttagcagtttttgcaaaactaaacacttatgataccatccagccattgtgttccttggcatttactcaaatgag

SEQ ID NO: 758676 - DNA, 632 bp, Homo sapiens
gattattggtgctggcaagtctgaaatttgcaaagcaaactggcaggctggaaaccctggcaggagccattgttgcagtcttgatttcaaaggcgttctggaagctgaattcctttctctttgggggaccttaatcttytttcttaaggttttcaactgattagatgaggcttacccataatttagagggtaatctgctttattcaaagtctactgatttaaatgttaatcacatctaaaaaatactttcacagcgacatttaaattggtgtttgaccaaacgactggccaccataacctacctatggtgacacataaaattaaacctcacggaggtagttgttgccttttcaagattcccttttcaagttacacaatagcatattccatgctcttcccttaacacactgttgtcctttatttgtgtgtccctaattaatccgtatcattatttctccctaaaattatatgcactttcttctcagtagatgacctcatgcatcacgactaaggatttccagcctcctaagtaccactctactatgtggaatatcacttccatatgctggttttgtcatgtttggtgagctctcttggatcatttatgagtataggacatatagccttaaagc

SEQ ID NO: 758677 - DNA, 632 bp, Homo sapiens
gattattggtgctggcaagtctgaaatttgcaaagcaaactggcaggctggaaaccctggcaggagccattgttgcagtcttgatttcaaaggcgttctggaagctgaattcctttctctttgggggaccttaatcttttttcttaaggttttcaactgattagatgaggcttacccataatttagagggtaatctgctttattcaaagtctactgatttaaatgttaatcacatctaaaaaatactttcacagcgacatttaaattggtgtttgaccaaacgactggccaccataacctacctatggtgacacataaaattaaacctcacggaggtagttgttgccttttcaagattcccttttcaagttacacaatagcatattccatgctcttcccttaacacactgtygtcctttatttgtgtgtccctaattaatccgtatcattatttctccctaaaattatatgcactttcttctcagtagatgacctcatgcatcacgactaaggatttccagcctcctaagtaccactctactatgtggaatatcacttccatatgctggttttgtcatgtttggtgagctctcttggatcatttatgagtataggacatatagccttaaagc

SEQ ID NO: 758678 - DNA, 637 bp, Homo sapiens
atatttggtttatgctatttgggttgcccagcagaagatagaaaaaaatcaaatcactgattattaaaaacagttttgttggctgggcgtggtggctcatgcctgtaattccagtactttgagaggccaatgtgggcggatcacgaggttaggagtttgagaccagcctgaccaacatggtgaaaccctgtctctactgaaaatacaaaaattagttgggcatggtggcgcatgcctgtaatcycagctactcaggaggctgaggcaggagaatcacttgaacccgggaggcggagcttgcattgagcacagatcacaccactgcactccagcttgggcaacagagcgagactctgtctcaaaaagaaaaagaaacacaaaacaaaaacaaaaacaaaaaaccacttttgttattgatactattatggaaatgaaaataacattgttttctttctgaataactttcttaatattgaatgacaatttgaacaaacttaaacaatttttgctagtatgatttccccaatatcattaaataaaagaagggggacctatgtaaattctgatgatactacatatccccctctataattttaatataaaaatataaaggaaatattttaatgacatttagctt

SEQ ID NO: 758679 - DNA, 614 bp, Homo sapiens
agctcatttttctttggtgctttttttatatttatgtttctctgcctcctgtcagatcagaggggacactagattttgataggagcgcaaaccctattgtgaaatgtgcgtgtgagggttgtgcactgctgatgaggtggaacagtttcattccaaaaccatccaaccccaactcagtctgtagaaaaattttcttccacacaactagtccctggtgccaaaatattgaggaccattgcattaaaggatattaatcattcctcggttcttgagagattttgccttctctattatttccttaacaatgagcaaraaaattactcatttttattttatttattttaagaatctttgcttaaaaaccaactaacaaaatattttagtatgagagaatgtagtattttttctaaagtgttgtatagtaaaaaagatataaactaacaggttgagagagggaatatcaccaagtaaagaatgttttagttaaataattcttattttctgagaagcctccttgtcctgtttgttctcaatctgatgacataaaagccaagcatctgcagtagtttagaaatgtaaatcatcagggtttataaaaaattctcaagaaataa

SEQ ID NO: 758680 - DNA, 650 bp, Homo sapiens
agccctttgtccttatttgagcatagaacactaaatcccacttttaacaccattggtaagagaacattaaatctccagtctctggggtactccacaagcctgatctcaaccttggaaagaatagttctcacctgatggagcaaagcctgtcagagaaacaaacataccatctgatttttaaactccaaaatgtgcttaaatttttaaacattccatctctgctaatctatttaagaaatggagtgatggaagtgaatacctaagactaagatgagtcttccaccagagagccaagctaactcactactttaggagcaagagctaatgctttgttgtaaatctaagaatgctttgcatcatttttccactgttcattaaatgaaatgtataccacttaattattattcatgtgacagaatatttttatcataattatatttcaatttaggctcatttcagagctasaaaacccattaaacagaaaccctaataccttcagaattattgagaagagagccctgactatatagtcacactgcttcattctcttgtccccttctggtgagacttcaagaatgtaccttccattgacccattctcttctgataagtatacatatttaacaactgaattcattataattaatgccc

SEQ ID NO: 758681 - DNA, 655 bp, Homo sapiens
tatttgagcatagaacactaaatcccacttttaacaccattggtaagagaacattaaatctccagtctctggggtactccacaagcctgatctcaaccttggaaagaatagttctcacctgatggagcaaagcctgtcagagaaacaaacataccatctgatttttaaactccaaaatgtgcttaaatttttaaacattccatctctgctaatctatttaagaaatggagtgatggaagtgaatacctaagactaagatgagtcttccaccagagagccaagctaactcactactttaggagcaagagctaatgctttgttgtaaatctaagaatgctttgcatcatttttccactgttcattaaatgaaatgtataccacttaattattattcatgtgacagaatatttttatcataattatatttcaatttaggctcatttcagagctacaaaacccattaaacagaaaccctaataycttcagaattattgagaagagagccctgactatatagtcacactgcttcattctcttgtccccttctggtgagacttcaagaatgtaccttccattgacccattctcttctgataagtatacatatttaacaactgaattcattataattaatgccccctaatatacaaagggcc

SEQ ID NO: 758682 - DNA, 611 bp, Homo sapiens
atggttttttaaaaaatgggaatttgtctgcacaagttcttctcttgtctgtcagcgtgtgagatatgtctttaaatttccatcatgattgtgaggcctccccagccacatggaactgtaaattcaataaacctctttcttctgtaaattgcccagtctcgggtatgtctttattggcagcatgaaaacagactaatacagtaaattggtaccagtagagtggggcattgctgaaaagatacccaaaaatgtggragcagctttggaactgggtaacaggcaaaggttggaacagtttggaggactcagaacacaggaaaatgtgggaaagtttgtaacttcctagagacttgttgaatggctttgaccaaaagcctgatagtgatataaacaataaggtctaggctgaagtggtctcaaatgtagatgagaaacttgttgggaactagagcaaaggtggctcttgttatgttttagcaaagagacaggtggcattttgcccctgccctagagatctgtggaactttgaacttgagagggatgatttaggttatctggcagcaaagcattcaagaggtaacttgggtggtgttaaaggcattcagtttcca

SEQ ID NO: 758683 - DNA, 579 bp, Homo sapiens
tctataaacttattttaatttacttgtgcaaaataatatgagtacacatactgtttgtcaacttttcataattaatttaatattatctgattgttcccaataatacctcctagtttatcaaattagccctctaattgctagattaatttttttcatgattttacagatgaagaaattgaaggctcagagaggttaagctatttactgcttgtttgacttctggcagcttaacttctataatttgtttccaagttatgctacgtttttatatgacttgtttcctgttgcaatgatggtattcactaaactgttccaatctggtatctgtgttccatttaggtccttgtgtggtgtccagctaaatttaaaataattcctactttgaaacaacattttttccaatcaataaggtcaactagtatatataaaarttaattaataagaaacgcattctcattgtcagaatagttcaaaaatggaagtgacagaaccaacagggagaaattttcctttatgggaaataatcactagatgggaacattgtaaggagaattcaaactttagaaaaatattcaccta

SEQ ID NO: 758684 - DNA, 626 bp, Homo sapiens
aggaggtgaaagatttctacaaggagaaccacaaaacactgctagaagaaattatagacgacacaaacaaagggaaaaacattccatgatcatggatgagaagaatcaatatcattaaaatcgtcatactgcccaaagcaatctacagattcaatgctattcctatcaaatgatcaatgtaattttttacagaattagaaaaaactattcaaaaattcatatggaagcaaaaaaagagcttgaataactaaagcaatccyaagcaaaaggaacaaggtcagaggcatcacattatccaactacaaactataccatgagcctacagtaaccaaagtagcgtaggactgatacaaaaagagacacatagactaatggaacagaatagaagaaataaagccacacacccacagccatctgatctttcatgaagttgacaaagataagcaatggggaaggattccccattcaatatattgtgctgggataactggctagccatatgcagacaaataaaactggaccatcagcctgtcataatactagaagaaaacctaggaaacactattctggacatcaaccttgagaagaagtgtatggctaagtcctcaaaagcaatcacaacaaaa

SEQ ID NO: 758685 - DNA, 637 bp, Homo sapiens
caaccatttcctgaggccatatcatacctgaaaaataataaaacctatattttaaaacgtgcagttatgatattgatcccacctttgttataaccttataaacaatgtgcctatcaatatcagttgacccattatctctggattatattcatctttcttgggccacacatattcatattcccaaaccttcactgtataagcaagtcagagataacccagatgaatgttttattataatttacatgaagtttagttcactatatagatgactttgacaagttctttataagtagattataaggtctttgggggaggggcaatgactatactttgtgtgtgtttgtgtgtgtacgaaaaagaaacrtgataacttatttggcatttctggcagggagtgaagctagttgaatatctcttatctgaaatgactggcacttgaagtgttttggattttggattttttgggggtatcttggaggtgaaacccaagtataaagatgaaatgtatttatgtttcatatacacattatatgcttaagctgaaagtaattttatacaatattttaaataattttgaaacaaagtttgtgtacattgaacatcagaaagcacaagtgtcactatataaggaacccat

SEQ ID NO: 758686 - DNA, 634 bp, Homo sapiens
ttgtagagacttttcacctccttggttagaggtattctgaggtattttctcctttttgtggctattgtgaatggaattgcattcttgattaggatctcaatgtggatgttattagtatatagaaatgctactaatttttgtatactgacttttgtatcctgaaactttactaaagttctttatcatatctaggatccttctggtaaagtctatggggtttttggcatagaatcwtatcatcagtgatagtttgacttcctcacttcgtatttggatgccttttctttctttctcttgcctgattgctcctgctaggactttcagtgctatattgaacaggagtggtgagagcgggcatccttgttttgttccagttctcaagggagaatgcttccagatttcacccattcagtgatgttggctgtgagtttgtcatagactgctcttaccactttgaggtatatttcttcaatgcccaatttgccgagagttattaacatgaaggatgttgaattttatcaaatgctttttctgcatccagtgatatgatcatgtggtttttgtttttagttctgtttatgtggtgcatcacatttattgatttgcatatgttgaatcaatcttacatcccagg

SEQ ID NO: 758687 - DNA, 594 bp, Homo sapiens
aggttgctaaaacattggctaaaaatttggctttaagtaactagtttttatcttgacaagtttgtggttattctactatgtggctgaatgaactcagggcaaaagcaactagtcagttatgccaaattcattaaattcagttggccaacatgctagtttgattagataaaagcacaatcaaatcagatggcragaatgagaaatattggtgcttgatctgctcaatgttttatttgtaagtttgaacacaacactgagaggggaacctccaagagaatgccagaaaaccatcttctctgctctcatcttatctctttgcttggctccatttgtctctgtgctttggaaccatgtgggtgaggaaaattcacttccttccctgtctgtgactaagaaaagaatcaagctcattatccttagtctgctccaaaattgtgaatcagattagactatgaaaaatagcgataacagctatgactgttccagaaaaggaattatattaaagctcatatgttgtctttttatgtttgattctttgcctagagagaaatgattaataactataagatctaacatgtgttttatgtttactat

SEQ ID NO: 758688 - DNA, 644 bp, Homo sapiens
attgactttcttttacttccatttccagatgatattgacaaagatattgaaaaaatttgattaatatgcctcagcttagatttgctatgcgagagcaaagtcttattgttttaaaggaattatttgctgatcagctataggctgacttgacctcatattcctaccatgatagtcccacagtgtagggatggggtggtatgactcccaagacttggagtatgttattttctcagggcaatgaagatttggaaaaatgatggcaaagacagaattactatctcatcaaagacatccctcagcagtatctgtgggctgtgcagtgttctcagttcgataaaggattagaacacaatgcttctttggagagctgtgacttgatactgcatcaatacctttctgagaattgtttttcattttcttgcctctttaacttmttaagccttaggagaattagttgaaaagccaagtctttggggtagatactaacattaagtcttctactctgtcatttgcaatcataaattccagaacacagctcctaattccattgtgtattgttttctaagggaatgatagacagattctttatttttttaaacctctaagcctaccacacttgccgagttcctcactagtcactaaga

SEQ ID NO: 758689 - DNA, 479 bp, Homo sapiens
ccactgtgggcaccggttaggcctcaggctatctagcccaatggctactgtacactttttttttttttttgagacagagtctctctctgtcacccaggctggagtgcaatggtgccatcttggctcactgcaacttccacctcccaggctcaagcgattcttgtgcctcagcctcccaagtagctaggattataggcatgcaccaccatacctggctaatttttgtgtttttaatagagatggggtttcactgtgttggctgggctggtctcaaactcctggcctcaagtgatctgycctcctcagcctcccaaagtgctgggattaccggtgtgagttgccatgcccagcctggctattgtagactttaataggactcttaatttgactttaatgtgactacttctcttcctatctgtgcttcttcatatagactctgcaccgcacctggagatattttatcccacataatcaatgtc

SEQ ID NO: 758690 - DNA, 510 bp, Homo sapiens
ccccactgtgggcaccggttaggcctcaggctatctagcccaatggctactgtacactttttttttttttttgagacagagtctctctctgtcacccaggctggagtgcaatggtgccatcttggctcactgcaacttccacctcccaggctcaagcgattcttgtgcctcagcctcccaagtagctaggattataggcatgcaccaccatacctggctaatttttgtgtttttaatagagatggggtttcactgtgttggctgggctggtctcaaactcctggcctcaagtgatctgccctcctcagcctcccaaagtgctgggattacyggtgtgagttgccatgcccagcctggctattgtagactttaataggactcttaatttgactttaatgtgactacttctcttcctatctgtgcttcttcatatagactctgcaccgcacctggagatattttatcccacataatcaatgtcagacaaaaataaatttaaaaagctttttt

SEQ ID NO: 758691 - DNA, 616 bp, Homo sapiens
acagtctgaagggacctaagcactccccttcacttgccactcagcccaaataccactgctggcccctcctgaagagcacagagaagagaatctccttctgaacaatgagcagagattttgtttaaaatttctcacatctctttgtagtttatttttgtaaacttggcctataagacgctacttatttgctcttatatgtgttacctgcagttttaagaaagaactaccagaccaacaatatcactttggttttggtttatgtagcctaaataactcgctacacgtctcttcttaaagtgtttaatgagagtttttagtgaaatttgctgttttgtggaaatattcacactaggtgatggattatttgaaattttcttcctaatgcagcgctgctgtgtaagaacatcatcattgttcagtttggtgggttttctcttcamggtgtagataacagtagaagggacttttgcaggattagcatttacaatgctttgtcagtcagggtcatgggattagactcactgagtcagtcatcagtagctccattaactgagacataaacagattcattaaagagtggaatgaggtccaaagttgatgtctttgctgagggtca

SEQ ID NO: 758692 - DNA, 544 bp, Homo sapiens
agcttgagatctgagaatgggcagactgcctcctcaagtgggtccctgatccccaagtagcctaactgggaggcaccccccaagtaggggcagactgacacttcacatggccgggtattcctctgagacaaaacttccagaggaacaatcaggcagcagcatttgyggttcaccaatatccactgttctggagccactgctgctgatacccaggaaaacagcgtctggagtgaacctccagcaaactccaacagacctgcagctgagggtcctgactgttagaaggaaaactaacaaacagaaaggacatccacaccaaaaacccatctgtatgtcaccatcatcaaagaccaaaggcagataaaaccacaaagatggggaaaaaacagagcaaaaaaaaacggaaactctaaaaatcagaacacctctcctcctccaaaggaacgcagctcctcaccagcaatggaacaaagctggacggagaatgactttgaccagttgagagaagaaggcttcagaagatcgagctactccgagctaaagg

SEQ ID NO: 758693 - DNA, 544 bp, Homo sapiens
agcttgagatctgagaatgggcagactgcctcctcaagtgggtccctgatccccaagtagcctaactgggaggcaccccccaagtaggggcagactgacacttcacatggccgggtattcctctgagacaaaacttccagaggaacaatcaggcagcagcatttgcggttcaccaatatccactgttctggagccactgctgctgatacccaggaaaacagsgtctggagtgaacctccagcaaactccaacagacctgcagctgagggtcctgactgttagaaggaaaactaacaaacagaaaggacatccacaccaaaaacccatctgtatgtcaccatcatcaaagaccaaaggcagataaaaccacaaagatggggaaaaaacagagcaaaaaaaaacggaaactctaaaaatcagaacacctctcctcctccaaaggaacgcagctcctcaccagcaatggaacaaagctggacggagaatgactttgaccagttgagagaagaaggcttcagaagatcgagctactccgagctaaagg

SEQ ID NO: 758694 - DNA, 634 bp, Homo sapiens
agtagaatctcacacatttttatatgctgtgtttttattttatgagctaaaaacactttctatatttcttttgatttcccttcaatccttgaattatttaaaagtttattttccaaatatttttaaatagttaaaagatccttctttttattattgattttttatttaattcattctaattgagggaacacacttcatataacttgaakcctttaaaatttatttggtcttgtcatgtggccctgaatatattttgtcttgataaatgttttatgtacactcgaaactaatatgtgtttttgttgttgttgctgggtaaagtatcctataaatttcaagttgcttgatggtgtttaagtcttctatatgcttactgattttctatatacctgttctatcaatcattgaaggacaggtatagaaatctccaacgataatcatggatttgtctatttttccttatagctctatcggaatttgcttcatgtattttgaagctttaatattaggtccataaatgtttaggattgttatgcccttttaataaattgaacactttatcattatgaggtaaccttctttatccccaataatattattttctttgaaatctactatatctgattttactata

SEQ ID NO: 758695 - DNA, 628 bp, Homo sapiens
gaaaatcccatcaggctaaaacaactttcctatgaacatcaataatgtgtcagtccatggacacaggaaggggaacatcacacaccggggactgttgtggggtagggggagaggggagggatagcatcaggagatatacctaatgctaaatgacgcgttaatgggtgcagcacaccaacatggcacatgtatacatatgtaacaaacttgcacattgtgcacatgcaccctaaaacttaaagtataataataataaaatttaaaaaaagaataccataaaaatagatttgaaaaaaaaataatgtktcagtcattaacactctcctatattttatagagaagccttagaataaaggcatctcaaaatgaaagttgaagggaaactataaagctggaaaatacattcaggatgggagacacagtgaaggtcagctttgctgatttcatagttctgtgtgaatccagcactggttacctgtatacattgacaataatcatatgcttaccctaatatctagaatggagaaaagactatttagggggctgggaaacccactgtttgtcaaactaaagaatgtttgattatctttcatgactcctcataccatctggtgagtaataatgagct

SEQ ID NO: 758696 - DNA, 606 bp, Homo sapiens
ttgaggtagcaggtattgctcttttgtttccatggttggaactcccttaaggatgtcttgtaaggctggtctaatggtaacaaattcctttaatgcatgcttgtctggaaaagattttatttcttttttgcttttgaagcttggtttggagagagatggaaatcttggctagaatttgttctctttaagagtactgaaaataggccttaaatctctcctggattataagctttctgctgggaagtttgctgttagcctgatggggttcccattttgtgtgatccgccctttttctcttgctgccttyaagattgttttcttcagttttgaccttggacaatctggtgactatataccttggtgatgttcattttatatagtataagtgttctccggattttttgtatttgaatttctacctctctagaaagattagggaagttttcttgaattattcccttgaatatgttttcaaagttgtttactttttctgcttctctcttgaaaatgccaataattcataggttttgtcactttacataatcctgtatttctcaaagacttgatcattttttaaaattcttttctttttatctttgtctgact

SEQ ID NO: 758697 - DNA, 615 bp, Homo sapiens
ttctcctcaggctgtgccactggaaggagaattgggctctgctttctctgagatctgcagctacacgcatgttccatatctttcccacttccctgttgcctattataactttgggcagcctttccttctattttgtggttctgagtttcaaaagtctgttagtttaatcaaaactggagtttgtgtgtctgggtcttgtacctctgttgcatttgggtgatttctgggagatgagaaaaatgtctaatgttatctggccattttaaacccagatcctaattgcttctcagcctttgggctaggatctgttcttgtcagtttaaaactagacttcagtggcttttcaaaaattctgtagccacttggatttcttttcttgttaattacttaattatccattcacatcctttttaaycttttggggtattcctttagtagtcagcaaaacaatttgaaaattaacaaaatattttctcaaaggagggtggtagtgaccatgatgtgagtagcattcagagctgataggaagaggcagccttcagtccaatgggactgtctctgactcttcctattggagtccattgcccaagaggtcttaattcctaagaactcact

SEQ ID NO: 758698 - DNA, 609 bp, Homo sapiens
ttcacatcctttttaaccttttggggtattcctttagtagtcagcaaaacaatttgaaaattaacaaaatattttctcaaaggagggtggtagtgaccatgatgtgagtagcattcagagctgataggaagaggcagccttcagtccaatgggactgtctctgactcttcctattggagtccattgcccaagaggtcttaattcctaagaactcactgggctcattgctgggcctggcttatcatcttgttattttgggtgccactactagaaggatattgagagagttgaggaataggaaagataacctttcctgagtgatgtgaaaaattctttcrtatctgttttcttctctttgctgtcttcccatcatcagcagaactgtctagggccatttgctttgtcataagacttttgagaaaataactgaataaaatttttctaatttggaatgagttgaagtttacatacacttagggccacagtttatctctttcttctttcatttatttagcatatagaaaggcaaagcaaatcaagtcaaaatacaaattgttcctaactcatatgtgcacaggtatcaatgagctgatgtgtatatgaaatgat

SEQ ID NO: 758699 - DNA, 455 bp, Homo sapiens
tatggcaaagactcaactatgttctgctgaaagctctggtttgcagtccaaacttgatatattatctattttttttaattttcagaaaccttatttttttccccaaatttggaaagaaaggaataaaattcagatattacagaaaaaaatctcaaggaagcaagtaaaaacaacctgtaatctgatccccagagataaccaacatagtataatgctgtatatcttttaatatataaaatagtaaaatatgtgtatatatgtatatataattaatggaatattttatacattcttgttrgtaacctaaatttttcatctataatctgtatcacaatttttatgttatgatatatcttattcttcctcaacataattttggaggctgttaaaacattattaaatcgttctctagttttagacacttagattagtttcacggttttactattaaaatc

SEQ ID NO: 758700 - DNA, 629 bp, Homo sapiens
tctgcccttatgcattatgcaatattttcagtgggttggcgttctgcttggtgacctttgaaacatgcaggcaccatcttgaaatgaggaccaacagaagttctgtctttcctgtttactgtgctcgctttccaggacttcttcctgacagtgtgtctcaaaccctgaaggttgacaatgaacactcatagaaaaaaagatagaaatttgtttgtggaagtgggtatctgaagkgttgcggttgataaattattgcaaaatggtgaggagattatctgaaatcgatcaaaagttataacgatggttgtggatgggtgtggcccatcacacacatggtgaactacactagctggtaggcgtctcaggtttgtgaatgtgtggattttgtggatcccacatagctcaattcagctgagtgcagtttcctgggttcatctaatactttttgcagataaaattgcagagagtaaacttggcatttacattatgctcaaattgtttcctgatatttcacttacactgaaacgaatgcagtttcaaaataagaatttatagctaaaccaagcgtataactatgatgatcacagctaacatatcttgagcccttgttatgtgccaggcacaattcc

SEQ ID NO: 758701 - DNA, 629 bp, Homo sapiens
tctgcccttatgcattatgcaatattttcagtgggttggcgttctgcttggtgacctttgaaacatgcaggcaccatcttgaaatgaggaccaacagaagttctgtctttcctgtttactgtgctcgctttccaggacttcttcctgacagtgtgtctcaaaccctgaaggttgacaatgaacactcatagaaaaaaagatagaaatttgtttgtggaagtgggtatctgaagggttgcggttgataaattattgcaaaatggtgaggagattatctgaaatcgatcaaaagttataacgatggttgtggatgggtgtggcccatcacacacatggtgaactacactarctggtaggcgtctcaggtttgtgaatgtgtggattttgtggatcccacatagctcaattcagctgagtgcagtttcctgggttcatctaatactttttgcagataaaattgcagagagtaaacttggcatttacattatgctcaaattgtttcctgatatttcacttacactgaaacgaatgcagtttcaaaataagaatttatagctaaaccaagcgtataactatgatgatcacagctaacatatcttgagcccttgttatgtgccaggcacaattcc

SEQ ID NO: 758702 - DNA, 629 bp, Homo sapiens
ttgtaggagacctttaagagatattacttctaggcctgaggagggtggggtctggaaccctgaagagagagtcctgtagagcacactgccttgagaggaccacaggtctctgttgagacgcacaactagccggaggtgacctcacggggaaggactggggaaacacattctcygaattcactctctttcctctttctcatctcctgctgcatcttcccatttgcccaaagagaactggaagccaaagggagtgcgagccattgatattatttacacagacccatctgtctccaggagcagaggaagaacggggaaggggaggcagtggatccagaggagcaaacagaacatgtcgagcagagggtaccagaaagttgataaatcaacgctgaaatctcaaccagaatccaaagcacaacggggaataggatcatatacaaaaatagcgtcatcaaataataaaacaccatgccatttccactggagcttttctagagaattccacttttaaatgacattctgtaaaattgtccaagttgctaaacatataaaattgttggatatcaatttacatcaattaaatttgggatgcatctaggaaaaataatacttttggctttagaaattgg

SEQ ID NO: 758703 - DNA, 629 bp, Homo sapiens
ttgtaggagacctttaagagatattacttctaggcctgaggagggtggggtctggaaccctgaagagagagtcctgtagagcacactgccttgagaggaccacaggtctctgttgagacgcacaactagccggaggtgacctcacggggaaggactggggaaacacattctctgaattcactctctttcctctttctcatctcctgctgcatcttcccatttgcccaaagagaactggaagccaaagggagtgcgagccattgatattatttacacagacccatctgtctccaggagcagaggaagaacggggaaggggaggcagtggatccagaggagcaaacagaacatgtcgagcagagggtaccagaaagttgataaatcaacrctgaaatctcaaccagaatccaaagcacaacggggaataggatcatatacaaaaatagcgtcatcaaataataaaacaccatgccatttccactggagcttttctagagaattccacttttaaatgacattctgtaaaattgtccaagttgctaaacatataaaattgttggatatcaatttacatcaattaaatttgggatgcatctaggaaaaataatacttttggctttagaaattgg

SEQ ID NO: 758704 - DNA, 599 bp, Homo sapiens
agcctggaaacacaggcctctccctccgtgcccagagaggaagaactctacctgccaggatgtgagcgcggagggcagcacacacaactccagcaccagggtttgctcatgataactgtgccaggactgagcctgggcaaggtgccaccgaactgctcccttttctcacagagacatactgctcctcactgycaccatctcagaacaacccccgttccacctcccaggctcctctggctgggtctggccatgttcttgcacgatccacatatacacacacaggggcctggtgaggagctcacaccggcaaatgatcagactcatgaggtcggctcacatctgatcctgggacgcccaagtgctccaaggccgctggtggctccccgagcccatggcaacagcacttacctgggaactccacgccccttctctgcaagactttagatgtgtccaccacctgtgtaagtcccctctctcatgcccctcagggctgctgcctcctcggcctcccagcctggctcaggggcaaccactcgctggcaggtaaagctgtgccctgagctctccactggcctctgatcagaccaggtggacacccc

SEQ ID NO: 758705 - DNA, 599 bp, Homo sapiens
agcctggaaacacaggcctctccctccgtgcccagagaggaagaactctacctgccaggatgtgagcgcggagggcagcacacacaactccagcaccagggtttgctcatgataactgtgccaggactgagcctgggcaaggtgccaccgaactgctcccttttctcacagagacatactgctcctcactgtcaccatctcagaacaacccccgttccacctcccaggctcctctggctgggtctggccatgttcttgcacgatccacatakacacacacaggggcctggtgaggagctcacaccggcaaatgatcagactcatgaggtcggctcacatctgatcctgggacgcccaagtgctccaaggccgctggtggctccccgagcccatggcaacagcacttacctgggaactccacgccccttctctgcaagactttagatgtgtccaccacctgtgtaagtcccctctctcatgcccctcagggctgctgcctcctcggcctcccagcctggctcaggggcaaccactcgctggcaggtaaagctgtgccctgagctctccactggcctctgatcagaccaggtggacacccc

SEQ ID NO: 758706 - DNA, 641 bp, Homo sapiens
gtctgagctccgggaggacagagctggagtctgaactcagatccgtggatctgcactgtctcgtgggagccacgggccccagagctatttacttgtagttagaaaatgagcagttcagttcctaagatgcataagcctcctgtcaatggctcactgcactgccacatgtgggacagggcaggagcagagccacgcgggtcctctgccggtgctggtgcasgtcccacgtctgagcttgtattcccgactgtgccgccttcctcctgatttgccatgtgatttttaaaaagcatgggcccttttttaaagttgtttttgaatcttttgagtctccttttgcagcaattttaggcctgtagaaaatctgccagtttagtccaaaaagtggtctccctcattcacctgagagccggctgccagcctcatgtcccgtcaccctgatgattttcatgtgctttacgaccatcggggcattgtcctgcacggccaccatgcagtcatggcactaggaaacgaacactgttgccggccgtcttcagaccttactcgagtttggtcatttgtcccagctttatccttttcagtaaaaagaaggatcccagccccaagtcacctgccgcatgtgtcctgtttctcttagt

SEQ ID NO: 758707 - DNA, 641 bp, Homo sapiens
gtctgagctccgggaggacagagctggagtctgaactcagatccgtggatctgcactgtctcgtgggagccacgggccccagagctatttacttgtagttagaaaatgagcagttcagttcctaagatgcataagcctcctgtcaatggctcactgcactgccacatgtgggacagggcaggagcagagccacgcgggtcctctgccggtgctggtgcacgtcccasgtctgagcttgtattcccgactgtgccgccttcctcctgatttgccatgtgatttttaaaaagcatgggcccttttttaaagttgtttttgaatcttttgagtctccttttgcagcaattttaggcctgtagaaaatctgccagtttagtccaaaaagtggtctccctcattcacctgagagccggctgccagcctcatgtcccgtcaccctgatgattttcatgtgctttacgaccatcggggcattgtcctgcacggccaccatgcagtcatggcactaggaaacgaacactgttgccggccgtcttcagaccttactcgagtttggtcatttgtcccagctttatccttttcagtaaaaagaaggatcccagccccaagtcacctgccgcatgtgtcctgtttctcttagt

SEQ ID NO: 758708 - DNA, 621 bp, Homo sapiens
caccctcttaaaaaatcacatagaactttattaaataaaccagtagaaaggctcctatttacatccaggttgtcagtttaagctcaagtaatatgcaaggcacaattcttcctttctccagctttagaaaaatcaaccacatggcccagccctgaaggactgaagggagcttgtgcgggatcccgtcatcctggactctccacacagcgtccacgcatggatggccatgggcatgagtctctggatctccctgagggtrgcccagcctcggcctggagcacaggggcctgtgatctgagaatctcagatccagaatcaggagctgggaagagaggacttttccaagggtctcctcccccaggccctggggagtcccttctggatgggcagggccctgggctggtggccgccctccatcattggcccaggccgggctctagggccggctgggaagctgtctggggccctgcgcatgataagctgccatgaaagtggccgcctctcacactggcaggcggtggctcagatctgctgaggttctggagtggcacaggaacaggaggagcaaatgacactgggtctttgtgctgaggcaggacacagcggctttccgaaacacac

SEQ ID NO: 758709 - DNA, 591 bp, Homo sapiens
gaggctgcagcagaggcatatatgtggcattggtggcctcacccatccccagttaaggggcacccagcttgcttccaatgtgtcagtgtcatcaacaatgctgaaatgaacgccctggtgcacacagctctgcccttgtctggttatttcccttggacaactacctagacgtggcatgcgctttcttctgggtgggtcttgagaggcgttgagccaaaattcctacatggattttgttcctgcaagcccctccaggaaccagccaccctaattctctgtctctgctccggtccacgccagaggagtcaactctggttggtcagggacaggctgggacacggaccaaagttattctgagaacasaaaagatgacagaagctgaggtttcctgctgatgggaggatggaccttgcaattccgcattcatctctgtggtgctgggactctgggaggccttcagcccacccctatgcttctgagttcatagtgtggtgaagcgcaggctcagaccagggccagagcggggccagtgctgaggaagctcctctcctcactccagtggtgaggataaggatgatcaggatgggttcc

SEQ ID NO: 758710 - DNA, 694 bp, Homo sapiens
gacttctaatcctggaaagtggacactccagatggctgtaggtctgcctgggcatggagcagagaggaccatcctgcaccaggatctctctgcataggaagtgtgaagcagctcaggctgctgttccaggtgagcaggtgctccaaatgcttggaaatctgcctgggtgtggagtggagatggtgtccctgcaccaacatctctgaacaaaaagagtggggcaattatgcctgcwgaaccaggcaaatgagggcttccaatgcatggagatctgcctgagcatgaggcagagagggcacccccatacccagatctctgcacagaaagatgcggtgactcaggctgttagtctatgctagcagttgctcctaattcttggagatctgcttatgtatagagcaaagagggctccactgcactacgatctatgcacaggaaaagtggggtggcttaggctgctgatcaaggtgaagggatgctcaaaaagcctggagatctgcctggctctggaacagagaagaccctgctgcacaaaaatctcaggggaacaggctggggcacccagcaatggcacatgcagaccagatccaggttgtcaagctggccctggctgcaggtctcatcattcagaagaactgtgattgggggagggcacaattccagtgccaactgttgaggcactttccaaagttct

SEQ ID NO: 758711 - DNA, 444 bp, Homo sapiens
atggggccaaaataaacagacaagtaatcaccatagtgaatagccattgtttttatcatcatatgctgcagggaacttaaaaatcagctcaaatatggactataatggcaccaggaaagaggcagcaggctgcacagctattatgtgtgtgtctgtgcacaaatgcagccagtgcttctaagcacttcccttctgaggaacaaaatacaaacataaaaatgcrcagacagttccttctcctattcctagaaaaacaaatcataaaagaattcactgctaccctcaccaaaatctaaatggggaggtaaaagagtcacaaaaatcccagcaaatgacgcatgataaaaatttattcctctcatgtctttccaagatcataaaaaacaggttggtagctgtcatcatggtcttatcctggacatttaaggataaacattaaacacc

SEQ ID NO: 758712 - DNA, 614 bp, Homo sapiens
aaaccaaactacatactgatcatttttcttctgaaaataagatattaacctctgttactacagagtatacgccaaatacagaaatatccctggtaaaatatcttttaacaacatgcaaagcaattcactgtaggtttatacagtatattaaagacacataaacagtgcttctgaacataaaaataactcaacattctcaagcttccatgaaaatcagtttgttttcttacttttttttagcaaaatgggctaattaacctactagtccatgttatgaattgcttttaagaacctgacaatgtcatcttgtccgttccccaatatatatttaataaggagacattaaaattagattctgttcaagagaaatattccttctttcaccttgcagttctgmagaacccccaatatataacagaaaaatcagagttgtgctaataagtactcttaggggaataattactgaaaatgccacatataagatagtcaaaatgaagggtaaaataaattctttattcatggatagcttatgttgacaattgtagaatggcttaagcactgcacgaactttggctagcatttgtttcatgttaagacacaagtcaatctgaggt

SEQ ID NO: 758713 - DNA, 569 bp, Homo sapiens
ggtggagagaagaaggcagactagctaaagacctcaagatccatgatgacatgctgggttttctttttgcttcttttatcccagatttgcagtggaaaaaaaagttagcaactcagaaatgtagacaaaaacaggcaaggaaacaaaaacaaacaaaataacaacagcaacaataacaaagccctaaaaaaaacaygctctctctagccaatggtctaggaaatggccagcctatgagaataaaaacatttagacactaacagttttacacaagccaaacaccacagaaaaaaaaaaaaaaaacacggtcctactacattcacaccagcacaggccaagtggggagcttaggcctccatcttgtcaagattgtgatgagtcatcccaacaccctaggtggtgtgagagaaagccaagtggggagctgggactttcattcccaccagttggtaaccagcacttccctagtacactgtgtactatcagtgggaccatatgaaaaaccaagactcccaactcctacccatcagtaatgagtcactctttcccctccccactggggtggtttc

SEQ ID NO: 758714 - DNA, 569 bp, Homo sapiens
ggtggagagaagaaggcagactagctaaagacctcaagatccatgatgacatgctgggttttctttttgcttcttttatcccagatttgcagtggaaaaaaaagttagcaactcagaaatgtagacaaaaacaggcaaggaaacaaaaacaaacaaaataacaacagcaacaataacaaagccctaaaaaaaacatgctctctctagccaatggtctaggaaatggccagcctatgagaataaaaacatttagacactaacagttttacacaagccaaacaccacagaaaaaaaaaaaaaamacacggtcctactacattcacaccagcacaggccaagtggggagcttaggcctccatcttgtcaagattgtgatgagtcatcccaacaccctaggtggtgtgagagaaagccaagtggggagctgggactttcattcccaccagttggtaaccagcacttccctagtacactgtgtactatcagtgggaccatatgaaaaaccaagactcccaactcctacccatcagtaatgagtcactctttcccctccccactggggtggtttc

SEQ ID NO: 758715 - DNA, 612 bp, Homo sapiens
atatgcttaactttggctccttggagaaatttcaggtgctaagtatgcagattcttcaggttttaagctaataacctggaaagaagagagatgtctgggttacctttgttttgtttttctttctcctacagctgttgtacttcagggtaggatgatatcactcaaaaacttcggcctccctataataaagttcagttaagtctatagtcactggtstgtcatagatactaattttgtcctcactcattactgtggcttttctggaattgaccaagtgctctgctctttttgattattctaattgacagctttaatcattggtggttccttaccttgtgcctatgcatatacctttgagttgagggtagaatgttggacactacaggctctgaagctgttgttccattctctgacttataagccctgtgaggatttaaactatgtatctgtgcttttctctctgaagtacagacttctgtttgttagtgcctagagtttcctgcttccttcctcagatcattcgtttatcctcccacatctcctccaaaacaattctgctttctgttccctggttaaagatgtgatgaataacagccatctgtggccaactgc

SEQ ID NO: 758716 - DNA, 593 bp, Homo sapiens
tattgaatactctactgaaaacatattgcttttgcatcaggctcatgtcaaacaattctaagtcaaatcattgtaaattggggaccctctttacttattgctgaaatccatccttattttattttattttacttcaagttctggggtacatgtgcagaacttgcaggtttgttacataggtataaatgtgccatggtggttttctgtacgcatcaacccatcatctaggttttaagcccctcaggccttaggtatttgtcctaacacttaccatagaatactatgcagcctcaaaaaagattgagttcatggtctttgcagggacatcgatgaaactggaaaccatcattctcagcaaactaacacaggaacagaaaacgaaacaccgcatgttctcactcatatgtgggagcygaacaatgagaacacatagacacagggaggggaaatccatccttcttaatcccagaaagctgctgaagtttctagatctcagcagcaaactgaactttacaaaacctttctggccaggcaccattcattccttgtcattggatctcctcctcaccaccactcccataaaagtttgactg

SEQ ID NO: 758717 - DNA, 589 bp, Homo sapiens
gattctgaaatgaaacatttcagagatggtgcagaataggtgggaatctctctgcttccacttccctccttaagttcataggtaaccaccatcctgaatcatccaaagtggccatattttgtatgtctgcactcaataaaatatatatcttttatatgttttgtatatatatyttttatatgcatgttttatatgttttttgaattttatatcaaatcacatcacatggtattcatcattttgcaacttccttttgttttcagtattaggttatggagattgttttcattggtgatacttttaactcaaggccaattttttaaattgctatagagtgatatttgcatatgtaacaagttctatgagcaaattttatacacatgaaacttaggatgtagaaagacagtgaaacaggaccaaagtgataagtccagagaagaataacatgggacccctagacgccagcatcagggtacatgggtacacctgtcactgaacatgtgaacagtcaaaaagaaatgaccctcagctgagcagtgtctaggtagaaagcatcctgaaaggcttttttccttttcacaaataagaa

SEQ ID NO: 758718 - DNA, 655 bp, Homo sapiens
cagaaaatgttcattttatttttccactttcaatataattttacaaaaatgcatttatttccttctaaaaatataataatgaagacctggaaaagacaaatggtgagtgaagagaaaaatagaaagacatgcatgccaaacttggtagacaaggcaaacctgcaaaaatcaattcaattcagcaactcttttgtgtttagttgtgcctttcactgtgctttgcaataagaactgagctagagctagagtcttacatcaccccccaactccttcagaattctacacctattttgttaatatgtctatgccctgtgatttcccatcacaccatgcgcttccatggcttccttccttccattttactcaaattcaaggctcaatgtaattgtcttctctatgaagctgaycctgggccatatcacccaatcagaatctttttgttttgtttgctttaatagcactttgctcaaacactggacgcattccttttttttttttagctggttgtttgcatgttgatccaccagatgtagtatcaactccttaagagaggatttatttatctcttgtgtatactatattattgatctaatagttgctcgatatagaaagaaaaaataaaagaaaataaaccccagcaccctccctttaacca

SEQ ID NO: 758719 - DNA, 585 bp, Homo sapiens
acaacataaattgtatataccaagggtgtatgacagtgttttgctctatgaatacattgtggaataatggccacaatcaatctaattaacatatccatcaccttatatagttaccattttctcttttttttttttggtgagaacatttaagacctatcctcttagcaaatttcaagtatacaattcagtatcgttaactattttcacacggctgtacgttaggtctccagaatartatccatccagactaattaaaactttgtaccccttgatcagtgcctccccatttctccctccccccaacccctgacaactaccattctagccaccattctactcactatttctatgaatttgaccattgtagactctaaaaataattgagaacatgcagtatctgtctgtgtgtggcttatttcatttgcatactattttccagattcatccatgttgtagcatgtcaggatttccttctatttttggctaaataatattccattgtatgcatgcacgtgtatgggtgtgtatgtatatcaagttatctttatccatttgtccattcattcattgatggacacttaggtg

SEQ ID NO: 758720 - DNA, 635 bp, Homo sapiens
tgtagtaattgatggtctttcaaaacacagtttctgtatattgacaggaagaaaaaccaggatgcagaagttgaggagagaattcatgatacccaagtgggcataaaatttaaaatgtttaacatggagggaaaccaacaygtagaactcgaaagctaacaggaaggggagtgggaagagccaggctctagtctcgactttaccagtggattttaaaaactccctggagttcagttttctcatctgtaaaatcaaggcactggaaccttgaacttttatatttccgaattatttggtgttgagtgaagtgtccaaatgacatatcagtaacttaaagaattgtgttttgacttaagtataaatgtcaatataaaaatatgttaattgttgggcactcaaagacataaagatgggaacaatagtcactgaggaccacagaggggagaaggagggagggaggcaagggttgaaaaactacctcttaggtattatgctcactacctgggtgacaggatcagtcataccccagacctcagcatcacacaacatacccatgtaacaagcctgcacatgcagttctgagtctgaaagttgaaataaaaaatatgttcattataataaattttaaagaagtt

SEQ ID NO: 758721 - DNA, 652 bp, Homo sapiens
cagtaatatgttttctcccttatgaagaaagactaagagcatgctaccgtggtgaatttacatgcaaagtctgtctctctttatgatatggggagaatcctcgtgtttgaaaataattgcacactgctgtcactattatcaaatactattgcatcagagatagttcctgagcccaagggacttaggtcttgtttgtaggatatttctgaggtttggcactctagaagttcccacttgcgtawactttcaactctctctctttcctagcatagccttgcaagaacacgagttagctttaggtagtttgtctcggaattggaaaatttcaaggggcatttggcagtagagcaaggctatttatttccaaaggaaagcgcagcccttaggtctcaatgagaattctgaagtcatatcagggattttaaacttctagtcaggcaagcctcaattccgtgttagtgctatgtagaggggtcgtttgcaagaagagccaaggcactggttaaacaggtttgagtcaacatgacatggatgattcaaggatgctggaaggcatgaagagatacacttagctttccaacagcccctggggaatcacgcagcttctatcatatatgacaacctgccaccgggcacatgctctgccctctat

SEQ ID NO: 758722 - DNA, 652 bp, Homo sapiens
cagtaatatgttttctcccttatgaagaaagactaagagcatgctaccgtggtgaatttacatgcaaagtctgtctctctttatgatatggggagaatcctcgtgtttgaaaataattgcacactgctgtcactattatcaaatactattgcatcagagatagttcctgagcccaagggacttaggtcttgtttgtaggatatttctgaggtttggcactctagaagttcccacttgcgtaaactttcaactctctctctttcctagcatagccttgcaagaacacgagttagctttaggtagtttgtctcggaattggaaaatttcaaggggcatttggcagtagagcaaggctatttatttccaaaggaaagckcagcccttaggtctcaatgagaattctgaagtcatatcagggattttaaacttctagtcaggcaagcctcaattccgtgttagtgctatgtagaggggtcgtttgcaagaagagccaaggcactggttaaacaggtttgagtcaacatgacatggatgattcaaggatgctggaaggcatgaagagatacacttagctttccaacagcccctggggaatcacgcagcttctatcatatatgacaacctgccaccgggcacatgctctgccctctat

SEQ ID NO: 758723 - DNA, 527 bp, Homo sapiens
acactgctttaaatgtgtcccagagattctggcatgttgtgtctttgttctcgttggtttcaaagaacatctttatttctgccttcatttcgttatgtacccagtagtcattcaggagcaagttgttcagtttccaagtagttgtgtggttttgagtgagtttcttaatcctgagttcttgtttgattgcactgtggtctgagatacagtttgttataatttcgcttcttttacatttgctgaggagagctttacttccaactatgtggtcaattttgaaataagtgtgrtgtgatgctgagaagaatgtatattctgttgatttggggtggagagttaggtagatgtctattaggtctgcttggtgcagagctcagttcaattcctggatatccttgttaacttgctgtcttgttgatctgtctgatgttgacagtggggtgctaaagactcccattattattgtgtgggagtctaagtctctctgtaggtctctaaggacttgctttatgaatctgggtgctcct

SEQ ID NO: 758724 - DNA, 591 bp, Homo sapiens
aggtaaaatggatgatctaaaacatgtgactaataaaaccttatcatttgaaactgaatacatcaacttttgattggtacagtaaagaaagaccccatttggcttgtacttgtagcattgcagaaaacaagttatgtatttgagrcaaattttgcttccttatctgacagttaagtctgccagctgaacgtttgacattctgtgcattgttttataataagctgtacaaaactttactcactgctaaatccaattttcatatctatgaaattctatagtgaatattacaaatctctaatctaaatggacatgaggctaggttttggaagatcacagtcctgaatttaagctacattgctgacttgctatataattgaaaaattaatgcaactttcctgtttctcaaatatccttatcaataatggaataatgaaaatgtctggggtataagcatttcactctgaagtccactatttgtgtaaccttgtaaaatcacttgacttttgaacctcaattcttttgtcactaaaatatggagaaaaacatttgcagttgatgctacaggctttgtgctaagatccactgaaatat

SEQ ID NO: 758725 - DNA, 589 bp, Homo sapiens
gagcgattttttttttttttttgccctgtgtctgatcaccactgagctgggatagagcaaacctctaggttagcagagcaaagactgctgtctaagaaggctctcaagagatccattatcccttaattgactgatgctgatttsgccccaggttagtggtagggatcacagcgaggagaggaaagtgctaccgccaatgaacagctttgcacacactatatggtttcagtgcctacatgtgcacctctcacttatgtcatcctctaaaaagcttacatttcttctgacagattgaccttcaccagcatttactaacctcaccaaaaggcaccttgtttattccattaaacagacctagaaacttattcacagttctatgcagataggaccagagttatgtgtcactcagaggtgatacccttaacctaatattttgacatgttcaaaaacaaccccattcatgttatgccagatattaggaaattatgctagaggtgataagagagagtgcttttagccactataatacgtagaccaatttgctgcttcaaagtgccatttcttgccaaaggttgcttttgtaaaaatt

SEQ ID NO: 758726 - DNA, 626 bp, Homo sapiens
agataagaattgtgtcacattgtaccatattttgttttctgtccttttcctcaggatcattctagatcattctgattaacaggccgtatttctgttttggtctttttaagccactttatggagatatggttgacatataaaagctatacatatttaatgtatacatctcaacaagagatttgctttctcttgccaccataacaaattaacacaaatacaatgacttaaaccaacacgtgtttattatgttcagtaaatagattagaaatctcacatctacaatcaaggtgtcagctgggctgtgttgctctctggagactctatgggaaaaggcgtttgtttgcgtttccagttataaaggtatcagcagctttcttgtcagccaagagggtgaagccctcaatgcgtcactctgacctttgtccacaggctcttmtacctggaaccttgtcctcctgcctctgtcttccactttaaggatctttttcattacattgggcccactcaataatctagtataatctccccatcccaagctcagtaagcgcattgttctgcaaagtcctcatgagccatgtcaggtgacacattgacagtctccagagagcaggacctcggggcttggg

SEQ ID NO: 758727 - DNA, 620 bp, Homo sapiens
gtttctaattcttttattcacagttatctttggaaatcatatagtcgacagctgggaacttattagtaaagctatatcactatcacagtatacaggatatgtatagtttcttgatacactggaacaattgctaagttttaatcaatagctatttattatcattgattttaattattatgcatctaatctgtaaatatccacagcagtttggctattgtatttacattcatgttaagcatgctatagcatataggttgcatgaaaatgcacaaaaagtattgtaatatcacttttaatcctaaaaggtcttcacaccacataaatgcrtgattcagtaatttacacacaatgaatcttaaaagaaagattctggatttcctgcagctgagcaaaatggggagtctgtagtcattaggacagagcttggtaatgaaatgttctttttctctctggtttctaaggtttatacctagatcatattgtatcatttcctgtatgtttctaataatgagtaatccttattaacacagcaaaaaactattcagtttattaagcagtctcctaaaaaccattccacttcgatttccaaattaaaataacatgactttgaaaataatgga

SEQ ID NO: 758728 - DNA, 636 bp, Homo sapiens
taataaaaagaatcctattgttttaattatctcttttattctccaaggaacccctattcctgccaattcttacagacgttattaaggcattcagttagtttttcattcatttatttaaaaaatatttatcatgccaagtactatttaaatggtggagataccaaagtgaatgagatacatacaaggggccctagttctcaaggagctcacattcatgagaaattaagttcacacatgcaagatataccagatattaataagtattactcagatcattaaactagaatgaggccaggcacagtggctcatggctgtaatcctagtgccttttagaggctaaggtgggaggatagcttgagcccaggagttccaggatacagtgagctatgatcactccactgcactccagcctgggtgatagagtgagaccctgtctctaaasaaacaaacaaacaaaaagtagaaagatttgacctgagaataactagatagctattttagatcaggtattcatgaataaaataacacttaaagtgagatctgaatgacagaaagaaaagccatgcaaaaatcaaggagtagggtgtgcagatttcacagatggcaaatacctaacatggtgatgctaaagtcagc

SEQ ID NO: 758729 - DNA, 594 bp, Homo sapiens
attcttgaaatctttacctaggatatgtcagccagtattctagacatctggtatacatcatagaacaaaacagtcctgcccccatgaagtttcattctagcttacccctagtatatgccaggctctgaactaagtctaaaayagatgatccctgcccttccagctccctgcaaagccagcattaataataggagggctttttacagaaaatgaaactgtgacttgtttaagttacaacctgtgagtgttgaagtcagagtaccagtctttcctgtataccttaccacctatttgaaaaatgatggatagttatcttaaacggtgaagaattagtgtaagttcttaaacaaaatagtggcgatattaagatcatgcttgagaaacctaattcttgctgtctccttacatattttaagtttggcctaactctgtctctgtgcatagtgagctgtaatgtaactggatgtgtaaacagattgtagcctactcttgtgccaatctccaagttttggccaatcaaaggtggccaaccattcaaaccatgttcaagtaaggcaaacatcaagctgtaaccaacccaactatttttgtacc

SEQ ID NO: 758730 - DNA, 512 bp, Homo sapiens
ccaaaaaatatcacttaaagttcacaaatgaaagttaataactgaattttagtaacaacaacttcaacttaaaaaattccatgtaattaatagctcatgagtcccactgagataggttgaacttcataacttctaaagccttttatgtttctactacttttcagttctaatgttcaatagtagcgtgagtatctggttagtttcagtataaaaaakatgatacccacttgtgatatgattctactttcaatgtcacggtggaatcatttattagttttttaatttaatttttcacatgtgagtgtgatacagaacacctgatttttctacactataggatgtcagttcagtaaatcgattttcctcattagcaactgcttatcaatgactatgctgtatagaaagcaagagtattatactctatttttgatcacagataattgaagtaaatttaattagatccatatgaaagaaataagaactctcacaattgtgacatatatacgtgtctg

SEQ ID NO: 758731 - DNA, 616 bp, Homo sapiens
ttccattcaagtccattacatttggttcaattccattccattccattcccttccattccattccatttgatatcaatccattcgattccattccattcgagcacattccaatcgagtccattccattcgatgccataccatttgattctattccattagactccattcaattccattaatctccattaaattccattctactccaactgattccattccattctattcctttccattccattccattccattcgcttctattccattcgtgtccattccactccagtccattccattcgtrtccattccattccagtccattccatttgtgtccactgccttccattccactccattccatattattccattacactccattccattctattactttcatttccattcagttccattccatttgattccattccactcggtttcactccacttgagtccattccattccattccattctgttccattccattccattccattccattccattccattccattccattccattccattccattcggtaccattccatattgttccattcgattccattcgaatccattccattccagtccattccattcgattccat

SEQ ID NO: 758732 - DNA, 565 bp, Homo sapiens
attactttcatttccattcagttccattccatttgattccattccactcggtttcactccacttgagtccattccattccattccattctgttccattccattccattccattccattccattccattccattccattccattccattccattcggtaccattccatattgttccattcgattccattcgaatccattccattccagtccattccattcgattccattccattcmtttcaattccattccattccattcgattccacttgattccactccattcccttccactgcattccattcgattccattccattgcattgcattccattccattggattgcattccattcgattccattccattcgaatcaattacatagcaatccagtacattcgagtctgttctattccgttgcactcgatttcgttccaatccattcgattccattccattcgattccattccatactattgcattccattcgattaaattatattcgaataaattccattcaagaccttttctgttgagtccattctacttgagtccattccctttg

SEQ ID NO: 758733 - DNA, 565 bp, Homo sapiens
attactttcatttccattcagttccattccatttgattccattccactcggtttcactccacttgagtccattccattccattccattctgttccattccattccattccattccattccattccattccattccattccattccattccattcggtaccattccatattgttccattcgattccattcgaatccattccattccagtccattccattcgattccattccattcctttcaattccattccattccattcgattccacttgattccactccattcccttccactgcattccattcgattccattccattgcattgcattccattccattggattgcattccattcgattccattccattcgaatcaattacatagcaatccagtacattcgagtctgttctattccgttscactcgatttcgttccaatccattcgattccattccattcgattccattccatactattgcattccattcgattaaattatattcgaataaattccattcaagaccttttctgttgagtccattctacttgagtccattccctttg

SEQ ID NO: 758734 - DNA, 398 bp, Homo sapiens
ctggaatggaatggatttgaatggaatcgaatggaacaatatggaatggtaccgaatggaatggaatggaatggaatggaatggaatggaatggaacagaatggaatggaatggaatggactcaagtggagtgaaaccgagtggaatggaatcaaatggaatggaaatgaatggaaatgaaagtaatagaatggaatggagtgkaatggaataatatggaatggagtggaatggaatgcagtggacacaaatggaatagactggaatggaatggacacgaatggaatggactggagtggaatggacacgaatggaatagaagcgaatggaatggaatggaatggaaaggaatagaatggaatggaatcagttggagtagaatggaatggaatggagat

SEQ ID NO: 758735 - DNA, 398 bp, Homo sapiens
ctggaatggaatggatttgaatggaatcgaatggaacaatatggaatggtaccgaatggaatggaatggaatggaatggaatggaatggaatggaacagaatggaatggaatggaatggactcaagtggagtgaaaccgagtggaatggaatcaaatggaatggaaatgaatggaaatgaaagtaatagaatggaatggagtgtaatggaataatatggaatggagtggaatggaatgcagtggacacaaatggaatrgactggaatggaatggacacgaatggaatggactggagtggaatggacacgaatggaatagaagcgaatggaatggaatggaatggaaaggaatagaatggaatggaatcagttggagtagaatggaatggaatggagat

SEQ ID NO: 758736 - DNA, 576 bp, Homo sapiens
atggaatcgaatggaacaatatggaatggtaccgaatggaatggaatggaatggaatggaatggaatggaatggaacagaatggaatggaatggaatggactcaagtggagtgaaaccgagtggaatggaatcaaatggaatggaaatgaatggaaatgaaagtaatagaatggaatggagtgtaatggaataatatggaatggagtggaatggaatgcagtggacacaaatggaatagactggaatggaatggacacgaatggaatggactggagtggaatggacacgaatggaatagaagcgaatggaatggaatggaatggaaaggaatagaatggaatggaatcagttggagtagaatggaatggaatggagattaatggaattgaatggagtctaatggaatagaatcaaatggwatggcatcgaatggaatggactcgattggaatgtgctcgaatggaatggaatcgaatggattgatatcaaatggaatggaatggaagggaatggaatggaatggaattgaaccaaatgtaatggacttgaatggaatggaatcatatagaatggac

SEQ ID NO: 758737 - DNA, 395 bp, Homo sapiens
atgtctttccataacgatccattccattctattcatttcgaatccattcaattccattccattctatttcattccattcgattcccttccattggactcctttccattcgagtgcattccattccgttccatttctttctgttctgtatgattcctaccgttcgatttcattttgttccagtstattcctttcacgtccattccattccatttcactccattcgattccattccactcgattcccctccgttccatttcattgcattccattctattcaattctattgcattccattccattccatttgattacattccatgcgattccattcgaattcgaatcaattacattgaaatccattactattgagtccgttttactccagtccactcc

SEQ ID NO: 758738 - DNA, 395 bp, Homo sapiens
atgtctttccataacgatccattccattctattcatttcgaatccattcaattccattccattctatttcattccattcgattcccttccattggactcctttccattcgagtgcattccattccgttccatttctttctgttctgtatgattcctaccgttcgatttcattttgttccagtgyattcctttcacgtccattccattccatttcactccattcgattccattccactcgattcccctccgttccatttcattgcattccattctattcaattctattgcattccattccattccatttgattacattccatgcgattccattcgaattcgaatcaattacattgaaatccattactattgagtccgttttactccagtccactcc

SEQ ID NO: 758739 - DNA, 418 bp, Homo sapiens
tctcaagttgcatttatagatatagaatggaatccaatggaacgcaactgtacggaatggaatagaatggaatggaatcaaatggaatggagcagaatggagtggactggaataaaacggactcaatagtaatggatttcaatgtaattgattcgaattcgaatggaatcgcatggaatgtaatcaaatggaatggaatggaatgcaatagaattgaatagaatggaatgcartgaaatggaacggagtggaatcgagtggaatggaatcaaatggagtgaaatggaatggaatgcacttgaaaggaatagactggaacaaaatgaaatcgaacggtaggaatcatacagaacagaaagaaatggaacggaatggaatgcactcgaatggaaaggagtccaatggaagggaatcgaat

SEQ ID NO: 758740 - DNA, 582 bp, Homo sapiens
gcggtagaaacaaaataaagaaaggagctatttggagtttattattgaaaatgactcattcaactctgtatgattttgttttcttattctccagtgattggctgcatggcttgaatagctctgcacattcaaagaataaaaaatctttagacctgggaaataatgacaaaatgcagtgggcactaggacaaagatgtgtgcattttcaatgagaatttttccataatgcaaaatgttattttctggagtgaccactccaaataaggtacaatatactgtccacttcagttgcttcttcagaggtaaagaaagtaatattaggcagtgtaatgaaacaggagaaycaattcagtgtagaagagttctactcaaggtgagattaaaaacctcaggttcatctttagacgttaactttttattataccacatatatccctaaatagatgtatgcctcctttttgacaaatacgaaaccaaattttttcaagttgtttttaagtcagtgaagtcgaatacaaaaaaaaattacctagataatttcagattaaatagcatatcctatatcaatgcagtctatggatg

SEQ ID NO: 758741 - DNA, 631 bp, Homo sapiens
catttttgctgtcctgcagcccttgctcctattgccctcaggctcaggagggagtggagtggttggagacctatggagatgcccagcacagtgcagccaccttacagaaaagcagccagactgttttccacatgcgtccccacctcccctacccttcactcggcagtgcctgttgacctgggcccccaatatgattaacctgcccccacctgaacactttagtcagtggtggctctgcatttctctgaggaggaaaycccagagacaacccagagcatgtatgacattgcagttgcagcagtactgccctgactgtcctcgggctggggaaggaacaaagggcctggttgctatgctgaaacctccagcaagctgcagctatcatatggagaggagcccagtctctttccagcgagctcccacaccccactcttcaccaggcaggggtcttgcctcaagatcactgaagagctcctccacccgcaactgagaattcccattgctaatggctttgtgtttccctggggaggtgatcccagaggcaaccaacagcctctctgtacctgatgccctcagtctggggaagaaataaagaacctgagggttttactcatacttctagcacaccaca

SEQ ID NO: 758742 - DNA, 631 bp, Homo sapiens
catttttgctgtcctgcagcccttgctcctattgccctcaggctcaggagggagtggagtggttggagacctatggagatgcccagcacagtgcagccaccttacagaaaagcagccagactgttttccacatgcgtccccacctcccctacccttcactcggcagtgcctgttgacctgggcccccaatatgattaacctgcccccacctgaacactttagtcagtggtggctctgcatttctctgaggaggaaaccccagagacaacccagagcatgtatgacattgcagttgcagcagtactgcyctgactgtcctcgggctggggaaggaacaaagggcctggttgctatgctgaaacctccagcaagctgcagctatcatatggagaggagcccagtctctttccagcgagctcccacaccccactcttcaccaggcaggggtcttgcctcaagatcactgaagagctcctccacccgcaactgagaattcccattgctaatggctttgtgtttccctggggaggtgatcccagaggcaaccaacagcctctctgtacctgatgccctcagtctggggaagaaataaagaacctgagggttttactcatacttctagcacaccaca

SEQ ID NO: 758743 - DNA, 631 bp, Homo sapiens
catttttgctgtcctgcagcccttgctcctattgccctcaggctcaggagggagtggagtggttggagacctatggagatgcccagcacagtgcagccaccttacagaaaagcagccagactgttttccacatgcgtccccacctcccctacccttcactcggcagtgcctgttgacctgggcccccaatatgattaacctgcccccacctgaacactttagtcagtggtggctctgcatttctctgaggaggaaaccccagagacaacccagagcatgtatgacattgcagttgcagcagtactgccctgactgtcctcgggctggggaaggaacaaagggcctggttgctatgctgaaacctccagcaagctgcagctatcatatggagaggagcccagtctctttccagcgagctcccacaccccactcttcaccaggcagggstcttgcctcaagatcactgaagagctcctccacccgcaactgagaattcccattgctaatggctttgtgtttccctggggaggtgatcccagaggcaaccaacagcctctctgtacctgatgccctcagtctggggaagaaataaagaacctgagggttttactcatacttctagcacaccaca

SEQ ID NO: 758744 - DNA, 627 bp, Homo sapiens
ttaacaggcaaaataatcagctaacatcataatgacaggatcaaattgacatataacaatattaaccttaaatgtaaatgggctgaatgttccaattaaaagacaccaactggcaaactggataaagagtcaagacccatcagtgtgctgtattcaggagacccgtctcatgtgcagagacgcacataggctcaaaataaagggatggaggaagatctaccaagcaaatggaaaacaaaaaaaggcaggggttgcaatcctagtctctgataaaacagactttaaaccaacaaagatcaaaagagacaaagaaggccattacataacggtaaaaggatcaattcaacaagaagagctaactatcctaaatatatatgcacccaatagaggagcacgtcctgattcataaagcaagtcctgagtgacctacaaagagacttagactcccacacaataataatgggagactttaacaccccactgtcratattagacagatcaatgagacggaaggttaacaaggatatccaggacttgaactcagctctgcaccaagcagacctaatagacatctacagaactctccaccctaaatcaacagaatatacattcttctcagcaccacat

SEQ ID NO: 758745 - DNA, 612 bp, Homo sapiens
ttcatatttaatatccaggcaaatggaacaggcagaatctcaatgtggggaatgaaaatagaaactactgctaagaactaaaattttgagtttctcatcctccatggcagtcagattttcttgattctcagtcaggccattccgcaatgagtcaaggtcctgcatggcctctagaggaattaactaggaaatagcttttacgtgagtagcaaaaggcttcctgttggaaaggggctttgagtattcctgactcctaactggtctcttattaggagttaatgcccatcagataacctttcttgcttaagtgctactctgatattctccctgcccttaatgagtcaattgtctagtatgtagcatatatttcaaattgctttcccagtgatggttattgagttgtaatgaactcatgtggtcccatttcaacccagtagcacacmttacagaaccaatgattgaccaattgttctgcaaagtattgtcatcagaccatctgcatcagacactaggtatacatattagaaatgcagaatcctgagccctgctacagataaaccaaactggattctcagagatgagtctgggaattcacatcatttacaagctttt

SEQ ID NO: 758746 - DNA, 466 bp, Homo sapiens
tgctcactgtttgggtccacactacctttatgagctgtaacactcaccgagaatgtctgcagcttcactcctgaagccagcgagaccacaaacccactgggaggaatgaacaactctggatgcactgcctttatgaactgtaatrctcactgcgaaggtctgcagcttcactcctgaagctagtgagacaacaaatccaccgggaggaatgagcaactctggacacaccacctttatgaactgtaacactcgctgcaagggtctgcggcttcattcttgaagtcagcgagaccagcgagaccaagaatgcaccagaaggaactaattctggacacacaatgacatccataggctcaaagtaaagggatagagaaaaatctaccaagcagcggttgctatcctaattttagtaaaacagactttaaaccaaaaaagattttttaaaaagacaaagaagggactgaca

SEQ ID NO: 758747 - DNA, 514 bp, Homo sapiens
tgcagcttcactcctgaagccagcgagaccacaaacccactgggaggaatgaacaactctggatgcactgcctttatgaactgtaatgctcactgcgaaggtctgcagcttcactcctgaagctagtgagacaacaaatccacsgggaggaatgagcaactctggacacaccacctttatgaactgtaacactcgctgcaagggtctgcggcttcattcttgaagtcagcgagaccagcgagaccaagaatgcaccagaaggaactaattctggacacacaatgacatccataggctcaaagtaaagggatagagaaaaatctaccaagcagcggttgctatcctaattttagtaaaacagactttaaaccaaaaaagattttttaaaaagacaaagaagggactgacataatagtaaagtattcaattcaataatacctgactatcctaaatatatgtatgcacttgacacaggagcaccaagactcatagagaaagttcttagatacctaca

SEQ ID NO: 758748 - DNA, 466 bp, Homo sapiens
tgctcactgtttgggtccacactacctttatgagctgtaacactcaccgagaatgtctgcagcttcactcctgaagccagcgagaccacaaacccactgggaggaatgaacaactctggatgcactgcctttatgaactgtaatgctcactgcgaaggtctgcagcttcactcctgaagctagtgagacaacaaatccaccgggaggaawgagcaactctggacacaccacctttatgaactgtaacactcgctgcaagggtctgcggcttcattcttgaagtcagcgagaccagcgagaccaagaatgcaccagaaggaactaattctggacacacaatgacatccataggctcaaagtaaagggatagagaaaaatctaccaagcagcggttgctatcctaattttagtaaaacagactttaaaccaaaaaagattttttaaaaagacaaagaagggactgaca

SEQ ID NO: 758749 - DNA, 514 bp, Homo sapiens
tgcagcttcactcctgaagccagcgagaccacaaacccactgggaggaatgaacaactctggatgcactgcctttatgaactgtaatgctcactgcgaaggtctgcagcttcactcctgaagctagtgagacaacaaatccaccgggaggaatgagcaactctggacacaccacctttatgaactgtaacactcrctgcaagggtctgcggcttcattcttgaagtcagcgagaccagcgagaccaagaatgcaccagaaggaactaattctggacacacaatgacatccataggctcaaagtaaagggatagagaaaaatctaccaagcagcggttgctatcctaattttagtaaaacagactttaaaccaaaaaagattttttaaaaagacaaagaagggactgacataatagtaaagtattcaattcaataatacctgactatcctaaatatatgtatgcacttgacacaggagcaccaagactcatagagaaagttcttagatacctaca

SEQ ID NO: 758750 - DNA, 514 bp, Homo sapiens
tgcagcttcactcctgaagccagcgagaccacaaacccactgggaggaatgaacaactctggatgcactgcctttatgaactgtaatgctcactgcgaaggtctgcagcttcactcctgaagctagtgagacaacaaatccaccgggaggaatgagcaactctggacacaccacctttatgaactgtaacactcgctgcaagggtctgcggcttcattcttgaagtcagcgagaccagcgagaccaagaatgcaccagaaggaactaattctggacacacaatgacatccataggctcaaagtaaagggatagagaaaaatctaccaagyagcggttgctatcctaattttagtaaaacagactttaaaccaaaaaagattttttaaaaagacaaagaagggactgacataatagtaaagtattcaattcaataatacctgactatcctaaatatatgtatgcacttgacacaggagcaccaagactcatagagaaagttcttagatacctaca

SEQ ID NO: 758751 - DNA, 572 bp, Homo sapiens
atttgaatggctaaaatttaaaaagactgacaataccaaatgttgatgaggatatgaaataactagaatgttcatatattgctggtgaaagtgtaaatggtgcaaccactttaacaaaatgtttggcaatttcttataaaattaaatatacctgtatctatgacttagtgattccaattcagacgttcaaccaagagaaatggaatccttatgttctcaagatttacacaaaaatgttcattgtagttttatttatattagccagaaactggaagtaacccaaatgctactcatcaagagggaacagataaacaaagagcatggcttggtttcttttagcaaccaaaagaaacaaactgtagatatacatataacaacatgtataaatccarcagtcattataatgagtgaaagaagccagatacagaagagtcactgcacgattccataaatagaagttctagatgaggcaaaactagcctatagtgatagaaatcaggaaactagctactcctgaggggtatatactgacgggaaaggggcacaagggacctttctaaggtgatggaaat

SEQ ID NO: 758752 - DNA, 312 bp, Homo sapiens
ggctactgtaccacgccatagctagacagttctcagcatttgatgggcttgtagcttttgaattgttttccagaggaggaaactggtttcaacaactgtttgtatggttctttgttgcaaccagatgggccaagarcacaacagtatgacatggtgcaatcagagacgaaattcatgctcctgaaaaactcttctaagagtcaaaccatacacacatagatatttagatgtgtgacttcatttcaacaaagaatatataagcatgcgtataaacaaggatgtaaataaagaggatgccacataccacagagt

SEQ ID NO: 758753 - DNA, 631 bp, Homo sapiens
tggtaattgacatttctggctagggaatatgacaatcaacagaagggctactggtcaaatcttcttacagactgaaaatgctaaaagcttcacccagagtcaacaaatgccatgttctaaggagaggcgtcttaggggacagatctgttactcatcagtgggcatgtttcatcttaccgcttatggcaggcaagttaaaggaggctttgtgtacctgctttgcaacagaagctggaactctgaggtgcaggaaggcctggtcctgccctcaggccccgggacagataacatatacacagacagtaagcacctaaagagacacacacagcacagtcttcaaacgctgcccttcasgcaatttccctgcattttagactcattgaagaaaagggcaagtcaactacaggtcagaaagatgtgatggagaaacgtttttttcagttttgcatttaacatagattttcctgttcagcaaagtctgaagagcttgatattccttccagactccctgggtcttcctataaagataataatgtgcagaaaggtaatttaaaaattagtgcgacagctaagtcccttcacagcatgcccagtttacacaatgcattttagtgtcttccaaaaaaaagtg

SEQ ID NO: 758754 - DNA, 551 bp, Homo sapiens
ggaggttgctcggaatgctctggtggcaggcagtgtagtcatagttggtacctatcagacactctaagagccttgaatgtgtcctctcttaatctcatcttttacagggaagggcattgaggctgagagacattaagagacacttgctcaagttcayacaacttccagtaaactgtacagccccaaattgaatctaagtcttccaactccatgattctaaacataacacccatggcaagaggaaaaattttgtaaaaggactcatccatttccaacgaaagaccagagcagagactattctttcagccttacagctcctcaccacacaagcatcagaatcactaaggaacatcttggaaatattgatgcttggggcccatcctgcaatttctgattcaggggcctgagcatgggcctgggtctctggattttgaagaagttcctcagcctatgctggtgattttcctacagacttattaaaaactttgacaaacccagttctatctggctgagcttccacttatttcttagtgaaagggattacaagtctg

SEQ ID NO: 758755 - DNA, 502 bp, Homo sapiens
ctaggctgcagtgagccatgattgagccactgcactcctgcctgggcaacagagcaagaccttgtctctctctctctatatatgtctacaaattctttgatacctcttccttcaagaaatacagtttaaattcccctgcccttgagtgtgggctaggtttagtgactcacttatccccttctccctaaaatagcatakggcagaaatgcagaagtgtaattttcaagaccaggtcctaaaaggtattgcatctttttctttgctttgttcttttggatcactggctctgagggaagttagctaccatgtcatgaagagactcaagcagccctatgggaggcccatgtagtgaggaaatgggattcctttcaacagccaatgaggaactgaggcctcctgtcaatagctttgtgagtgagccatctgagaaatagatcctccagcccagtcaagcattcagatgactgcagccccagctgacatattgactgcaattttatga

SEQ ID NO: 758756 - DNA, 464 bp, Homo sapiens
tacatacagtaaaattcagccttttctagtgtacagttctatgaattttgacaaatggatatggttggataaccactgtcacagtcaaaatacagaacattcccatcattccaaacagctccccttcttggtagtccattcactttccctagttccagccctgttggttgatgaacccttatcygtgtttatctgatttccatctcacagttttgtctttctagagtgtcacataaatggaatcacatagtatgtagccatttgagtctggcttctttcactgaaccataatgtatctgagattcatccacgttgctgcttgtattagtagtttgctcttttttcttgctgagtgatatttcattgtgtggatgtatcatagtttatttagccatttatttatctattcactagttaatgagtatttgggttgctttcaattttttagaaattatgaataaagc

SEQ ID NO: 758757 - DNA, 551 bp, Homo sapiens; identical to SEQ ID NO: 743499

SEQ ID NO: 758758 - DNA, 646 bp, Homo sapiens
ttcttcatttttttgtagaaatggggtctcccaatgtttccccggctgttcttgaactcctgggctcaagcaatccacgcacttcagcctcccaaagtgctggaattacagacatgacccactaagccaagctgaaaagcttatacagttacttcattgccttggaagtagtaagcactcaataaatgtttataaattattacctttagtttgaataggaaaccaatggcgttctcacctctaatctactcctctgttcagagtgacataaagataggaatcctgggggaaatgcattttaagactaatcttcagaaaggacaataaataactttaagtccaagctacatgcaagtcagtttttcatgtgtgcctcatcctccatggctaccatgaaaaacgatasacagctcctaatacaccatatctccaagtctatgtcatgatcaccattaacaattgtagccaggtaacaacatgctgcaccactaacagaggaagtgagacaatcaagtcctaacatccttgaatctaaaccttaatgttaggttgaactatggaaatgccctctaaatagcagacaggcatttccaccagaacaaactaaaagaactcaatagcatgctgtttaacttggtgagggtgt

SEQ ID NO: 758759 - DNA, 693 bp, Homo sapiens
atgcctttccacctctcttcaacttaatggaagctactttgagggcatctgaaagagtaggcggggtggaaaggtagaaaagtaactcccttaatctaagctactttgcaaacctgagaaatcttaacgggtcttctttgcytgaaaccatctttagtctttttttgtgtgtgtttgggatctagaatcagcctgattttcctgtcctttcagaccccagattcctttttatttctgcttgtaaacctgtctatttcttcttgacttcagctatttattgtaatacctttctacaagtgagaaggaccaagatacactaacatcccaggtatttccaactactttccttagagctatagggtcaatagacacttgccttatcttccaagttcaactgatagttttatcaaatgtttcgtcactacatcacactggtatctttctttccacattgtgatatctatgttcctttgtctactgcccaattgctaagctcaggctatacactattttcatttgttaagatagcactctatttcaatgtaccattttctctactagttgtggtgatgctcaaaaacaatataatgactgaaatataagagacatttatttcttggtcacataacagacaaaggtggttatttcttgtgagtgggcagctttcctctatggagtgatttgaggatccag

SEQ ID NO: 758760 - DNA, 615 bp, Homo sapiens
tgaaaagtggctatttttctggtggtatatgaaaacacaatttcagtggagacggaaacttccactcaaaacttgctttgcttctttgcaattaataagttcctggtggactattcagaaagtgttcagctacaattgctgaaaaggatgtcgttgggtgaagaggttaacgatagcctcctagaagcagattcctgctagaagaaaaggaggtttaggaaatgcccagtgaccatggtctctctggtattgcataaaacaaccacaatttggggatgggttcttgcatcctcaccctgggcccttgtaatgagacaccatgcttgaactcaatactatttgtrtaggggctgggaatgaggagaagacagggaatcaataaactcaatgttcaagacatcatttgcaaataaattcaatatttgaaggggaacatgccaaagagaaaaatcaaaccataaataaaagaaaaaaagtttgttaattacaaatatctccagaagccacaatgtctccttcctccctcattccctaacactccttcaggtaggactgtacttcagtcatgtaggaaaaaacatttttctatttcatattaaagattaatgaggcctg

SEQ ID NO: 758761 - DNA, 678 bp, Homo sapiens
gccacttcttcatgtaacttaattgtgccttcagggcctgctcaggcccaatgttgtatataccacttccatttgatgatggagggttggctgcgcacactaaactttacggcttggtgggtcagataacacttagttcatgatgggaagctcaggccacatggtaacttggtggcacatgggcaacgttcagtgtctrctaagccccagcagcaggccaagagctgtctctcagaaggaaagtagttatctgcagaaaatggcaaggcctttctctaaaatcctaaaagcctatgctgtgatttacctatacaggcctgccaaaggctccaaacagcatccctatctgccactgacacttcaagcaccattggatctgctgcatcacacagtccaagtggcagagcagtttgcacagctgcctggcctgttacagagccttctcttgttctgggccccactcaaaactagcagctttttagatcactcagtaaatgggtcagagtaatacacccaaatgaagaatatgttgctaccaaaatccagaggtctattaggcattttgcctctttctttgttgtaggaggggccaaatgcaataacttatccttcactttagaagagataccttgacctgctccacaccactggatccctagaaatttcactgaggcagaa

SEQ ID NO: 758762 - DNA, 647 bp, Homo sapiens
aggttttcatgcaattttcctgcctcagcttccagagtagctgggattacaggcgcgcaccaccatgcccagctaatatttggttttagtagagatggggtttaaccatgttggccaggcttgtctctaactcctgacctcagatgatccacctgcctctgcccccccaggtgttgggattacaggtgtgagccaccacacccagctttgaattctatttgttatcctggatttttagtacctaaagacccagtcttactccacaaaaagaacactttatattgatattccaggtcaggaggaattccatttcttggcaaagaaacctataggcctgctgtgagttggttacaaataccataaagacacratcagttttgccatgtaaaataatttgtacaaaccctgacaaagtgtcttctaattatcagcatttatggaggaagggtcaatctacagataataaccaatcaatggacctttgaaatagtcagacataacaaaaaatagctactttgccaaaccacaattttcaaacaaggtatcctcttggtggtttcagattaggaacagagtaatactttcatagtttagccaaaatttagtgttagaattatattaacgtctatacaattaagtagttttat

SEQ ID NO: 758763 - DNA, 674 bp, Homo sapiens
tgcgggtgataatgccaactttcttctatggttttcagaggatggagaagttacaagcctgcaatgtccccatagagagaaaatattcccttcggtctgtgaattgtttttgaaataaacggcagaatgtgttatatgattgtgaagaggttaaggctttaaagtggctggcaggctctgacatcaactgaatgaaaaggaaatatggcctaaccaaggggtgttttcagaatgaatgaaatttcaaagtggaaattcttgcctgagaggcagcagtagagctcatttctgcatcaatagccatggctgaagcaatagaccagactggtgggtcagacaggcattttacctcacacctctcccttttataatgatctgtttcagagggcttccacggacgccgtttttcasaaacacctcagacaatgagaatgtttcagctcagggattttacatgtaggcaaaaaccagatcagtggggttacatgcccaccttcatcaaccatgtactggagacaaaatagaaattctgggcttgctgccctacaatgtctagttttgagaaatctgttttgctcctttgtgagtttatagcctactacacccagctttaaagagaagaactacttattaatgtcttgagaaatatgccctattcaacaagataagcaatt

SEQ ID NO: 758764 - DNA, 653 bp, Homo sapiens
ccttctgcttttaagccttcaaaactttgctacaatcatctcctttcctatatgcattgtccttgtggtttcttcttcttcttctcttttttttttttctttcaaacaaggtctcgctctgtcatccaggctggcatgcagtggtgcaatcttggctcaccacaacctccacccscccggttcaggtgattctcctgcctcagcctcccgagtagctgacatcacaggcgtgtgccaccacacctggctaatttttgtgtttttagtagagacggggtttcgccatgttggccaggctggtttattcttcttaaacatgtatttaataccataaattaaacatatatttaataactatttttggaggatacagttatatatgtgtgttcaatttattcccattaatccaacatctttctatttgctgagtcttttgtcgttgttcttgttgttaagcctttgcatatttacttataattatgatgtatattactccaaaacatcagcctcacttctatactctaattcttatcaattcaggtccacagaaataaacccaagccttcaaagtaattcagtcaatatataacctttatagctattttaaggggtttagttaccaaggtgcttaacctttaaaaaaaaaatgccct

SEQ ID NO: 758765 - DNA, 507 bp, Homo sapiens
agtgtctttatgcttttattcttgtgcagcacattacctactagctagcttcctgggaaaaggtacatgagatgtaatttttgtgagctcctgaaagcccatattttctttggtctacagcccttctttattgatagtttagttgggtatagaaatctaatgggaaaatatatttgctcaggattttaaaagatattgctcgattgttttctagcatctggtggtggtgtgaaatctgatccttgattcttcatatggggcttgttttatttttctctctctctttctctctgaaagcttatagatttttttttctttatcctatgttctgaaatttcacaatgatatgccgcattgtcytccattcttttctggaattcatattattcaaatgtaggatctaataagggggaagtaacgtaattatcttgtattttctctcatttatttgatcttcatttttaaagttttttttggctttaagaaagattttctcaactttatctt

SEQ ID NO: 758766 - DNA, 455 bp, Homo sapiens
accagaaattagcacttctaaatacttcagaaaagtccaaagtgttaaaaagccttctaggcaaaagaacgtctttctgcatcagtgaatagcagtgctcatcagaatttcctaataacacaaaaacaaaggcaagtctgtacatttgatcagatgtcaaagaaatgggaggtagactattatctcagccttagtcagagctcctgctggcttcttcctacatactgttcaccaatttgagtaaagtggrctttgtgagagaatagtgtttgatggctaggatgtcttttgggcatttcttcctaagtggaatacacaacatataagcgagtaggggaaataatagagggaagctactctttccagctcagaaggagttggtgatgccaatatatgcattagagaagcccatgggatcctctagctgtggatagtggctaatacggtcatccaga

SEQ ID NO: 758767 - DNA, 628 bp, Homo sapiens
gatatagcaataatggtttccagagcctagtaattccaagtatgagtattatgtatgtctcttcttttttcccattatgctagaaacataaaatttatttccatcccaaatagccagcatgtactgccaatttattattattagaatgacataaagggagggggtgggttgtggctcaagaggaagggactttacaaatatagaacaacctctttgaacagatgtcaataccaagaaaattctgaggctgactaaggattccagatgtaattgatgagatttcaacacagatgcattgttgagcactcaactggatcttctcactcttcagtgagagcccatggttgaaatgtacccagctctgatgtgcctagtmtgtggcaaaagcaatagtgaactgcaaaatccccatgctgaaagaaaacagcagtcttgcagaaagatgctgaatttattaacttttgatgaaactatttctttacaaaacaaatgactccatccccagacagattcatactatctgcaacagtctgaaaattattaacagcaataatgttatctctggaaccaagaaaaggcagctagaattcattaatagcttttgaccacccaaaatgcctccacacag

SEQ ID NO: 758768 - DNA, 636 bp, Homo sapiens
aacttgtacatatacccctgaaattaaaataaaattttaaaaaaatagcaagaagcttggataattttgtacaaccatatgtaatgaatttagaaattctgagcctggtttattcatgagtgaaatttagaaaacaggcttatttcaaaggttctttctaactctaaaagtatttgaagctacaaaaaaataatttcaaacagtcactatccrgctaaagacagagaatggtataagaaaagaatctctgccatgtgtcctcaaatattgcatttccctcccttcctgagaggtgtccataattctaaatgttttcatgaatgaatgcatgcatttccaagcaaaatgtttacttttgtgttttaagccttcaaaaattatatcatgttgtataaaatttctgagttagcttttcacttatgcttatgaaattcatacattcagatatgtactaatgatgggattctaacatctatatgcataaatgaggtagctccatattttctacactgtttcttgtctggtttggatactaaagtttatattatctacagtctgtcctcctatctgtaggttccatatctgtggattctaccaactatgaatcaaaaatatttgaaaaaaataaaaattaca

SEQ ID NO: 758769 - DNA, 644 bp, Homo sapiens
atttttctcttcacattatttgaatactttctctaagagtgttttcaaggtagatctttgcgtagaaaatctgaggcctgatgtgtcactgagtatttgtattacacattcatattttaataacattttagcttgttatcaaattctggaataaagttatttttctttaatacgtacaaatattagtgtattgtgtatctagcattgctgttggtaagtctgatcgcaactttatttttattcttttgtagatgatctgttatttccttctgcatgcttttagaatctctcttggtatttgatattcttaagcctcacttcgtttgatatttttaagtctctattgttaaatccccccacttcttatctgtactgtttaacacattcaaatagaagtctttatcttttattaattktaaaaaaattatgttttttcaaagattttttcttctcttcatatgctttctttctggtactcttatcacgcatatgttggcacttctacatctgtcctttatatctattacttctctttgtctatattttctctttttacatatttaaaattttcttcttggagaattactgaatcaggctttctatctctttaaaattcttcaactgcacccaacctattgttcgtc

SEQ ID NO: 758770 - DNA, 467 bp, Homo sapiens
gaatttctccccagaaaatgagtttttcttttctattgcatagtcaagcaggaaattttccaaacttttatgttctgcttcccttataaaactgaatgcctttaacagcacccaagttaccccttgaatgttttgctgcttagaaatttcttccaccagataccctaaatcatttgtctcaagttcaaagttccacaaatctctagagcaggggaaaaatgycaccaatctctttgctaatatgtaacaagagtcacctttactgcagttcccaacaaattcctcctctccatctgagagcacctcagcctggaccttattgtacctattctatcaacattttgagcaaagccattcaacaagtctccaggaggttccaaaatttcccacattttcttgtcttcttctgagtccttcaaaatgttccaacctctgcctgtttcccatttgcaaagttgcttccatat

SEQ ID NO: 758771 - DNA, 514 bp, Homo sapiens
ttgttttttaaaaaatggcttctgttccatgtaaaacttgtaataaatattcatctatgttatgtcatcatcttatgttatgtaataaatgttcatctatgttacattgatttaattctcagacccagccaggaccctaagaagactrgaatggagttttgccaactctacaatatgaacacacacacatacacacacacgaaagcaaatttggtaaaacattaacaatctggtgaaagctatgttagtatctttttttgtctaatttttcataaaaagcgggaggagccataaagatgtaagtagcttctaaattacagactattcaagcatatagatttttagcagtttttgccaacctcaaaaaagaaaaataaaaatggttattatttcaatttatgcttctaatatttttggcaacagaaaacattgtatgtttgtcaggagagtttcaaatttcttaaggtaaaattactcactaaaaatcacaaattggggttagcacgatattatt

SEQ ID NO: 758772 - DNA, 650 bp, Homo sapiens
tacctctggtgatcagtcttggcagactcataaaatgaaatacatgatactccctcaaattccataggaattcaaagaatatatgagagatggggataataaggaaaaattttagaggtagtttttatataggacttaacagatatgcaggatttargtaggcagagaggatagggaaaggaattgggtccatactggtagcagagttactatatgactccagaaattcaaacctgactggtgaggtacagttacagtgatgatcacaccatgcactgagattaagcaggatccctggaggttttgtttaaagacagagaaatgagaacactatatctaagggcagatatgcctgctcacttaggactcaaatctattttatataaataatggagagggtttacttctatttgatgaataatatacttgaggatgttactgaaattgtgcttaaaatagaactacccatctcaaatataacatgccccaaatgattttcccttgcattgcgttctttctacacaggtacatacaaacttatacttctgcatgtatatactacctgaaatttgcttttagctgtgtaagtacatagttcaaatcaacttccaacctagacttgattattaagggagtcatttaattttctc

SEQ ID NO: 758773 - DNA, 650 bp, Homo sapiens
tacctctggtgatcagtcttggcagactcataaaatgaaatacatgatactccctcaaattccataggaattcaaagaatatatgagagatggggataataaggaaaaattttagaggtagtttttatataggacttaacagatatgcaggatttaggtaggcagagaggatagggaaaggaattgggtccatactggtagcagagttactatatgactccagaaattcaaacctgactggtgaggtacagttacagtgatgatcacaccatgcactgagattaagcaggatccctggaggttttgtttaaagacagagaaatgagaacactatatctaagggcagatatgcctgctcacttargactcaaatctattttatataaataatggagagggtttacttctatttgatgaataatatacttgaggatgttactgaaattgtgcttaaaatagaactacccatctcaaatataacatgccccaaatgattttcccttgcattgcgttctttctacacaggtacatacaaacttatacttctgcatgtatatactacctgaaatttgcttttagctgtgtaagtacatagttcaaatcaacttccaacctagacttgattattaagggagtcatttaattttctc

SEQ ID NO: 758774 - DNA, 575 bp, Homo sapiens
ccttgttattgtctttatttgaattaagtatggtttaaggagatgtgaatgggtgctaagttgacaaggaatggacttaattttgggaatacctagaaacctgacaaagcattgctttgggtgtgtctgtgacggtgtttgcagaggaggttagtgtgtgcatctgagtggaccaggtggggaagatccgccctcagtgttggcaggcaycagctaattgcctggggccctggagagaacaaatacagaaggtgaactgtctctctcagagccgggacacactttttttctgccttggacatcagaaatttgattccatgaaagtgcattatcacattgactttgtaagccttgtgcatgtacataaaaatgttgaaacttcctcagtaaaagaggtgtgctatttgtgcacctgcgtttgtgaaagataaaatttctcaagatcttggttctttggttgactacttgtgcagtggtgacccatcacaggttggtttgttgagacagggtcttactcaggcgcccaggctggagtggagtggctccatcttggctcactgcaacctctgcttccc

SEQ ID NO: 758775 - DNA, 575 bp, Homo sapiens
ccttgttattgtctttatttgaattaagtatggtttaaggagatgtgaatgggtgctaagttgacaaggaatggacttaattttgggaatacctagaaacctgacaaagcattgctttgggtgtgtctgtgacggtgtttgcagaggaggttagtgtgtgcatctgagtggaccaggtggggaagatccgccctcagtgttggcaggcatcagctaattgcctggggccctggagagaacaaatacagaaggtgaactgtctctctcagagcygggacacactttttttctgccttggacatcagaaatttgattccatgaaagtgcattatcacattgactttgtaagccttgtgcatgtacataaaaatgttgaaacttcctcagtaaaagaggtgtgctatttgtgcacctgcgtttgtgaaagataaaatttctcaagatcttggttctttggttgactacttgtgcagtggtgacccatcacaggttggtttgttgagacagggtcttactcaggcgcccaggctggagtggagtggctccatcttggctcactgcaacctctgcttccc

SEQ ID NO: 758776 - DNA, 523 bp, Homo sapiens
actttttgagtcaggattgagataaagttttttgattctgtaagtactttaaggcttggctgagtgcaaacagatccaacgtttgagcagaccaattattaggcagttctcctaactctgcttccacaagagtctccttatcaattactgaatacccattgtggtttttttctcaatcacctgggagaaaccatctattgtcctgtcctgaagggaattcctcctaggtcttgtcagatctttgtacggtaattaagatttaaatcccctgttaggaaatctgctgggttaagggaattatcagtggttggtgttaaattacctttttctaacagaatagccccatactttaagatttttgagttagtaagctayctttttgcttttttgacttagaataattctgaactggtgaggtgtgctcacaatgaggtttcctctaaaagttacttttctactttcttctgttagcaaagcagttgctgctacagattgaatgcatttgggccatccgtgggttact

SEQ ID NO: 758777 - DNA, 614 bp, Homo sapiens
tcaaaacttacctctctttggcctggcccagctaacttcacaggtttccatgctggttcatcttctttatggagttgaggatttttactgtttaaggcttctttgctgacactttaaataaaacaatgaaattacatttcagttcttagcagatatcccatggcagccaggttaaagacttccagcaaattccataaatattttcagatcttagtcaattcccaagacaattaagtcatattttttctgcttagctaattagtaataataatcctgawcctacgcataagactgaattactaaaggccttgtcctgatgatcagtgggtatattccactatgaatatgacatatgtttaagaatagtagctgcaaaataaactcaagaaataaaatagatctgatgatggggaaaggaaaataccaaacccctgaatctttagaatactagtcttacaaggggcctttccatctaatcattataaaatacctgaaaaatagccatccagggatgaggatctcattatattttatactgagatggttcttattggttagaaaactccttctgaaatctctctttgtagttttcatccactgtctttgagttttaa

SEQ ID NO: 758778 - DNA, 527 bp, Homo sapiens
aaacattgcaagttttgtaaataatgactagtatttgtatatcatgttaaagttcacaaaatgctctcacatttattatatttcttaattctcccccaaattttgtgatacttctatttaaagttgaagaaattgcatcttaaagagttgaaataatttgcccarggtctcacagttgataactgctctagataggactagagcccaagcttcaggtctgttaaaaatgctgacttgccttgtgttttcttgaaatcccagttttctttaagggatttgtagatattgttgtttaatactatggaattatcctgggagctcaatggaaaggtaatgtcttcctgtgaactagacagttataggagacctgagaatgtttcagctgcaagtggatctaaagaaggagggtgtagtgggttgaatagtgttcctttctgcctggccctccccatcccccaattcaggtccacctcagaatgtgacttatttggaaacagtgtctttgcagctaaggatcttgagatgaa

SEQ ID NO: 758779 - DNA, 570 bp, Homo sapiens
gaccccatctccagggtccattaacaatgccagtggtgcatccagaggcatagagggacagcatggcctggatggccacgtacatggacagggtgttgaaggtctcaaacatgatctgggtcatcttctctctgttggccttggggttcacaagggcctcygtcagcagcaccaggtgctcctccggggccacacgcaactcattgtagaaggtgtggtgccaaatcttcttcatgtcatcccagttgatgatgatgccacgctcaatggggtcagagtcccaatcttcagggtcaggatgccatgcttgctctgggcctcatcacccacgtaggagtccttctgacccatgcccaccatcgtgccctggtgccaggggcgcctaaggatggaggggaacacggctcagggggcgtcgtccccagcaaatccagctttgtacatgccggagacactgtcaatgaccagcatggcaatctcttcttccattgtgacaggcggaggagcagggcggcagagcagtaggaggacatggtgcacgggctggcggcagcgactgtgtgatactca

SEQ ID NO: 758780 - DNA, 639 bp, Homo sapiens
tttcttatctacaacaagaaggagttagattagagaattcaatgagcactaggtagccctgaaagcactctaggctgtgattaccaagaaatagactaaaagcattttaagagaatttctgcctagatatctgacttggcctccaggagacacatttctctgagactagcaaatttaattttgaacttttttttcttttgatagctaattggcccttatgaattattaaatcagcagctcyttaagaaatccacacccagagctgatgaagagaggaagtctctggggctgtggtcttcagaaagcttaagccattttctgcaaatattttatttataaatgactatgaggaaactctagcctgtctctgactttatgaatgtataaacgaaacaggtcatacctaggatcccatgggagcatcaaacacaaacacttaagttaatgtaacttagagtagcccccataaagagatgacacaatgtagtggaaggaatgctaagctgaagagtctgaagacccaagtttaaatttctggctctgccactttcttgccagtaagaccttgagctaatgagttcactcctctgtgcttcagggtcttcagctataaaataagacagttggactaactttcaa

SEQ ID NO: 758781 - DNA, 550 bp, Homo sapiens
ggtacatggagttactacagaggctcatgaatccttattcatatgaagtacaacttaaaggactgaaaacataatatttactactatttttcaaatatttatacagcatttaatataatgtgaattcatttaaaactatgaaaccattttgtcagcgtgcatgttgtcaataaatattttttacaagattgggaattatttatgtagtgaaataaacacttgatctgwaatctgtatttcaaatgaccataaatattactttcatctataaaaggtaagattccgttctgggttgatcatttaactagttgtgtggctcatttatctttcctcatttgaaaagtagagataataatacaaactattcttatgggaattttatgagtctcaagtgctttgaagatgccacatattttgaaaatattagatgtcactgtgatgacagctattttcatgatcatttgtataatgatatgaagcataataagagagttgaaaaaaataatcccaacctcaggttcagagaatcaagttcgagttttcttatttt

SEQ ID NO: 758782 - DNA, 621 bp, Homo sapiens
ctcctctccatgccagctcctgtttgcacctctgggcaatgacaacagaacacgaagtcctttgttagaggtgggagcagggtcaagttatagtgactgcgtaaattgagggaaaacaaagggaatgtttgattgatttctaaaccatcaacaactgagactaaatcttgtcaggtttcagtgaagaaccagatcaataatccctagagaagtgcttctcagctsaatgtgcacacatatcacctgggggagtgttaaaatgaagattatcattcagtaggtctggggagggggctgagatgattcatttctaacagtgcccattgtggtggtccaaagactgggctttgagaagccaggcactagatttagactgtgaggtccctgagaccaaggccacattttcttgtctcccgtttggtccccagacttggcccgatggctgggactaaaataagttttcaataaatatttgctgaattgaattagtggggaacactggctccaaggataaattttgtagctgaattctttgttagaggaagctcatagccaaaaaccagagggatgaaaattgaaccatgattaaacctgtgtttaactagtttaactttggagttt

SEQ ID NO: 758783 - DNA, 602 bp, Homo sapiens
aactgaaaatatttcacccacagttctgcaaccaccaataaatcaggctgctgtcatttttccatgtttccttccaaaaaaatagaagtgtcagggaactaaacagtaaaggcaacacatgttagaatggggcagattgaggcagttcacccaaakgagatgggatgttggaatgctttggagagggattggccagctttggatgtgctggcaaagaaatgtcacaaaagcaagccttggctgccctgcccagcacgatcccagggagacacagagctttagtcaatgggttttgagtgtttccacttctgctggcaagacaatccctatgataaaatcaggctgtcttcgctgcatactattagatacacaatttctctaattgttttgttctggttccgtgtttgccaagcaaccttacgcttccgagtagatcttcctgcacaaagataatgtgtcgtctcactgactttgagtatttctgtccccatcataatgctctctcaagagaaaccaagaatgtcacttttcaaaaattttcctaggattatgtaatattcactatttgttcagcattgctgtaaaactaaagtactttacct

SEQ ID NO: 758784 - DNA, 627 bp, Homo sapiens
atgtgacttatacaaatatgatagatgaacattgggacctatgagtttgaatgagatccccaagcagatagaaaagaagagggttgtgaaagcgtcctagaggatggagagggaaaagaaaaagcagaaagagattaaagatgagcagtcagggaagtagaagaagaaccaaaatagagtcatggaaggcaagagaggaaagaaatcaataacaccaaaggctgcagagagcaaccaccatttgtctacacagaggacttggccaacagagcctgaaaggcagtaaatgctgggttctgtttttgagaaatgctgagacatctggctggtaggcccaaaagggatgtgagacggtggcctgttgaagaagcaggagcatgggagacccagcttgctygttggtctttgtggatgatagctcaggcaagatccagaactgagatcagacttcagatcttcttgtttccggcccaggactcgattcttattgcgtttcagagctgtgtctcttgcttctaatatttgaaacagatgttgtgaaatctataatttccagctttgaaatgaattaatatgttaacctcctacttctcagatgcattctgaagaaatagtactaagtgtgac

SEQ ID NO: 758785 - DNA, 562 bp, Homo sapiens
gaagaatggtgaaatcactgatgcttagtgaaaagtttatggggatgatgccagaaaaatcagcagtttacaaatgaataacttattttaagagaggatgaaacaatgataaagttaaagtctgcagtagcagaccatccacataaatttgtaaggaaaaaaattcatcttgtttgggctataattgaagaggacaaacaattgacatcagaaacaatagccaacattacagacatctcacttggttcggcttacacaattctgactgaaaaattaaagttgagtaaagctttctacttggtgggtgccaaaaccattgcacccagattagctacatgtaacarcagagttatcaatggaaattttaaataagcaaggtcaagattctgaagaatttcttcaaagaactgtaacaggagataaaatgtggcttttgtactcataagtacaatcctgaaaacaaagcacagtcaaaacaatggctaccaagaggtggaagcggtccagccaaagtcaaagcagaacagtcaagagtaagagtcacagcaatagtttctgggga

SEQ ID NO: 758786 - DNA, 562 bp, Homo sapiens
gaagaatggtgaaatcactgatgcttagtgaaaagtttatggggatgatgccagaaaaatcagcagtttacaaatgaataacttattttaagagaggatgaaacaatgataaagttaaagtctgcagtagcagaccatccacataaatttgtaaggaaaaaaattcatcttgtttgggctataattgaagaggacaaacaattgacatcagaaacaatagccaacattacagacatctcacttggttcggcttacacaattctgactgaaaaattaaagttgagtaaagctttctacttggtgggtgccaaaaccattgcacccagattagctacatgtaacagcaragttatcaatggaaattttaaataagcaaggtcaagattctgaagaatttcttcaaagaactgtaacaggagataaaatgtggcttttgtactcataagtacaatcctgaaaacaaagcacagtcaaaacaatggctaccaagaggtggaagcggtccagccaaagtcaaagcagaacagtcaagagtaagagtcacagcaatagtttctgggga

SEQ ID NO: 758787 - DNA, 562 bp, Homo sapiens
gaagaatggtgaaatcactgatgcttagtgaaaagtttatggggatgatgccagaaaaatcagcagtttacaaatgaataacttattttaagagaggatgaaacaatgataaagttaaagtctgcagtagcagaccatccacataaatttgtaaggaaaaaaattcatcttgtttgggctataattgaagaggacaaacaattgacatcagaaacaatagccaacattacagacatctcacttggttcggcttacacaattctgactgaaaaattaaagttgagtaaagctttctacttggtgggtgccaaaaccattgcacccagattagctacatgtaacagcagagttatcaatggaaattttaaataagcaaggtcaagattctgaaraatttcttcaaagaactgtaacaggagataaaatgtggcttttgtactcataagtacaatcctgaaaacaaagcacagtcaaaacaatggctaccaagaggtggaagcggtccagccaaagtcaaagcagaacagtcaagagtaagagtcacagcaatagtttctgggga

SEQ ID NO: 758788 - DNA, 634 bp, Homo sapiens
tgtattcatcaatccaatcaagttgacactcagtattaaccatcacagaccctaaacaacccaacctattgccttcttgcttactaggtttggctgggcctggagactgggccagatttaaaaccagaggtagaaaagcaagagagggatcagatagtgacctagacagagaatttgctctattgagggtcatactgtcaaaaggcctggcccatgagtcctcagtgcctgttctcaatcgcccacctgttccctactccccaccctcctgctcccatactgctgcctccaccccaggccaagggagctccagcagtggcttggagctggagaagtcctgctgtccctgcccagcagatgtgtgtgagtgaaggggttggggggtggrggaggaacctatgacacaaaagaatctcctggtttcaccacaagaaggactatatgctcctaaggtctaggttgaaatctggagtgggatttccccagaaatgtttttacatttacttccatcatcacaacacgattgtttagatacatgagtgaagaatggcattcaatgatgaatgaattttatgggttggctggacctaacattgtttctatggtgaaatgtttcaaatacatagcaaccaaa

SEQ ID NO: 758789 - DNA, 633 bp, Homo sapiens
gatgcctgaatcttcctcctcctcctcagccccagttcagagtcctgcctcttcacaaagccctttccatgcaccccaggtggacccctcctcacggctcttccagccctttgcctgtatcacacatttgagtgtttagggtggtagctgatgccggagcaggaagttccctttagtaatgtggatattactaaacccctcattttataaatgagaacactaaggcccgaggaaatcacgtgatgtgcccaaggtcatgccgttgtctgaaatgcttggcagctgcctgcacacagctgttgtgaatcccctcctgccccttcataccgtgccactgycttggattgacccactgtgactgtgtgcactgtcttagataaggaaaccccagaaaacacccgtcatgaaagttcacaatggagagaggtcaccggtggggtctttgccttcttcactgtgactcttgcttccaaggtccaccttctcgttggccagcgctcatcaattaccattgcccctgcctgcctgttctcaggagtcccattctcacttgaaaagtggatggagcgccaagctggatctaggatgcttggggtggaattaacccagaacggaatatgcaatggctgttct

SEQ ID NO: 758790 - DNA, 633 bp, Homo sapiens
gatgcctgaatcttcctcctcctcctcagccccagttcagagtcctgcctcttcacaaagccctttccatgcaccccaggtggacccctcctcacggctcttccagccctttgcctgtatcacacatttgagtgtttagggtggtagctgatgccggagcaggaagttccctttagtaatgtggatattactaaacccctcattttataaatgagaacactaaggcccgaggaaatcacgtgatgtgcccaaggtcatgccgttgtctgaaatgcttggcagctgcctgcacacagctgttgtgaatcccctcctgccccttcataccgtgccactgtcttggattgacccactgtgactgtgtgcactgtcttagataaggaaaccccagaaracacccgtcatgaaagttcacaatggagagaggtcaccggtggggtctttgccttcttcactgtgactcttgcttccaaggtccaccttctcgttggccagcgctcatcaattaccattgcccctgcctgcctgttctcaggagtcccattctcacttgaaaagtggatggagcgccaagctggatctaggatgcttggggtggaattaacccagaacggaatatgcaatggctgttct

SEQ ID NO: 758791 - DNA, 631 bp, Homo sapiens
taatgttaggatccttgcaacttaagcaaatttctgcagctggcttgaattttgcctcagaaaatgggactttattttctatctcactgtcaggctgcaaattttccaaacttttatgctttgcttcccttataaaactgaatgccttgaacagcacccaaggtatttcttgawtgctttgctgcttaaataattcttccataagataccctaaatcatctctttcaagttcaaagttccacaaatctctagggcaggggtgaagtgctaccagtctctttactaaaacctaacaagagtcacctttgttccaattcctctccttcatctccatctgagaccacctcagcctggaacttattgttcatatcaatatcagcatttttgtcaaagccattcaacaaatctctaggaagtttcaaactttcccacattttcctgtcttcttcgagcccttcaaactgttccaacctctgcctgttacccagttccaaaattgcttccatattttcgggtatcttttcagcaacaccccactctattggtaccaatttactgtattaatcaattttcaagcttctgataaagacataccacagactgggaagaaaaagaagtttaatgaaattac

SEQ ID NO: 758792 - DNA, 630 bp, Homo sapiens
tcttgggcattaatgttaggatccttgcaacttaagcaaatttctgcagctggcttgaattttgcctcagaaaatgggactttattttctatctcactgtcaggctgcaaattttccaaacttttatgctttgcttcccttataaaactgaatgccttgaacagcacccaaggtatttcttgaatgctttgctgcttaaataattcttccatawgataccctaaatcatctctttcaagttcaaagttccacaaatctctagggcaggggtgaagtgctaccagtctctttactaaaacctaacaagagtcacctttgttccaattcctctccttcatctccatctgagaccacctcagcctggaacttattgttcatatcaatatcagcatttttgtcaaagccattcaacaaatctctaggaagtttcaaactttcccacattttcctgtcttcttcgagcccttcaaactgttccaacctctgcctgttacccagttccaaaattgcttccatattttcgggtatcttttcagcaacaccccactctattggtaccaatttactgtattaatcaattttcaagcttctgataaagacataccacagactgggaagaaaaagaagttt

SEQ ID NO: 758793 - DNA, 631 bp, Homo sapiens
taatgttaggatccttgcaacttaagcaaatttctgcagctggcttgaattttgcctcagaaaatgggactttattttctatctcactgtcaggctgcaaattttccaaacttttatgctttgcttcccttataaaactgaatgccttgaacagcacccaaggtatttcttgaatgctttgctgcttaaataattcttccataagataccctaaatcatctctttcaagttcaaagttccacaratctctagggcaggggtgaagtgctaccagtctctttactaaaacctaacaagagtcacctttgttccaattcctctccttcatctccatctgagaccacctcagcctggaacttattgttcatatcaatatcagcatttttgtcaaagccattcaacaaatctctaggaagtttcaaactttcccacattttcctgtcttcttcgagcccttcaaactgttccaacctctgcctgttacccagttccaaaattgcttccatattttcgggtatcttttcagcaacaccccactctattggtaccaatttactgtattaatcaattttcaagcttctgataaagacataccacagactgggaagaaaaagaagtttaatgaaattac

SEQ ID NO: 758794 - DNA, 631 bp, Homo sapiens
taatgttaggatccttgcaacttaagcaaatttctgcagctggcttgaattttgcctcagaaaatgggactttattttctatctcactgtcaggctgcaaattttccaaacttttatgctttgcttcccttataaaactgaatgccttgaacagcacccaaggtatttcttgaatgctttgctgcttaaataattcttccataagataccctaaatcatctctttcaagttcaaagttccacaaatctctagggcaggggtgaagtgctaccagtctctttacyaaaacctaacaagagtcacctttgttccaattcctctccttcatctccatctgagaccacctcagcctggaacttattgttcatatcaatatcagcatttttgtcaaagccattcaacaaatctctaggaagtttcaaactttcccacattttcctgtcttcttcgagcccttcaaactgttccaacctctgcctgttacccagttccaaaattgcttccatattttcgggtatcttttcagcaacaccccactctattggtaccaatttactgtattaatcaattttcaagcttctgataaagacataccacagactgggaagaaaaagaagtttaatgaaattac

SEQ ID NO: 758795 - DNA, 630 bp, Homo sapiens
tcttgggcattaatgttaggatccttgcaacttaagcaaatttctgcagctggcttgaattttgcctcagaaaatgggactttattttctatctcactgtcaggctgcaaattttccaaacttttatgctttgcttcccttataaaactgaatgccttgaacagcacccaaggtatttcttgaatgctttgctgcttaaataattcttccataagataccctaaatcatctctttcaagttcaaagttccacaaatctctagggcaggggtgaagtgctaccagtctctttactaaaacctaacaagagtcacctttgttccaattcctctccttcatctccatctgagaccacctcagcctggaacttaytgttcatatcaatatcagcatttttgtcaaagccattcaacaaatctctaggaagtttcaaactttcccacattttcctgtcttcttcgagcccttcaaactgttccaacctctgcctgttacccagttccaaaattgcttccatattttcgggtatcttttcagcaacaccccactctattggtaccaatttactgtattaatcaattttcaagcttctgataaagacataccacagactgggaagaaaaagaagttt

SEQ ID NO: 758796 - DNA, 631 bp, Homo sapiens
taatgttaggatccttgcaacttaagcaaatttctgcagctggcttgaattttgcctcagaaaatgggactttattttctatctcactgtcaggctgcaaattttccaaacttttatgctttgcttcccttataaaactgaatgccttgaacagcacccaaggtatttcttgaatgctttgctgcttaaataattcttccataagataccctaaatcatctctttcaagttcaaagttccacaaatctctagggcaggggtgaagtgctaccagtctctttactaaaacctaacaagagtcacctttgttccaattcctctccttcatctccatctgagaccacctcagcctggaacttattgttcatatcaatatcagcatttttgtcaaagccattcaacaaatctctaggaagtttcaaactttcccacattttcctgtcttcttygagcccttcaaactgttccaacctctgcctgttacccagttccaaaattgcttccatattttcgggtatcttttcagcaacaccccactctattggtaccaatttactgtattaatcaattttcaagcttctgataaagacataccacagactgggaagaaaaagaagtttaatgaaattac

SEQ ID NO: 758797 - DNA, 690 bp, Homo sapiens
tttttagatgtaaactgtagatttactgagtactcatcagagcctcacaagaatgtaaccacttgccccattgcttactctccctcctttttgttttttccttttttcttaccctctcacttgctctgccccttttaaataagttctctctttggaataatagcacaagacacagatcttactgcaacttgtgtagyttttttccccaggcatgtcctcaaccttggcaaaataaacctccacattgattgagatctgcctcagccactttttggtttagagtagcaacagaaaataaactaagagagaaaatttgtacctagaagtgtggttgcctctctagtaataccttaaaatgtgaaagtggcttcggaactaggtaatgggtagaggttacaagagcttggagataaaggctagaaaaagcctagaatgccataaatggaatggtaggggtcattcttgtgagggcttagaagacaagaagattagggaaagtgactattctcagagactgcttaagtggtcatgaccagaatgctgacagtattgtggacagtaaaggacattctaatgaggtctcagagggaaatgagaaacgtcttaatgagaactagagtaaaggccatccttgttacacagttgcaaggaacttggttccattgggtccacgccccagggctttgtgga

SEQ ID NO: 758798 - DNA, 690 bp, Homo sapiens
tttttagatgtaaactgtagatttactgagtactcatcagagcctcacaagaatgtaaccacttgccccattgcttactctccctcctttttgttttttccttttttcttaccctctcacttgctctgccccttttaaataagttctctctttggaataatagcacaagacacagatcttactgcaacttgtgtagtttttttccccaggcatgtcctcaaccttggcaaaataaacctccacattgattgagatctgcctcagccactttttggtttagagtagcaacagaaaataaactaagagagaaaattkgtacctagaagtgtggttgcctctctagtaataccttaaaatgtgaaagtggcttcggaactaggtaatgggtagaggttacaagagcttggagataaaggctagaaaaagcctagaatgccataaatggaatggtaggggtcattcttgtgagggcttagaagacaagaagattagggaaagtgactattctcagagactgcttaagtggtcatgaccagaatgctgacagtattgtggacagtaaaggacattctaatgaggtctcagagggaaatgagaaacgtcttaatgagaactagagtaaaggccatccttgttacacagttgcaaggaacttggttccattgggtccacgccccagggctttgtgga

SEQ ID NO: 758799 - DNA, 690 bp, Homo sapiens
tttttagatgtaaactgtagatttactgagtactcatcagagcctcacaagaatgtaaccacttgccccattgcttactctccctcctttttgttttttccttttttcttaccctctcacttgctctgccccttttaaataagttctctctttggaataatagcacaagacacagatcttactgcaacttgtgtagtttttttccccaggcatgtcctcaaccttggcaaaataaacctccacattgattgagatctgcctcagccactttttggtttagagtagcaacagaaaataaactaagagagaaaatttgtacctagaagtgtggttgcctctctagtaatacyttaaaatgtgaaagtggcttcggaactaggtaatgggtagaggttacaagagcttggagataaaggctagaaaaagcctagaatgccataaatggaatggtaggggtcattcttgtgagggcttagaagacaagaagattagggaaagtgactattctcagagactgcttaagtggtcatgaccagaatgctgacagtattgtggacagtaaaggacattctaatgaggtctcagagggaaatgagaaacgtcttaatgagaactagagtaaaggccatccttgttacacagttgcaaggaacttggttccattgggtccacgccccagggctttgtgga

SEQ ID NO: 758800 - DNA, 690 bp, Homo sapiens
tttttagatgtaaactgtagatttactgagtactcatcagagcctcacaagaatgtaaccacttgccccattgcttactctccctcctttttgttttttccttttttcttaccctctcacttgctctgccccttttaaataagttctctctttggaataatagcacaagacacagatcttactgcaacttgtgtagtttttttccccaggcatgtcctcaaccttggcaaaataaacctccacattgattgagatctgcctcagccactttttggtttagagtagcaacagaaaataaactaagagagaaaatttgtacctagaagtgtggttgcctctctagtaataccttaaaatgtgaaagtggcttcggaactaggtaatgggtagaggttacaagagcttggagataaaggctagaaaaagcctagaatgccataaatggaatgrtaggggtcattcttgtgagggcttagaagacaagaagattagggaaagtgactattctcagagactgcttaagtggtcatgaccagaatgctgacagtattgtggacagtaaaggacattctaatgaggtctcagagggaaatgagaaacgtcttaatgagaactagagtaaaggccatccttgttacacagttgcaaggaacttggttccattgggtccacgccccagggctttgtgga

SEQ ID NO: 758801 - DNA, 579 bp, Homo sapiens
gctctaatccaaagcaaaataaagcataaggtgctttaatctacatactattcatgccacaaaatgactttttttcacggcttcataagtttgcaaatgttttaaaaaaccttttcttaaaaacctatacccttacattttttgaaatatccctatcactactaatatggcttacataattgctatacaaaggaatatggttgcattatcttctatgacattttcaattaaactctaagttcggtataaaaggttacatttatttatataatgagkaaacgggaaaaatttttcaaaaaatcttcattaaaagaaatttgacagactgaagttattctcttttctacaactaatttttctccattagctaccatatagatttcaacttagtgttctatatacactatgacataaacatcactcaactagtttaaggggataatttagctcagaaacacgttctgagccaaataaattatagcttagcttaatctgaagttacaaaacaaacttggaaggaacttcatagttcagctagaccacacaattttatgaaaagtaaaatgaagccaatgttaa

SEQ ID NO: 758802 - DNA, 615 bp, Homo sapiens
gcctctatgaagtttattttacttttctatggacttagattgttcttaaagtttcttctgctggctctcccctacccctaatgctgatgaaatctcatgaccctttactggttttccaagattgttttgcagatcataatggtaggtttttgattttcattttttttaactgtgagttacttaatttttaagtgcaacaataaaattaatgacaagtgttcactgtcaagattttaaggtctcttaagtacgcgctctccttaaaaaagaaagtgactaagtcttagattttattcttctacttgttatgaaggcagaaatgaaatgcatataatgctatgtttctgaattcacaaaagataaggataatattcatgtagatttgrgaagacaagcacaagcattccttagctcattggtcttccaaatgtactctatttttctcctaaaagagttctggagcactttgcaccccatcatacaacttaatatttacaattcttcattattaatttaaatcacttcaaaagtctgaacttcatggatagggtaaatattggcatttaaaactaaaactgatgcatttctttaaactgtatacataggacactaaat

SEQ ID NO: 758803 - DNA, 617 bp, Homo sapiens
ttactgggatggtggagaagccatttccagaaaaataattattctctgacaccatcaaagatggaataacacatttttttcaattaaaattttgtatatttaaatgtatgatactatcatagaagtaaacatgttaattagaaaagaatcggccgggcgcggtggctcacgcctgtaatcccagcactttgggaggcgaaggcgggcggatcacgaggtcagtagatcgagaccatactggctaacacggtgaaaccccgtctctactaaaaatacaaaaaattagctgggcaccgtggcgggcgcctgtagtcccagctactcaggaggctgaggcagragaatggcgtgaaccctggaggcggagcttgcagtgagccgagacagtgccactgcagtccggcctgggcaaaaaagcgagactttgtttcaaaaaaaaaaaaaaaaaaaaaaaaaagaatcagaatataacaaaattcaaaaaagaaaatgaaaataattctaaactgttaacattttgtaaacagtataatttttactaattattttcttttgtgcacttaattcctatatgtacatgtatgtataggttgcataataatactatatattcagtg

SEQ ID NO: 758804 - DNA, 637 bp, Homo sapiens
aggatccaatccaggatgccaggttgtggttagtgtcatgtctccttagtctatcggagtctgttcctgttcaatattcttttcttttcttcatgactgtgatacttttttagtacctgtcaagtattttataggytatccttcaattaaaacttgcctgatgttttctactgattaaattgaggtttttcataattgggaatagttccagagaggcaatctgtataccattttccattttatcacagggtatatgtgttgataggtgatattattagtgatattaaacttgatcatttaaagtagtgtgtgctggactttttttactgtagaagtataattctatctttgtatttattaaatatttattgggggaaagctaatttagactatgtaaatatttcatgactactttttactattcatcaatgtttgttgcttgtaacaattattactgtataattttggtaaaatttactattttccttactctttctatatattggaattattctgtaaggaagagttgttatttctcccctatatgtttatttattcagccttctatttaaatcaatatgcactcataattattttactctttatgttattatctcatactgacatcatttattct

SEQ ID NO: 758805 - DNA, 500 bp, Homo sapiens
ctcaaaaaggggcatcattttgactttgggtagatgtctatccagttttctctcataggctatcctgtacaatatacaatttttattgtaaataatattgcaataatacaaccatgatataaacagtctctatgagcagcaattcctagtttcagtagtgacrtaattttttaagtacatgagacataatgatgccatttctattttggagacataaatagcttgatcatatttgatgccctctattcctaaaaacagttataaatctgaaaaacaaacttatttatcttatcatatttctgtataatgagctttaaaagatccaaaaccataccttggctcattttaagtatggttttgatctttaaaaggtcattatggtcattatacaaaaataaggtaagtcttttccacccacctctagaggagaatctgcttcaggttcttagagtctatacatgactggcagtgagagttggtggggctttaaaagcctttga

SEQ ID NO: 758806 - DNA, 636 bp, Homo sapiens
tttatacctgcaggtgacaggggatatgatggcttagcatggtctcagaggcctaacacatggtagaaagcaaaggagaagcaagcacctttttttataaggcagcagaagagagacattgggggcaagggaaagtgccccacttttatttaaaccattatacctcctgagaactcactcattatcataaaaacaggatgaaaaaaccacccccgtgacccaatcgcctcccaccaggttcctcccttgacatgtagggattacaattcaagatgagatttgggtggggaaacagacccaaaccatatcactacttcaatctctatatttgttgggttttttcaggctcyttatttatgtctgatttaatattggtagattgtattttgctaggaatttattcatttcctcaattattcaatttattggcatatgattgttcgtaatagtccctcatccattttatttctgagatatcagttgtaatggttccactttcacttataattttattttactcttccctcttggttagccaagctgaaagtttgccaattttattttttcaaaatgccaactcttctttttgttattttttctatatttttctattctttactgtatttatttctgttc
